United States Patent Application Publication US 2026/0103690 A1 - sequence listing, part 59

SEQ ID NO: 285971 - protein, 407 aa, unidentified
MEVIYPRCAGLDVHKQTVVACVRIAGNGAPLHEVRTFATTTSELLALADWLESFGVEQVAMEATGVYWKPVWHILESHFQLVLANAAHVKNVPGRKTDVNDAMWLADLLAHGLIRASFVPPVAVQELRALTRTRKQFVRERSAHVQRIEKVLEDANLKLGVVLTDIMGQSGRAVLQALIDGQDDPDQLAALVSVRVKASRAEVREALRGQVHAHHRFMLKLHQDHIKALDQAITTIEQEVGSTLKPFRTAARLLTTIPGLSAVSAHVVVAEIGVDMSRFATAGHLLSWACLCPRNDESAGKRRSTRLRRGGNWLKTTLVQAAWAAIKVKGSYLQAQFQRLRARRGAKKAIIAVAASMLTAAWHMLRDGTEWNELGAAHFDRADAKKTANRLIRRLQQLGYVVDAKPA

SEQ ID NO: 285972 - protein, 348 aa, unidentified
MVIIGADLHKRTHTAVAIDENGRKLGQRTVGATPEGHLELLEWGRGLGDHRWALEDCRHLSRRLEADLVRAGESVVRVPPRLMAGVRRSGREPGKSDPIDALAVARAALREPDLPIARLDGPERDLRLLVDHREDLVATRTQMINRLRWHLHELGLPEPQARSLGRGPAMVSLRVDLACASGTVGRIARDLLERVVAITTSINALEREIEALANELGPDLRQLAGCGGLSAAKLIGETAGIGRFRSRAAFARHNGTAPVPVWSGNTTRHRLSRGGNRQLNVVLHRIAITQIRLGGLGRTYFDHRIEAGDTKTEAIRALRRRISDEVYRRMREDEAARAAQRASLAAAA

SEQ ID NO: 285973 - protein, 317 aa, unidentified
MALQRTFVGIDVSKEWLDLWLAPLKRFERAGNDGAGWAAVIGLLRSLGLEAGIVVAFEATGGYEQGLRRALLEAGFDVRGLNPLRVRLYAKSLGRNAKNDRIDARVIARYAEAADTTPDILDPARERLAELVSHRRRLVDERVAVGNQTDTLHCVLLQAQNRKRLALIERQIDETDTLILEAVGQVPSLVAKVGLLKTLKGVKDITAIALVALLPELGRISRRAIAALVGLAPFDHDSGKFTGTRSIAGGRAAVRTALYMAARAAARSKSPLGDFYKRLIAAGKPPKVATVALMRKMLVTLNAMIRDNEPWKHAKPC

SEQ ID NO: 285974 - protein, 391 aa, unidentified
MTYFVGIDIAKFKHDCFIQDHNGVVIRHSFSFRNNQDGFNILLDALNGLDHSQEIKIGLEATGHYGSNIKQFLNSNDYSFMEFNPLLIKRFSQATTLRKTKTDKIDAALISSFLMTVDYKPITHTSYHTSALKSLTRLRESLVKERSLTLVRITNALDIIFPEFKPLFDNSLKSSTCMYILENYSSPDRISRMNVESYNKMKSRLRKTISYDKFLKIRDAAKSTVGTTDEIYVYELQILLGIYKELDSRISDLENKIIQYYRQFNSHIHTIKGVSELSAAAIYAELNGVTGFRNPDQILAFAGLDCSRIQSGESDKNGRMVKHGSSALRCVLMRCADSFALHNPVVYEYKLKKMNEGKFFRVALSHVAKKLVRTIYTLEKNDLDFDQSKLR

SEQ ID NO: 285975 - protein, 344 aa, unidentified
MNQNNVIAIDLAKNVFDICVLDKVNKVRSEKSVRRSNLEKYLSQQTPSLVAMEACAGAHYWSRIAQSHGHLVILLPAKFVTAFRQGQKTDANDALAIGIAARQPKVKSVAVKTLEQQDLQSSQRVREHLCAQRTAVSNMIRGLLTEFGLVFGKGFAQLKRRVPCILEDAENDLPFTFRETVSLAWQHWQHLDKQVKQCEKTLKARVKQHEHCRGLLELESVGPVNALGLYVVLGDGNAFDNARAASACIGVTPKQHSSGGVVHMKGIGKQAANKRLRSSLIQGAQAFINVVEKRPARTEKEVWLKALIARRGRGRAAVALANKTVRTAWAMLHNNQAYQATRIS

SEQ ID NO: 285976 - protein, 367 aa, unidentified
MMEWMAPLRHLGARMLGVESPADGEPSMSEIRTIGLDLAKHIFQVHGVDAEGTTVLRKQLRRGQLLVFFSRLPRCVVGLEACATAHYWARELRALGHEVRLMPAQYVKAYVKRNKNDAADAEAICEAVLRPTMRFVPVKTAEQQAALLLHRGRERLVRQRTMMVNALRAHLAEFGVIAPQGLRNVGQLIAMIRDESDARLPDLGRRVLQVLAAQIEQIEAAVAELERQLMAWHRSNPVSQQLATIPGIGPITATAIAATVVDPIAFRSGREFAAWLGLVPRQNSTGGKTRLGGISKRGNQYLRRLLINGASANLLRSKATNTDPWVIGLRRRRPSLVVAVALANKTARIAWAVMHRQEDYRRVAVAA

SEQ ID NO: 285977 - protein, 352 aa, unidentified
MKIIGCDFHPSFQQISVLDLETKQRVRKKLDHASGEAEQFYRGLQGEAVKVGIEACGNTGWFERLLAECGHELVMGNAARIRAMAVRKQKTDERDAEHLLELLESGKFPVIWVPSAKNRDLRQLLLHRHKLVQMRTRIKNQLQHLAMNQGLQKKRQLWTVRGRQWLEQLSLSPWSERRRCDLLVLLDGLQERITELSQAVEEQARQNERAQLLQTHPGVGAITALAFVLVIGEVSRFERSRKLTSYLGLIPSEDSSGKRRRLEAISKQGNTLLRTLLVEAGQSAARCDPELRRAYRRLCHKKQHPGIAKVMVARKLAVRLYWMLKSNQPYVPARMPGSPSHSVNPREGGSTI

SEQ ID NO: 285978 - protein, 368 aa, unidentified
MKKNTSKKQVASKGKKEIKEGLAFYIGIDLGDKNSDVCVLDPRGEVGKEFRLRMKEEAFREYFASIPRSRVAVEAGGQSRWVAEVVEKCGHEVYVSNTRKVPYIHQSDAKDDPGDAYKLAELVHFKPRLLHPIQHRSREAQADLSWIRAREVLVESRTQLINAVRGLSKAFAGRLEKCSTESFTAKLAGQVPEAIRSAVAPLLETIDHLNEQIGYYDQMEEQIARERYPKYRLLEQVNGVGVHTALSFMLTIGDPERFGKSREVGSFLGMRPRKQDSGETKPQLGITKAGDVYLRKTLVNCAHHILGPHGKDSDLRRFGLRLCQRGGKNAKKRAVIAVARKLSVLLHCLWFSGEVYESLRNSKQAVAA

SEQ ID NO: 285979 - protein, 415 aa, unidentified
MESTAETTLPDEPPNGVTCGIDWARDDHAVSIVDHRGREIVRSTVEHNAAGLRDLLAVLERAGVREVAIERPDGPVVDTLLDAGVTVVVISPNQVKNLRGRYGSAGNKDDRFDAFVLADTLRTDRVRLHPLLPDTPATITLRQTCRARKDLVAHRVAVANQLRAHLKIVFPGAVGLFADLDSPISLAFLTRFDCQDRAHWLSVKRLAAWLASVGYSGRTDPSVLYRRLTSAPRGTAGTDGTATTGAFVAVLSSLLAQIKALDADIAEQLARHADAQIFTSLPRSGTFRAARLLSEIGDCRARFPTPESLACLAGVAPSTRQSGKVKHVGFRWAADKQLREAVTDFAGDSRHANPWAADVYTRAIARGHDHPHAVRILARAWLYVIWHCWQGGVAYDPAKHRALQALLNQAQHRAA

SEQ ID NO: 285980 - protein, 370 aa, unidentified
MAKSTTLFVGLDTHKEFNTVAYAEGATTDPPVYVGPIGTRHADIDKLIRRLHSKASHLVFAYEAGPTGYGLYRYLAGKGEECHVVAPSLIPKRSGVRVKTNRRDAVELARLLRSGDLVSVWVPRIEDEAIRDVCRARDAARITLKAAKLRLKSFLLRLGLQYTGRATWNDAHRRYLARVVCPTPAQQIVFQESLHAVDEQVERLARLERELVELTPAWRLHPVVEALQALRGVQFLVAITVVAELGDLTRFTNPRQLAAFVGLIPSEHSSGTTRRQGGITKTGNGRARRVLVEAAWAYRFKAKVSEEIRMRLEKLPAPIQAISWKAQVRLCARFRRLVSRGKDANVAVTAIARELLAFMWAIAKEVPLEA

SEQ ID NO: 285981 - protein, 345 aa, unidentified
MNIASIGIDLGKTTFHLVALGERNKILLRKKFSRSQLLAYTANLPASLIGLEACAGAHFMGAALREQGHHVRLIPAQFVKPYRKSNKNDFIDAEAIAEAVTKQNMRFVQIKTQEQLDWQAMHRVRDRLVQRRTALINEIRGFLLERGLTFAARPIYLRQNLPTVIEDAEQNLSPALRWLLDRLWQEWKQTETEIEAITDEIERISNEDARCRQLRQIPGFGPLVSTATVAAIGNGSAFRRGRDFAAWVGVVPRQYSTGGKQKLYGISKRGNIYLRRMLIHGARAVLFRVKYDTGGFGQWVHRLAQRAPSNKVVVAIANKLARMAWAVLSSGQDYRHQPLQQLAAA

SEQ ID NO: 285982 - protein, 406 aa, unidentified
MARVFIGVDPHKLSATIEVVDDQETVVATGRFTTDKAGYAAMRRHVAAFPERVWAVEGSNGAGRPLAQRLLADGESVVDVPAKLSARARLFDTGHNRKTDAHDAHAVAVVAVRTRGLRVLSYDSELEALRMLVDRREELTRARVQTVNRLQRLLGELTPGKAKKNITAGQAKVMLAGVRPRDMAGKTRRRLAVEQLAELVAIDKKITASTKELKAMVLARHSTLMNLAGVGPVVAARILADVGDVARFADRNRFASWTGTAPLDASSGQQIRHRLSRAGNRRANHMIHIAAASQLRHDTPGRAYYRRKLAAGKTPMEAMRCLKRRISDALYRQLVNDAKMASAAVAAGMDAGPGGHSGASLQSSAAGSHPHTGTSDQPQPGPAKETLPAPTPARKTTPSRPMKSAS

SEQ ID NO: 285983 - protein, 343 aa, unidentified
MHITSVGIDLGKTTFHLVALDTRGQVVVKKKFSRPQLLVYMANLKATLVGMEACAGAHFIGAALREQGHQVRLIPAQFVKPFVKSNKNDFLDAEAIAEAVSRQNMRFVPIKTEEQLDLQALHRVRDRLVHRRTGLINQIRGFLLERGISFAKGPAKLRNHMVWILEDAEQSLTCRMRSLLDHLWQEWKCLDSEIEHISEEIDGIARQDAACQRLQQIPGVGPLVSTATVAAIGNGAAFRKGREFAAWLGLIPRQHSTGGKPHLLGISKRGSIYLRRMFIHGARAVLLRVKYDTGRLGQWAHELELRAPRNKVVVAVANKLARIAWAVLARGKDYRSAPAIAAA

SEQ ID NO: 285984 - protein, 388 aa, unidentified
MLKQDLEESNGGRTVVGIDPCSEFLQLAILTPKKKTEFKKLPLSPSITEEITKSTDPKTTQIAIESYGSYGKLFVYDLLKKGYDVREVNPHISKKLSGLYSEEHSDQKDAEILAKALLLIPDLPRISITDKKQWLAKLTRTRRKLVKDLNGYLNRLHIALAESYGFVYKKLFKILFAKKALQFFEDYPTINDSLSDKNAKKRIGEEKWDLLKQAGKWRDTYYLETLRTEIRGMIEIIRTINSTKLAIDEKIYEIADKIEEMKILKTFPGIGGVAGASLLSEIGDIDRFGQESHLSAYCGVSPVIWQSGTGRIRTKRRKRYSRRLKGILYFIALSQIRINPESRAYYDRKIKEGKTHWQAMNALSRQLIKIIYYMLKNMEPYRRPVLVN

SEQ ID NO: 285985 - protein, 308 aa, unidentified
MSSTSLEAFVGPAGPGRSFANTAEGIAELAAFCQEHQVELVAMEATGGYEKQALGLLWSLGLAVTLLNARAVRDFAKGMGLLEKTDRIDARIIARYAEVRGSLPSVPRTAPEEHLKALVTHLRQLTQLHVAQQNQGLLVTDKTVQRSMAKVLKVLEEQKRQVAAKIAAVVASDPLWKQMDQVFRSIKGVADRAVSTVVAEMPEIGTLSNKAASKLAGLAPLAQDSGKKQGKRPVRGGRRQLRAVLFVVAGVVARHNPDFAAFQQRLSAAGKPKRVIRVALAHKLLVRLNAKARDVRMQFMTLNAAQIA

SEQ ID NO: 285986 - protein, 419 aa, unidentified
MTQVQDNAAIKIIHPICCGLDVHKEKISACLMTMDEHGQEISEIREFATFTDELIALRAWLQESDCPIVAMESTGVYWRPVHNVLEHYLAVILVNARHIKNVPGRKTDIADSRWLASLLKHGLLRGSFIPPKDIRQWRELTRQRRRVTESLSDYKNRVHKLFETANIKIASVVTDLFGKTGRRLIEQLCTESAGGFTEKAVAEIAYGRLRAKAPELYRSIQGYFEEHHRFQLHSLMRIITTLESEIGIITERVQLLMERHEEVLERVAAVPGVGPHSAQVIISEVGYRLDSFANAACFASWAGLCPGNNESAGKRRTGRTAVQKHPFKTIMVEVAWAAVRTKGSYFKEKYHRLKARRGAKKAIVAIAHRLAKALFHIIKHGERYREIGDDYLNKRTRTTLSTLRKRAKALGFQLVPATL

SEQ ID NO: 285987 - protein, 410 aa, unidentified
MLLLVGDDWAEDHHDVELQDASGRVVGKARLPEGVAGIARLHAQVGEHVGDDDDEPVQVVVGIETERGPWVQALVAAGYEVYPINPLQVARYRERHGVSGAKSDAGDAHTLADMVRTDRHQLRPIAGDSAQAEAVKVVTRAHKTLVWERTRHTLRLRRTLLDFFPAALAAFADLTAPDTLELLAAAPDPASAAVLDIDQIAAALRRARRRKVAAKAAQIQAALRTEQLRQPPVVAAAYAATVRAQVAILTTLNTEITTMEEQVEAHFGEHPDAEVYLSQPGLGVVLGARVLAEFGDDKSRYPDARARKNYAGTSPITRQSGKKKLVLARYVHNDRLIDALGQQAFSALRASPGARAYYDQLRARGVGHRAALRQLANRLVGILHGCLKTGTTYDEDTAWPQPQQDLQTAA

SEQ ID NO: 285988 - protein, 374 aa, unidentified
MENTITYAAMDTHKKYHKIALQYPCREQLVEFTVENNLRDIRKMVNKIKKQAPGQIQFCYEAGVCGFALKRRIEQLGCRCRVIAPSLVPRKPGERVKTDRRDAKKLLDMFKAGLLTEVHAPDESQEAARELTRLREAARDNLKRVRHQILKFLTRHGYVYRQGRHWTQRHIGWLRRIEFTEPMLKDVFESYFDDMIYCIGRLEDLDRQVEILAGSKEYKQVVGLLCCYHGIETLTAITILTEIFEFGRFESPRHLMSYLGLTPSEDSSGDKQNKGAITKSGNKRIRRLLNEASWHYRHLYVPSAALKKRREGQPKWAVEIADAAGRRLSKRHRYLINKGKMPCKANIAVARELAGFIWFTITQYYARKDAIDAA

SEQ ID NO: 285989 - protein, 470 aa, unidentified
MNKLNVIGVDLAKNVIQVSVLSPSNRELRNSALTRRKFAEFLGRQPASLVAFEACATSHYWARVALRHGHEVKIIPAKAVFPFRQGHKTDENDALAVAEAARRPNVKLAPLKTVEQQGMQAVQRSRELLVHERVALSNHLRGLLMEFGIVIPQGFASLYRLLPEILEDGENELPDLYRPTLNLLYGRLCGLREDLERLNIEIESLVQNNPVCRRLTALEGIGPIGSVLLYATLGTGEAFANGRQFSAYLGLTPKQFSSGGKVNLVGISKRVANRRLRAVLIQGARAYVYHMKEPKTTKDRWLWAIVERSGKCKAAVALANKNVRTAWAMLTPVNRLLLEVIEPDARGETVFTVGFTFPGLDSGFRIALVAFQHFPHGPSESLPVSRIQAERPGLALEELLVLRCRHVVLEGRNQVGNGRQGGVQHIGFIIRQVGRKLLHDQFKCVVLAILHDTLGSHQALDDGLDRYTPS

SEQ ID NO: 285990 - protein, 334 aa, unidentified
MTNDKYVAMDVHKASVVIGMRDGGGKMIGHAVVETKAQTLRDYVRGLSGTVHLTFEEGTQAAWLYDLLKPLVAECIVCDPRRNKLLESGNKSDDVDVEKLSELLYLGRLRAVYHGGQGTRALKELAQNYEALVKDNTRVKNRLKAIFRGRGISYEGGELYDYEQREQWLAQLSERGVKERAGQLYEQLAQLEEWVAKARLAMLRESRKQKAKKILEQIPTLGEISVAQLIATVDTPFRFRGKRQFWTYCGLAVVRHTSADYQFAQGELRRRAKPGATRGLNRNYNRRLKRLFKSARGLNPELAQVTLARKIAAITLTLWKKGANFDREKLVKPE

SEQ ID NO: 285991 - protein, 411 aa, unidentified
MDKVYDKCCGIDLHKKLIVACFKQGNRQEIRDFGATTRELLEMADWLKEGGCEMVAMESTASYWKPLYNILETCGLKAMVVNAQHMKAVPGRKTDVKDAEWIADLLQHGLLTASYIPDKDQRELRELVRYRKSLVGERARELNRLQKMLEGANIKISGTIRDINGKSARNILEHLLSGRQIDSAEYDILYEKKVIAHNLKATKEQIIDDLNGVMSALQKKMMRILLNHLDELNAHIRELDDDIDNFMKPEEKEAAKVIQDIPGIGNTSAQAIISVIGADMSRFPTDAHIASWAGLCPGNNKSANKRKSGKTRKGNGLLRDTLIVCAHSAVKNKSSYFHAQFARISAHRGSKRAYVAVAHSMLVAIYHILKDGVVFRDLGAEYYNQFNRERKINAYLKKLKALGWEVPVVAA

SEQ ID NO: 285992 - protein, 355 aa, unidentified
MNSEKYIGLDVHQATISVAVLDATGKLVMESILETKAATILQFFAGLRGTFSVTFEEGTWAAWLYDLLRPHVAKLVVCNPRKNALLKDGNKSDRIDARKLAELLRGNHLKPVYHGETGVRMLRELARSYLTIVKDLSRVMNRLKAVYRSWAIPCAGRDVYYTRHRAEWLDKIREAGVRRRAERLYEQLDMLQHLRQQARRELLAESRKHAITAKLRQIPYLGPIRSALAVALIQTPHRFRTKRQLWAYSGLALETRTSAEYRYVEGQVRRSKKLLSIRGLNKDHNHDLKGLFKGAATMASVRPGPFQDFYQASLTKGMKPTMARLTLARKMAAITLTLWKKGEDFDAEKLKPQAA

SEQ ID NO: 285993 - protein, 379 aa, unidentified
MSVARLVRAALSVEVMAKGRLAPTMAQQTDEVTGGVDTHKDSHTAAALDSAGRLLGVEQFPATGAGYGRLLDWLRGFGAVGKVGVEGTGVYGAGLARHLAAAGVAVVEIDRPDRKARRWQGKSDPVDAEAAARAALAGRRTGKPKDRTGQVEALRALRVARRGAVEGRADAQRQMKALVVTAPEQVRAELSALTATRLVEVCASADIAVAHAGDPAVAVRLALRSLARRHQRLSVEIRDLDTVINRLVVTISPKLLEVQGVGPDTAGQLLVTMGANPDRMRSEAAFAMLCGVAPLPASSGRTHRYRLNRGGDRQANAALYRVVLSRLRWDARTRAYVERRTKEGKSKKEIIRCLKRYVARELYAILTTLREPNDLPVIT

SEQ ID NO: 285994 - protein, 343 aa, unidentified
MEVYVGLDVSLKETSICVVDGSGKIVSEGKVLSEPLALAEFLRAKAGNAKRIGLETGPTTTWLWHELRALGLPVLCIDARHAKAALSLQINKSDRNDAVGLARIMQCGWYKEVQVKSLSCHEVRAVLISRAQLVKTKVDLENQIRGLLKNHGLVIGKAGGNIFRRRAEELVGEYRLLREAVRSLLAVHEVVRREITDLTRKLLVLARNNDESRRLMTVPGIGAINALAFCAAIDEPSRFRRSRSVGAYFGLTPRRHASGEVDRTGRISKCGDAMVRTLLFEAAGVLLTRVPQWCKLKAWGHKLWKRIGFKKAKIAVARKLAVILHRMWRDGTDFVWSTKEAVA

SEQ ID NO: 285995 - protein, 477 aa, unidentified
MAKRKKSTFERLRSGELNRRERREWQRRLSLPDPGLEIVHPDAAGIDIGNASHFVAVPPGRDEQPVQEFGSWTSDLRRMAAWLKQCRIRTVALQSTGVYWIAVLEILEAEGLEVYLVNARGTKNLPGRKSDVQECQWLMRLHTYGLLRNSFRPPEEIRAVRTIWRQRERLVQDAGRTVQQMQKALTTMNVQLANTVSDISGVTGLAIIRAIVDGVRDPWELAKLRDRRIAASEEEIAHSLAGNWREDVLFELRQVVEAYDFYQKQMTACHQQLEKYLAALPDAKAPAESEVPSQPPQGWLKSKYRRKNQPDFDLAPELERTLGVDLTTIDGIDILTAQIILAEVGPDLRAFPTEDHFTAWLQLAPHRDISGGKVIRHVKPEGRNRVANALRMAAQALSRSDSYLGARYRSLRGRRGGPRAVKAMARYLARLVYRLLTKGQAYVDRGAAHYENKRQEREKLALQRKAAELGYQLVPAV

SEQ ID NO: 285996 - protein, 342 aa, unidentified
MQITTIGLDIAKNVFQVHGIDGNETVVVRKQLRRGKLIAFFESLAPCLVGIEACATAHHWARELTRLGHQVRLMPAKDVKAYVKRNKNDAADAAAICEAVRRPTMRFVRIKSTDQQCQLMQHRTRDLMMRQRTQLINALRAHLAELGIVAAMGDKGVTELLMIVADEDDGRLPVEARASLALLAAQLNALQMLIGSLEKQIKMQHRANPASQQLETIPGIGIIGATAIAATVADPTVFRSGRDFAAWIGLVPRQESSGGKHKLGSISKRGDRYLRRILVVGAHSVLRRAMEKPGKYPWLTQLMARRPFKVVAVALANKMARMAWALLTYGGTYRAPRLSIVP

SEQ ID NO: 285997 - protein, 362 aa, unidentified
MSVYVGIDVHRKRSQVAVIDQDGEVLANRNVPNGTETILSVIGGLPTGTPAAFEAAFGWGWLVELLEDYGFDPHLVHPLQCKAIASARLKNDKVDAAILAQLLRAGLLPEAWIAPPAVRQLRAVLRHRVQLVRLRTLLRNRIHAVLADHGHGRAGGCWSGPGRQWLASLQLPAASREVIEDDLALIDALQQPIDRLDWELHQRARSEPDVKVLTQLPGVGPFTALVLLAEIGDISRFGSARKLAAWAGLTPTVRGSDRTVRHGHISKQGSVWLRWILCEAAQTAKRHPDFAAGYQAIARRRGKKIATTAIARRLLTRACHLLADASQASAPKPPQPSHRAPGKDAPADREGSPSPGHARKTA

SEQ ID NO: 285998 - protein, 403 aa, unidentified
MLNAVGIDVSKRKSVVSVAQPGGVFIAKPFEVPHTKNGLQDLVAYIKNLEGETRIVMEHTGRYYEPMALWLSEAGFFVSTVNPKLIKDFNNNSLRRVKTDKADAKKIARYTLDNWAELRQHTSMDNKRIELKTMNRQFAFYMKQKTAYKNNLISLIDQTYPGANTYFDSPARSDGSQKWVDFLKKFWHVDCVRNLGLTSFTEEYKKWCKEHSYNFQSSKPSELMDKAQDLIAVLPMSEMTKLFVLQAIEQLNAISKAVEELRIKMDELAQTLPEYPAVIAMNGVGKTLGPQLIAEIGDISRFARRGALTAYAGVDPGANESGDMYQKSNKTSKAGSPHLRRTLFQIVEGLIQRSPDDPVYYFMDKKRSEGKPYYVYMTAGANKFLRIYYGKVKKYLSSLSLEG

SEQ ID NO: 285999 - protein, 424 aa, unidentified
MKVTYQTCCGVDVHKSFLVATIVKTTGGVEPSYQKKRFSTFNNSILEFKHWLLDNDCLDVCMESTGKYWVPVFNLLEDEINVVIANPKWVKAVKGNKDDTKDSKWIGDLFRLGLVKGSYIPCKKVRILRKYTRYRYKLVSYRSSEKNRYQNALTVCNVALDSVVSDIFGKSSSSIIDYLLEQSDTSINHEEIASKLLRRLKSKEDAVIESVEGYQMTDAQKYRMRLVRAHMDYITAEINDVDKMIENMISSNPDFENAIQFLCTIPGVKRDSAITIISEIGTDMSQFSSSKRLCCWAGLTPGSNESAGKKKSVRITRAGVYLKPALVQCAHAAVKSDKSPYYKKKYESLVKRRGKKRSIIAIARMILTAIYQMLSTGEQWNPSDLYKIDMPVALVEKQKAKAIKQAKKLLQREGLLPPDEPLAS

SEQ ID NO: 286000 - protein, 428 aa, unidentified
MNYNTQNAKIASITEKTLIVGIDVGSETHYARAFDWRNYEYSKNPLEFSNTEAGFLTLKVWMEDIAEKHGKTAVIPGMEPTGHYWFALGKFLQDSGMKPVHVNPHHVKKSKELDDNNPNKNDRKDPKTIAALVNEGRFSYPYIPTGIYAEVRSLSNLRFQTQEELTRIKNRIARWFSIYFPEYKDVYVDLKAVSGRMVLKAAPLPEDIVKLGAEGVNRIWRNAKLRGAGMKRAKTLVSVAEHSIGSKEAPEAARIELKNLLNDMDVYAARLEELLRSIEEKLKEIPYIDKLMEIKGIGLVTVSGFIAEVGDIGRFDNPKQLQKLAGYAIVANDSGKHNGESRISYRGRKRLRYVLYEAAISLIGKNAEFREIHEYYRSRKENPLKKMQSVVAVACKIIRVFYAILTKGVDYNAEKLMGDIKRPQVQAA

SEQ ID NO: 286001 - protein, 340 aa, unidentified
MGVFVGIDVSLENSAVCAVDEHGKLVKETKVASEPGELDACIRGIPGVVEAIGIEAGPLSQWLHKSLTDLGLPVVLMETRQVKAALKAAPVKTDRRDAAGLARLLQMGWFRPVHCKSLSAQELRVLLGARRSVQDAAINIEMSIRGMLRNFGLRLGRIGKVSFEGRVRELTEGNQLIQLSIEPMLRARAALRSELVRLERMARDITREDPVCRLMMTMPGIGPVVALTVRSTIDDPGRFRRSKDVGPSIGLTPRRYQSGETDIVGGVTKAGDLDMRTALYQAATVVIHRSKKQTWLRAWAERVVRRRGAKRAAAALARRMGVILHRMWVDNTEFQAARQV

SEQ ID NO: 286002 - protein, 359 aa, unidentified
MEQKRFVGIDLGKRTFEIKFITSNGSVTGTNGKTCPSGRKELYKKLLPTDRIAIEVCSLGMVMAKEIIQQVGAEVVLLNPSQIALIYRSVKKNDKEDALKLARLVQKFTNEELPKVELPTEHEENLRQILTELRQLKNDRTKEINRVHAIFVECGITEIKKSNLATHKNRSECIKILKGIFLSQAERSLRKLELIETQILEVEELLDKEIDGDKSIETLITVPGVGKQLASSFVAFLGDGSRYPNVSSIGAATGLVPRLDMSGASLRLGHITKKGNSNLRSLLILAAWSHVRAKNGGALKEKYLYMTIAQSKSKKVAIVAIARKIAELMYSLLKNNTQYEKRAPVSIKKLATEALVVAS

SEQ ID NO: 286003 - protein, 338 aa, unidentified
MTIVMGLDQHRAQIAAEWIDTDTGELGRARVSPALRGDVRRFFRRFVGQQLEVALEATTGWRFVVEELHAIGAAAHLAKPAETAARRGNKKRAKTDRADARHLRELLMIGRLPESWIPPGHLLDLRARVRLRHTLVDQRGEWQQRIQAVLYHHGFPQRNGLLTGENRAWLEGLSLPASARGQVAVALTMIDAVDAQAAPITRELRLYARRQPGCRALMKHYGIGELTAVTILAELGDARRFSASRHAVRYAGLDITVHQSDQRRAAGHLSRQGPPALRWALYEAAQAARRPGSPDRGYYEQAAERLGGNRACLALARKLLKRSYHTLRELGDEALQPV

SEQ ID NO: 286004 - protein, 397 aa, unidentified
MKHSELIRHRAFRQLRTEIRGSREYLIVGLDIGKDRHHAFFGSATGKTLLKRLLFNNTSEGFQKLLLQTEVLKVQHGFPHVVFGLEPTANYHKPLGEHLIRHGHQVVLVSGVAVKRNRELLDGRWDKHDTKDAANVADLISQGKCLFYEHPDAKLRDLRTLLALKRRLKKQEQSWRVRIRNGLVAQYFPELDRSFRRLIAPGKERDWLFMIGQRPSSMGCEIHPAVAFEAQVMVEELQRVREALQGIQEKIQQLCSQFSEYPYLLSIPGFGPEVSAQVLAAIGDPFRFGNGKQVLKLAGLDLSSDRSGKRSDLAVPVISKKGKADLRYALYQAALIASVRNLAFMAYCTSNLRGRAQERGIGTKFRVKWAAKLLIIAWTLMKRKEAFDPRRLIPSPI

SEQ ID NO: 286005 - protein, 415 aa, unidentified
MALKIVYKICCGIDVHKTFVVACIASTNDKGVATYENHRFSTYTKGLRDLLQWLLKRNCKDVCMEFTGKYWIPVYNILENHCSIILAHPKYVKAVRGKKTDKKDAKWIADLFKHDLVAGSFMPPADIRQLRDLMRYRFKLTCFKSSEKNRLQNCLTVSNIQLGNVVSDTFGKSAQAILDKLLENPADTSFDLEPLVFKSLKKKLPELRDAIDGFITPEQVGKLKVIKGHFEDLESRKAELEELILALAAPYQQELAILQTAPGISSVFTAIGIISEIGTNMEAFPSAKHLCSWAGLTPTNNESAGKKKSVRVSKAGCYIKPLLVQCANAVVTSKKHPEIRNRYLRLKKRRGHKKAIIAIARMLLTALYHMLKNGENYNAELYRKSNLPPVDREITVEQAIIIARNQGYKIKSATA

SEQ ID NO: 286006 - protein, 408 aa, unidentified
MNAVGIDVSKGKSMVAALRPMGEVALLPREFLHTEVGLEQMAYAITTLGEDTRVIIEATGRYHEPVAAALHKYGIYVCVLNPLYIKQSGGGSIRKVKTDKADAMKIAKYGLDNWVDLREYTPMDTVRQQLKLCSRQYNLYMKTVVSLQNNLISLTDKTFPGVNELFSSPERADGHQKWVDFVMTFWHCDCICRVSEKAFTERYQKWCKRKGYHFSTEKALDLYAGSCGHFPTLPKNDNTKLLITTAAQQLLAGKMTLAALRAEMTRLAMQLPEYNTVRTMYGVGETTAAQLMAEIGDVRRFPRRSSIVGFAGVDPGVDDSGKHSAKSVPTTKRGSPHLRKTLYQIVCTYLRKAPANEPVYQFLDKKRAEGKPYFVYMTAAQNKFLRIYYARVKECLAAFDAQQDTTQS

SEQ ID NO: 286007 - protein, 412 aa, unidentified
MMENVFPCCAGLDVHKQSVEACVRRIEPNGRLHQQTRHWGTMTRDLLAMADWMITQGVTHVAMESTGVFWKPIYNILESRFTMLLVNARHLKQVPGRKSDVRDCQWIAQLLQYGLLKGSFIPPRSQRELRDLTRHRTQLVEEKARTANRIHKVLQDTNIKLSSVASDVLGASGRAMLEALITGEEDPVKLADLAQRKLRGKIPELEKALEGHLTEHHRFMLKLLWKQLAQQEGLIVELDRKIEEQTRPFAAEIDRLDAVPGVDRRVAEVVLAEVGPDMEPFPTHANLASWAGMCPGNEESAGKRVRKRITPGNRWLKRTLAQATWAASHSKNTYLASQYRRLAGRRGRKRALIAVGHSILVIFYHMLKAGTSYTDLGGDFFDRLEPQRMTRYYVRRLESLGHKVTLESLKAA

SEQ ID NO: 286008 - protein, 414 aa, unidentified
MEVIHPRCAGIDVSKKDAKVCVRVQGAGPRGTTTTITTWTAVTSRILELRDHLLNERVDLVVMEATSDYWRPFYYLLEGDGLAVVLVNARETHNMPGRKTDVSDAAWLADLGAHGLIRASFVPPPPVRELRDLTRARTIITRERTREIQRLEKLLEDACIKLSSVASNINGVSGRLMLQALIDGQDDPAALAQMAKRKLRQKIPELTEALNGRFKDHHRYMAGLYLRRLDAHTADIEDLSARIEAAMEPFCDSRELLISIPGINTTIAEVIIAETGADMSVFATAAQLASWAGTSPGANESAGRVKSTKTRPGNKYLKGALGMAAFTAARLNNTYFSAKYRRILVRRGPMKALVAVEHAMLTAAWHMLTTGELYKEPGADYFSRHTPGRAKTRALKQLESLGYHVTLQPLHQTG

SEQ ID NO: 286009 - protein, 317 aa, unidentified
MTPPHRFFGIDVSKWQLDIAARPSGESWTTTNDESGIHELVKRLRRSCPALIVVEATGGYELELAMALARANLPFAVANPRQVRDFAKGMGILEKTDKIDAAVLAHFADAVRPKPRPLPNEATLLLNALVVRRRQLVTILTCEENRLYTAPKEMRPAVQAHINWLRQDLSLLEAELRQAIKQNPAWREEYRILCSAKGVGPVLAVTLIAGMVELGKLNRREIAKLAGTAPFARDSGKFKGRRMIWGGRASIRAVLYMAALSATRSNPVIRDLYQRLLRAGKLKKVAIVACMRKLLTILNAMVRDGTAWQTQPIPQES

SEQ ID NO: 286010 - protein, 355 aa, unidentified
MNDAKYIGMDVHTATISAAVRDASGNLVMEATLETKCETILEFVHGLRGSLHVSFEEGTCASWLHDLLKPHVTEVLVCDPRKNALLRVGNKNDREDARKLSELLFLNKLHPVYHGETGIRTLKELARSYLTLTRDLTRVMNRLKAIYRGWGIACAGQQVYAPGFRAEWLAKITEAGVRRRAEIYYQQFDILVALRQEVRRELLAESRKHPARRLLRQIPSIGPIRAALLIALMQTPHRFRTKRQLWAYCGLALRTYDSGEYRFVGGQLKRSKKAVTIRGLNKNHNHDLKNIFKGAATRAAATAGPLQNFYEARIANGMKAPMARLTLARKIAAITLLVWKKGVRFDAEQLKQQAA

SEQ ID NO: 286011 - protein, 387 aa, unidentified
MLQTVAAPIPAAVDYERTLVLAIEVSNKSWVLAAQVPGLPHTKAKRTINPEAEALLAAITGYRARAAATGRSIERVIAVYEAGWSGFWLARWLIRHGVEVYVVQPSSVPVDRRMRRAKSDGIDAELLLRTLLAWLRGEPRVCSMVPVPDEADEDARRCVRERTELISERVGLTNRIGAILATLGVSDYNPLLRNRDRRLAELRTALGEPLPANAHAKIKRLLARLELVLTQIAELERERDAVVETEASDRASKMIQQLTALRGIGVQSATVLVREAFVRRFANGKALGSYAGLASSPYSSGGIDREQGIGKAGNRRVRTVMVELAWLWTRYQPGAAQVCWFRERVGSTGRRVRKIMVVALARKLLIALWRFVIDGVLPEGAVLKPAA

SEQ ID NO: 286012 - protein, 404 aa, unidentified
MTVVCAGIDWASEEHAVCVLKDEGELLHEGTVRHDEAGLGELCELLCGLGTDRVAIERPDGVLVDRLVAAGLPVYAMHPNQVKAARARFRTAGGKSDRFDALVLAELARTDHQRFRPLAPDSDETRALRALTRAREDLVATRVALANQLRAELERCWPGAARIFADVDSPIALAFLERYPGPADAKGLGERRLAAFLARHSYCGRRAAADLLARLREAPVTALGELEAEARRGVVLALVAALKVLVERIRLLSSEIAGAVRQHPDGALFLSLFRDRNSTVTAARLVAEIGDQRGRYPSAEALAADAGMCPVAVESGKRKVATFRRACDKRLRDAVVTLCDSTRHWHPWAHDVYERARRRGCDHPHAIRVLGRAWLRVVWRMWQDRVPYDPDLHGSLRALPVTGG

SEQ ID NO: 286013 - protein, 408 aa, unidentified
MEVVHKRCAGLDVHKDTVVACIRRVEGETVHREVRTFATMTGALYELSDWLASAEISQVVMESTGIYWKPVWHVLEESFELVLANAKHVKNVPGRKTDVNDATWLAELLAHGLVRGSFVPERPVQELRDLTRARTQLVRERVRHVQRLQKVLEDANIKLASVVSNIVGRSGRAMLDALVAGETDPGALAQLAHARLEATPEQLAAALQGHVTPHHRVMLQLYLDQLDATDRAIASVERHVEGALRPFREAAELVVTVPGISKAVAASVVAEIGTDMSRFPSVGHLISWAGFCPRSDESAGKRRSTRIRQGAPWLKPMLVQAAWAAIRVKRSYERALFYRLKARRGPGRAIIAVAASMLGAVYHMLRDRVPYRDLGPDHFERRGREYITRSLVRRLQHLGYQVDLREAA

SEQ ID NO: 286014 - protein, 456 aa, unidentified
MAKTKAGQRNKSGRPLVPIHRNAAGLDVGSTFHVVAVPPDRDPQPVRSFKSFTGDLHALADWLKAVGVTTVAMESTSVYWIPVFEILEARGFEVLLVNARNAKNVPGRKTDVNDAQWLQQLHEYGLLRGSFRPRDGVARLRALLRHRERVVEYAASHIQHMQKALMQMNVQLHHVVSDITGVTGMKIIRSILDGIRDPKVLAQHRDRRCKASIETVGKALDGNYRTEHVFALRQSLELYDFHRAKVDECDVEIEVALGELNNDREAPAAPMPKVRHASNPNEPKFELRSALYTLLGADLSQIHGFGAFTVLRLVGECGDDMRKWPSAKHFTSWLSLAPGNKISGGRVLSSRTPKSANRAAVVLRMAAVNIGKTHTALGAFYRRLAARTGKAKAVTATARKLAVLFYNTLRFGMAYVDPGQDHYEEKYKQRVVHQLHRRAKQMGFTMVKENATVGVS

SEQ ID NO: 286015 - protein, 406 aa, unidentified
MDAMSTPSNTPPVIITESASFIGIDFHKKYSVWHAIDAAGSDLGKGRIEHHSPQDFATLVKRWPNPRVVFEASMNWHWLFEVLEQAMPGEHLTLANAFKTRIIAEAQVKTDKIDARILALLLRAGLVSSVHIPCKETRQRKEVLRQRCFFVRQRTMLRNRIHRLLGAQHDLKLPQVTDLFGKKGMGFLEKLELPAPTGLLLKQQLEMLKSVQLRIKEDETALEAMMSTTEAQKQVLSIPGMGPILASVVVSEIDDISRFKSAQKLCGYIGLCPSTSSSGGKTYNGRLMRHCNKWLRWAFVEAAWVAMGCDSYFGDLYKKKRALGKKFNTAILCVARRMARITWQLLTQGRSYEKTPPAHPIQGRPARGAQAPAGPVKEGGLSADARARSLRGRPATSISPAAPIAH

SEQ ID NO: 286016 - protein, 363 aa, unidentified
MFTECMSVGLDVHARSVAAAAIDGVTGEVLQTRLTPSYEHIQSWISELSGPVAVAYEAGPTGFGLYRALTEAGIRCEVVAPSKLQRPAGDRVKTDARDALHLSRLLRLDEVTSVSIPSVAQEAARDLVRAREDCRGDLMRARHRLSKLLLRHGIVYYGGQAWTGAHDRWLRTTAAPQLSAPATKMAFDADYDHVLTMQARRGRLDAVIEDIANDCEFTSIVRRVSCLRGVSTLTAFALAVEIGNWNRFTGNTIGSFVGLVPSEYSSGSLRAQGPITKTGNTHVRRLLIEAAWHHRPRYHVGAVMRSRWKLAPAAARARGDEGNRRLHTRWVGFLERRKRPVVANVAIARELAGWCWSLAVMEN

SEQ ID NO: 286017 - protein, 350 aa, unidentified
MLIIGCDYHPSFQQIAFVDTETGEFQEQRLSHREEAERFYRDLAAQGRKGRVGMEASGHARWFERLLAELKVELWRGDAAKIQAKRVRKKKTDREDARHILQLMLKDDFPQIWVPSWDNRDLRQLLWHRHRMVQMRTRIMNQLQAVALNEGLRCKKRLWGERGRQQLESIGLSPWASRRRRDLLELLDRLTPTIAELTKQIEQEVEKYPAAQRLMTHPGVGALTALAYVLIIGEPERFECGKQIAAYLGLVPEEDSSGERRRLGHISKQGSGLMRFLLVEAAQVTVRSDPEWRSKFFHLALRRGRKIAKVAMARRLAVRMYWMWRQQWDYEQLKKFGPHAGQPGTAHGVK

SEQ ID NO: 286018 - protein, 340 aa, unidentified
MEHVAIDLGGRESQICVRASDGMIVEERRARTAALGRYLGSRPHSRVILETCSESFHVADQARALGHEVRVVPATLVRSLGVGSRGVKNDRKDARVLSEVSCRIELPSVHIPSEKARELKSLCGMRDGLIRARTLLINTVRGWLRGRARRIRSGVTKTFALRVRRHFGDNAIELPKFVERQLISIEAITEQILLANQELETQAAGSELCQRLMTVPGVGPVTAVRFVAVVDDARRFATVHDLQSYLGLVPGERSSSDRKHRTSITKAGPAALRWSLVQAAWAARRCRRVDPMVHWSLRVESRRGKQIAVVALARKIAGVLFAVWRDGTVYESARMLRRAR

SEQ ID NO: 286019 - protein, 312 aa, unidentified
MGLDVGDRFSQLCVVDQDGVVIQEDRIPTTRVALRERLAGPPARVVLEAGTHAGWMSRELTALGHEVLVANSRKLRWLYHNEHKTDRVDATYLARVGRWDPTLLAPIRVRSAGADGALRLVRARASLVRARTRLINHVRGAVKSVGGQLPPCDATSFARRVAAHLPAELHAALEPLLAQIAGLTQTIARYDAGVGALTALAFVLTVDDPRRFGDGRAVGAYFGLCPRRADSGAHRPQLGITKCGDGLVRQLLVQAAHYILGPFGPDCRLRRWGLELARRGGKNAKKRAIIAVARKLAALLYSLWVHDTRYAP

SEQ ID NO: 286020 - protein, 449 aa, unidentified
MKRTGKSGFPLLNPDAAGIDVGAREHYVAVPADRDAQPVRCFGAFTEDLHRLAQWLLQCGIKTVALEATGVYWIPLYQILESYGLAVKLVNARHVKHVPGRKSDVQDCQWLQQLESFGLLAGSFRPEAKICVLRSYMRQREMLIRQASRHVQQMQKALTQMNIKLHQVISDLSGDTGLRIVRAIVAGERDRLKLAALKDRRIKSEVALIAKALEGDYRAEHLFALKQALELYDYHQRKIAECDAEIYKEMQTLETRGSAAPLAKHKPRSSHNPLGFASQAELYRIMGVDLTRIDGVNENTAQLILSELGLDICQKWPTEAQFTSWLGLCPNHEISGGKLLKRGTRKVVNRVANALRMCAQSLLNSKSALGAYARRMRARKDTPVAITATAHKLARLIYRTLKYGQDYVDVGSDSYEAKYQAAVVKSLQKRAQSLGYQLVSCQTPGAVVP

SEQ ID NO: 286021 - protein, 349 aa, unidentified
MVVIGTDVHKRSHTFVVVDEVGRKLAQKTVPATSAGHLQVIRWVRERFGAEVVWGIEDCRNLSARLETDLLSAGQRVVRVAPKLMAQARAGGRTRGKSDPIDALAVARAVLRHPDLPIAAHDQASRDLKLLVDRREDLVAMRTATINRLRQRIHELDPAVEAGLSSLHRAGVCARLADWLAGQPGVLAEIAREELADIIGLNERITELAERIGQRVQALAPNLLALPGCGELTAAKIVAETAGVHRFRSEAAFSCHNGTAPIPVWSGSTSGRVRLNRSGNRQLNAALHRIAITQLRLPDSDGARYYRRRLTEGKTPKEALRCLKRQLSRVVYTRLHLDHATHNPHQAAA

SEQ ID NO: 286022 - protein, 465 aa, unidentified
MAKKAQKMKKGKRSELLIVNINAAGIDIASTEYQVCVPEDRDTAPNRRFEAYTCDLHSIAQWLKQCNIDTVAMEATGIYWVQLFMVLQEYGFDVVLCNAKHIKNIAEKKTDYVDASWIQLLHSYGLLRESFQPENQIRQLKDLMRHRERIIHSMSQDILRIQKALEMMNIKVHKVLSDIKGKSGLNILEAIISGERQPLVLAGLVHHSVKASKEEIIKSLEGNWNDAQLFILKQSFDSYRFALRQIEELDQSIEQLLLAYAHVSGEANNNKPIERASKRKLIQGNVLHFDAEQYSYDILGVNLTRIPGISSLTAVKLISELGRDFTEKFPSVKQFCSWLNVVPNNKKSAGKILSSKVPKRKNFAGQALRVAANTLCRSKCYLGDHFRRMQSKLGYIQAIVAVAHKLARIIYQMVKEKTEYDESIDRAKNVKLLDFKRKSLQKRLAKIENEIYLSSCNTSNLLLVR

SEQ ID NO: 286023 - protein, 445 aa, unidentified
MDKLVYSLGIQTMPSPPIIFSEHICSKGVPMALKIVYKICCGIDVHKTFVVACIASTNDKGITSYESHRFSTYTSGLKTLLQWLLDRNCKDVCMESTGKYWIPVYNILESDCSIVLAHPKYVKAIRGKKTDKKDAKWIADLFKHDLVAGSFMPPADIRQLRDLMRYRFKLTCFKSSEKNRLQNCLTVSNIQLGNVVSDTFGKSAQAILDKLLENPADTSFDLEPLVFKSLKKKLPELRDAIDGYITPEQAGKLKVIKAHYENLESRKAELEELILALAAPYQQELTILQTAPGISSPFTAIGIISEIGTNMEAFPSAKHLCSWAGLTPTNNESAGKKKSVRVSKAGCYIKPLLVQCANAVVKSTKHPEMRNRYLRLKKRRGHKKAIIAIARMLLTALYHMLKNGENYNAELYQKSDLLPVDREITVEQALMIARNQGYKIKSATA

SEQ ID NO: 286024 - protein, 404 aa, unidentified
MLFVGIDWASRAHELCVVDEQGAIVERFGFAHSEHGIGGTLERLAKLCSPREVPVAIERPDGLLVDRLLEAGHEVVPIHANAFHAARPRWEGAGSKSDPGDAYRLSDLLRTDYHRLRPIQPLDQATRELQALVRLRDDHVKARVAATNQLAALLGAHWPGAAAIFGRLDSEIALAFLDRYPTPQSTQRLGESRLASFLRRHSYCGRRSAEELLTRLRQAPQPVHALDAHIVAELVQAQTRLVRTLLASIADLDRAIAAAIDQHTKAQLLRPLPRVGTINLGQLVAEVGPLLDRTQSADQAAALCGAAPVTKRSGQQRAICFRYATNAKARKALTIWADNSRHASTWAERIYRDARARGCRHPHAVRILARAWLRVIWACWHTDTPYDPARRRGQERHLAPQSLT

SEQ ID NO: 286025 - protein, 336 aa, unidentified
MLIIGCDFHTRYQQIAMAREETGELLVERRLDHASGEAHAFYRSLQSSQEPVRVGIEATGPIHWFERLLADLGHELWIGDSAKIRASEVRKQKTDERDAALILDLLLAKRFPRIWVPTPAQRDLRQLLWHRHKLVSMRTMLGNQLHALAMSQGLCRKKKLFTKKGRVELVSLGLAPWASRRREELLKLLDQLEPPIAELDRAVLEEAKRHADAVRLMTHPGIGPVTALAFVLAIGPITRFRCSKKIASYLGLNPSEESSGGRRRLGAISKQGNTMVRWLLIETVHHAVRQDPELRQDYQRLKFRRGHAVVGGTRFHRTIHAASLGRNEGKRNDSFR

SEQ ID NO: 286026 - protein, 418 aa, unidentified
MEVLHSCCSGLDVHKKSITACVLWAEAKGKVRKEKRRFGTFTQDLLRLADWLKQSGVTHVAMESTGVYWKPVYNILEGQFEEVLVVNAQHIQAVPGRKTDQKDSEWIADLLRHGLLRGSFIPPRPTREMRDLTRYRVSMVEEVNRIANRIQKVLEDANIKLASVATDALGASGKVMLEAILAGEQDPEKLAEMSKGLLRNKIPELKLAMEGRVTEHHRFMLRALLEDLRHAESKIAAIEAEVDKRNRPFEEEVARLCTIPGVSRVTAWGLLAEVGLHMQQFPSAAHLASWAGLCPGNFESAGKRRSGRTRKGSHTLRRCLCQAGWAVSRQRNNYLAALYARIAARRGAKRAILAVAHALLVIAYHLLQRKTVYRELGPDHFDRINQRRITHRLVQRLQRLGHTVILQPATPPTGEVFS

SEQ ID NO: 286027 - protein, 411 aa, unidentified
MNNTLFVGIDISKRSNVATFMNCEGKVVGRLTFSNSGSGADRLVAKILSYYEKEDFEAIRIGLENTSVYSKNLVWFLYEHEALNEHKLSIIPLNALMVANYKKSFLDMDKDDITDSFAIADFIRIRPGLLPFKLDDRQEALKIMTRSRYNYEQALSRMKSQFLTRLFLSFSEMEAGKPFYSIFSKTSLSLLEEAFTLDELAEKPIPELVEFLQEKGGGKFQNPEEIAKVLKKAASSSYRVPAMVRESLNRTMASDMEIMRILENEIHNCDKNIEKLMKSVPAILVSIPGIGPVLAAGIMSEIGDISRFQKQESLGKMAGFKWKRNQSGKKESENKAAVLSGNKKLRYYLVEAANRVRIHDPVFEAYYRKKYAESKTHAHKRALILTARKLVRVIFYLLKENKLYKPDVGIS

SEQ ID NO: 286028 - protein, 407 aa, unidentified
MKHVIALDVSKGKSTIAIYDGYRQCEFEGELYHTRIDFKQLHLRIKEITALDGQAPEIVFEATGVYSKPVEKFLRDHGHTYCRMNPLEANLQMASMRRHKTDISDAHELAKTHIKLERETTYVQNDYYEQMRAITRYYDEIEEELILLRNRMHAILHISFPELERLITPSSALFLNFVQLYPHPALLLAHSKTIIKNRLKSNTRKKLSLERAEKIAIMLLEAAKNSYPAIEPTDIRCNQVRDYAQRIADLIEKKDQLVKQMVMMSEGRKEYTVLRSFPGIGDATACRLIGELGDIRRFKNAKQLNAYVGIDIMRYQSGNTQYRDRINKRGNKKLRKILFFMICTMLMAKGKPNHLVDYYYKLKTQPQRKPHKVAIVACINKFLKVTFQLLTHGILYDYESALPAQKS

SEQ ID NO: 286029 - protein, 362 aa, unidentified
MHDSITWVGMDVHAENIVVAAIRGDSENLQARWETPNTKKGLERLAERLGEFGEARCVYEAGPCGYELRRFLQSKGIRCDVVAPSLIPRKPGDRVKTDRKDAEKLARLHRMGELTSVHVPAPAQEALRDLVRSREDAKEDLMRRRHRLSKFLLRQGRQYEGNKWTQRHWSWIRSQAFEDRNSTMVLGEYIVAIEQELERIKRLEERIEEESRSPELASTVARLRTLRGVDTITAMTIVSEAIDINRFASPRELMAFIGVVPRERSSGGKELRGSITKTGNAHLRRVLIESAWHYQRMPWVTTKNIQIRRRGQPPEVVEIAKKAERRLHKKYARMIGRGKPKGVAAVAVARELTGFIWAIGRC

SEQ ID NO: 286030 - protein, 347 aa, unidentified
MDHYAGIDVSLECSSVCVVDASGKIVREGKVATEPEALIAWLGSLGFGLLRVGLEAGPFSQWLYAAMQKTGLAVELLETRHVRAAFEAMPVKTDRNDARGIAQLMRLGWFRPVHCKSLPAQEVRTLLTARKLVQSKLFDVEMSLRGILRGFGLKVGRTTPKRFAGRIRELVAGHATLEVVAVSLLAVHEVMRREFGSLEKRVRSMAREDARARLLMSAPGVGAIVALTYVSAVDNPRRFTSSKGIGAHFGLTPKRYQSGERDVTGRISKIGDASVRAALYEAAHVILTRPVRGSALKSWAAKLVKRAGMKKAKVALARKLAVILHRMWVDGREFIFTTPRNAAAAAA

SEQ ID NO: 286031 - protein, 347 aa, unidentified
MLIIGCDFHPGFQQVAIFDNRTGEIEEKRLQHRAEAEQFYRGLAGQEVLVGMEACGHYPWFEGLLQELGMELWFGDAAKVRASVVRKQKTDRRDAEHLLDLLRENRFPRIWVPSLEVRDVRQLLVHRHKQVQARTRTKNQLQAMALSHGVQKKRKLWTKAGRAELEQLPLLAYAAQRRKKLLEALDELDVEISELDRRVAEEARERPEAVRLMTHPGVGSVTALAMVLTLGPAERFGSGKQVGSYFGLIPSEESSGGKQRLGKISKQGSSFLRFLLVEAGQTAARYDPQLKRFYRRLAVRKNRSVAKVAVARKLATRLYLMLREQWTYAQLSQAVMQVSPSHSVAGE

SEQ ID NO: 286032 - protein, 309 aa, unidentified
MEKVYVGIDISKDDLNVAVHDSEKQWRYCNDHAGITKLCRMLVKLEPALVVFEATGGYEMPLYLSLDEAGLPAAPVNARQIRDFARSTGKLAKTDSLDARVIAHFGYAIQPTPHSLPDTQELKAVQARRIQLLEMITAETNRLRGAPKVLKARIEAHISWLRKELGDTDRELKNMIEKNPIWREKDSLLQSTPGVGPNLSATLIAQLPELGNLNRRQIAALVGVAPLNRDSGILHGRRMVWGGRANVRAMLYMSALVATRHNRVIRDFYLRLCSAGKRKKVALTACMHKLLTILNSLLKHHVPWSYSPC

SEQ ID NO: 286033 - protein, 414 aa, unidentified
MGLKIVYPICCGIDVHKTFVVACIASTDKGVTTYKRHRFSTYTKGLKELSQWLCEHNCKDVCMESTGKYWIPVFNVLEHSCNITLAHPKYVKAIRGKKTDKKDAKWIADLFKHDLVAGSFMPPLAIRQLRDLMRYRFKLTNFTSSEKNRFQNSLTVSNIQLGNVVSDTFGKSSMNIIGKLLEDPTDTTFDIEPLIHGSMDHKIPELKLAVEGFITPEQSGKLAVIKKHYDNLNARKSDLEELILSLAEPYTEEINLILTVPSFKNIFSAIAVVSEIGVDMDVFPTAKHLCSWAGLTPTNNESAGKKKSVRVSRAGVYIKPLLVQCATAVVKSDKHPEIRNRYLRIKKRRGHKRAIIAIARMLLTAIYHILKKKEPYNPDLYQKADVLPVSREITVEQALSLAKSQGFRIKETVT

SEQ ID NO: 286034 - protein, 422 aa, unidentified
MSDPNCWYVGVDWGSESHCVFLTDAQGRKVGEKTFRHSGDGLAEMAAWVLKTCAVEDSGQVLVAIEVPHGPVVETLIERGFAVHAINPKQMDRFRDRFSMSGAKDDSRDARVMASCLRTDPQSFRKLQAADPLLVELREWSRIAEELGVERNRLANRLRDQLWRYFPALLELDPDGGDEWLLDFLELAPTPAKAARLRQAKIADLLKRRRIRRFDAAMLIKTVSARPPQVAAGTVEAASAHVASILPRLRLINRQIKDAERRLGELTDALVAAERGEPETEPGQIKQHDAVILASLPGVGRTILATLLAEAWEPLQRRDYAALRSLAGVAPVTKKSGKTRIVSRRQACNERLANALYHWARVAMQHDPRSRAKYAELRKRGCTHGRALRTIADRNLNVACAMLRVGATFDPSIVGKNAQKTT

SEQ ID NO: 286035 - protein, 357 aa, unidentified
MGKSINNLSSVTTIGLDIAKNVFQVHAIDAKGAVVVARAVRRGGLLGFFSSLPRCLVAMEACSSAHHWGRALTELGFAVKLIPPAYVKPYVRRGKNDAADAAAICEASRRPNMRFVPVRSVENQAQLMRHRARELLAGNRTRMLNALRGHLAEIGVVAAQGAQHAYALKRLVADGFDDNGEVVVPDCVRQALAPLVHQIDALDAEIEAIDDEIKTLVKADETARRLMTIPGVGPITASAIVATVRETSAFSNGREFAAYLGLTPRQSSSGGKERLGRITKMGDRYLRKLLVVGACATLIHRKGHHDALRVWASSLLARKAVKHKFKLTAVALANKVARIVFALMTRGGDYNERPVAA

SEQ ID NO: 286036 - protein, 347 aa, unidentified
MRFYNRQHRHYCGIDLHVKTMYVCILDPAGQVLVHRNVKSTREAFLEIVAPYRDELVVAAECMFTWYWLADVCAAEGIAFVLGHALAMKAIHGGKAKNDKIDSPKIASLLRGGLLPQAYVYPAAMRSTRDLLRRRLHLVRKRGELLAHIQNTRAQYDLPAFERRLAYPANRDGVSAHFADPSVRKSVDVDVALIDQYDTLIVDLELTIVREAKRHDADAFHRLRSVPGIGKVLALTILYEIHDVTRFDRVQEFASYARLVKCVKTSGGKKLGTGGAKMGNVHLKWAFSEAAVLFLRHTKDGKKWLAAIEKKHGKGKALSILAHKIGRAVYYMLSRGTVFSMEKFLAA

SEQ ID NO: 286037 - protein, 347 aa, unidentified
MLAESLDVVVGVDTHRDSHELALLDARTGALLGRARVAADRGGYRQALRLAKRVGAGRAWAVEGTGAYGAGLTRFLQRQGERVLEVERPARRGRDGRLKDDGLDALRAGRALLAEQAAGEPRAQGVREGLRCLLVAREAAVAERRNGLNQLRALVLTAPEQLRGSLLGLGRGRLRKRCLALRPGAIVDAQLQATVLALKSCARRVELADGEAKTLERELRRRLHALCPWLLALPGVGPISAAQVLVSWSHPGRLRSEAAFARLAGAAPIPACSGQLVRYRLDRGGDRLLNRALHTIIVSRRKHDPETIAYIERRQAEGKSVREAIRCLKRYLARSLFRMLETTPMAA

SEQ ID NO: 286038 - protein, 391 aa, unidentified
MLICGIDIGKNHHEASVINQDGKLLAKSLRFANTTPGAESLLDYINRCNPEKDVVVIGMEATGHYWMSIYCYLFDTGFQVNVINPLQSDAIRNLFLRKTKNDAKDSFLIAETIRIGRYSKTEIADEDILSLRQLCRHRMDLVDYIADQKRKIIGVMDRVFPEYKDFFSDMFGRTSTELLSKAATPEELLAIPTDELCELLKTNSRGRFREAKVEELRKVAKTSFGITIGISAFTMQLRQLLEMIELLERQLDELELEIEQYLLKLNTPITSCPGVGNVLGAVILSEIGDISRFTEPKKLVAFAGIDPSVNQSGEFKGTKNKMSKRGSPHLRRAIWLAANVAAFHDPVLSAFYQKKRSEGKHHCTVIGAVARKLTFIIYAVLRDNKPYIPNC

SEQ ID NO: 286039 - protein, 343 aa, unidentified
MELNAIGIDLGKTLFHLVGVDVGGNVVVRKRCSRTQLLKYTANLRVQRIGMEACSGSHFLARALREQGHDARLIPAQYVKPYVKTNKSDYIDAEAIAEAVHRPTMRFVPIKTEEQLDLQAVHRVRERWVARRTAVINQIRGLLLERGWTLPKGRSHVDHALPDILADTASRLSGSFRALVAQLKLDLDQLSARIEELDAVIQHTAKENEACQRLTTIPGVGPVAATALIAAIGNGSGFRRGKDLAAWVGMVPREYSTGGKQKLLGISKQGNSYLRRLFVQGARVVMQYRTKQAPGLSAWLAQLMARTHQNVAIVALANKLLRMAWAVLCKNEMYRIPELATAP

SEQ ID NO: 286040 - protein, 335 aa, unidentified
MHYLYYVGLDVSKETFDASLVAFEDANEMAHRKFANSRKGICSCLHWVEKRHGIRLDDVIFCAEDMGSYISEMAVCASDRTLNFNFSLISPLVIKYSMGIARGKTDRVDARRIAEYAITHYRKIALYLPAEKELCQLRTWLILRAHLAKQRVAKLVLLEKLDYKEKFADVSIQRSMLQEEIAYAETHMKTIEREMKELIAADSNICRNYKLLTSIKGVGPITAIVMLCSTLNFTKITDHRKFACYCGLAPFEHSSGTSVRGGCHTSSMANRDIKEQLNRSALIAIRCDPQLKAYYERKVAEGKHKFSVLNAVRAKIAARCFAVVRRGTPYVALQI

SEQ ID NO: 286041 - protein, 392 aa, unidentified
MIYVGIDVAKDKHDCFITNSDGKVLFRPFTISNNRDGFETLFQKIQSVSDDLSKIKVGLEATGHYSYNLLGFLLDKGLPTYVINPLHTNLYRKSLSLRKTKTDKVDSRTIATMMMSDVNLKSYSDTSYHNEELKSLTRYRFDKVKERAKLKSSVSRLVCILFPELEKLVPTLHMASVYALLAEFPSAAAVANAHLTRLSNLLSESSKGRYGKNTAILFRDAARSSIGSHMPAKSLELKHTIKLIQELTAEIDEIEATIKQIMDEEIQSPILTIPGISYRMGAMIIAEIGDFCRFDSADKILAYAGMSPSTYQSGQLDNCYSHMEKRGSRYLRYALYNATKYVCHWDKSFGAYLEKKRSEGKHYNVALSHATKKLVRLIFAMEKSGRAYLPTT

SEQ ID NO: 286042 - protein, 332 aa, unidentified
MNMHPQGGVTQRDPRPHAGIDVSKQHLDVCCATHERRLTNDAPGWDELIALLKAAKVDLVVLEATGGYESALVCELQSAGFAVARVNPRQARDFAKSMGVLAKTDKVDARLLRDFADVLARHPKRAQYITPWVDEKRRDLAVLMTRRRQLIEMRVAESNRLALASARAAKSIKIVLKTLDAQIAAVDREADDSLERHFKEQRALLDSFKGVGAVSTLTLTAALPELGRLQRRQIAKLVGIAPLACDSGRHKGKRRIWGGRGEVRAVLYMATQAAIRHNPVIKLFHERLIAAGKLPKVAIVACMRKVLTILNAMLRDGAIWDAARHLQPSKFA

SEQ ID NO: 286043 - protein, 350 aa, unidentified
MKERNKPKPAHVFGIDIGKNIFHVVGVDASGQPIQKVRFRRETLLQFFEKAAPAVIGMESCPGSQWLARKLAVMGHEVRIMPAQFVKPYVKTNKNDLIDAEAIAEAVTRPTMRFVAIRNTGQVDLQALHRIRSQLVSSKTRLINQMRAFCLEYGIAMRQGAGVFKLDIHRVITDEGNELTSTMRRLLTDMNGDLQHIEMRIKAVTDEVDALAAKDDMARRLMTIPGIGTLGATALLSAMGNAARFRKARDLAAWLGLVPHQHSTGGRSNLLSISKRGNGYLRRLIIAGARSCYAHLDRSRDRLGSWMNALEARMHPNKAIVAVAAKIARIAWVIITKPGALYDRKDPRFA

SEQ ID NO: 286044 - protein, 422 aa, unidentified
MNINTDSKRRQVPDDYLVAGIDPHKKSHTMVLMTREEKVLTSLKFDNSKTGFEHAVKRVDDQISKSGSKGVVFAMEAGGHYWRNLAYFLNKRGMWFCLVNPFTAKRLREGKDINRAKSDMRDARVMAELVISNGVPQTNLPQGIYAELRAVYNAYQRLIKERSRIKSRMKSLLDQLFPEFCLVFSNVCSKTAMQVLGCCLAPTDIARMHEAQFIARIREGFTGRALKIHSLQELYQLGKTSIGAEAGARGLALELNLMTQQLLLLSEQIEKTKHILQGLLLSIPESRCILSIQGVGHIAAAGILAETGPLQAYRNSGQLIKLAGANPISWESAGKRHSITHMSKKGRPKLRSCLWIAAIALLRSNPDFKEWARVRRERELHMHPLKPRETVGAVANRLLRIVYALVKNGSMYCLPKANEALV

SEQ ID NO: 286045 - protein, 388 aa, unidentified
MNVGADKSEPLTAIHTDLGAIFVSLELSRSSWLITSLSPGGGEKMSKHSVPGGDFAGLMERFAQLQEKARLRTGQSFRIIVIQEAGLDGFWIHRALQNEGIESHVVDAASIATSRRRRRPKTDKIDGETLVRALLAYKRGEPRVCAMVKAPTPGEEDRRHLCRERKALTAERVRHVNRIKGLLFSQGISGYQPLRRDRRQRLEELQTGDGRAFPQHLKALVNRELDRLELLLKQIKTVEAARDALLAVGQTGKPAPAAMLLDIRGIGPEFAAILWSEGLFRHFENRRQIAAYAGLAPTPWQSGAVDREQGVSKAGNPRLRTTLIQLAWLWLRNQPRSALSVWFHERVSRNGGRLRKTTIVALARKLLVALWKYVTAGVVIEGVTMKVA

SEQ ID NO: 286046 - protein, 386 aa, unidentified
MNAVLPHVAAQTAIQTQLGAIFVSLELSRSIWLVTSLSPGGGEKMSKHSIRAGDLPALFERFSVLKEKAQARTSRDFPVIVIQEAGLDGFWIHRALVGDGIESWVVDPASIAISRRRRRAKTDKIDGEALVRALLAFKRGEPRVCAMVRAPTPEEEDRRRLCRERKTLVDERIKHVNRIKGVLYSQGICGYEPMRRDRRARLDELRTGDGRPLPQYLRAQISRELDRLELLLQQIRAVETERDALTVPQMPTPPEPVTMLLALRGIGAEFANVLYSEGLFRHFDNRRQVAAYSGLAPTPWKSGSIDREQGVSKAGNPRLRVTMIQLAWLWLRNQPESALSKWFRERTAVSTRRKTTIVALARKLLVALWKYVRAGVAIEGASMKAV

SEQ ID NO: 286047 - protein, 346 aa, unidentified
MTIVEMTRPVTGGVDTHADVHVAAAVDANGGVLGVETFATTPRGYAELADWLAGFGEVVRVGVEGTGAYGAGLARSLRARDLMVIEIDRPNRQARRRHGKSDTVDAIEAARAALSGRASGVAKTADGDVEAIRALLVARRSGRNVRVKYLNQIRHLIFTAPDELRERLRDVHRDRLARTAAALRPGATTDAATYATKLAIVTLARRVLALEADGKRLDRHLEQLVRRSAPSLLAVYGVGIHTAAILLVAAGDNPQRLKSEAAFAHLCGVAPIPASSGKTTRYRLNPGGNRQANHALWRIVFTRMSNDERTRTYVARRLAEGKTIREIMRALKRYIARELYLHLVTR

SEQ ID NO: 286048 - protein, 329 aa, unidentified
MNYIGIDISKDSFVAAYSHEKGSKTQTYKNTPEGVRKFIKTIDREQHHCVMEATGNYCFLLLYMLIEQGYKASLINPKQIKYFAKTTLSVTKTDAQDAILLSLYGKSFEPPIYKMPSESIIFLKQKRTVIRQLKKQRVASENLKKSIDVLPYKDKKTLKILTKTITFLNNQINNIEKEFFDVATTEFNKQISLLTSIKGIGMAVATSLIIATGGFSFFDNPKQISRYIGICPTYQHSGTSVNIKGAINRNGDTALRSTMFLAAITAIRCNSACKEFYTNLRAKGKPAKLAIIAVANKLIRQAFAIIKSETPYKDGFVSKVPNQHQLGCA

SEQ ID NO: 286049 - protein, 321 aa, unidentified
MKPVAPPSSYRLFVGADIAYRDFTAALLQPGEQAQSEPRAFAQTSEGFEQLQQRLTSSGLEPAAILIVMEATSSYWMALATTLHQAGFAVSVINPAQAHHFAKAQLKRAKNDALDAQTLAELGQALVPERWTPPPHIFYELQQRLAQRTRFLELRTQVSNQLHALSAAPVIVAAVRQRNVELIASINQHIAQLDTELLALVKVEQKSGTEAPIEEEKEPADALEKRWKAAIALLLTIPGIGLLTACWLVVATLNFTLCETAEAAVHYVGLAPMLRLSGTSVRGQAHIGHSGHARARTQLYIATLERRSRNGKDEIDRRSWG

SEQ ID NO: 286050 - protein, 412 aa, unidentified
MAAVMIGVDPHKGSHTAVAIGADEVPVGLVRVRACAAQAERLLTWAKSWPERIWAVEGAAGLGHLLAQQLVAAGERVLDVQPKLAARVRLLATGAVNKNDPGDARSVAVAALRSAACLPVRPDDHAAVLKIWAKRHRDLSRARTQVACRLHAVLCELVPGGLSKEICAAQAAAILDQAEPGGAVRQARLELAAEFTADLRRIDVQLRETRKKLAVAVRASGSTVTEVFGVGPFIAATMIGDVRDVSRFASRDRFAACDGTAPIEVSSGNRKVHRLSLRGNRRLNHAIHMAAITQIRYRHSDGRACYDKKIAEGKTPKEALRALKRQISDAIYQHLKADAARAAAAGAQGPGGQPGNDSVASAASSHPERQLFGQATPGPVTTLRHPADQQERASSHARKRPHEPLDTKTSCH

SEQ ID NO: 286051 - protein, 408 aa, unidentified
MEVLHPHCAGLDVHKDTVVACVRHVTDGEVTREVRTFKTMTTDLLALSEWLAEQGCTHVVMEATGVYWKPVWHILSDGDFVLTLANAAHVKNVPGRKTDINDATWLADLLAHGLIRGSFVPDAATQEQRGLLRTRKQLSRERASHVQRLQRVLEEANIKLDSVISDVVGQSGRAMIGALIAGQTDPAKLAALAHRSIKSPPETLREALRGRVTKHHRFLLALHLKQVDLLDEAMAAIRTEIDAHVASFRAAIEQLKSIPGISDLSACVILAEIGQDMSRFATHAHLLSWAGLCPKNDESAGKRRSNRMRKGAPWLKTTLVQCAWAATRKKGSYLQAQFSRLRARRGAKKAIGAVAASILTAAYHMLKDGTFYKDLGPDHFDRRSKASATKRLVAKLASLGYQVTLEPA

SEQ ID NO: 286052 - protein, 348 aa, unidentified
MKILALDLGKYKTVACEYEAESGQHRFHTILTTAAALQGLVAQVQPDQVVLEICNIAGWICDLLRDQGLLVTVANTSDDAWRWRKVRRKNDRCDALKLARLAALQQLQEVYIPAQTMRQWRALIAFRQQLVRRRTKVKNHIRDLLVSEGQLLPRGGKCWTQLGRAHLEALAQPLAAASATELWRGQLDTELRQLQGLQEELEKVEEKLQALAHEDARVALLRTVPGVGPRLAEAIVALVDQPERFHDARQVSAYIGMVPKELDSGETRRRGPITKQGSRLVRSLLVEVAWAGLRYNSWARATYERISGGKKARRKIAIVAVGRRLLVRCWAMLRDGSRWQAPTLANSA

SEQ ID NO: 286053 - protein, 291 aa, unidentified
MSPNSCPRPARIVCKVGPRGKLGSLRRRNGRGGIVDVDVAKEQLQVAVAPGGGSWSMAYTDEVVAELARKLQADRPKLVLMEATGGLELPLAAALQSAGLAVAIVNPRQVRDFARATRRLSKNDRIDAEVLAVFAATLRPTARPVPDEQQQALDALLLRRRQLIEMRTMERNRLSICRDARSQTDLQQHIAWLDERLSELDDELGNQIRRSPLWRVQDELVQSVPGVGPVTSAALVAELPELGKLSRKQIAALAGVAPLCHDSGTLKGKRSCWGGHGALRAVHGDAECDAL

SEQ ID NO: 286054 - protein, 345 aa, unidentified
MPIVGGLDIHRRQITFDYLDTVTGQVCRGQIAPADREHLRVWLARFAGRDDVAFAVEGCAGWRYVAEELAAAGITAHLAEPADTAARRGRKRHAKTDKTDARHLRMLLAEGRLPECWIPPAHVLECRALLELYNDLRREHTAWVQRIHAVLFHQGAPVLGEGALRTDKGVAELRAAAAAHLSAAGQLQVATALEVIDGLEDRLHLVRHQLLDAARHLAGAKALAARLYGVGPITALAITCWLAGAGRFSSSRQAVRFAGLDITVSSSDRKGPPGKLSRQGPPVLRWAVYEAGKTHARTSAPDHRYYAAVKDRKNSKRACLSEARKILRQAHHILAELGDDALAAA

SEQ ID NO: 286055 - protein, 420 aa, unidentified
MDIVLERCAAVDVGKAEVVACVRTPGVAGARLKRTRSYPAFVEDLEAMAEWFAGEGVTAVVMEATGSYWKPVWYVLEERGFQLELVNARHVKFLPGRKSDVLDAEWLAELFEHGLLRGSFVPSATIVELRDLTRYRKRLVQAKTSEGQRIEKMLEDAGIKLDVVASDILGVSGRLMLTALIAGERDPEVLAELARGRLRAKIPELRRALRGRFGEHHARLIGLSFNHIEFLEASIAELEAQIDRIIADRVSDGGVPFGMARDRLRTIPGVGQRAAECLLAEIGPDMTRFPTAGHLAKWAGVVPGTNITGGKRRSAKTIAGNRWLREMLIECAWAASHSRDTYLGAQFWRLSRRIGKKKAAVAVAHSILVASWHILTNNCDYNDLGADYFTRHDDPARRRDHHIRQLQDLGYAVTLRPAAA

SEQ ID NO: 286056 - protein, 343 aa, unidentified
MQAITTIGLDIAKSVFQVHGVDAEGNVILRRQLKRRYVLAFFQKLPPCLVGIEACASSHHWSRELQTLGHTVRLMPPAYVKPYVKRHKNDAIDAEAICEAVTRPNMRFVATKTREQQSCLTLHRTRHLCIRQQTSVINAIRAHMAEFGIVAPVGRNGVEELLTVAADASDKRLPDVARACIVALGAQLRTLKAQILQFDRLILAWHRSNEASRRLDDIPGVGPVLATALVATVADPIAFRSGRNFSAWIGIVPRQHSSGGKDRLGSISKRGDRYLRGLFVAGALAVIRYAKIHGTKHRPWLTALLARRPTKVAAIALANKIARMAWAMMAKGECYKEPVALAA

SEQ ID NO: 286057 - protein, 306 aa, unidentified
MSRSFGSERLFPMKKPAQHLIAEVPRRQSRVEMTIGIDLGDVWSHYCTLNEEGEVVDRGRFRTSPKGVEKWFTDVAPARVAMEAGPHSIWISEQLQELGHQVIVANVRELRAISHSDRKSDQVDAVKLARFARLDPQILRPIAHRTVQQQEALTLIRARDLIVRLRTAAVNAVRGLTKSCGYRMPASSTRCFAKRSLAVMPPGLAQALGPVLEQIAAMTIKIKQYDRQIQQLGQTEYPETQALLKVYGVGHITALTYVLTLGSKQRFVRSRDVGCYLGLRPRRSQSAIEILSLASQKPGTCISEAY

SEQ ID NO: 286058 - protein, 343 aa, unidentified
MGEVSTIGLDIAKSVFQVHGVDVDGAVMIRKRISRAKVLEFFAALTPCLVGIEACPTAHYWSRELQALGHTVRLMPPSYVKAYLKRSKNDANDAAAICEAVTRPSMRFVPTKSEQQQSALMLHRSRQLLVRQRTMLSNAIRGHMAELGVISAKGRNGTAELLEIIAKDEDDRIPGVARLSLTVLARQYAAIMTEIGTIEKHIHALHRSCEESRRLAEIPGVGPIVATALIAEVGDWTAFSSGRSLAAWIGLVPRQHSTGGKDRLGRISKQGNRHLRWLLVAGAMAVIRYARQHGTKRLWLVRLMGRRPVKVAAVALANKIARMAWAMMVRGERFNEPKLLSAA

SEQ ID NO: 286059 - protein, 390 aa, unidentified
MSLDHRFAEPTAIRADSGAIFVSLELSRSTWLVTSLSPGGGAKMSKHVVSGGDLAGLLACFSELQRKAAARMARSFSIIVVQEAGLDGFWIHRVLEAEGIESHVVDAASIAVPRRRRRAKTDRIDGETLVRTLIAYKRGEPRVCSMVVAPSPAEEDRRRLCREYKELVAERVRHVNRIKGLLFTQGIRDYEPLKRDRRACLDRLRTGDGRPLLMHLKAQLIRGLDRLELLLDQIKTVEAERKAVLITASDPHQVAAAPMLLMALKGIGPDFAGVLWTEGLSRHFANRRQLAAYAGLAATPWQSGSVAHEQGISKAGNPRLRTTMIQLAWLWLRHQPQSALALWFHAHVGQDCRPGARKRGIVALARKLLVVLWKYVTAGEVPEKAVMKVA

SEQ ID NO: 286060 - protein, 461 aa, unidentified
MLGAIKPEFELDPGFLEHLRLSPRAIIGPGARFLEFLYTGPHADDAAQEEGMELLHRRCCGLDVHKETVVACLRLVSNGKVTTEVRTFQTTTAALLRLSGWLAANNCAHVAMEATGVYWKPVWHILDDGEFELMLANAAHVKNVPGRKTDVNDAMWLAELLAHGLIRASFVPDTQTQEMRNLLRTRKQLVREQSSHVLRVQKTLEDANIKLDSVLTDLMGKSGRAMIEALIAGETNPAKLASLADRRVKASPEEFREALRGRATKHHRFLLRLHLNQINALDAAMATLDAQVEANLGPFRTAVEQLMSIPGIKNLGAQVIVSEIGIDMSRFPSDAHLISWACICPRNDESAGKRRSNRARKGATWLKTTLVQCAWAAVKKKGSYLQAQFHRIKSRRGPKKAIIAVAASILTAIYHMLKDGTIYKDLGYNHFDRRSSDQQKKRLIKRLADLGYAVEIRPLAA

SEQ ID NO: 286061 - protein, 321 aa, unidentified
MEYIGIDVHQGESQISILTEQGEILERRIRTQRERFAELLGCRPRARILIEASTGSEWVGRCFEDLGHEVVVADPNYAPMYATRSRRVKTDRRDAQALMDACRLGAYRPAHRTCDAQRQVRAGLAVRDALVRTRSRFISLIRALLRRDGLRMPSGMARNFPRRLALLTVPDEVSAEIAPLLAVMESLNQQIDAADARLAQHAAADPVVRRLETVPNIGPVTALSFVATLDQVERFRGPHPAAAYLGLVPGERSSGEQQRRGPITQRGSGRTRWLLVEAAWGMVRHAHPDTAELRAWAARIAVRRGRRIAAVALARRLAGIL

SEQ ID NO: 286062 - protein, 393 aa, unidentified
MICVGIDVAKDKHDCFILSSEGEVLADVFTIQNNAEGFDTLLQTIRRCVCPGDKIKVGLEATGHYSYNILGFLLDKGLDTYVINPLHTNLYRKSLSLRKTKTDRVDARTIAAMLMSDVDLKSYTDTAYHNEELKSLTRYRFDKVRERAKLKQSVSRLVTILFPELEKLVPSLHRASVYALLSEFPGAKQVAGAHLTHLKAVLYDASKGRYGRDMATTLREAARCSVGSVMPTKSLELQHTIRLIRELDAEIEDIEAAIQSMMDEMQSPITTIPGIGVRMGAMILAEIGDFSRFDSPDKILAYAGMSPSTYQSGQLSLSGAYSHMEKRGSRYLRYALYNATKYVCLWDPVFATYLAKKRTEGKHYNVALSHAAKKLVRLIYAMEKSRQSYRNAA

SEQ ID NO: 286063 - protein, 430 aa, unidentified
MSESKEPVLTYAACVGLDWGSQTHSWALQETGKDKIETGELTHTPEALEQWARSLEQRFGGRPVAVALEQTRGAVVYALSQYAHLVLYPVNCTAVWGYRKVFRPSGATDDAYDAKVILELVRDKREHLRVLRPDTPETRTLQFLVERRRCWVDERTAFSNRLTDALRQSFPQILDWFDSVQMPMVCDLLERWPTLLQLKAEPVIHVEKFLRSHGSPAHLVQRRLELLANARPATHDEAVLAMAKIDIPQQAEMIRHLNTTILQLNKEIADRAEKHPDFAIFDSMPGAGDALVPRLIVAFGTDRQRYTSAEQLQSFSGIAPVTEQSGKQHIVHWRWACPKFLRQTFHEWAEKSVQYSAWAHAYYDHQRQAGKTHPAAIRALAFKWIRIAYRCWVKKETYDEALYLKRITERHRPVAKNFQWKNCAGFSKAG

SEQ ID NO: 286064 - protein, 358 aa, unidentified
MQTKSNTICFNGQNVYVGIDVHLKSWKVTIMLEDLVHKTFSQDPNSEILYKYLKKNFPGANYYSAYEAGFCGFGVHRELTQFGISNKVVNPADVPTTDKDKKQKEDKRDSRKIARSLRNDEFKGIYVPGKAMEELRGLVRYRKTQVKEIGRSKNRIKSFLHFNGIEIPIEMDTASKHWSGKFTQWLKTIKMSTPYGDMVIKETLDTAEHQREKLLKCNQILRGINKNSEYSQKLKLLQSISGIGLVTAITILTEVEDIMRFKNLDQLCSFVGLMPTTHSSGEKNKAGKITPRSNRFLRSNLVESAWIASRSDPSLAYSFNELCRRMQPHEAIIRIAKKLLNRIRYVMKNETEYVLSVI

SEQ ID NO: 286065 - protein, 426 aa, unidentified
MNFNTNEKINQVTENTLVIGIDIAKKKHFACAVDERGRVLQKSFPFTQTHDGFEWLYERLLALREAHQKTEILVGFEPTGHYWMNLAVYLSQRGIPYVMVNPMHVNRTKELDDNLQTKNDQKDALVIARLMRDGRFSHPRILEGIEAELRVGASFRSVLQEEINAIHNRIIRWIDLYFPEFTQVFKDFGKMAYAALEKTPLPSDIKNRTPEELLFLYREVEGMKSPQLPKAKQLVAVAQHSIGLTEGEKMARFEIASLISKLKLLLADLDALTVQLEELAKQMTDYEYLASVPGIGDATIVELLSEVGTFTQYEHPRQLIKLAGLTLRENSSGQHKGQKRISKRGRRKLRAVLFRVMMPLIRHNPAFKALHQYYTNRAHNPLRKKQSIVVLCGKLLKILHALCHKKIMFNEDAMMKDLYCLQDAVA

SEQ ID NO: 286066 - protein, 291 aa, unidentified
MKYVGVDLHKKSISICVVVLEGRKWKGLARKRFACQDVEGIFRFFRELGTFQVVVEATASYEWFAGLVERLADRVVLAHPKKLRIIAESKYKTDKIDAWVLAEFLALDMIPEAYRPTPRQREHRALVRYRYYVQKRTVSVRNKMRHILANYNADVKELFTAQGLAYLGEQKVSAADRFVLNHLLQEWREHRRRLAEAEKQLETFAKETPLAEQESRQVLATFPLAGPVTIDIVLSEVGDVKRIRSLSRAGSFAGLAPGFRESAGRRKEQGITKEGPRHGSGLPIGRRNHGS

SEQ ID NO: 286067 - protein, 373 aa, unidentified
MSDYSAFVGLDVHKDTIAVAVADAGRTGEVRFWGEIANTPDAVASMLRKLGGRHPLMHFVYEAGPCGYGLHRQIMATQHHCEVVSPAQTPRKPGDRIKTDRRDAIILARLSRAGELTSVWVPDTIHEAMRDLIRLRQAMVKDLRAARQRTKSFLLRHGRVFKGTSWKRSHRIWLGNQSFAHPAQQIAFQSYLNAVDQAQARRDEVDVQLHHFTADWSMAPVVEALQALRGVAFITAVTVVCEVGDIRRFAKPRQLMAFLGLVPGERSSGETRRQGGITKAGNVLARAVLIEAAWSYRTPAKIGAQMMLRQEGTPQAAKDIGWKAQVRLCGRYRRLMARGKKSALAVTAVARELVGFIWAIAHIAEPTGAEGVA

SEQ ID NO: 286068 - protein, 349 aa, unidentified
MRFYTQRHQFYCGIDLHTRSMYVCIMNHEGAILVHRNMPADPDDLLKVTEAYRSDLVLAVECIFTWYWIADLCHQIGVKFVLGHALYMKAIHGGKVKNDKIDSQKIAALLRGGMLPMAYVYPQAMRSTRDLLRRRLYLARQKAELQTHIQNTNTQYNFAAFEKRIDRASNRIGIETRFTDPAVRTSIEVDVALMDALHQQILAIERQINSQVPEHDPVAVHLLRSIPGVGKTLALVILYEIHDIRRFPKVGNFISYARLVKCPHESAGKRVKGKNSKIGNVHLKWAFSEAACLFLRRNPRAKTYHQRLVSRYGKAKSLSIIAQKLGRTVYAMLKRRTPFDARRFFETVG

SEQ ID NO: 286069 - protein, 338 aa, unidentified
MKLYGGIDLHSNNSVVALLDEQDQVVYRKRLPNDAAVILEALAPYQAGIEGLVVESTYNWYWLVDALMEADYRVHLANTAAIVQYDGLKYSDDDSDAQWLATLLRLGMLPEGYVYPKGERAVRDLLRRRSRLVQQHTANLLAVQNLFARNRGQALSANAVKRLMPERVSELLPDPNQALAVQTTLLAMRALEGSIELLEGHVRKQVKLRPAYRHLLSVSGIGNVLGLTIMLETGEIGRFAHVGNYASYCRCVGSERLSNGKRKGRGNTKNGNKYLAWAYVEAANFAVRYNDTIKRYYQRKRAKTNGVVAIKTVAHKLARACYYILRDGTDFEVSRAFA

SEQ ID NO: 286070 - protein, 392 aa, unidentified
MYYIGIDIAKNKHEVSIIDSSGKLLSESISFSNTIKGFEKLIKYLSSYNVYSYNCIVGMEATGHYWLSIYSYLVEYEFNTFVINPIQSEAFRKMYIRKTKTDSKDSFVIAQVMRFGEFSSSPLLDERMFELKNLTRYRFSLVDESSDWKRKLITLLDQVFPEYDKLFSDIFGVTSKNLLSKYPLPEDILSISTETLAELLAKCSNGRFGFAKAEEIQNSALNTFGVKFAKRSFSFQIKQIIDQISFLEEQLKFLEKEIEYLLNDINPIITTITGIGSVLGASIIAEIGDISRFEKASQLVAYAGLDVSVKQSGEFNAINSAKLSKRGSPYLRRAIWLASTVAAFKDPALSVYYTNLRNRGKAHGTAMGAVARKLTNIIFAVLRDNKPYVPNI

SEQ ID NO: 286071 - protein, 274 aa, unidentified
MNDAKYIGMDVHTATISAAVRDSSGNLVMEATLETKSETILEFVHGLRGSLRVSFEEGTFASWLHDLLKPHVTEVLVCDPRKNALLRVGNKNDREDARKLSELLFLNKLHAVYHGETGIRTLKELARSYLTLTRDLTRVMNRLKAIYRGWGIACAGQQVYAPGFRAEWLAKITEAGVRRRAEIYYQQFDILVALRQEVRRELLAESRKHPAMSLLRQIPSIGPIRAALLIALMQTPHRFRTKRQLWAYCGLALRTYDSGEYRFVGGQLKRLRKR

SEQ ID NO: 286072 - protein, 455 aa, unidentified
MPGKRTRGRSSGRLSTIHPDAAGIDIGSTFHVVAVPGDRDGQPVRTFRTFSRDLHALADWLTAVGITTVAMESTGVYWIPVFEILETRGFEVRLVNARDVKHVPGRKSDVNDAQWLQQLHQHGLLRGSFRPRDNVVRLRAYLRHRERLVDYAAAHIQHMQKALMQMNVQLHHVVTDITGLTGMRIIRAIVAGNHAPEQLAEFRDRRCHASEATIREALIGNYRPEHVFALRQALELYDFHQAKVAECDVEIEAVLGELNAPRVTPEAPLPAVRHAKGQNEPAFDVRAALYTLLGADLSQIHGFGPYTVLRLVAECGDDMTKWPTAKHFTSWLSLAPGNKISGGRLLSSKTRRSSNRATALLRIAAVNIGKTQTALGAFYRRLAARTGKAKAVTATARKLAILFYNALRFGMRYVDPGVSAYEERYRQRVIHNLQRRAKSLGFALVAASPSTEGVS

SEQ ID NO: 286073 - protein, 333 aa, unidentified
MTKPVQTLGIDVSKAKLNYCLLGAGGEIKQEGIVTNDHNGVEDLDRMVKEHEQPKSVRVVIESTGDYHLLATMAFSEMGYVVHLINPLITKQYLKANIRKCKTDKVDARLLARIGTMDGDTFPVYHASTEEVRMKKKVSLVHQLTKTKQQMKAALYQAQKTLAILGETSSSGMEVTANAVKELEKGIKELEKEIVEARRKDPMVKQLAEIPGISEQSAALVMTEIAGKNFDTKEKLTAFAGLDVSVRQSGSSLHGKGRLSKRGSPSLRRTLFLIAWGLKQHNEEFKKLYDYYRGKHKHYTAVLNILARKFLHVLFGMMKNQTPFNPDLIVLPS

SEQ ID NO: 286074 - protein, 371 aa, unidentified
MSKASTFVGLDVHKNSIVVALLRPGQSTPLEWKVVNEPGAVHRLIRKLERESEGGLQCCYEAGPTGYVLKRQLDRAGIACAVIAPSLTPVKPGCPIKTDRRDARKLAELLRAGLLTEVAPPTEEEEAVRDLTRSRDDAQRDLTRARNRLSKFLLRRGCVYAVDRKPTWSQKYRSWLRALTFERTADQVIFEDYLLAVEQVEGRLEALTDRIEQFAEQEPWRERVQALRCFHGINTVTALALVAEIHDPRRFSHPRRLMSYLGLVPRESSTGMRERRGGITGAGNRHVRRLLVEASWHYRHKPVIGRALRLRRCEQDPKAIALADRALRRLTLRQRRMLYQGKHPNLVNIAIARELVGFVWNVLHTRATAQA

SEQ ID NO: 286075 - protein, 351 aa, unidentified
MIIVGVDYHPSVQQVAFLDTETGETGERRLNHSDGEAERFYRDLQRRQVKVRVGIEATGHARWFERLLAELKFELWIGDPARIKAARVRKQKTDRQDAQLLLRLLIEGRFPQIWVPSPENRDLRQLIWHRHRLVQMRTRAMNQIQAAAMNEGVRRKKTLWSKTGRRQLEALPLAPWATRRRQDLLELVDRLNTTIDELTAAAEQEARKRPEVLRLMTHPGVGPITALVFVLVLGSPDRFGCGHQIGSYLGLIPCEDSSADRQRLGHITKQGSSLLRFLLVEAAQAAVRWDPDWRRRFVHLAMRRDRRIAKVAMARKLAVSLYWMWRKGFDYPQTLQFGSHAGEPGYVHGVK

SEQ ID NO: 286076 - protein, 386 aa, unidentified
MAQTPKTTLAVSYAHPADKLWTLEEFRAFVGVDLHKSTVTLVAVDPQQNVISKLTVSTKCVEKIETFLRDLPGPVWMAVEAVGFIEWFIDRFGPAVDLISIADATELAARRGKRRKTDFNDAKDIAERLARGECPLGWIADPKTAGLRKLGRHWHQLSRTLTRVKHTMRSILHAANLPGPVKLDGDLTQRWLLGFGHLLKDESRKAFENFLDLILLLERQRESLRLQITFANRTEKFKTITELFKSTPGINEIWGCIIVAEIGDFGRFPNADTIEFWAGLTPDNELSAGKAREGKITKAGSATLRWALGKAAIVLCRSDRTQEKNRQRILKSTGKKAKANVAMARRLLRILFAMARDQKPYTLGEPSNHQARANQVRLKKQPRKIA

SEQ ID NO: 286077 - protein, 343 aa, unidentified
MKKFVGVDLHKKLIVICVVDQDRRVLTTQRFLNIETERMAAWLKSLGEFELVLEATASYEWFVKLAEPLVQRIVLAHPGKLRIIAESTRKSDKVDARVLAEFLALDMIPPAYRPTPRQRAHRKLMRRRYYVRSRMTSIKNRLRHLAAEYNADRDDLFTVEGLRYLRKLPLEPVDRFLVQRLLRELKLYREELKTTNRQIAAFAGKAPPAEAQQRKLLESIPAVGPVTRETFLAEVAGPERFNSAKKLTSYVGLAPGQRESAGKRKDLGITHAGSPILRWALHQAAWQLVRRSPRWKETFEKIAARRGKKKAITAIARRLLCLMLAVIRSGKPYEEKAPQAKAA

SEQ ID NO: 286078 - protein, 361 aa, unidentified
MKTGQRNKLDFTGQNIYVGIDVHLKSWSVAVLSEHTVLKKFRQNPDAAALHRFLSASYPSAIYHSVYEAGFCGFWIHEKLVGLGIHNIVVNPADVPTMSKEKLRKTDAVDCGKLARELRSGTLNGIYVPRVETLEIRSLIRLRNSIVKDSTREKNRIKSLLHFHGIEIPEEFTRYSIGNWSKRFLGWLRALELSTQYGKKALELHIEQFVRLRGMLLQETRAIRNLSRTGSFVEPLKLITSVPGIGITTGISLLTEIDDIDRFNGSEQLAAYIGLIPMCHSSGEKEGVGDITIRKHAMLRCHLIEAAWIAIRKDPAMTMAYEEYRKRMNAQKAIVKIARKLVNRIYFVLKRKQEYVPSIVK

SEQ ID NO: 286079 - protein, 439 aa, unidentified
MKRRRDRVCGADVHKDLIVATITGDDVPTIRENFGTTKAELKRFRNWLVANKCEQVAFEATGVYWMPIYDALSKTIDTIVANPLQIKTIPNDKSDSKDSNRIATLCLNGQIKRSRVFTDEDRDLRMMTRARSGYVKTRTQFRNRIHKYLSSSGVKLSSTMDDIFCKSGRYILDGLAKEKPLEEILKGIPSGKIRKKQDLIRSALENGLNDTNRMLLIDALEILDNLESKMEKLSLEVLKKVQQKSKDLAIVMSIPGIGFTSASVILSEIGNYRDFKTPEQLAKWCGLNPGENESAGKKKKCGITKRGSKHIRVILVQAAQTISNMNKTALSRFFQRLIKKKERNVAIIAVARKLICLIYHLLINQELYQEGECRKRGSSQEKSCQAPSFKEEHLTDWVAAIVDAFYHLKEGSRKNALMREIADISGVKVGRKRPSKGGG

SEQ ID NO: 286080 - protein, 402 aa, unidentified
MNAVGIDVSKGKSMVAIMRPFGEIVSTPFEIKHTSSDINSLVKLIKSIEGESRIVMEHTGRYYEVLAHQLSEANLFVSAINPKLIKDFDNDSLRKVKTDKADSVKIARYALDKWQNLKQYSVMDELRNQLKTMNRQFGFYMKHKTAMKNNLIGILDQTYPGVNTYFDSPARSDGSQKWVDFASTYWHVDCVRKMSLNSFIDHYQNWCKRKKYNFSQSKAEEIYGKAKELVPVLSKDAITKLIIKQAVDQLNSASTTVESLRTLMNETASKLPEYPVVMAMKGVGTSLGPQLMAEIGDVSRFTHKGAITAFAGVDPGVNESGSYEQKSVPTSKRGSSDLRKTLFQVMDVLIKTHPQDDPVYQFLDKKRAQKKPYYVYMTAGANKFLRIYYGRVKEYLASLPES

SEQ ID NO: 286081 - protein, 411 aa, unidentified
MTTYVGIDIGSRFHKVAIIAQEMMKRGDSEWKKTPTFKVLNRRADFDSLVEGIVAASGPQEEEAVVGLESSGYYYSRPIAEFLGKRFTLLFVDGAAVKDARERFFSITYKDDDVDARCIARLLFLRDSLGEPLGVSPVALDLADRSQAIRVLSRQRRAMRKMITATTNRLQRIYSGVFPEAAEHHWPAILRVADSFPIPAEIAAAQPEQLKGIRSRRRRESLIALAKDTIGADATRYRRLILFLARQLKQQRELLEEIEEELRGELSTHPQARILLTIPGIGPWTAAEIIGLVGDIRRYPTKKKFRKMLGVYPVSEQSGVSLKRSRMGRGGARSGRGSLYIAVVGLLAPNRRPNFIAHYVDRRRSEGMGGKAAVIAAMGKLAETMWSCVYHNQPFDAERVKTPRPRAICGG

SEQ ID NO: 286082 - protein, 350 aa, unidentified
MMIIGCDYHPAFQQIAFVDTDTGELQERRLQHREEAENFYRDLAAQGMKVRVGMEASGQARWFERLLAELQFELWIGDAAEIRTKRVRKQKTDRQDAQLILKLMLKDDFPRIWVPSWENRDLRQLLWHRHRMVQARTRIMNQLQAVALNEGLRCKKRLWREAGREQLEAVRLAPWASRRRRDRLELMDRLNPTITDLTQTIEQEVEKCPEARRLMTHPGVGSLTALAFVLIIGTAEQFQCGKQIASYLGLVPLEESSGNRRRLGHITKQGNSLLRFLLVEAAQVSARSIPEWRAKYFHLAMRRGRKIAKVAIARRLAVQLFWMLRKGWDYEQVRKFGSHAGQPGNRDGVP

SEQ ID NO: 286083 - protein, 348 aa, unidentified
MNHYAGTDVSLEYSSVCVVDASGKIVREGKVASEPEALIAWLGSLGFEITRIGLEAGPTSQWLYAAMREAGLAVELLETRHVHDAFKAMPVKTDRKDARGIAQLMRLGWFRPVHCKSMEAQETRAMLTARKLVQSKLHDIEMSLRGILRGFGLKVGPTTTKRFEGRIQELVSGHPSLQVIADALLAVHAVLLREFNGFEKRVRIMARSDRQAKLLMSTPAVGPIVALTYASAIDDPARFKSSKTTGAYFGLTPKKYQSGETDYSGRISKIGDAAVREALYQAAHVMLTKPLKGCSELKSWAMRIAKRAGMNKAKVALARKLAVIMHRMLADAKPFNPTARTKPVAAAA

SEQ ID NO: 286084 - protein, 338 aa, unidentified
MEQITTIGLDLAKNVFQVHGVDVAGKVLVRKQLRRAEALRFFAALPPCLVGMEACGSAHHWARELTKLGHTVRLMPPAYVKPYVKRGKTDAADAAAIAEAVTRPTMRFVAVKTVDQQSVLMLHKVRELLVRQRTMLINALRGHLAEFGIVAARGPGGVTAVITALHEAQDGLPDLARQVLHGLIDQMRVVGAEITKAEKRIMAWHRASEASQRLATIPGIGPITASAIAAAVPDATLFRSGRQFAAWLGLTPRAHSSGGKQRLGGISKQGDGHIRRLLVIGATAVIRFARQDNASKTWAARLLERKSARLVSVALANKTARIAWAVLARNQSYTATAI

SEQ ID NO: 286085 - protein, 339 aa, unidentified
MELYCAIDLHSNNSHVAIIDDQHKRVFCRKLANDPKLIENAFAPYRDRIRGIVIESTFNWYWLADLLMEKGYPVHLANPCGIQKYSGLKHADDKHDAFWLAQMLALKILPEGYIYPKQERPLRDLLRKRSHLVRIRTSLILSLQNIVMRNHGIKIRSNDLKKLTQDPVAELLKDQQELALAGSASKETIDFLTRQIQRIEAAVRRKALSKEPFSKLLTLPGVGDILAMTILLETGPIDRFKAVGHYVSYCRKVSSRWTSNEKKKGKGNTKNGNRYLSWAFSEAADHARQTHEPSRNFYNRKLNQTNASVAHNALAHKLARAGYYIIRDHVEFQEGKMFR

SEQ ID NO: 286086 - protein, 310 aa, unidentified
MVVAMLSPGLEPEQSTGLKPNPQGWATPGTCHRDTETQSKMTPLCFVGIDVSKANLDVASRPEGEDFRLPNTADGISALVTRLRPMAPALILLEATGGLEQDAAVALTAAGMKVRIVEPGRVRHFARSIGQHSKTDAIDAQVLAHYAEAVRPEARDLPDQQTRDLQGLLDRRRQLIDMRTSEQNRLKQKPNATVKVDLEAHIAYLTDQVKRIDRAIGELIETKADWKLRDELLRSVPGVGTQTSRTLLGMMPELGSLTGRRITALAGLAPRARDSGTVRGARTIFGGRAEVVLVQREMEKQGLGDKVVNI

SEQ ID NO: 286087 - protein, 347 aa, unidentified
MNFYNNTHPYYCGIDLHARSLYVCIIDQEGNTCVHKEISADPDKLLKLLKPYIGNIVVGVECMHCWYWVADFCNDIGVDFILGHALYMKAIHGGKAKNDRIDSFKIANLIRGGNFPLAYVYPKEMRATRDLLRRRMKIVRHGADLKAHVVNTTSQYNLPPNKVNLKNKDAREQLKSTFPERSVQKNIDLDMVILDCYAEQLSKVEWYIQQQAKQHKPNHLHLLKSVWGIGPILALTIIYEIGDIERFESVQKFASYSRLVKCKAESAGKTYGTQGNKIGNAHLKWAFSEAAVLYLRGNKKAQKYLLKLQKRMSKAKALSALAHKLGRCVYFMLKNETVFDENKFLKG

SEQ ID NO: 286088 - protein, 378 aa, unidentified
MQAAQVKAYESGAVLYMAMELSNSKWKLGFGNGSKLRRKSIDARNRQRCLEEVALAKEKLKLPADAPVVCCFEAGRDGHWIYRWLVSEGFEVLEIDSSSIEQARGRKHVKTDRVDVEKLLDLLIRHHCFGLRKAFRVVRVPSAAAEASQRLHREDEYLIKQRTRISNRIKGLLVAQGMVEVSLRGDFSGWLDRVRLWNDEGLSSELKIELRRLHAQYAVFDSQLKELAEDYAEELMADTPLAEARRKLELFKGIGAKSSRVLSAEVFAWRTFANTKQVGAMAGLTPTPSQSGDTETEQGISKAGNRRVRRIMIELAWLWLRWQPDSALSQWFNRRFANNGKRMRRIGIVALARKLLIALWRYTEHGVIPEGAVLKTQG

SEQ ID NO: 286089 - protein, 342 aa, unidentified
MSEIITVGLDLAKNVFQVHGTDGAGRAVLRKKIRRGQVLEFFSQLPSCVVAMEACGGAHFWGREIGKLGHDVRLIPPAYVKPFVKRQKNDAADAEAICEAALRPTMRFVPVKSEETQGAAMVFRVRELLIRQRTQAINALRGHLTEFGQIVPQGAANASKLVALVEDPESDLPADAIPTLKALIAALTHLEAEIRKLDAEIARRAKENDVARRLMTVPGIGPLIATAIAVLAPPPETFRKARDFAAWLGLVPRQHSTGGKQRLGATTRMGERSLRRLLIIGANSVVIKRNVHKEAQPGTWLGSLLLRKPPMLVRVALANKMARIVWALMARGGIYQSPVAAA

SEQ ID NO: 286090 - protein, 344 aa, unidentified
MGEVSTIGLDIAKSVFQVHGVDVAGAVVIRKRVSRAKVLGYFGELPACLVGIEACPSAHHWGRELQALGHTVRLIPPSYVKAYLKRSKNDANDAAAICEAVTRPSMRFVPIKTKEQQTALMLHRTRQLLVRQRTMLSNALRGHLAELGIVSAKGRNGTAELLRIIADGADNRVSPAVRGILNVLARQYGAIGTEIASIDKSIMALHRGCEASQRLAEIPGIGPIGATALVAEIGDWKTFSSGRSLAAWIGLVPKQHTTGGKDRLGSITKQGNRYLRWLLVVGAMAVIRYSRKHGTEKRPWLGRLMERRPTKVAAVALANKIARMAWAIMVRGERYKEPKLSLAA

SEQ ID NO: 286091 - protein, 341 aa, unidentified
MKNLFIGVDFSKEKVDVAILFADGLVETAARVFNEFKTTVSGYRQLVKWVEQNSCGIDSSLWLFCGENTGDYSKGLCNFLYGKGYDMWLENAKSIKDASGLRRLKSDRADASMIAEYAMRNYDKAVMYEPLSESLAQLRELFLYRQMVVRHRCSFQVRRGEKRLTMEKSPIKTMISQSGRHIVSELNKEVEKIDKRIAELIKSDEELTEVFTIVTSVPGIGTQNAVCLMVYTDNFRRFNYDSRKIACYYGLAPFGKDSGTSVHSDPHVHYMANRQIKAMLTQAALAAVNFNPIMARYYMRLVERGKKKQVALNNVKNKLVHLVTAMVRNRQTFTPEYKISA

SEQ ID NO: 286092 - protein, 393 aa, unidentified
MVCVGIDVAKDKHDCCILDSEGTTLVDCFTIPNNMDGFKSLLQTIQDCSQKSDKIKVGLEATGHYSYNILGFLLDKGLPTYVINPLHTNLYRKSLSLRKTKTDRVDARTIAAMLMSDVDLKSYTDTAYHNEELKSLTRYRFDKVKERAKLKQSVSRLVTILFPELEKLVPTLHMASVYALLSEFPGAKQIARAHLTHLKALLNDASKGRYGRDMATELRDAARCSVGSVMPAKSLELRHTIRLIRELNTEIEDIESAIQTIMGEMQSPITTIPGIGFRMGAMILAEIGDFSRFDSPDKILAYAGMSPSTYQSGQLSLSGTYSHMEKRGSKYLRYALYNATKYVCLWDSTFEAYLAKKRAEGKHYNVALSHAAKKLVRLIYAMEKSRQPYNSVA

SEQ ID NO: 286093 - protein, 410 aa, unidentified
MDVVYPRCCGIDIHKKTAVACVIVSDTKGPPRKETRTFGTMTDDLLALADWLASEGVTHIAMESTGVYWKAPFNLLEGQFEVLLANAQHIKAVPGRKTDVKDAEWIADLLRHGLLKPSFVPDRPQRELRELTRYRTVLVRERAAEINRVQKTLEGANIKLGDVASDILGRSARQMLEGLVAGTAEPSTLAQFARGRMRQKIPQLERALAGRFAVHQRLLVAQQLAHIDYLDEAIDSLSAEVAERLAPFEATLERLDVIPGVGRRTAEILLSEIGTDMHRFPTAGHLASWAGMCPGQHESAGKQHNGKTRKGCQWLRAALIEAAAAAAKTKDTYLAAQYHRLVRRRGSDKATVAVGHSILVIVWHLLQHDCPYVDLGSTYFDERDRTATERRLVQRLEHLGYSVHLDRSAA

SEQ ID NO: 286094 - protein, 342 aa, unidentified
MKHYAGLDVSLEETFICVVDESGKRVWRGATKSDPQTISRVIRKRAPKLVELGFEAGPLCTWFWHEFKEMGFPVVCLDARHAKAALSMQVNKTDANDAYGLARIVRTGWYRAVEVKSIESHVVRSLLAVRSQLVGIRTRLSNQLRGILKTFGLVVGKVSGRSLESRVRELTAGNLMLKDVVESILNVWRTIYDQLAVIDKKLRQFSHSNEVCRRLMSVPGVGPVTAAAFMAAIDDPDRFKRSSSVGAYFGLTPKRYQSGEVDRSGKISKCGDSRVRSYLYEAAGVLLTRVKKWSKLKAWGVRLATRVGLRKAKVAVARKLAVILYRIWVDNSKFQWGDAPSL

SEQ ID NO: 286095 - protein, 412 aa, unidentified
MKQIRERVAGLDVHRDTVVACCRVPGTRRDFKTVKQSFRTTSRELAELAAWLLEAEVTTVVMEATGVYWKPVYYSLEGLFEELWLCNAQHVKNVPGRKTDLTDAEWLADVAAHGMVRPSFIPPAEIRAIREMTRYRKTQVDARTQEIQRLEKVLQDAGIKLSSVASGVWSKSSKEIIEAMIAGERDPKVLAQMAKSRMRAKIPQLEEALSGHFGSHHAVVCRQVIEHIDFLDQTIATLSAEIATQLVPFQAAITVISSITGVSRITAEIMVAEMGVDMSRFPTASHLCAWAGVAPASHESAGKRRPYGTRHGSTWLQRALIEAARAAARTKGTYFSAQYSRIARRRGPNRAAVAVAHSILNVTWHLLTTGAFYDDPGADYFLLRHDPAVEAKRLQKRIEALGFEVTIGAAAA

SEQ ID NO: 286096 - protein, 342 aa, unidentified
MSGVTIIGIDLAKRVFQLHGARCDGSVAFRKKLSRGQVLAFVAEQPRCVIAMEACATAHGWGREFEKLGHEVRLIAPIYVKPFVKRQKNDAADAEAIVEAALRPTMRFVAVKTEDQQARAMLFRTRQMFVGQRTQMINALRGHLAEHGLVAARGPAHVKRLAAALTDEDIALPDGVRDLGQIYLDQIDSLTARIAELDRKMKRAAKEADLARRAQTMPGVGPVTALAIETFAPAMASFRRGRDFAAWLGLAPKQHSTGGKARLGKTSKMGQRDIRTLLVSGAMAVLQAVERFDTPDNGWLKRLLTRKPRMVAAIALANKMARALWAMMTKQEDYRNPVAAMA

SEQ ID NO: 286097 - protein, 526 aa, unidentified
MPYPVRTSRREYRRPRSKPPRQSLQKPNGLISPRVQKVGGGRFAIVCVDPAKHRSEWMMADYFGNLLIEHQTLEHQAAFYKSAIEQIRQAQQRHNIQDTIVVLERTGNYYLPPKRAFASAGFETRVVHPFATKQYRMPADPGNKTDETDLFAQHRAAVAGFGLCEYELQSPYRELQLRARHRRNLVEKAAAMACQIREHLHLAMPGFATLFDRMLEQQTPLAIAARCDSPAKLLQLGQAKLSAHLRKKKIRHQVRTIEKVLAWAVQANGDPIQDGAMHHAIWTELHELYLHFQRKITALEGELAGDLVATPYVRLLAIPGINVVSAAELAAEMGPIKQYANANAITGRSGLYPSRHQSDQTDHDGPIVRQANRRLRCVLMRIADNLACHCRYYRGQADVDKVRGIDKRASRVKIAKRFSRLALACVAGDDPMRHPCFQQPDCILEKLRRFHHAHQMPVDLLLANLETAVTQLTYDTCRRESEIVAKVLDEHAHRRAGATTIGELLPAVLARLNIKTKESNEHWDRS

SEQ ID NO: 286098 - protein, 374 aa, unidentified
MVLKEWLEPDAGRLARPVLRGRRRSNASLLPDQLYWVDPETGEIQNRRFQRQKLIEFLAQRKGRVALEACGSGHWWARKLLEMGYEVKLLHAKYVRPFVRTNKTDAADARAIWTAAQQPGMPAVTPKTVEQQATLVLHRMREQHIKMRTMMINALRGALYEFGLSFNKGRQAGLAEMRERLAEVEEDVPARVFEALREQFELVGRLDKGIEQLEGQIKAWSQTQPACKRLMAIPGIGMLTATALLATIGDAQGFESGRQLSAYLGLVPRQRGTGGKVQLGAISKRGDCYLRMLLIHGARAVVYRAKDKGAWCDQLARRRPSNVTVVAMANKAARIAWAVLRGKEPYERDHELKKAETARQMADSALGQLRLPKP

SEQ ID NO: 286099 - protein, 357 aa, unidentified
MFMIADHQESVTSIIFGGVDTHGDVHVAAAVSQTGKVLGTESFPATSGGFAQLLGWLCGHGDLARVGVEGTGSYGAGLARFLAEQGVRVREVNRPNRQKRRRHGKSDPVDAVSAAIAALNDDETATPKAGTGPAETIRQLRAARAGAMKARTQAGNELRDLIVTAPAALREQLRPLATRARVKAAAVFTPGDLAEPAEGAKAAMRHVALRWQHLDAEEKAISAQLRVLVPQAAPQEFLDRTGVSTQTAAALIAAAGDNPQRILSEAAFAALAGVSPVDCSSGKQEHHRLNRGGDRQANSAIWRIVMTRLRCDPRTKAYYDKRTREGRTRKYIIRCLMRYVAREVYKHLVCPASTAAP

SEQ ID NO: 286100 - protein, 307 aa, unidentified
MTSTKYIGMDVHKESISIAVRNDAGKIVMECVIESKANIILDFIHGLRGELQVTFEEGTWATWLYDLLKPHVAKLVVCDPRKNARQGNKNDRIDASELADRLYMNKLSSVYHGGAGVRTLRELARSYLTISKDLARVMSRVKAIYRSWGIPCAGKQVYAPRHRAEWLAKITEVGVHRRAEFYYQQLDALRPLRHEVRCELLVESKKHKVTKLLCQIPSIGPIRAALLIALIQTPHRFRTKRPLWKYSGFAIEMHSSADYRKVQGQLQKSRKRVSVRGLNRDCNHDLKNLFKSAATIASVKPGPFQEF

SEQ ID NO: 286101 - protein, 473 aa, unidentified
MAKRKLSTFERLQRGERVDRRERRQLQRQLESCDPQLKIVHPDAAGIDVGNASHFVSVPGGRDQKPVREFGSWTADLHKAAAWLKSCGIRTVATQSTGVYWIALQEVLEQAGLEVFLVNAQGTKNLPGRKSDVQECQWLMKLHTYGLLRNSFRPPEQIRGVRTLWRQRSRLVEDAGSRVQQMQKALTTMNVQLANAISDISGTTGMAIVRAIVGGQRDPHALAKLRDRRIQASEEEIAHSLEGHWREEVIFELKQVVGAYDFHQKQIAECDVEIGIRMGKLGSHPSQEQKEDVGEKAVRKPRKNQPSFDLRGELHRIFGVDLTRIDGIDVMTAQVILTELGPDLSAFPSEGEFSSWLELVTRNDITGGKTIRKKARKSKNRVANALRMAAECLSRSDSYLGARYRKFRGRMEGQPAVKAMAHYLARLVYRLLTKGQEYVDKGAAHFERKRKERDVANLQRKAAELGMKLVAAQ

SEQ ID NO: 286102 - protein, 346 aa, unidentified
MTLGLDLGDRTTQWCLVGDQGVVKEGSAQTDAASLKKACEIAMSRGAERVVMEVGTHSPWISRELASLGIEVVVADPHAVKLIWAAGRKSDRRDAQVLARLGRADIELLHPVQHRGAQAQAALSLLRSRAQLVEVRTCLINHVRGSCKSVGTRLPKCSAESFHKMVADSIPAELKKAQGAVLDSIARLSANIKELDVEVHRMSRESYPETQRLTQVVGVGPITALTFVLTVEQPARIVQTRNVGAYFGLVPGCSQSGGRDPELHITKRGDDDMRRLLVTCAQYILGPFGPDTDLRRFGQRLEAKGGKAAKRRAVVAVARKLSILLLSLWRSGQTYQPIKNSSAVVA

SEQ ID NO: 286103 - protein, 355 aa, unidentified
MESVKYLGFDVHQSTISVAVVNADGKLVMQSVIATHAATILDFIHGLRGTLHLTFEEGTHSAWLYDLLARGVARVVVCNPRQNALLKAGNKSDTSDARKLAELLRAGLLAPVYHGEGSTRTLQELVRSYAALTEDTTRVMGRVKALYRSQAIACAGKKPYGRRHRREWLSKLSEAGLHRRAERLYEELDALQGLRRAAKRELVLESRKHAAAKLLRTVPLLGAIRAALLIGRVQTPHRFRSKRQFWAYCGLALETRSSADYRFEDGQLVRAKKPVFIRGLNRNHNHDLKNLFKSAATTASVIHGPFREFYEGLLAKGMQPAMARLTLARKIAAITLSVWKKGESFDAEQLKPQAA

SEQ ID NO: 286104 - protein, 410 aa, unidentified
MDLLVARCAGLDVSKNEVVACIRVPGETGGRRQEIRTFSAFRFGLEALADWLAEEAVTDVVMEATGQYWKPVWYLLEEGSFELKLVNARHVKILPGRKTDVGDAAWLCELLEHGLLRGSFVPPPAIRELRDLTRYRKRLIQEHSSETQRVQKTLEDAGIKLDSVASDVLGMSGRAMLRALVAGERDVTVLAEMAKGRMRSKIPELRQALRGGFREHHALLVGLSLDHVEYLEASITRLDEQIEEMMAPFVEARDRLDTITGVGKRAAECIIAEIGVDMSVFPDAAHLCSWAGLCPANNITGGKRRSNSTNKGNRWLGEILNQCAWAAAHSRDTYLNAQFWRLARRIGKKKAAVAVSHSIVAIAWHLLANESDFQDLGGDYFVTRDLERARQQAVSQLESLGYRVVLEPAA

SEQ ID NO: 286105 - protein, 313 aa, unidentified
MKKTICGVDVSKAKLDVCIEPGHRFASFDNDTAGIAELAAFCREHAVTLVVMEASGGYERRAFVELWEKGISCALTNPRNVRRYAEAMGILEKTDRIDSSVIARFAHAKNLAPTPLPSQAQQRLKALVTRLRQVTDDLTVQKQRRTSTFDSTEMRSSIDEVIALLKRQSRSLEGEIASMIDDDPLWAKLAETWREVKGVAGRTVARLHAELPEIGLLSNKAIAKLAGLAPIANDSGKRKGKRSTRGGRAGVRSILFLVAAIAARYDHSLGEFRDRLLKAGKEKMVIRIALARKLLVRLNAKAREARAEYANAT

SEQ ID NO: 286106 - protein, 431 aa, unidentified
MIVLGADTHKRSHTVAAVAAATGELLGEQTVQVGWRGFDALLRWARGLDGERVWALEDCRHVSGGLERFLIARGERVLRIPTHLSATARKSARQRGKSDPIDARSVARVALQEGLESFPAAHLDGPELDLRLLVDHRERLVRQRVGLNNTLQWHLHDLWPELELPGSSLFYGRWAPRVARRLARAEQTMRVRIARDELRRIRELSQTIKALEREIAQLVATIAPQLLSEPGFGPLTAAKLVGEIAGAHRFATPAKLARAAGVAPIPASSGNTRRQRLDQGGNRQINAALHCVIVTRARCHPETQDYIARRRAEGKTTREAIRCLKCYLARHVWRLLQPPRPVEEKLSPSISCHRSDKNGGWGTEKGTGLRLSAGLHRDPAEPRALSHWLPPRQAGRWAPQADPTQLLLKPNCVSAPSGRPCPRPTDPVSGP

SEQ ID NO: 286107 - protein, 408 aa, unidentified
MEVLYARCAGLDVHAASVTACVRIAAGPDVTYQHRTVSTTTRGLLDLGEWLAACGCTHVAMEATGVYWKPVWHVLEGRFTLILANAMHIRNIPGRKSDMNDATWIADLLAHGLIRSSFVPPAPIADLRDLTRTRKQLVREITRHTQRIHKTLEHANVKLTEIISDIVGTSGRAVLRGLIAGETDPQRLADLTSGRLKASRAQLVDALEGRVTAHHRFMLQLHLTQIEALETAVHDLEARIREALAPFRAAVSLVTTMPAVKATTAAVILAEIGTDMTQFPSAGHLLSWAGVCPRLDESAGKRRSTRTREGARWLKTTLVQAAWAAVRKHDSYFHAQFVRLKRRRGSKKAILAVAASMLTAVYYMLRDGVEFHDLGSQYFAHHDKEQLTQQLLRRLRDLGVEVEVKNAA

SEQ ID NO: 286108 - protein, 315 aa, unidentified
MTNQTSIYVGIDISKDHLDVYIDQTAQTFRVTNTQDGVESLIKQLQPLRIERVVLEATGGLERLVVSHLCAADISVSLANPRRVRAYGISLGRAKTDALDAKLLAEFGRSAQLAPSLILDPSSQELVDMVRRRRQLVEMRVAESNRLSRAAKAIQADIQAHIEQLSARIEALENSIEQRVAQPYWQQRRKILTSFKGVGPVTASVCLSELPELGQLSAKEIARLVGVAPMNRDSGQFRGHRMIEGGRAHVRSALYMAALVASRRNPVIRDFYTQLVNRGKKKKVALVACMRKILVILNAMIRDNTCWIEPTPEQV

SEQ ID NO: 286109 - protein, 331 aa, unidentified
MNKIILGIDISKGKFDVTLLINNKLQTRKFDNGSKGFCALSQWLKMKDVYTAHVCMEATGGHEELLANYLYKNNFKVSVVNPARIKGFAMSRLSRVKTDKADCKLIAHFCQAMNPELWQPTPKHIQELQQLVRRLDMLIANKNQETNRLEGLSDIVAANVQSHIKFLAQQIKEIEQLISNHIKKHKDLSDKGLLLASIPGIGEKTVAVVLAFLSNVESFTSAKQVVAFVGLNPKPRQSGSSINGVGRISKTGDADLRKAFYWPALTAIKFNPIIKVFSERLGREGKVKMVVIIAAMRKLLHIIYGVLKTKTYFNPDIEIIISKNEKLLKNS

SEQ ID NO: 286110 - protein, 458 aa, unidentified
MYRELQPLRRTLSEELRSSLLPGLPGIQPDKLLETYLDQLTLFVGADVADLTLSLLAIDARKEELGHLLNVANNASGFRQITAWLEKLRSQHQLRIVGVACEATGVYYWGFWDALAEQPNLARILYNPRTTEHMGEVLSKRVRTELVDAYLLAEQLRLGSTPEVVLSQDADLLSARFCSRSARDLAQQINRKKNQLRALLRAYSPAFSQVFPGQKFHHPAVYALYAQYLFPDEIVAAGPEAIAAILTSHCRTAFDATVAQQLVELCRTVLLRPITRTVIRQRALDLADDITTAQSRQRYFIRTGYDLIKQRSETKLLKQTSGAGLSNTLALVSEIADVQRFPDGEHLASFLGLTTSKHISGATVYKATHITKQGAPNARYAAVNMADHLRHKVPYYHTMYQRITDRKPPHKGHFVALVAIARHFTTNVLYDMWRHQRPFFLETEDYRQYLKEHPHTDH

SEQ ID NO: 286111 - protein, 336 aa, unidentified
MESSTIAIDLAKRVFQIHYVDTETGAIYSKALKRTQLVPFFTNRPACRVVMEACGSAHHWARTLARLGHDVRLIAAQFVRPFVKSNKNDAADAAAIWEAAQRPGMRFVAVKTEEQQAMLALHRVRQQLVRIRVMQINQLRGLLYEFGIVLPQGRRPSIEAAKAALASLADQLPVMLTDSLQDQLSRLRILDEQIELLERRIQEWRRNDEACRRISEIPGVGVLTATAAVSAIGQAKSFRSGREFAAYLGLVPRQNSSGGKPKLGGISKRGDVYLRTLLIHGARAVISSSKHLPERLRLLLARRPTNVVAVALANKMARTIWALLAYGRTYQAPPMP

SEQ ID NO: 286112 - protein, 347 aa, unidentified
MARIARIGIDTSKSVFQLHGVDEREKAVLQRKLRRQHFLTFLSKLEPTLIGIEACGGSHYWARELQALGHTVVLVPPQYVRPYVARGKNDAADAEAICEAISRPRVAQRFVPVKTADQMAAQMLLGVRESLIRRRTQLSNAIRGHAAEFGLVAAKGLSKVDPLLARIAADDALPTLAKDMFATLGQELAELAPRIAAVEAKLMAWHRGNELSRRLAEVPSIGPIGACLLPIKIANPQAFRSGRMCAAWIGLTAKDHSTAGKQKLGGITRAGDESLRATLVAGATAYIQQVKRGRTKPSPWLAELLRRKPPKLAAVALANKTARIAWKLMTSGQRYHRPPPAPAAAAA

SEQ ID NO: 286113 - protein, 473 aa, unidentified
MALGTETNTPDADVQRLSYKDFAGPKLAWLVSFHQRTLMKNSDPQMSPGSNESLAACVGLDWADEKHAVVLQATDSQIKEHATLEHTPEALSDWVAQLHQRFAGGKIAVILEQSRGSLLYALLPHAHLVLYPINPQMAAKFRKAFYPSGAKTDPLDAELLLQILLQHRDRLKAWQPDEPITRQLQLLVEARRRFIADRVRLSNRLENALKSYFPQALQLAGESLTTAMACAFLQKWPTLEAVQKAGAQRLRKFYYGQHSRAEELIQQRLLLLAQAKPLTTDAAVVSAQSLLVKSVAHELAALPAILAEYDQQIATLFAAHADCGIWDSFPGAGAALAPRLAAAWGTQRDRFESSDAMAAYSGIAPVKQASGRSVWIHMRWACPKFLRQTFHELARTSLCFCVGAQCYYQMQLQRGKGRHAAYRALAFKWQRIMWRCWRDRVPYDDTKYVECLKRDNNELYTRIIAFQSAQVGA

SEQ ID NO: 286114 - protein, 418 aa, unidentified
MNVKARRTKKQVNVENQAINLLSKEELNKKIEVVEKELGSYTWRELETNGKFAKNDKLSFITDDMLIVGCDIGSENHYIRAIDVRGRELSRGAFEFSNTSEVFENAKAWVLALAAKHDKKQIVLGLESTGHYWFALAAWMISNGISVVQVNPYAVKQSKEIEDNSQLKDDRKDPKLIANLVKDGNYGMPYLPEKVYADMRRLSMFRDQLTEDRIRNINRLHRELKIYFPEYMDAFGKIDGAFTLEVLKVSAIPSDITALGAEGIKNIWHNEKLRGRGYSRANEIVSYAEKSVGLTDGIDAGREAVKWYAEQILKLVACSSGKHKGQTKISHRGRKRLRYWLFQAAKSAVSHADEFKQLHEYYTTRTNNPLKKMQSLVVIACKILRVIYTILKTGTTYDPQKLLEDIKRPTASQTPMAA

SEQ ID NO: 286115 - protein, 412 aa, unidentified
MLFVGDDWAEDHHDIEIVNEQGRRLARRHLSEGLDGVTRLHALIAGVMPKEWAELPASDAAARVKIGIETERGAWVASLVAAGYEVFAINPMSTARYRERHSTSKAKSDAGDAHVLAEIVRLDRDHHRPIAGDSDDGEAMKLVARSHHSMIWDRTRHVLRLRSALREYFPAALTAFDDLDAPDALAVLAAAPDPDRAARLSTARISTALRKANRRDVAVKALQVQTVLRAPALRQPPAVQQAFAAIVAGEVRLIAALNAEIDALGEVVAEHFGRHPDAELYTSLPGLGVVLGARVLAEFGDDPKRYADAKARKNYAGTSPITRASGTKRTVLARHVHNDRLSDAVHQWALCALRGSPGARAYYDAMRARKIGHHAALRQLGNRLVGILHGCLKTRSIYDEHKAWAHHSTAAA

SEQ ID NO: 286116 - protein, 342 aa, unidentified
MEITTVGLDLAKNVFQVHAINSAGEVVVRRALRRAQVIPFFSKLAPCLIGIEACGTSHHWARELVGLGHEVRLMPPAYVKPYVKRGKTDAGDAEAICEAVTRPTMRFVPIKSVEQQAALSLHRTRDLLVRQRTQLVNMIRGLLAEFGVDIPKGITHALAFVRRVVAGEAHEVPELAAKVIGALAEQALEGQHRIRQLERDLLAWHRANPLARRIATVPGVGLLGATALAATVTDPTQFRSGRQFAAWLGLTPLNNSSGGKERLGRISKMGDQYLRRLLVTGMTSLVRRNLHHPQTADPRIAALLARKPMRLATVAMANRAARAIWAIMVRGGVYRTPEPAAA

SEQ ID NO: 286117 - protein, 330 aa, unidentified
MGIDIAATTAEVSTQRPGAQASRSFKIDQTPEGFTRLVHKLQATGTAPSHVLVVMEATGSYWISLATRLVHDGFRVSVINPSQAHHFAKALLKRAKTDAIDAQTLAQLAVVLQPEPWIPPPQIYYELQQRLAQRDDLLNLRQQVRNQLHALAQHPEVIAAVRTRMESLLAIFQSQIDEVEVEIAAVLNQDSAWAAAAERLQSIKGVGWVTAAWTLVTTLNFTTCDTVDSLTAYAGLAPMPRQSGSSVWHRPAIGHSGNGRLRTAFYMATLTAARFNPAIKAFYSRLIEAGKPEKVARCAAARKLLHIAWAVVKKDQPFDPNYVQGVKKPT

SEQ ID NO: 286118 - protein, 355 aa, unidentified
MTPASYLFTKYDVFCGIDVDARSFACTTSDRDGMINRAKKMPADPDMLYRYLQNSFPEKNVLCGYEAGPTGYNLYDCLMAKNIKCIVMPPASVPKSPDSRVKTNRIDSGRIADYLRSGKARMIRVPDEAYRELRHLIDIRQRYARNIAHTKQRIKALLLYTHLDIVPNTDIRWSQAYIVRLEAIKTSPAVGERLGLLLEDLAYSRGQLLRALKSLRSFCRANSDIGRYRAYLESIPGIGLTTALTILARIGDPKKLKNVRELGAFFGLVPMEKSTGDNVNRGPITHLGNGAARSLLVEASWIAIRKDTELAQFYHRIRGRHHPGCASKKAIVAVARKLTHRIYCVLTEERPYISR

SEQ ID NO: 286119 - protein, 356 aa, unidentified
MSRDIKYIGMDVHKEATVIAVQNGSGKLVMESIVETEASSILQFIHGLRGELQVTWEEGTWAAWRYDLLQPQVERVLVCDPRRHALLKEGNKSDKIDALKLADLLRTGMLRPVYHGEHGLRTLRELGRSYRTISQDLNRVMNRIKALYRGWSIPCAGTQVYALRYREEWLHKMEPAGVRRRAELLYQQLDGLQALRRTLRPELLAESRKHKASKLLRQIPCIGPIRAARLLALMQTPHRFRSKRQLWTYSGLGIETRDSAQYRFVRGQLQHAKKPQQIRGLNQNHNHEMKEIFKGAATRASWGVGPLRDFYVALLAKGMKPEMARLTLARKIAAIALTLWKKEERFDAEQLKPQAA

SEQ ID NO: 286120 - protein, 414 aa, unidentified
MEVVHTHCAGLDVHKKTVVASIIVSDPKAGLRKETRTFGTMTSDLLTLSDWLMSNGVTHVAMESTGEYWKPVFNILETNFEVLLVNAQHIKAVPGHKTDVKDSEWLAELLRHGLLKASFVPPLGQRELRELTRYRSTFVRERATLVNRVQKVLESANIKLASVATDVMGVSGRAMLEALIEGQASPAEMAELAQKRMREKRDMLTKALEGRVKPHHRFVLIELLCQIDSLDETIERFNQQVEAYCRPFEEAVVSLDSIPGVGHQVAEIIVSEIGTDMDRFPSADHLASWAGVAPGNNESAGKRRSGKTSKGNKALCSALNQAAHAAAHTKNTYLSAQYRRLAARRGKKKAIVALEHTILVIAYHLIKRHELYCELGGDYFDKRRPEATAKRLVKRLEQLGYSVSLQQPALCSAV

SEQ ID NO: 286121 - protein, 347 aa, unidentified
MNFYNNMYPYYCGIDLHARILYVCIIDQEGNTLVHKEISADPKKLYELLKPYIGNIVVGVECMHCWYWVSDFCNEIGVDFILGHALYMKAIHGGKAKNDRIDSFKIANLIRGGNFPLAYVYPKEMRATRDLLRRRMKIVQHGADLKAHVVNTTSQYNLPPNKVNLKNVSAREQLRSAFPDLSVQKNINLNMAILDCYAEQLSKVEWYVEQQAKQHKPIHLHILKSIHGIGRILSLTIIYEIGNINRFESVQKFASYSRLVKCKAESAGKSYGTQGNKIGNAHLKWAFSEAAVLYLKGNKKAQKYLLKLQKRMSKAKALSALAHKLGRCVYFMLKNETVFDESKFLKS

SEQ ID NO: 286122 - protein, 312 aa, unidentified
MAMPVSLSKPIVGVDVAKNELVIYQADNDLLKEIPNTKTSIKQWLNTLPGTVAIAIEATNIYHLDFADLAYEAGCAIYMVGGYELKHYREGVKIRAKTDALDAKLLARYLKNEAEELRPWTPPSPLYRQLLSLFRRRAALVQARVGLVQSWSNEPLLKAAFAEQVKSMQQLETLIEKTINDQLKEAGLLGQLKRCLKVEGIGFLTGARLITAFQRGDFRNADAFIAFLGMDLRVSKSGQKDGRRSLTKRGDPEARRLLHNAAMSASRTKAWKGFYEAQRARGFSTTEALVMLARKLARVAFALLKGQSEYQS

SEQ ID NO: 286123 - protein, 343 aa, unidentified
MVHYVGLDVSLKQTSICVVNQLGSIVREGVVDSEPEAIAAFVRLNAPGAVRIGLETGPTATWLWTELKQLGLPVICIDARHAKAVLKMQINKSDRNDAAGIARIMQTGWFKEVRVKDLDSHSVRALLASRALLVKIKRDLENQIRGLLKNVGLVIGRTKFNVFTVRAEELIADRPELIAVVGPLLKARQAIEQQTDDLDRKVLKLARYDAQVRRFMTVPGVGPITALCFKATIDDPTRFKRSRSVGAYVGLTTRRHASGEVDWTGRISKCGDAMLRSYLFEAAGVLLTRVPKWSALKAWGIRLAKRSGLRKAKVAVARKLAVILHRMWIDGTEFNWSTKKAAA

SEQ ID NO: 286124 - protein, 339 aa, unidentified
MTWWTVAIGVDTHKQAHVAVALDRLGRLIDSLTVPATMVGYRQLLVWAHGLGQPTFGIEGCGSYGAGLARFLTDHDETVFECERPRRHERHGDKNDLIDATLAARHVISGDGLSLPRGSGQREQLRVLLLERRGAVRARTAALNQLDAAIMTAPAELRQRLDGVPKRRLVMTVARLRPRPDGVTQVLRRIARRIQLLSSEITEIDQTLDHLVAATAPDLLTECGVGPVCAAQLLVSSGDPARMTTEASFAALAGTNPLKASSGKQRRHRLNRGGDRQLNWALHVIALQRVHHHDQTKAYYQRLLADGKTTKEAKRCIKRALARHFYHRLRELHPPALTT

SEQ ID NO: 286125 - protein, 293 aa, unidentified
MIIIGCDFHTRYQEIAWLDTDTGEIHERRLEHTGDETRKFYAAFSGPVRVGIEATGYSQWFERMLRELGHEYWIGDAGAIRASVVRKQKTDRRDAAHILDLLMTNRFPRIWVPTPAERDLRQLVLHRVKLVQLRTKVQNQLQAMAMGQGVCRKKKLWSVRGRAELESLPLDRWAQRRRQELLQLLDQLEGSIRELHAAVEQQARQHPEAVLWMTHPGVGPVTSLAFVLTIGPVSRFARSKKVSSYLGLNPGEHSSGGHQQMGPISKQGNSMMRWLLVEAGQTAARRDPALGRM

SEQ ID NO: 286126 - protein, 411 aa, unidentified
MEVIYRRCSGLDVHKGSISVCVLLMEEEGAKKQVRRFGTMTRDLLELSQWLRQLGVTHVAMESTGVYWKPVWNLLEGQFELLLVNAQHIKQVPGRKTDTRDCEWIADLLQHGLLRGSYVPQQEQRDLRDLTRYRVRLSEDKVRLANRIQKVLEDANVKLASVATDVLGVSGRAMLQAIAAGEDNAQKLAQMARKGLRKKLPQLQLALEGRIRDHHRFLLRQLFEELTSTEQKISQLEQRIQASMRPYQHVITLWTSMPGIRETTAWSLVAEIGTNPEQFSQGSNLASWAGMCPGNNESAGKRKSGKTRKGNRWLRRALNQAAWGAVRTKNTYFAARFHRLAAKRGSKRAIVATGHKILVLAHYLLQHNCLFRELGADYYQRLRAPSLSQSLVRRLQRLGYQVTLAPAPPVM

SEQ ID NO: 286127 - protein, 338 aa, unidentified
MHSITNTELSSHEETRCQFNGGRCAIKMGIDVHQDFYVVAEQVGGTNPKPPQRFHKQAFLHWAAKLKEKSAGAEVHAVYEACGFGFTLQRQLAALGIHCHVVCPQKLDELAKRVKTDGLDAKALCLKLDRFVQGNRDALALVRVPTEEEEHSRAIHRQREQLVGARKRLEAQGRSLMVNHGLEPVQNWWKARTFAALPVPQWMRELLLNSQPILLALQQKIAALTLQLQSAAASNQPRGLGKMTSVILDREIGDWYRFNNRRQIASYTGLCPGEYSSGNTRLQSCVTKHGNPRLRAALVELAWRLVRFQPNYKPVVKWRQILAKGGAHRALQSASSRS

SEQ ID NO: 286128 - protein, 378 aa, unidentified
MKNDNRYVGLDVHAETIAVAVVETDGEVRFLGTIPNRAETVRRLVKRLGPANRLRFCYAAGPTGYVLYWQLTGLGAHCDVVAPTLVPVKPGDRVKTDRRDAEKLAALYRGGHLTPVWVPDQAHEALRDLVRAREAAKSDQLRARHRLQKFLLRHGRRPLQGIKAWTQKHLDWVRREVHFEALAQEAVLVDHLAEVEHARERIRRLEGAIDTAVEAAPGRMRAVIEALQALRGIATVSAATIVSEVGSLSRFRKPRQLMGYSGGVPREDSSGERVRRGGITKTGNAHLRRIVVEAAWSYRHRPTVRGELVKRQAGLSEEVKAIAWKAQHRLYSRYRRLIGKGKAKQQAVTAVARELLGFIWAIGVHVEQQHGTAARHAA

SEQ ID NO: 286129 - protein, 417 aa, unidentified
MKKRTYRSKEVKQINWDELKKSLSGEKIAVAIDVAKQKQYAVLTNMDGSLSELFRWQHPEQTSQVFEAIGVLDCPTTVIVESTSTYGDIFRHQSLLRGFDVHQASAKRVHDAKEVYDGVPSLHDAKAARIIARFYLDGLTKPWRELNGNERQLNALRREYEIHQSQYQRNQNRLEAYSSRHWPEVSYLLSGDSVALEALLMKYGSPEEVAAHSKEAQQVLKTASRSMLKPEKIKAIVQSAQNTLGVPCIEAEKQYLQALATEMRHSRLQGHVAKKALEAEIDNDVQLTEMAKLVGKVTTAVLLSFHLDPRNFKCGRSFQKAMGLNLKEKSSGRYIGQLKLTKRGSSKARMYLYFAALRLLQTDPVVKQWYQGKVNPKAKNKTVIAVMRKLSKALWTVAQGQSFDANKLFSVVTKKAA

SEQ ID NO: 286130 - protein, 317 aa, unidentified
MTAPEIFVGIDISKNRLDVAVTPGDQTMAHPNNENGIQKLVKRLNNLKPLIILLEATGGYEFFLVAALREAKLPACFINPKLVRNFARSAGIAAKTDHLDAQVLALFACRMRPQPRPLPQAQQQELQHLMTRRRQLLGILLMEKNRLDPAPFPRVRQSIQRNIDSLEAQLADLNRDIDDFFRQNSWWVDLEKALSTQTRVGHLTLLGVVAYLPELGRLNRKEVASLGGLAPFNRDSGQWRGQRHIEGGRNPLRQALYMATLSASRFDHVISAFYQRLLQKGKPFKVAIVACMRKLLTILNAMAKKLLLRRSLAPLTP

SEQ ID NO: 286131 - protein, 345 aa, unidentified
MKHYAGLDVSVKETAVCIVDETGVICREVKVASHPEDVARVLGSPAWRIDRIGLEAGPLSQWLFSGMAEVGLPVICIETRHTKAFLKAQVNKSDRNDARGIAQMMRVNLYRPVHVKTLASQKRRALLTARKLLQEKAHAIENDIRGLLRNFGLKVGVIGVSKFDDRIHELVEGMPELAEIIAPLLTSRRHLREAFLTLHRKLLSMVRDDAVCRRLMTIPGVGPVVSLAFKSTIDIPARFKNSKAVGPALGLTPVLNQSGESHRVGRISLCGDEMMRHLLYEAAQVMLTRVQKWSWLKAWAMNIARRRGQQKAIVALARRLAVIMHRMWVDGTEFRWTREPTPAAA

SEQ ID NO: 286132 - protein, 441 aa, unidentified
MRKQISFEEVNEAAAGVDIGSERIYVSPDGIAVENFGTYTSEYRRCVSYLKQLGIKRVAMEATGIYWISLYNLLSDHGIKVSLVNPTETKQKKGKKTDVRDCRWIQKLFAAGLLKESFIPEGKMLEIRYLVRERLDIIEMGSTYVNKMQRCLELMNIKLTQVISQVHGASGMRMLKAMIAGERNAEALLLLCDERIKQKKGDRVLEALEGNYNDTWLFMLQKNIELWEQHQQQVMAIYKQIQMILESLTAGIEVSEETIGKEKVVRHHKPHIGNLNTMLVALFGVNVTSVSGINSYTLLRLIGETGTDMTRFATIKHFTSWCGLSAGNHQSGKQSKWVKRAPCNKAGQVFKDVAQSLENSKNIAIGSFIRKLKARRGAGVAYKAGARKVAEAYYNILTKGVEYVEQGNTSYEAQQKQREVILLKKLAKKHKVQIVENQQAA

SEQ ID NO: 286133 - protein, 376 aa, unidentified
MQNTGRRGACRGPFLRCNEILCFWNAPTNAHPGFQQIALLDAETGELRERRLAHREEAEAFYRDLGAHGVGVRVGMEASGPARWFERLLSELQFELWIGDAAEIRTKRVRKQKTDRQDAQLILRWLMEDRFPRIWVPSGENRDLRQLLWHRHRMVQARTRIMNQLQAVALNEGLRCKKKLWREAGREQLESFRLAPWANRRRHDLLALLDRLTPTIAELTQAVEREAEKCPEAKRLQTHPGVGALTALAFVLIIGRADRFQCGKQIASYLGLVPLEESSGERRRLGHITKQGNSLLRFLLVEAAQVTVRSDPEWRRKYFHLAMRRGRKIAKVAMARRLAVRMYWMWRKGWDYEQMRKFSSHAGQPGNRDGVPLNTE

SEQ ID NO: 286134 - protein, 365 aa, unidentified
MKHVTTYVGIDAHKKDLFIAMLIGHEATPVTWTVPNEPNAVRRFVRRLERDAPGPVRACYEAGPCGYVLQRQITTPRVSCHVIAPALVPRKPGERIKTNRRDARKLAELLRANVLTEVRPPTPEEEAVRDLCRARDDAREDLQRCRHRLGKFLLRRGLHYNGRNWTRAHRQWIDSLAWTHAAERVLLEDYQLAIDHVEARLIELDRRLVEIAEAAPYREPVGWLRCFRGIDTLTAMLVLAELHDFRRFKSPRALMAYLGLVPGEDSTGEKHRRGRITRTGNALVRRLLIETAWHYQHRPSVGAALMRRRKGQPGRVIAIADKAQQRLCRRFRRLAEQHKPAPKIAVAVARELAGFLWAALQAPAA

SEQ ID NO: 286135 - protein, 429 aa, unidentified
MSVLGRTDAFAAFFGNGRSCADPMRAIGGEAGILALSKTSGRCHMSGFTGSAQTAIDYNSTIIAALELSSKKWVLAVHLPGVDRHSRHVLDACGDGLVSFVARLKARCAAAGREITRVILTHEAGRDGFWLARFLARHNIEVHVMQPSSLPVDRRARRAKTDIIDVEMLLRTLMAWLRGEPRVCSMVPIPSEGDEGARRAHREREDLSGERRSIVNKIDGILATLGVKGYKALRRDRREQLNCARQPHGDPIPPKAKARIERLLDRLDLVLKLIEQVESVRDAVLQKDAPADEAERMIRSLTQLRSIGPDFATLLVREAFVRQFRNRRALGGYVGLGGTPFSSGGSEREQGIGKDGNRRVRAAMVELAWTWLRWQPDSALSVWFHARAGAMRGRIRKIMIVALARKLLVALWRYVKDGVIPDGAKMKPA

SEQ ID NO: 286136 - protein, 387 aa, unidentified
MAGLDPAIWGAHWIAGSSPAMLGGRPPNGITVPSWPVVNPQQKGTVRMNTTMIGLDIAKTVFQVYGEDAHGQPMLSKRLGRGAVEPFFAKLPPATIGIEACGSSHHWARRLQALGHAVRLIPAAYVRPFVKRNKTDARDAVAICEAMQRPDMRFVPIKSIEQQAARGIETARELLVRQRTQLMNAMRGLSAEFGIVVAQGSTGFAALCARIAAGDPALPAALLPSLRLMRQQWQALNDAVDVQQAQLVARAKADPVMRLLMGVPGIGPLTAHAIVAAIGDGRQFGSARDFAAWAGLTPREQQSANKRRLGHISRQGDPGVRRLLTLGASAVLRQVRAEPRRGTAWLRGILTRRPVKVAVVAQAAKTARIAWAMLRSGEAYRVAAPAI

SEQ ID NO: 286137 - protein, 416 aa, unidentified
MGKQRDIACGADIHKNTIVATILSLAGTKNQAKFGTTLSELLRFKFWLTDNGCGVVAMESTGTYWIPVYSVLEGSIEVVVANPYMIKHIPGKKTDLIDSDWLAELCLKDLIVPSRIFPKEDRALRSLTRAREGLVKIRTQLKNRIHRDLSSSHIKLSSVVTDIFGKSGMHILRGLLDDQSIDEIIKGIPSGRVKKNADKIKESIENNLDSSQIFLIESSLDLMGHVQDKIDRIDMDLKSKIITRLNDLKIAMSIPGIEFTSAATILAEIGNYRNFSSPEKLASYFGLVPFVNQSADKLHTGCITKHGSKHLRWIMVQVAHAASKKIGSKLRKFYLRIRARKGANVAIVALARKILCILYHLLMNQEMYEEPGAARKTRPNRLDQSTTQREFTAQEMIDILKRSGYEIRKIDRGACG

SEQ ID NO: 286138 - protein, 296 aa, unidentified
MIQRACGVDVHRDNFVATILTSKGCETRDFEKSLEDIEAFKAWLKAKKCRAVVMESTGVYWIPLYAALENEFDVKLANPERTRKTSGRKTDQSDAEWLAYLLRAGLIEACYVPERNIHVLRELTRLRTKMVQNRTDYKNRVHKVLQRCNIRLGSKLHSVFGKAGMEVLNGLMTGRSLDEIVNESNSRVLKEKRGELEKVVRAGLDQEDIFVLKRCLRTVEHLDGELKELDARIAMLIGDREKEMKNISKVPGVAQVSASSILAEIGDAKRFADGKKIASWAGLCPSVYQTARVTTN

SEQ ID NO: 286139 - protein, 384 aa, unidentified
MNKHSILFIGLDTHKEFNEVAYIEEHRGAQPVHLGRFSSSKVAVQKLVRQFESKYPGATLHFVYEAGPCGYWIYRLITSLGHCCYVVAPSLIPKKPGEKIKTDKRDALKLAKLLKSEDLTPIYVPEPEDEAVRDLSRAREIAMEDLKDAKYQLKALMLRNNINYKGTANWSQKHLRWLTELVLPHPAQHIVLQEFLHTITERISRLERLDNELTHHVHQWRYYPVVKAIQAMRGVRLLVATGVVAELGDLSRFDHPRKLMSYLGLVPSEHSSGGKRHIGAITKCGNGRARRLLVEGAHTYRYAANISTDMQKRQEGLPKDIIDIAWKAQLRLCKRYKKMIAKGKHYNLVVTAIAREMIAYIWAIAKEVVLTPVNTKLRLARVPA

SEQ ID NO: 286140 - protein, 336 aa, unidentified
MKKISFFIGVDVSKSVLDVAIINGLEPNSFIHSQFKNTKNGISELLSWVKKNTSKNKEELLFCMEHTGVYGLPLCSSLSEKQLNYTLFPALEIKRSSGIQRGKNDKSDSKMIARYAFLRKDTIRITKIPDKNLLLLRYLLTHRERLLRCKVMFENSKEIERFSDKEMAGMFQKETKTVISFLNKKIEELNARIEKVLKADSIMARQYELITSIPGIGLQIAANVIAYTQAFTCFDDPRKFSCYSGIAPFPYQSGSSIRGRTKVSPLANKKIKSLLSMSALLVVRNDAEMKVYYNRKVGEGKNKMLVLNAIRNKVVQRIFAVVKRDTPFVPLAKHVA

SEQ ID NO: 286141 - protein, 372 aa, unidentified
MGHHTEVFVGIDTSKLRNAIAIADGGRGGEVRYLGEFPATEAAIRKLVAKLATKYRHLTFCYEAGPTGYGLYRLLKSLGHECLVVAPSLVPKKAGDRVKTNRRDAVSLAKLLRAGELTAVWVPDERHEAMRDLSRARQAVKKDLQGKRQQISSLMLRLGRIYPGKTTWGPAHMRWLMAQKIEHREQRIVFEELLEGIRQECERVERLENAIREVLPEWSLAEAVVALQAVRGIDLIAAVGVLAEIGDLSRFQNPRELMGYLGLVPSENSTGDKVKRGGITKAGNGRARRILVEAAWSYRYPPRVSRDKQPKVEAAPRRAREIAWKAQTRLCGRFRSLERKGKRRTVIATAIARELSAFIWAINRELMAHRQA

SEQ ID NO: 286142 - protein, 415 aa, unidentified
MALKIVYKICCGIDVHKTFVVACIASTNDKGVTSYESHRFSTYTSGLKTLLQWLLNRNCKDVCMESTGKYWIPVYNILENDCSIVLAHPKYVKAIRGKKTDKKDAKWIADLFKHDLVAGSFMPPADIRQLRDLMRYRFKLTCFQSSEKNRLQNCLTVSNIQLGNVVSDTFGKSAQAILDKLLENPADTSFDLEPLVYKSLKKKLPELRDAIDGYITPEQAGKLKVIKSHYENLESRKAELEELILALAAPYQQELAILQTAPGIRSDFTAIGIISEIGTNMEAFPSAKHLCSWAGLTPTNNESAGKKKSVRVSKAGCYIKPLLVQCANAVVTSKKHPEIRNRYLRLKKRRGHKKAIIAIARMLLTALYHMLKNGETYNAELYRKSDLPPVDREITVEQAIIIARNQGYKIKSATA

SEQ ID NO: 286143 - protein, 373 aa, unidentified
MRTTIAWVALDSHKKQHSVAVVYPNTGELAEWAVRNTQKDVAQMVRKIKRRAQGEVRFCYEAGVCGFVLKRWIEAQGCSCSVIAPSLIPVKPGDRIKTDRRDARKLVRLFMGGQLTEVYPPSVEQEAARELTRCRDVAREDVKRNQHRLVKFLTRHGYLYTAGHHWSKAHERWLGSLVFENSCLRSVFDEYYTELQHSQHRLESLDHQVEQLAQSEAYRYVVGILCCFRGIEKLTAVSLITELFQFGRFESPRALMNYLGLVPSESSSGSKESRGRITKAGNCRIRRLLIQAAWHSRHGYGVGQTLRKRRAEQPEWAIALADRAGVRLRRRYRALVERGKDVRKVTVAIARELAGFIWAMMREVQVRGLAKAG

SEQ ID NO: 286144 - protein, 401 aa, unidentified
MNAVGIDVSKGKSMVAIMRPFGEIVSAPFEIKHTASGINSLVELINSVEGESRIVMEHTGRYYEVLAHQLSEANLFVSAINPKLIKDFDNDSLRKVKSDKADAVKIARYALDKWQNLKQYNVMDELRNQLKTMNRQFGFYMKHKTAMKNNLIGILDQTYPGVNTYFDSPARSDGSQKWVDFASTYWHVDCVRKMSLNAFIDHYQNWCKRKKYNFSQSKAEEIYGKAKELVPVLPKDDITKLIIKQAVDQLNSASITVESLRTLMNETASKLPEYPVVMAMKGVGTSLGPQLMAEIGDVSRFTHKGAITAFAGVDPGVNESGSYEQKSVPASKRGSGTLRKTLFQVMDALIKTKPQDDPVYLFMDKKRSQGKPYYVYMTAGANKFLRIYYGRVKEYLSSLSK

SEQ ID NO: 286145 - protein, 417 aa, unidentified
MKCAPSFLPDQPANGLTAGIDWARDDHALAIVDARGKQIYRDTVEHSDAGLRALLKLLANHGVGEVAIERPDGPVIDALLDGGLTVVVISPNQVKNLRGRYGSAGNKDDRFDAFVLADTLRTDRARLRPLTPDSPATVALRRACRARKDLVAHRVALANQLREQLRRVFPGAVGLFADIDSPISLSFLSRFDCQDRADWLSPKRLAAWLASVGYCGRTDPAVLHARLTDAPRGATGDHGTAESRVTQAYLAVLASLTDQIKALSIQIDEQLALHTDAHIFTSLPRAGRIRAARLLAEIGDCRARFPTPESLACLAGVAPSTRQSGKIRSVGFRWSCDKQLRDAVTDFAGDSRRANPWAADLYDRAIARGHDHPHAVRILARAWIYVIWHCWQDNTAYNPDQHGALQRLIQSRNHAAA

SEQ ID NO: 286146 - protein, 400 aa, unidentified
MRTVFGIDVSKASSEVAILVNGERVHGYTMPNDIIGFSRLLEDLKTVSNPEIIFEATGVYSRRLQAFLEENSYDYTRLNPLEAKKQLDGLRVRKTDKIDAEKLASSQFVLNRKPTYVQEEVYQNLHDLSRFYQNLTEDIVRTKNRLHKVLQVAFPEIENLLSTPTGEQYWNLVSIFPTKHWVLELSEVELKEAIRNSTSKRISENRVGNLTEKLVGLAKQSYAGISKTSPMVEEVKYDAQEFIRLTNRREQVLQQLIALAEPLPEYKILLSIPGIAETTATSIIGELGDIRRFKSANQINAFIGIDLKHYESGDFLGQEHITKRGNPYARKILYKCIHNIASASHTNPCHIADFYEKRKRQSQITSTKQHTIASIHRLIRTMYYLIMHNKLYDYSLAQSH

SEQ ID NO: 286147 - protein, 415 aa, unidentified
MKGTEDTSQIERYIALDIHKEYVLAGGQNAKQEWVMPPHRISMAKFRGWAAANLHAGDALVLETTTNVWDIYDIVAPLTTRTVVAHAGAVRQIAEARVKTDKEDVKRLIRLLIADIVPEVWVPPVEVRELRGMISYRQRLVKMGTMVRNRLQSLLHRHNMLLPKGKLLDATWWQEQKMSTLEKMQIQQELAMLEELDRHKREVDAELGRQCLREPRGKQAVRLLQLPGFGVVMTMIVLSAIGDIQRFESAKKLVGYSGLGAGVHDSGKEHIEKRITKSGRKELRWALVEAAWQAIRISPYWKEQYEKYLRRMRKPNQAIVVIARKLLVAVWQVLTKEETDLHASEEDLAYKMLVLSWDLDESVRMGLTYKQFAKYALMKLGIETDITRFVRRNVPRRVASREETLARMEELGLTC

SEQ ID NO: 286148 - protein, 373 aa, unidentified
MPRYSTAFGMDVHLRSTTVCALDAETGEAVTRRFRGNPWGEVAEWMSGFPGPSLAAYESGYLGFAPQRELSGLGVDCVVAAVSKVPRSAADLSSKNDRNDAARMAKAILSHDVTPVWVPSPEIEGLRDLAAAHDAATARLAAAKQRLLAFLARRGYAYGGTTPAGNPRRYWTYGFLRWLDKVRPADDGGIRALAALRNEVEAAAETRDDLLAEYRAAVAAGPLSAEVEALQSIKGCGFALAAAFASEVGDFSRFRSGRQVTSYFGLAPKQRSSADSVRLGGISGAGNTLVRRLAVEGSWSYVQASHQPKLMPKGSGVPLEIRMHGRKGSERLLRRREEMLERGMPQAKANAATAAELVRWLWALGAMCREAGE

SEQ ID NO: 286149 - protein, 338 aa, unidentified
MGYFVGIDLHGDNNYIGILDEEDRRVFKRKNRNDIKEITRVLEPYQEEIEGIVVESTFNWYWIVDGLMDAGYTVHLANTAAMQQYEGLKYVDDTRDSFWLAHMLRLEILPEGYIYPKETRSVRDLLRKRMMLVQQRTAHILSMQTMVSRNKGVSISSDTIKTMSGEEVEGLFGDEHLVMSAQCDHEVVGVLSGQIDKIEKAVLKEVKLKKPYKKLLTVPGIGEILAMTIMLETGDIERFREVGKYSSYCRCVSAKKVSNGKNKGKGNRKNGNKYLAWAYVEAAHFHVRYCEEARKWYQRKASKSNAILATKALSNKLARACYYIIKEQVPYDKKRMFG

SEQ ID NO: 286150 - protein, 407 aa, unidentified
MEVICPRCAGLDVHKQTVVACVRIASDGAPLQEVRTFATTTSGLLQLADWLESFGARHVAMEATGVYWKPVWHVLEGHFELVLANAAHVKNVPGRKTDVNDAMWLADLLAHGLIRASFVPPAAVQELRTLTRTRKQFVRERASHAQRIEKVLEDANLKLGVVLTDIMGKSGRAVMQAIIDGHDDPEYLAARVDVRVKASRADVLEALRGRISTHHRFMLKLHLDHIDALDKAIADIEKEVGLGLEPFRQGAKLLSTMPGMSDIASNVVVAEIGIDMSRFATPSHLLSWACMCPRNDESAGKRRSTRLRRGGKWLKTTLVQAAWAAVRVKGGYLQAQFHRIRARRGAKKAIIAVAASMLTAIWHMLRDGTEWNDLGAAHFDCADATKTANRLIKRLQQIGYQVTAVPA

SEQ ID NO: 286151 - protein, 369 aa, unidentified
MNEGITSYVGLDAHAQSSAIAVADAGEVTAPRFLGTVGAKFSELAKALGQLGKPSGLRIVYEAGPCGFAMVRQLRQAGYQCEVVAPSKIPRKPGDRIKTDRRDALTLAGLARAGQLTFVCVPDERDEAMRDLSRARTDAVRARLKARQQLKAMLLRHDRRYTGKSSWTAAHERYLSAVSFDHRPQEIAFVEYRRAIGEAHARVGLLSAALSEELQHWRMRPLVCALMTLRGIDELTASSLVAELGELKRFAHARDLMGYLGLVPSEYSSGSRRALGAITKTGNGQARRLLIEAAWNYRFPARISLLLQKRQEGQPAAIREIAWKAQLRLTQRYRRLTARGLQHNKVCVAIARELSGFIWSIGQQVTVET

SEQ ID NO: 286152 - protein, 336 aa, unidentified
MTATTRPFDPIALDDTLCLALELGEGRWKLGFARGFGGKILRRQVLARDGKGLLAAIAWAQERLALPGSTRVVSLYEAGRDGFWLHRFLVAHGIENLVIDSSSLEVNRRRRRAKTDRLDLEGLLDLLQRHLAGSAKKGFSVVRVPTVEEEDRRHLHRELVSAKRDRTRITNRMKGLLANQGLTLDLKKNVPVQLAALRQWDGAALPSGLQARLAREWERVCFFDALIDRLESERRELVRTSSDPVMKQVQKMNLLRGIGMNSAWLYGMEFFGWRRFRNGKEVGGLAGLAPTPFQSGESDREQGVSKSGDRDRLGLAALPAAERADEVVRTPLRSRE

SEQ ID NO: 286153 - protein, 346 aa, unidentified
MLHVGLDLSRKRLDFHALAQDGNIVEVGASPPDRDGLVGLARRLDHHGEPICAAIESMNGARFVHDQLEMAGWEVEIADAQKVKGIAPLACKTDRIDAWVLAELSRRDLVPAIWLPDPEVRAERERARFRLHLVKHRSSLKHRVHSVLLAWGKPCPVSDLFGRRGRELLATLNVPEPWRSHVETAVGMIDDLEREIVGIERELRRSGVDHRYVPLLTSVPGIAWVLGYTIASEIGDISRFSSPTKLAGYTGLCPRVYQSGRSDRRGSLSKRGPRYLRWALLEAATHACAHPVYRERYRRNKRRLGKQRGAKVAQVDIARKLAEAIWHMLTLNQPFAPAGAPQRLAA

SEQ ID NO: 286154 - protein, 395 aa, unidentified
MKEVASGENGSLRMIEGQSHFRPFGLSCWGFADLNKGVGSMTASYDYHIGVDYHKSYSHLVVQDSGGKTLRSGRVKNDRQSLGGFLERYRQNSHAVVEATRNWMVMYDWLDDICDDVVLAHPLKVKAIAEAKIKTDKIDATVLAHLLRADLVPEAWAPGERARELRVALRERMFYVRLRTMTKNRIVTVFDRYPEQTTQLKKLGDLFGKAGRVQLAQVKVSEIDRIQIDRGLAFIGDIDGRIKQSEATIRAMTKANANVRLLKTIPGIGEFFARLIDAEIDDIGRFRSPKKLAAYAGLVPSTYSSGGKTFHGKIIKQGNKWLRWAFVEAVTPAIASDAQLRAQYEHLKIRGVNKARVAIARKLLTIAFQILRDQRAYEPRGESTTEGASTISRLS

SEQ ID NO: 286155 - protein, 409 aa, unidentified
MRYYLGVDWADQTHAVWVVDERGTKVAMRTVPHTAEGLSEWGRELDEWRAHGTELWAAIERPEGRVVDFLLDHGVVVYPVNPKALDRARDRFRQSAAKSDPFDARVLADFLRTDHARLRALRPSSEAAQELKLLTDDYQRQIRQQTRLVNQLTMTLKAYYPRALEVAELPTALARDFLQAYPTPAALTALTERQWQRWARAHRMHEARTQELWAVLQRPQLPVPAHVVRAKARLMQSLVAQLTLVVEVVGTYREAIEDFFAQIPAAQWIRTLPIGDHGITAPTLWARLGDAPGRWESFRHLQAQAGTVPVTIRSGKQQVVRFRFACDKSLRYVIDHVAFLSLRWSEWARAYYAGQRARGHSYHQALRALSAKWLKIIFVMWKRQVPYDEQYHLATMTRQQLRLRQKQIA

SEQ ID NO: 286156 - protein, 330 aa, unidentified
MKNWNVILGVDVSKLTLDISCAEQNLHIKIDNCSKGFTEFVKWCKVNNLDLKETLVVMEYTGGYEYRFIQFCDSKSIAFCRIPGLEIKHSMGMIRGKNDKADAFRIARYGEEKRERLIPSKPLDQNILTLRQLLSFRKRLVRDKAGLQSTSKERIHMYAVNKTDTIMHIAQAKIKADEKYISQVEQQIRELIKDNEGLFQNYRIITSIKGIGEVNGWMTIAYTENFTSFKNARTYGVYVGVIPFGHSSGTSIKGKNRVSHLANKELKSELSQAAKSAIAHDKELHAYAERKLKNKDYGVVVNNVKFKLILRMFSLVQRGEMYVENYKRSA

SEQ ID NO: 286157 - protein, 338 aa, unidentified
MQAATIGLDIAKQVFQVHGADKSGKVLFRRKLRRNEVARFFADLEPCMVGMEASGSAHYWARVLTGSGHRVRLMAPQFVKPYVKSNKNDANDAEAICEAVTRPNMRFVPQKSVQQQNLQCQHRVRSRLVACRTQLVNQIRGLLAEYGIVLPQHVGPLRSGLPAVLEDAENQLTGIGRQLFRGLYEELAQLDKKIAVADRQIQLAFQGNEDCQRIGTVEGIGPLTATAIVAAISNGRAFANGRQFAAWLGLVPRQNSSGGKTRLMGISKRGDPYLRTLLIHGARSVVYRAKNKTDQRSLWIVDKQQRLGTTKACVAVANKRTRIVWSLIARDQVYRPAA

SEQ ID NO: 286158 - protein, 423 aa, unidentified
MENTAARKRKQVPEGYLIIGVDPHKKRHAAVTITQDFTTRDKFKFDNTRGGLEIMLRRVRTEMMKSGCRGVMFAIETGGHYWRNLAYALDEQGIPFRFINQFTLKRRREGKDLNRRKNDYRDSEVAAQLLCTGEFTETKIPQGVYAELRTAHNAYRRLVKERTRIINLVKGLLDGLFPEFTHVFKDPCGLTSMSVLSICPIPMVIAGMTEAEFVATIEAQHQGRLMRRKLRALHYMARTSIGIEAGARSVSSEISFLVEKLELIRRHIRIIERTLVRLVDETGEGKYLLSIRGLNYIAVAGLLAELGCFKAYRSAKQMIKMAGSNPTESESAGKRGRHTPMSKQGRPVLRYCAWTSVIPMLRLNPDFRAWAKQRRERPAHANPLNGREVVGAALNRLLRLAFAMVKNQTYYQVSKPEPALVAV

SEQ ID NO: 286159 - protein, 427 aa, unidentified
MPYKIAGIDVHKRMLHVVVSDVQVDGEYDFTRRIFGSLPEALRSLSAWLVEQQVQEVVMESTAQYWKPVWGTLERYWKPICQTREGALATSGRLHLAQALSNRGRRGRKKDFRDAERLVKRLVAHELVLSFVPDVEQRLWRTVVRTKYQLTRNRVQLQNRLEALLEEAHIKLSSLVSDLLGASARRMLAAIADGETNRETLAALADRGLRSTQGQLQDALGVCQELNPVYRRLIRMVLDEVASIDKRIEQLNQEMANLIRLHEDQVKRLAEVPGLGVDSAQQIIAEVGATAATFPSEKHLSSWVGACPGDEESAEVNRSRRSPQGNRHMRRILNQAANAAAKLKGSIFEILYRRYVPRLGHNQTIGIIAHKLCRLVWKILHRGIRYEERGQEVSKASKQKRTRKMIQALRRLGYRIEPNPSQPTITA

SEQ ID NO: 286160 - protein, 389 aa, unidentified
MIYVGIDVAKDKHDCCILGSEADKLFPVFTIPNNKAGFDELYEKMFSVTDDKTKIKVGLEATGHYSLNLLGSLIDKGLPTCVINPLHTNLYRKGLSLRKTKTDKVDARSIAMMLMTNKTLKPYSDISYHNEELKSLTRYRFDKVQERAKLKSSVARLVNILFPELEKLVPSLHMASVYSLLSKLPGASYITECHLTHLKNLLETASKGHYGRDMAITLRNTARDSIGSVIPAKSMELKHTIHLIKVMTEEIDEIEDSIKSIMDTCNSPIMTIPGISYRMEAMILAEMGDFTRFNYADQILAFAGLSPSTYQSGQLDSSYSHMEKRGSRYLRYALFNAAKFVCKWDENFGAYLSKKIGEGKHYNVAIGHATKKLVRTIYRMELTGEAYRR

SEQ ID NO: 286161 - protein, 343 aa, unidentified
MEYYVGLDVSLKQTSICVVNQTGSIVQEGVVDSEPEAIASFVRSRAPGTVRIGIETGPTTTWLWTELNRLGLPVICIDARHAKAVLKMQINKSDRNDAAGIARIMQTGWFKEVRVKDLDSHAIKALLASRALLVKIKRDLENQVRGLLKNLGLVIGRAKFNVFAARAEELIEGRPELIAAVGPLLAARKAIEQQVGDLDRKVLKLARHDAQVRRFMTAPGVGPITALCFKATIDDPTRFKRSRSVGAYIGLTTRRHASGEIDWSGRISKCGDAMLRMYLFEAAGVLLTRVPKWSGLKAWGAKLTKRNGLRKAKVAVARKLAVILHRMWIDGTEFNWSTRKAAA

SEQ ID NO: 286162 - protein, 321 aa, unidentified
MSKYKEIYGVDISKDVFDVHGEKSGHNQFKNGGKGFTSFLKSLPKGALVVMEATGYYHYRLAQYLYKQKVFVSVVNPLSVKRFIQMKLAKVKTDKSDAKAICEYGQMNDVPLYTALTDVQSECLQLFRLLDNYLKKRTATKNKLHGEDILGIPSKFVYRSLKRDLKHLNKEVKGIEERLLELVKQDQQQQLTLLKSIPGMGVKTALFLIVVTDGFSKFEKASQLCSYAGITPTIRESGSSVRGRSRISKVGNRKLRNLLFLCAFSACKHNKACREVYERIVNKGKSKKLALIAVANKLLKQAFAIAKSGLPYDENFVSKLS

SEQ ID NO: 286163 - protein, 361 aa, unidentified
MKKPAQHPIAEVPRRQVKVDITIGIDLGDVWSHYCTLNQHGEVVDRGRFRTTPKAIEKWFTDVPPARVAMEAGTHSIWISAQLQELCHEVIVANVRELRAISHSDRKSDQVDAEKPARYARLDPNILRPIAHRTVAQQEALTLIRARALLVRLRTAAVNAVRGLTKSCGFRMPASATTCFAQRSLTVMPPGLAQALGPVLQQIAEMTAKIKQYDRQIQQLGQTEYPETQALLKVHGVGHLTALTFVLTLGSKERFGRSRDVGCYLGLRPRRSQSGDHDPQLGITHAGNAYLRSLLIECSNHILRPHGRDSALRQWALHLAARGGKQAKSKAVVAVARKLAVLLHRIWSTQEAYMPFYEQAA

SEQ ID NO: 286164 - protein, 355 aa, unidentified
MKKDITVDELVVVGLDLGDKYSWYFRLAVSGGIDGEGRIRSNPKEMRKFFEKIGPCRLVMEVGPMSRWVSALATECGCEVIVANPRKVRAIAESDSKTDRADAELLARLGRVDPKLLHPIRHRGPEAQADLAVLKARAELVRTRTALVNHVRGVSKSFGARLPLCSTPSFEKKNLAFLPAVLRPAFEGILKVLQSLGAAISEYDEQIDQLSETKYKETALLRQVPGVGVQTSLAFVLTLEDPHRFKKSRQVGSFVGLRPRLRQSGAQDPQLRITKTGDVRLRCLLVQCAHRILGPFGQDSTLRRWGEKLSLRGGKAAKKRAIVAVARKLAVLLHRLWVTGEVYDPLHGITQPQAA

SEQ ID NO: 286165 - protein, 407 aa, unidentified
MAKKVRSWAGLDVHSAKVVACVVDAESGEMSVHRLPGDTAKVVAFCAGLPGPTRVAYEAGPTGFGLARTGRRRGIDVRVVAPGSIPKGPGDRVKTDSRDAVRLVRLLAAGELTFAFVPTEEDESFRDLIRCIEDLRGDLMRARHRLSKFLLRRGHRYQDGGAWTPRHSRWLRSLSFDGSAQATFADYCASVELLAGRRATLLVTLEQTAPGCSHAQTIGRLRCFRGIETLTAAGLCAETGGFERFPRPTLLSGFLGIVPSERTSDQKRRQGAITRARLPARPPAAGRSRPALPQAASDHPHPHPPPGRPGPASDRDRLARPATPAPALAAPPRRAAKARRRGRDRRRARARRIPLGGRHPRCLTAAPPTTAPGRCRGAHEHPGRPSTVARGSRVHYGQPAPAGRARI

SEQ ID NO: 286166 - protein, 343 aa, unidentified
MTGVTLGVDTHKDVHVAAILDDLGRLIGTAAFKADDRGGEGMLSWARRHGELQTAGVEGTGSYGYRLAILLSGAGVRVFEVSRPDRSRRRRKGKSDPVDAEAAARAVLAGDARAIPKNRQGPVGSLRGLVVARRSAVKARTQAFNQIHALLVTCDDATRRRLDSLPHRRLAGACARLRPTDGCRVGLRSLGRRWLGLDTEIRTLDGHITAIVEGVAPALLERHGLGVHSAAQLLVTAGDNPERLKGEGAFAALCGCTPVEASSGKTVRHRLNRGGDRAANNALWTIAHVRMVHDPRTRAYAERRTALGNSRNEILRMLKRYIARELFPIILDSLRDPGGADLT

SEQ ID NO: 286167 - protein, 412 aa, unidentified
MLFIGDDWAEGHHDVVAQDDAGKALARRRLPEGADGIARFHEMVAFCLGEDAEPDPARVVVVIETDRGPWVKALAAAGYRVYPANPKQAARHKETIANSGKKDDFFDAACLADMGRTRRHQMRELAADSDVAEAVKIAARAHQKLVWERTRHQLRMRSALREYFPAALEAYADLTLAGKDALELLAKAPDPESAARLTVTQITAALKRAGRRGDLAQRARDIQAALRTEHLAQPDVITEAYAAAVQAGAAVIAALNAQIKVMETKVSELFRRHPDAGIYLSEPGIGDITGARILGEFGDAPGRYASAKARKNYAGTSPLTIASGKKKTVHARYIRNRHLIDALHAQALSALSASPGARAYYDDLRAREIGHDDALRRVASRLTGILHGCLKTGREYDEATAWSHRAETPEAA

SEQ ID NO: 286168 - protein, 440 aa, unidentified
MSKRAYRATRVNDVNWDQLAQGKEGLDITLGVDVGKYSLWAVCRWADGRFERPWRVQNPGEIPTLLTLLKGVSAGRRLVVAMESSGTYGDALRQALADNQIELQRVGGKAAHDYAEVFDGVPSQHDGKDAAVVAELAALGKAMPWEYQPADPWEQELAYWVEWMVAHRQMLTIWQGRLEGLLARHWPEATQVLKLSSGTLLRVLKRYGTAQALAADGEAAKLLARWGGAFLAPAKIEQLLTGAGASVGVRLGEWQQRQIQNYAQQALAARQEANRAERRLRSLAEGHAVLQAQGKVVGVPTACVLWASTGDPRKYHAAGAYRKAMGLNLVERSSGTYQGRLRISKRGSPRTRQWLYFAVLRLVQKCGVRPWYEAKKAHDEADARRVVVAVMRKLAVALYYVGVHNEEFQPGRLFGRIRRRRDSPGEQKSRTKRRSRAEQI

SEQ ID NO: 286169 - protein, 384 aa, unidentified
METLQKVSHIGCDLHKKFTIATARDAQNRLLWRERLEHADRPGLQARLDAWPKGTPVIFEASFGWGWFADAVQAAQLEPHLASSRKVAAWREARGLAKSNRVDADLLSELWSQQPRWWEVWLAPPAVRDQREWLRYRMALVRIQTGLKNRIHAVLHRHGLVHGFADLFGRDGRRFLSLLVAPRDITLPDSARATLKGQLQLLDQVRRQIAQATRVFRRTVERDPVAERLRRLPGIGYVLAYTLVAEIGRIERFPNAQHLASYSLLAPRAYDSGEPEDGPPQGRHVGHVGRRVLKWAFIEAARGAVRHGGRWRQTYDRRTDGGQRNRNRGYIAVARKLAHVVDLVWRKGVEYTEEPPPRPGSRRRTRRSRPGTGQPVDAMVGVAE

SEQ ID NO: 286170 - protein, 341 aa, unidentified
MSSTSLLDSVQTYVGIDVSKDWIDCYLRPHQEAIHCGNNSDGFTELEQWLTVHGVEADATVICMENTGIYDDKLLKHLTENGWLCAVEKTTVLGKVTPDHHRKDDPFDAAGLAEYADRYLDKLTITYPKSDDVERLRQLYSERNRLVIQKGAVQNKYSQLDHHTVTSELVEESWKQQLDFYEHQINQIEQRMHELVRAHDGLQHYWELLMDIPGIGKVTAWLWLVLFYGQSTLDCKKISSRFGFAPHSNRSGSSMRGKTRSSGHGAAQMRKCMSLAARAASSYYEKFRDYKQRKIEEGKLWPVVRNNLINKLIKIICAIWNSGKPYRSDHMSRFDRQKVAN

SEQ ID NO: 286171 - protein, 389 aa, unidentified
MVCVGIDVAKDKHDCFIISSEGEILADVFTIPNNAEGFDTLLQAIRRSTRPEDKIKVGLEATGHYSYNILGFLLDKGLPTYVINPLHTNLYRKSLSLRKTKTDRVDARTIAAMLMSDVDLKSYTDTVYHNEELKSLTRYRFDKVRERAKLKQSVSRLVTILFPELEKLVSSLHSASVYALLSEFPGAKQISSTHMTHLKAVLKNASQGRYGQEMAETIRNAARSSVGSVMPAKSLELQHTIRLIRELDAEIEDIETAIQAIVDEMQSPITTIPGMGVRMGAVILAEIGDFSRFDSPDKILAYAGMSPSTYQSGQLSLSGAYSHMEKRGSRYLRYALYNATKHVCHWDPTFAAYLAKKRAEGKHYNVALSHAAKKLVRLIFAMEKSQRPY

SEQ ID NO: 286172 - protein, 402 aa, unidentified
MDSGAREVEYAAFIGLDWGSEKHSVAVQAAGCKEIEMYTLKQTPEEMHGWLFKLQDRFGGRPVAVAIEQTRGAVIHVLLGYDFVHVFRINPKSLADYRKAFSTGGAKDDPTDAQYLLEWVLLHRDRIQPWIPDDAETRALQKLVEFRRDVVNQRVALTNRLTQVLREYFPQALDWAGEIDCVMASDFLSKWPTLEKIKKARLDTIRTFYRQHGCRNSERIEERLQAICTAQPLTEDPAVIETSVCVVQRIVAFLRPTIESIDRLDQEIEKRFHAHPDMAIFHSLPGAGPVLAPRLLAAMGSDRNRFESASEIQKYCGIAPVTERSGKHAWVHRRFACPKFLRQTFHEFAAQSRNWSAWARGYYEMQRHNGKGHHTAVRALAFKWIRIIFRCWKERVTYNEET

SEQ ID NO: 286173 - protein, 352 aa, unidentified
MEIIGLDLHKRETQLCRRQSDGRIVDERIPTSRARFTQTFGALAPATILLEASTESEWVAAHLEQLGHTVIVADPNFAPMYATRSRRIKTDKRDARALMQACALGAYRPAYRLSPARVHARAALAVRDTLVRTRARVITLLKTLVRREGLRVPTGTSRTVAARVAALDLGATAPALGAELAPLLALLPALNTQIAALDATLAAIALDDPVVARLATAPGVGVVTAVAVAATLDDITRFTSAHAVEAYLGLVPSEYSSADRRHLGHITKAGNARARWLLVEAGWRILRSTQPETAALRAWGAAIAARRGNRIAAVAVARRLAGVLYAMWRDGVPYDAAKLARGQRGVPRSPTA

SEQ ID NO: 286174 - protein, 354 aa, unidentified
MTSTKYIGLDVHKESLSIAVLNSAGKVVMECVIETKASTILQFIHGLRGDVHLTFEEGTWAGWLYDLLKAHVTELVVCNPRKNALLKEGSKSDRIDARKLAELLYMSKLSSVYHGEHGLRMLKELSRSYLTITKDLGRVMNRLKALYRGWAIPCAGTQVYAPHYRSEWLAKIHEAGVRRRAELYYQQLDALRLVRQQARKELLAEARKHRATKLLRQIPGIGPLRAAHLVALMQTPHRFRTKRQLWTYSGLGLETHDSAQYRVVEGQLQRSKKPVTLRGLNDNHNHDLKDIFKGAAMRASTAAGPLRDFYEALLAKGRKPTMARLTLARKIAAITLIVWKKEVRFDANYLKQAA

SEQ ID NO: 286175 - protein, 427 aa, unidentified
MSEVESVRPEPQFAAFVGIDWADQKHVWCLQAAGSKKRESGELEHTPEVVEAWVGQLCQRFNNHPIAVAVEQSRGALVFMLAKYEPLHLFPVPSTMSASMRKALYPSGSKDDPRDAALLLDLLLQHRNKLHRWSPDTEATRRVQNLVEERRKLVDEKTAQTNRLTSHLKIYFPQILNWFERLDTELVCALLERWPTLEELQKVPPAKLRTFFRKHHCRDEALIERHILAIGQAIPAIRDRAVIEAKSTVVKVIVQIVRSLVEGIADLDERIEEAAAVHPDFFIFESLPGAGAVMAPRLLAAFGSQRERYGSAYEVQTYTGIAPVTEKSGKKKWIHFRWACPKFLRQSFHEWAGHSIPHSVWARAYYQQQRSKGQDHHAAVRSLAFKWIRVAFRCWKDGVAYDESKYLASLARHGSPLAAVTATAKTL

SEQ ID NO: 286176 - protein, 485 aa, unidentified
MKRKQPEKGQRAKKASCQTNQGKWHEMNRKQRREAMRKMQSGDISLEVVHPHAAGIDIGNEAHYVAIPPGRDNQPVRRFGCTTAEVKEMADWLKQCGIRTVALQSTGVYWIAVYDILEEAGLEVYLVNARETKNLPGRKSDVQESQWLMKLHTYGLLRNSFRPPQEIRTMRTYWRQRHDLVRAAGRHIQRMQKTLTQMNVQLANVLSDISGRSGQAIIRAILKGERDSHELVALCDSRVKASEEEIVRSLEGNWQEDLLFVLQQEQNGYEFCQKQMAECDQRLEEYLQKRADRSWGKTLPEEKRKARLKKKQGNAPQFCLRGEMFRMTGVDLTQIDSIDIMTAMTILSEAGWDMSKWKTEDHFVSWLRLCPDNKVSGDKIIGKGRLPITNRVTIALKMAASTLRTSKTYLGAQFRRFRTKLGAPVAIKAMAAKLARLVYRMLRYGMQFVDRGAEFYEAQHRKLQINHLKWKAAQLGFQITEVLAA

SEQ ID NO: 286177 - protein, 343 aa, unidentified
MKITTIGIDLAKTVFQIHGVDAQGKTVFKKQIKRDQMVTFFTNLVPCLIGIEACGSAHFWARKLQALGHTVRLMAPQFVKPYVKTNKNDMADAEAICEAVTRPNMRFVPIKDIEQQAVLAVHRVRQGMVKARTAQANQIRGLLSEFGLIIPQGIAYINKRVPALVEEAGDALPGAFRALVQRMLDHLKELDRQVGELELQIKAWHHSSALSRKLEQIPGIGPITASALVASIGNARNFANGRQLAAWLGLVPRQHSTGGKSNLLGISKRGDCYLRTLLIHGARSVIRFAENKPCEKGGCGWLQTLIGRRNKNVATVALANKNARIVWALLAHDREFRSDYVRA

SEQ ID NO: 286178 - protein, 429 aa, unidentified
MEEVDELELLVERVAGLDVGKAELVACVRVPHPSKPGRRMQEVRAYATTTAELVAMAVWLRQHRVQRVVMESTGDYWKGIYYLLEAKGLDCWLVNARDVKNLPGRAKTDTLDSIWLAKVAERGMCSPSLVHPEPIRRLRNLTRYRRALVADRGREMQRAEKLLEDAQIKISSVLTEVHGVSGRAMMEALIAGKRDPHTLARLARGRAKVKTAQLEEALRGFFTDHHAVMLRMMLDNIDCMSAQITALDGRIEEAVAPFSDRVDRLVDLPGVDRVAAAELIGEIGVDTSRFPTAAHLVSWAKFCPQTHQSAGKTKRKGRGKGNPWLGGTLGRIVFGLSRTDTFLGTRYRRLAKRRGKQKAIVALGNSVLTVVYHLLADPEARFDDLGPGFYESRINTNRRARNLATQLQAITGQKIVIRDGKAVIAESAA

SEQ ID NO: 286179 - protein, 331 aa, unidentified
MTNAAREAAADARPLDYIGIDMAKARFEWGVHGAQSTQGATNDAPGFETLLAELREHRVGLIVIEATGGLEHALASVLLQHALPVAVVNPRAAREFARSMGHLAKTDAIDALALAHYAHTLAHKANQAGVQLMPLPVHLESLQAMVLRRKQLTDMRTAELNRRGGAMRVLRKSIDAVVKTLNQQIDTLNKDIGMHLDEHFKDLNRRFDSIQGVGPNTCAAVIAFMPVLGRISNARAAKLVGLAPLNNDSGNSRGKRSIWGGRTLVRGALYMATLSAVRFNPVIKAFYLRLLAAGKCKKAALTACSHKLLRILNAMARTGQAWRPELHRITA

SEQ ID NO: 286180 - protein, 411 aa, unidentified
MEIMHERCCGLDIHKQTIVACLIVRDEDGQPSRTLQTFGTTTRQLLSLADWLRQAGCTQVAMESTGSYWHPVYNLLEEQFTLVLVNALQVKKVPGRKSDVKDAEWIAELLRHGLLRGSFVPARPERELRELTRYRSSLVQERSAEVNRIQKVLEGANIKLASVATDVAGKSGRAMLAALVAGNDDPAYLASLARGRMQRKHDALEEALLGSVRDHQRLMLKLQLEHVDALDGLIENLSDEVEERLRRFTETMARLERIPGVGRRVAEIIVSEVGTDMGRFQTAGHLVSWAGLCPGLNESAGKNYSAKTPKGNNALKTVLVQAALAAGRTKNSYLSAHYRRLRARRGPQKAAIAVAHSLLIIVYHLLADPERTYQDLGPGYFDQRDKERRSRQLKARLEELGYTVTLEPIAA

SEQ ID NO: 286181 - protein, 355 aa, unidentified
MNSEKYIGLDVHQATISVAVLDSTGKLVMESILETKAATILEFFAGLCGTLSVTFEEGTWAAWLYDLLKPHVAKLVVCNPRKNALLKDGNKSDRIDAHKLAELLYLNKLSSVYHGETGVRMLRELARSYLTIAKDLTRVMCRLKAVYRSWAIPCAGRDVYYTRHRAEWLGKIKEAGVRRRAERLYQQLDMLQYLRQQARRELLAESRKHAITVKLRQIPSLGPIRSALAVALIQTPHRFRTKRQLWAYSGLALETRTSAEYCYVKGGLRRSKKQISIRGLNQDHNHDLKGLFKGAATRASVLPGPFQDFYQRSLAKGIKPTMARLTLARKIAAITLTLWKKGENFDADKLKSQAA

SEQ ID NO: 286182 - protein, 412 aa, unidentified
MEVIYPSCCGIDVHAKTVVVCLIKRGKKQTRTYSTMTDDILKLSDWLLSEDCTHAAIESTGVYWKPVFNILEGMLEVILVNARNVKAVPGRKTDVRDCEWLADLLRHGLLRASFIPPIEIREIRELVRHRHTLVAVQTAVSNRILKVIESANIKLAQVASDALGVSGRAMLRALSEGENDADKMAQMARGALREKEAQLRRALTGKLTRSQRFVLKELLRQLDETEAAIARVSQQIQLQTQENHCPFVPEAVELLQTIPGVGERVAEAIISEIGVDMTRFPSDAHLSSWAGMCPGNNESAGKRKSGKTTKGSPYLRAALTQAAWAASHTKLTYLSAQYRRLASRRGKRKALVAVGHTILVISYHILKHKSGYRELGVDYFDRQNVESQRTRYIRKLAALGLKVTVSPDPSVP

SEQ ID NO: 286183 - protein, 362 aa, unidentified
METKTKVNQKLFEGQSIYVGIDVHKKSWQVAIMGEQYEHKVMSQNPDPDLLAAYLRRNFPGGNYHAVYEAGFNGFESCRKLRQLGVDCVVIHPADVPTRQKEKLQKSDPSDSRKLARSLRSYEFEPIDIPDPSLEADRALVRQRFRQMRDVTRTKNRITSLLFQFSIKIPERFTSAQTRHWSKVYINWLKEVPIGYESLRQTLDNYIRIGESQRKELLLLNRQVRDLSQMDSYRNNHCILISIPGIGLLTAMTFLVQIGDIRRFKRLDDLCNYVGLVPMMHGSGEKIRTGKMIKRGRKELKIMLIEASWEAVRKDPALMARFNELSKRMNKNKAIIRIARKLLSRMRTVLLNGERYELGITG

SEQ ID NO: 286184 - protein, 375 aa, unidentified
MKEKVRFLGLDVHAETIAVAVAEPEGEVRSLGTIPNRAESIRKLIKKLGPAARLRACYEAGPTGYVLYWQLAELGVECEVVAPTLVPVKAGDRVKTDRRDAEKLARCYRSGDLTPVWVPDAGSEALRDLVRAREAAKQDQARARHRLSKFLLRSGQRPPAGVRPWTRPYLIWVAQLRFTQIAQESTRQDYLHEVEHMRERVARLEQAIMEAVKLASPALQQVINDLQALRGIADISAVTIASELGQVSRFDSARQLMGYCGVVPSEDSSGKRTRRGGITKTGNAHLRRIVVEAAWSYRRPPRIWYGLRRRQESISEEAKEIAWKAQHRLHKRYMKLGAAGKDQRKIVTAVARELLGFIWAIGTRAETVSRQQVAA

SEQ ID NO: 286185 - protein, 339 aa, unidentified
MLYVGIDVAKNKHDVTALNVPGKTVLKPLTFSNNKAGFELLDLSIRQINQDCLIALEDTGHYAFNLLNFLHEQGYKVYTYNPLLIKEFAKSLSLRKTKTDKKDAHGIALKLLSDPNREQFQHDNRQVELKILARHIHRLKKKQSDWKVQYTRCLDIIFPELDKIVGKHSEYTYQLLTRYPNPQKRIEAGFDKLIEIKRLTASKIQDILSVAPRSIGTTSPAREFEIIKHYKRLIDKAETCVNDLMAEFNSVITTVTGIGNRLGAVILAEIRNIHAFDNPAQLQAFAGLDSSIYQSGQIDLAGRMIKRGSPHLRWALIQAAKACARFSPAFKAYLKTKLE

SEQ ID NO: 286186 - protein, 359 aa, unidentified
MDLSEAKWKLGFTNGLGSKPWIRTIDAGEVLLLEREIQRAKEHFGLAADSRVLSCYEAGRDGFWLHRCLVASGIENVVVDAASIEINRRAKRTKTDRLDAGKLVRMLVRYASGEQKVWSVVHVPSLEAEDQRQIHREIATLKVDHTRHINRIHGLLAGQGIRMPIQADFLAHLDELRLWDGAPLPAGLRARLEQEYACLQFVNEQVAAQEAKRRELLRTSTESYVEQVRQLMRLKGIGEQSAWRYVTEFFAWRAFRNRREVGALAGLAPTPYRSGDEQHELGISKAGNRLVRAMAIEIAWDWLQFQPESELSQWYRRRFSEGSKRIRKMGIVALAHKLLIALWRYLELGQLPAGAQLKA

SEQ ID NO: 286187 - protein, 441 aa, unidentified
MSETPSPSPSPEPQWAAFVAIDWADQKHCWKMLAAGLEKSEQGTMENTPEALAVWAADLRDRFAGRPVAVCLEQSRGSLVYALCKFPHLVLFPVLSTTIARYRKAFFPSGSKSDPLDTTLLLDILIHHREHLRRLDPDTAETRLLQMLVEQRRDLVDERTRHSNRLTAWLKMYFPQVLDWVDKIHSPMACDLLERYPTLEQLQRVNPAKLRDFFIRHNCRSQKRIQERIDAIYKATPAVTDKALLEAGPAFVKALVAQIQALNASITQFETRIEQVSSTHPEAPLFAHLPGAGPALRPRLIAAFGTKRERYDTAAELQSYAGIAPVTEKSGNSEWVHFRRACPHFLRQTFHEFAAHSIAKCDWARAYYDHQIKQLGKRHHAAVRALAYKWIRVLFACWRDSKPYDEKIYTSALQKRNSPLAKLTLEWKAVAGFKKPTLKNL

SEQ ID NO: 286188 - protein, 461 aa, unidentified
MRNNRKSGDRPGSTRPIAGLPIVRAKVAGIDIGSERHWVCAPGLEGSGREVADFGATTPELVRMAEWLKERKVESVAMESTGVYWIAPHEVLEKDCEVLLVDTRQLARVPGRNKKTDPSDCEWIQRLHSCGLLNGSFRPQEQVCMLRTLVRDKANLVAESADWVRRMQKSLDQMNVRVHRAVSDLNGVTGMAIVRAIAAGERDAQKLAQLRDRRCRQSEQEIAEQLSGHWREDHLFSLRQSLQMYDAIAERITAYEQEILRKLATMEIGEYPGGVVPPVKNLEKGKAIKKRGQEPKRQALYRMSGVDVTQIDAIGVETVEVVLSEYGPDLSRFPTEKQFVSHATLAPRVPKSGGKPLKHKKRNSASTRVAAALRMAALSLRHSATALGAYYRRLARRIGGDVAVFATARKLATLIYRLLRWGQPYVDEGAEAFEKRYQQQHIKGLAARAKELGYQLMPTTT

SEQ ID NO: 286189 - protein, 341 aa, unidentified
MQQHITTIGLDLAKSVFQVHGIDHEGQAVLRKKLRRGQMLKFFTTLSPCLIGMEACGSAHHWARALSAKGHQVRLIPPQYVRPFLKTNKHDAADAEAIAEALVRPTMRFTPIKSADQQAVLMLHRSRELLVKQRTMFINAIRGHCSELGMIASQGASRVKDLIAIIDDPEDARLPTIAREALGVLIAQLDTVKEAIRKLESKLQAWHRSQQSSQRLTTIPGVGVITATALVATIGDGSQFKSGRHLSAWLGLVPRQHSSGGKSRLGRISKRGDGYLRRLLVHGSRAVLRWQRGAPKKPSPWIEELLTRRPTNVVLVAMANKTARTVWAMMRDQQTFTAVVR

SEQ ID NO: 286190 - protein, 384 aa, unidentified
METITQKIDILQSINFQHSINTLYVGIDPHKYIHHILITNRAMDKLGEFKVHNNQTDIDELIKEINKIKDEHNFNNVVIGIEGYHGNGDFITRNLLKEFNSIYEVPVALTSNYRKSSIYREKTDSIDAKGVINALVTNLPKLSVITSKSNDRIAIMLRDLTMNRNRFVSSRIGFKNAIHNLMQHIDPEYVKTVKNFNSKKTRKTTKEFCDNILISDTDLEIKNRAKLVITNIERVNDFEEQVNTIEKEIKNILINSRYQKIIDSFKGVNYITMAELISWIYDINRFPTPEKFCKYCGIAPVACSSGKSNKLINSKAGVKSLRTTFRTIAIVRVRRSPEDEQYFKKQLSKGKTKKQSLKLVMRKNALVLYALLTKNQAYISPVLA

SEQ ID NO: 286191 - protein, 339 aa, unidentified
MTVGLDVHKATACAAVRKNGQEIATWVMPMDNQTIVASLKRFGPALKKVVYEAGPTGYGLARALKKAGLPVEVIAPGKVPQAPNADSKTDRLDARKLAEEAEKGSLQKAVIAIPTEQEEADRQLARLRDQLIGKQRRVKQQIKSLLLQHGLPEPAGLAHWSAEGLAALKAMRLRHQLQLSLEVLVGELEHLVVLRKRVERHEVWLMKQRRHRKGARLLQTHPGVGVVTATAFRLEVYQPERFATPEQLAKYVGLAPRVRQTGPKRRGGPLIPAGRGSLRSLLIEASWRWIRDDAAAAKTYRRHVRNTGSGQKAVVAMARRMAVHLWCMLCRGQEYRPAA

SEQ ID NO: 286192 - protein, 424 aa, unidentified
MKVTYPTCCGVDVHKSFLVATIIKTTGGIEPSYQKKRFSTFNNSILDFKSWLLENECHDVCMESTGKYWVPVFNLLEDQINVTIANPKWVKAVKGNKDDTKDSKWIGDLFRLGLVKGSYIPCKSIRILREYTRYRYKLVSCRSSEKNRYQNALTVCNVALDSVVSDIFGKSSSSIIDYLLEQSGTTINHEEIASKLLKRLKSKEDAVIESIEGYQMTDAQKYRMRLIRAHMDYITAEINDIDKQIESLISSDPDYDKAIRLLTTIPGVKRDSAITIISEIGIDMSQFCNSKRLCCWAGLTPSNNESAGKKKSVRITRAGVYLKPALVQCAHAAVKSDKSPYYKKKYESLVKRRGKKRAIIAIARMILTAIYQMLSTGEVWNPSDLYKIDMPAPLVEKQKAKAIKQAKKLLQKEGLLPPDEPLAS

SEQ ID NO: 286193 - protein, 407 aa, unidentified
MDSLKTVFGIDVSSRKSNVCIMVNGRKVNDYAISNDMVGFNQLLDDLKQVTNPQIIFEATGVYSRRLQAFLDMHDLRYVMMNPLEAKRKTKDDLHQNKTDKLDAMYLAKMQSEHPQRLAYVQSEEYQELMANNRIYEQASHDLITNKNRLHKAIQLTFPEIEHLLANPRGKNYWSIVLKFPHPNIVLETKEADIIDFLKSLSGIGEKRANDLAQRLIRLAKLACPAVKKSSAHIRGLEMAINNILSAEETCQTALKETAKLAPKRDLEILKSIPGIAENTALRIISELGDIRRFNKPNQLNAFVGVDPQVYESGNLTAHLSISKRGTAIGRKVLYLAINQIQSAKKAGNPCHIADYYEKRKRSSETASHKKAAIASIHKLLRTIFALITNDQLYSYDIAKHNQRLLS

SEQ ID NO: 286194 - protein, 429 aa, unidentified
MGWTITYFYLGGLIMEVITAVGIDVSKGRSTVATMRPGGEVVTIPYDVEHSADELQKLVRVLTALDGGVRIVMEHTGAYYLPVATVLLEAGLFVSVVHAKLIHDFGNNSIWRGKTDKKDAVKIANYALTNWTSLPQFHQQENTRQEIKKLNRQLSLYTKMEVALKNNLIALLDQSFPGVNKVFPPAAKANGHEKWIDFAERFWHRDCVCGVSRSAFSESYRKWCKKTNSLWSADKVDKVYDHARVQVATFPKNDTTKLIVTQAVSQLNSLLETVFTIQNEMNRLASSLPEYETVLAMPGVGKILAPQLVAEIGDVARFHSKRALTAFAGLDSPPYQSGQFESKERKISKRGSPHLRRALFRVMTMLLLNQPEDDEVYQFMCKKRAEGKHYYVYMTAGSNKFLRRYYGKVRECLLEQTATITVDEPNHAS

SEQ ID NO: 286195 - protein, 400 aa, unidentified
MHKRTVVACVLNGTPGKEPGTQTKSFGTTTPELMEMVEWLKSHRTTHVAMEATGNYWMPVYNLLEGHFGLIVANAAHMKAVPGRKTDVADAHWIADLLRHGLLKASFIPAREQRDLRELTRHRSSLAAKRGQAANELQKALESANIKLQSVVTDITGVSATEMLTEMLGGKNDAKELAQLAKRKLRAKIPELEKALSGKLRAHHRLILEQLLADIALFVAQIAELDAHLEQLLAKDDDHIDRLDGTPGINRRVAEIIIAEAGTDMSRFPSANHFASWIGLCPGQNESAGKRRSGKTRKGNRALRAALVESAHGAVRKKDCYFGAQFRRIAPRRGRKKALIAVAHSLAVTIYHIIKNQTPYVELGAGFFDHLNPTRVLHRLTKRIQNLGFDVQLSPITSPL

SEQ ID NO: 286196 - protein, 381 aa, unidentified
MVVGLDVHKKETVAFVVHGLPLESGEWFSFQTTRESILDALPRLRGERVLIEASTSGKAVARFLCNNKVDAVLVPADVLSAHMRRAKSDKLDARDLARIGLVGGYSTCYIPTSQEDDVRAIVRHVRDLREQQAAFKNQIRAIAQRNLVPPPMGSLSNQGPKRRWRHLPLPHSEQLTICSKIDLLEQVEHQEEAVMLELYRLVHADPNIRSLLGIKGIDVYTAATVTSHCGDMTRFPNPKKIASYSGLAPRLSQSGTKARHGGITKAGPNMLRHALIEATHTIVRYPGRLQTKFKRLRARIGAGRAIVATARTLITAIWRMLIDKKPYADIEDKLAAAKRWRLSAVVKLIERGAIEDAVAISRRTDVRMIQRAWQKRITDAG

SEQ ID NO: 286197 - protein, 350 aa, unidentified
MDSVKSIGMDVHKEAISVAVLNSSGKLVMECKIETKASTILDFLKGLRGSLHVTFEEGTWAAWLYDLIKPHVTELVVCNPRRNALLKEGSKSDRIDARKLAELLRSNMVRAVYHGENGVRTLRELARSYLTISTDLIRVMTRVKAIYRSWGIPCRGKQVYAERYRAEWLGKIQQAGVRRRAEFYYQQFAALRALRQEVRRELLAEAQKHDAWKLLREIPFLGPIRAAQLIALIQTPHRFRTKRQLWSHSGFGIETYSSAEQRFVQGELQRAKKPASIRGLNRNHNHELKNLFKAAATVAAAKAGPFQEFYDALLAKGIRPEMARKMAAITLLVWKKGVRFDAQRLKPQTA

SEQ ID NO: 286198 - protein, 482 aa, unidentified
MKPKQQEKTKNATYQPTQGHWQQMNRKQRREMTRKIQSEDISLEMIHPDAAGIDIGNESHYVAVPPTRDSQSVRRFGCTTAELKAMANWLKQCGIRTVAMQSTGVYWIAVYDILEQAGLEVYLVNARDTKNLPGRKSDVQESQWLMKLHTYGLLRNSFRPSQEIRTMRSYWRQRNDLVQSAGRHIQRIQKALTQMNIQLANVLSDVSGMTGQSIIKAILKGERDPHKLAAFRDHRVKASEEEIARSLEGNWEEDVLFVLKQEQDGYEFCLKQMAECDQRLEQYLQQREDRSAGAALPEEKRKERLKKKKGNKPLFDLRTGLFRMTGTDLTRIDGIDVMTAMMILSEAGWDMSKWETEDHFVSWLRLCPDNRISGDKIIGKGRLPTNNRVSIALRMAANALRTSKTYLGAQFRRLRSRLDTPVAIKAMAAKLARLVYRMLRYGMKYVDQGAAFYEAQHRQLQIKHLKTKAAKLGFQLLQVPAA

SEQ ID NO: 286199 - protein, 334 aa, unidentified
MNNVSLIGIDLGKNSFHVHCQDATGKALSRKKFTRAKLFEFLANCPSATVVMEACAGAHYIARKISDMGHKPKLISPQFVRPFVKSNKNDFVDAEAICEAASRPSMRFVAPRTESQQEILALHRIRESLVRDKVKTTNQMHAFLLEFGISMPKGLAVIRRLSVVLTENELPPYLAKLLVKLQSHYLYLVEQIRDIEHELELAAKQDDTTQRLMSIPSVGPITASVLMANLGNGQQYKQSRDFAAATGLVPRQYSTGGRPTLLGISKRGNKNLRRLLVQCARVYILHLEHQSGYLAEWVRHQLSKKHSCVVACGLANKLARIAWAITTKQSVYMA

SEQ ID NO: 286200 - protein, 472 aa, unidentified
MSGKVNRNQRKELIRRLYSDDPGLEVVHPQTAGIDVGNESHFVAVRPDSDAEPVREFGSWTAALHRMADWLETLGVKDVVMQSTGVYWIAVYDVLQKRGFAVCLTNARDTKNLPGRKSDVQESQWLLKLHTYGLLRNSFRPPEEIRTVRTMWRLRSRHVQDAGREIQHMQKALTTMNVQLANVISDVSGFTGQAIIRAIVKGERDPYKLAELRDYRIQASAEEIARSLEGNWQQDVLFELKQAVERYDFCQQQIAECDQELEKNLGSLPNRTIAEAETPEEEAATSSAAEGKRKRKRGKPRKSEPQFDLNGELKRICGVNLATIDGVDVMTIQTWVSELGVDLRPWRTEDHLVSWLNLSPKRQISGGKLIKHERNKAKNRVADALRMAASTLKESDSYLGARFRSLRGRLGSGKAIKAMAAHLARLIYRMLTHGQDWVDRGAEVYQKRREEREKRALERKASALGFRLVASE

SEQ ID NO: 286201 - protein, 472 aa, unidentified
MNSLNSPQKNKKSKTKLKKMVKRYAQKINKVGVLEQINFNAAGIDVGAEEIYVAVPEDRTEQSVRKFGTFTQDLVQIVLWLKANGVTTVALESTGVYWIPLYDQLGKAGLDVYLVDARKTKNVSGRKSDVQDCQWIEQLHTYGLLSKAFVPDEQTRNLRSLERHRDMLINYRSSHIQHMQKALTEMNVKLTNVLTDITGKSGMAIIRDIIAGEWDPNRLVRHRDYRCRKSEKEVALSLEGNFNQQKIFVLKQAVELYDNYTQKMVELDVESEKLFKTFARKVDVKSKPLKKLAPSLQNMKKNAPHYDLRSQLYQIAGVDLTRVDGFNVLVLQRIISEVGLDMSKWPTMKNYTSWLALSPNNKITGGKIISSATAKTKSRANIAFRMAAMGVARSNCPIGRFYRKMKARDGAQSAITATAHKLARIFYVMVSKQVEYSEEIANGDEEKNKKRMIKNLQRRAKELGYELVQETA

SEQ ID NO: 286202 - protein, 337 aa, unidentified
MMYGGIDLHSNNSVVAIIDDADRVVAQKRLPNDITKIVGFLARWQDQLAGVVVESTYNWYWLVDGLQDAGMQVHLANTAAIKQYEGLKHSGDETDAQHLAHLLRLGILPTGTILPREHRALRDLARKRMQLVQSCTAHVLAVENIMARQLGGRITSNQIKRLTDDTIDSLPLAADVGLAIKANVAVIATLQSQIEVLEKRLQERVKPRPQYGLLTSVPGIGQTLATVILLETGPIDRFADVGNFASYARCVDSVHTSNRRKKGEGNVKNGNTYLAWAFVEAANFARRFCPEAKRFHERKKARTNNIVATKALAHKLARASYHILKEGKPFEAMRCFA

SEQ ID NO: 286203 - protein, 332 aa, unidentified
MYLGIDLHKRYAQVAVIDSEGKIVEEVRVENANLDDLARRYAGAKAVIEATSNYYHVYDTLVEYLDVTVAHPGKLTLIAQSDKKTDRVDAKELARLLRLNSVPESYVPTDEIREARALVRGRQTLIEDRTKFANKIHGLLADNGITREVKPLSVKGREFLRELSLPSPWDALLESYLDVVGTLTEKIAQLETAIEKRAGSLTETQLLMTIPGVSYFSALLIYGELGEVDRFDSHKEVVSYMGLNPTIRESGDSRIEGGISKRGSGRVRWILVQSAYTAVYNSNDEYLSRFFHRLNSRMNSKKAIVATARKLLVSMYYMLDREEVYDPPGVSS

SEQ ID NO: 286204 - protein, 468 aa, unidentified
MTPRKRQRLSPEPLRVTNPHAAGIDVHANVHWVAVSPADAPAPPADHPANLPAHVRYFGACTADLIAIADWLAQCGVTTIAMESTGIYWIPLFELLESRGFEMFLVDPRQSRHAPGRPKSDVLDCQWLQRLHSYGLLTASFRPADQVVVLRSYLRQRQMLIRYAGQHVQHMQKALEQMNVKLAEVVSDITGVTGMAIMAGILGGQRDPLQLAKLRHDYCRRTEAEIARALYGNWRAEHLFALKQALTLYEFYRQQLQECDVQLQAHLGIFPDRSKGKPRPKRQRRYGQRSGKRTNEPAFDLGTALYQMSGVDLTVLEAIDVTTALVILSEVGSDVSRFPTVKQFTSWLGLSPQHQGSAGKIRSRRVPRGANRAGRALRMAVQGCYHAKHALGAFYRRVQARAGAPKAIVATARKLAERVYRLLKYGAEYVRQEIEVYEAAYRARVVKGLARRAAEMGYRLEPAMAAGT

SEQ ID NO: 286205 - protein, 341 aa, unidentified
MKNLFIGVDFSKEKVDVAIIFADGLTETAARVFNEFKTTVSGYKQLVKWVEQNSYGIDSSLWLFCGENTGDYSKGLCNFLYGKGYDMWLENAKSIKDASGLRRLKSDRADASMIAEYAMRNYDKAIMYEPLSESLAQLRELFLYRQMVVRHRCSFQVRRGEKRLTMEKSPIKTMISQSGRHIVSELNKEVEKIDKRIAELIKSDEELTEVFTVVTSVPGIGTQNAVCLMVYTDNFRRFNYDSRKIACYYGIAPFGKDSGTSVHSDPHVHYMANRQIKAMLTQAALAAVNFNPIMARYYMRLVERGKKKQVALNNVKNKLVHLITAMVRNRQLFTTEYKITD

SEQ ID NO: 286206 - protein, 293 aa, unidentified
MFPNDAEGFAALLAWGRAQGVDWMQTGVCLEATGPYGKPLACALHEAGVVVAIENPARIQAFARLLGARVKTDRADARLIARYARQHPPRRWIPPSAQEERLHALVSRLDDLLVMRTMEQARAQQVQGEALRSVANVLKALEDEIARLRDAIRDHIDHDPDQRHKAALLESIPGIGQETIGRVLAYLGPLERFECVRQVVAYAGLNPRVRQSGQWTGASPISKQGSSAIRKALYMPALVAKRHNPVLRAFCERLAARGKRPKQVVVAAMRKLVHLIWGVLKSGRPFDPAIGLP

SEQ ID NO: 286207 - protein, 345 aa, unidentified
MQSMYYIGLDVHKKTISYCVKDGSGRVHAEGAIPATRLDLDIWMKRLPQPWTVAMEATIFTAWIYGHLKPHAAAVKVAHPLMLRAIAAAKKKNDRIDAHKIADCLRCDFLPECYMASTEIRERRRTLRYRNLLVRQAVQMKNKIAVLLMEAGVSYNKQKLHKVRYFRELLATNQDIDDGLRSLLRLCRETVVRLGKTESALVRSLQRDSLLVERVERLMTIPAVGPITALTWALEVGDVQRFSSIKKAISYCGLCGAEQSSANIIKRTPLSKQRNKHLQTMLIEAAKMAPRNSPDLAMIYDREKQKGNANRATLAVARKLVAYLVAVDRRQKDFLIVERENRTAA

SEQ ID NO: 286208 - protein, 373 aa, unidentified
MKYTTVFVGMDVHKESFTLACYTNEKEKAEYVQRTEAHYSKVISYLEAMRFHYGKEVTFVCGYEAGCLGFTLYHQLTEHNIQCEVIAPTTMLVTRGKKKVKTDRRDAELIGRCLAHRDYSTVHVPTAKDEETKEYLRMRNDHKQALKKIKQQILAFCLRHNFHYHAGRSYWTEAHLKWLRSLEVGSMYREILEEYLLTYQNLLDKITRMDKRIEELAKEEEYAEKVKKLTCFIGIKTQSALSILTETGDFKRFATPQKYASYLGLVPGEDSSGEDQIRLHITKAGNRLLRTILVEAAQSYSRGRVGAKSAELKKRQEGNRPEIIAYADKANERLRRRYYRMVLSENKRHNVAKTAVARELACFIWGMMTGNVA

SEQ ID NO: 286209 - protein, 422 aa, unidentified
MNYKQNEKINQVKESTLVVGIDIGSTTQYARAFDWRGIELGKVFTFSNSREGFEAFKAWMQHLQDKYRKSDVIVGIEPTGHYWFDLGAYLEDEGILLVMVNPYAVKQTKELDDNSQSKNDRKDPKVIAKLVTEGRYSAPYTPDGVYADLRIMVANRKRLIREMTQIKNRFARWFAIYFPEYTDVFGDYEAQSSMLLLKKVCTPEAIVELGAEKINQIWRDAKLRAVGMKRATTLCETAKRSIGLKKGSSAARYEMKLLLEDYEYKKAQLDAVMEEIEKLCRKIPESEQMLAIKGIGVITVAGFLAEVGDVRRIESPRQIQKLAGLSLRENSSGKHKGQTTISKRGRSKLRAVLFNAAIPLIAKNPEFKSLHEYYTTRANNPLKKKQSVIAISCKLIRVFYAILANGVTYDAQKMLSDIHRQP

SEQ ID NO: 286210 - protein, 318 aa, unidentified
MSDGSTDTAGIDTAKEKLDVAVHGKVAVVGFENAETDFARLAEYLRAEGVRRVGIEATGGYERNVVRYLRKAGFEGIVLQPLQVRAFARMRLQRAKNDRIDAKLIAHYTYLFGAHNKTLPDARFDALADWLTFIEQVEADAIRLQTRLEHIRDTRLREIYINDIKNLKERAATERRGLTEALQAHEDLAKLYELVLSIPGIGAVTALSLVVRMPELGAVSREEAASLAGVAPFVHQSGKYAGQTHIGGGRAPLRRSLYLTACAAALRWNKPLIELYKRLTARGRSHKAAMIACARKLLIYANTVVARATPWAEQAPSA

SEQ ID NO: 286211 - protein, 360 aa, unidentified
MLAELVDAVVGVDTHRDTHEVELALPTGTPIGIRKISNDSSGLAELLAWILDRAPGPRVVVSIEGTRSFGVGLARAVAAAGLTVIECEQPNRKARRGKGKSDPIDAHLAVLAALRLDADRLPIPRADGDREAPRILLGTRHELTVVTTAQTNRLRALLLGGEDTERDLARATLTDPVLLAMVRRREPPQASREQTVRHGEIRRLAHAIRAGRHALAANRAQLQAIVDQIAPGLTERRGIGAVTAAQAIVSFSHPGRCRSDAAFAALSGTNPLQASSGKMVRHRLNRGGDRALNSAIHTIAITRIRCCPITKNYVARRTAEGKSSREIQRCLKRYIARELYRALNASTTLTAQTSAAPAAA

SEQ ID NO: 286212 - protein, 397 aa, unidentified
MYIVGIDIAKRKHEAAVIDGDGAVIIKPFSFTNNCSGYNRLLAMLAKAKLPLDEVSFAMEATGHYWLALFTRLQKEGFRVQVINPVQTNSIRSFYIRQAKTDPRDALLIAEVIRFGHFSESTLHPENIYELRELCRGRHAIVSMQADVKRKVVALLDQVFPEYETAFTNLFGDTSMAILQACPTPKELSEMPLEELCHLIEVSSHKRFRMAKARELQELARNSFGFAMAGDVFSTMIRLYAKHLDFLKQQVREMDRKIAEIMETLDTPITTITGIGPTLGAYILSEIGDISRFSSAAKLAAYAGIDPTMRQSGEYNGVRNRMSKRGSPYLRHAIWLAASSAVLHDPALKLYFQKKRDEGKPYMASVGHACRKMVSIIYAVMRDNKAYTPCIPNEISA

SEQ ID NO: 286213 - protein, 339 aa, unidentified
MEQATTIGLDIAKHVFQLHGADAAGHVLFRKRITRVKLLGFLAAQTRCVVAMEACAGAHYWAREIAKLGHHVRLIAPAYVKPFIKRQKNDAADAEAICEAAQRPSMRFVPVKTEEQQANGIVFRARDLRQRTQCVNALRGHLMEYGYVFPKGITHVETLIALVEDLQSSLPDSVRVILKLLIDTFTALEAQIAVLDAEINQRSKSDPTARRLMTIPGVGPIASTAITALVPAAEGFPAGRDFAAWLGLTPLQKSTGGKQKLGAVSKRGERTIRRLLIIGASAVVQQASRRGAPKGSWLAQMLARKPKMLVTVALANKMARIIWALLVKGGTYRTPAAAA

SEQ ID NO: 286214 - protein, 416 aa, unidentified
MQVIFERCAGLDVHRDTAVATVRSPGQRRGSRATETRTFKTTVRALADLGDWLVCEGVELVGMEATGVYWKPVFAALEGRFTCWLVNAAHLRNVPGRKTDVADSVWIARILECGLVRPSFVPVQEFRELRDLTRARTAVSQERVRVIQRLEKVLQDAGIKLTSVASQVWSKTARAVLEALLDGVTSPVELAALAKGRLRSKREALEEALEHRFRIEHHGVIVRGLLAHIDGLEQRLDAYDAEIAIRLAPHQEVLELIQTIPGVGAKVAQVLIAEIGLDMSGFPSSAHLASWAGVCPGNHASGGKRRGGRSRPGPKWLKAALTEAAWGAVKAKGTYLHAHHMQIKGRAGGFKALGATRHDIVVAYWHIVHDQVPYRELGPDWAARRFSPEQRARRLTAQLEALGFDVTIGPAGTGPA

SEQ ID NO: 286215 - protein, 479 aa, unidentified
MQRLPALSSEAPEAATGRRASHRVPAYEHPQRYLILGNRANANYSSGVAAATTQQMCVRRLVVNVNDHECAAAAGLDWAKDEHALCVIENSGRKIFEGRFAHQEGGINELCRSLVEMGVERLAIERPEGVLLERVLEAGITVLTIHPNQLKASRPRFRASGYRAKSDSFDAFCLAELARTDHHRFRALVPDSDETKALKVLSRAREDLVGSRVALANQLRAELEAFWGGAAILFSEIDSAISLAFLKRYPSPKDASRLAEKRLESFLSKNRYCGGKSALELLERLRKAPQGRAGKAEIEARREAVLALVGTLKVLVERIKGLEERIARAVRAHPDGEVFLSVFVSPNSTLTAASLVAHIGQCRERYPTNEALAAAAGMSPVAVESGKRKVASFRRACDKRLRRAFATLAESTRHHNRWAKDIYLRARARGCDHAHAIRILGRAWVRVIWRMWQDGMPYDPERHGGLRRFQSAEVLPQGV

SEQ ID NO: 286216 - protein, 371 aa, unidentified
MLTHEHGVAGIDPHKKSATIAVLDRRGGVVGSESFPISEEGIDRLLTFLLGTELTIDRIGVEGSAFLGRPLVLALTAAGYDVREVQANRTAERRKRRRRGKTDIEDAEAIARETLADPQLPPAGKHAAPSPAWQTLTVLRDWRASLVLQRVRLLTEAEAVLVTLPVTIRDTLPATSRVLPQLVALADGHTAPGRLAPADRLKLERLATSLLDITTLTQRIKELDRRIPALLAELGSTLTDLHGIGVVTAMDLLVEIGDPHRFTNEAQFARWCGIAPVPASSGEGHGPARRHRLDLGGNRAVNSILHIIHVTQARCHPPAKKYLARKISENKSKREARRCHKRQLANVIIRHMWHDAERHAQTTTIDHMAAA

SEQ ID NO: 286217 - protein, 348 aa, unidentified
MESTAKLPIIGLDIAKNVFQLHAVNPETGEIHRRQLKRSKVAEFFANRQPSLVAMEGCGGSHHWARTLMKMGHQVKLLPAKYVKAFLLRDKTDALDAQAIWVAAQQPHIKEVAVKSEQQQACLALHSMRQQLMKMRIMQTNSLRGLLYEFGIALPIGHHKLLSTVHDEVAQAQQENRLPEVVVVSVQEQLKRIDFLQGDIDALSARLAAMLKQNQQMRAVQAIPGVGPLTATALVATVGDVSNFKSGRQFASWLGLTPRQVGTGGKTQQLGISKRGDCYLRALLVAGARAIVGHSTHNSWVEQLLQRRHFNVVVAAVANKIARTVWAVLAKGVSFDPCKWSPVEASAA

SEQ ID NO: 286218 - protein, 386 aa, unidentified
MKVIKQNVGIDVSKETLAVCLVMLHEDLSVKVKGSKSFANNQDGFKQLLAWVLSKRAPEVRLSFTMEPTGVYYENLAYFLHAQKEIVHIVLPVRAKRYAESLPGDSKTDKLDAKALGRMGVERSLDVWQIETPIYKDLKQLTRERESLIKERTNVKNRLHALLNSANPFQKSIKRLKGLIKYFDKQIQAIEEDIKDLVISEEWLRKKVEQVISIPGVGLLTAVIVIAETNGFALIKSIKQLVSYAGLDVKIRESGAWKGKAKISKKGNVHIRKAMYFPAYTNMKHSKNYLGLYSRIFAKKQKSLIAATATQKKLLGLIYTLWKNETVYIEDYQQQKSLTERNKKISGNGETRPSFSFLPEQKLVGAKPPLNKIDFSPKLRKKPSFC

SEQ ID NO: 286219 - protein, 351 aa, unidentified
MNYVGVDIHKRYSVLVAVDERGRELGRSRINGNTAFGFAQFFGGLEGKSKVVLEACWNWGRIYDLLSEIGQVEEVVLAHPLKTRLIADAQIKTDGLDAYALATLLRGDLIARAHVPAKPTRQRKEVLRQRLYWARLRTRIRNRIHALIDRQRELKMPQCSDLFGRKGLSALNKLVLSEPDATLLREELGLLELIQGQIKAQEARIVEFNSNDEMTLRLQSIPGMGKILAAVAAAEIDSIERFSSAAKLCAYAGLVPRTHASGGKVYQGHLLKSRNKWLQWAFIEAAWVAVGCSAYFGGLYRQHRARGKNANIAITIIARRMSQICWTLLKERRDFIETFPGRSAVRLTAAA

SEQ ID NO: 286220 - protein, 387 aa, unidentified
MARKRTLSTLDTSIAYEAVGLDLAKTDVALAAFDSDHKEPYLIDRIPYDKLYELLANMAPTLVAMEPCSGAHQIAEQIQELGHEVMMISGRHVQAWVKDHCNGQKTDLNDAFAILNLAYDRWLTPIRGKTREECRLLALQASYRQLKGQRTKTMVHVKATLHAWGFPIRAGSFNQKALHELIDANREAFGDEVVETLHLMINRVHDLDHDIATVLKLLTEATQRDPRASLLRSIPGFGVLTTSRWCAVVGDIARFDSPKQTMAFIGLVPNNRITGHHTETSSGREARGQGKMSKRGDKMLRSLCILGAGALCLMVRNDRLPDCPFVASIKERLASPRPWFKVLVYVAAKLVRIATALLKYGETFSFEKAGISKAVLKQWELEKAKAA

SEQ ID NO: 286221 - protein, 372 aa, unidentified
MPRSRRLDDTNSTSQKKSVKPNKQIRGNSIKDKLIDPAKLKKTAFVGLDVHKKTIRISAMGADGNELANWAINNTTKSVEVAFKAIPKTAIAVMESSSVWKDLYFQIRDILGYKTILSNPRYTKMIAESKKKTDKVDAKILASMARGGYIAECYVPTKKSMDNRDLVRHRQSIIRSRTVYKNFIHGILLQRRIQISHTPFSTPWIAKVRKIDDHRIDINLELISAVNNALAKIDVRVRNAARIDLDAVLLMSIPGIGPYTALVVSSEIDGIERFNKSHKLCAYAGVVPSVKSSGDSIKYGPITHHGSSILRWVMTECIHSHVRFAKNSSVTKFYHRLSKKRGKSKATVAAASLLLRIIHNMLRERRTFVDVL

SEQ ID NO: 286222 - protein, 344 aa, unidentified
MENLLKHFVGIDISKKTFDVSVLKPVSGKEGKIAHKQFTQKAEGFSEMEQWLKAQDIFLNNQTLFCMEHTGIYNQPIVSWLTAKKALVWVEMAIRIKKASGFSRGNDDKTDSAMIATYAFRFRDKMQIWNQTDENLVQVKNLMAQRDRVINAISALTVPVEELLSMGCKSEAKQLENLQKGAISKLEESKNKIEATILILIKKDTNLFDKVKKVVSIKGIGMVTAVSFLVYTNGFSSFKTAKELACYCGVVPFVSKESGTSVKAKARVSHFANKKLKCLLHLCSLIAIRCDEEIKGYYERKVKEGKNKMCVINAVRNKLVARIFAVVRDNREFVDNYVNKVGLS

SEQ ID NO: 286223 - protein, 370 aa, unidentified
MKKKVLYVGLDVHKKTTDVAIAPGRSNGKVRSYGKIDSTVDALNKLIKKLQVDDKELRFVYEAGPCGYQIYRHLDANGIDCSVVAPSMIPRRSGDRIKTDRRDALNLARLFRAGELTSIYVPTVEDEAIRDLIRCRDDIKRFERKARQRLLSFLLRHGYQYSGKRNWTKGFYNWLATVKFSHSAQQVTLHEYIEATNECSQRIKRITEQIQVHAEEWSRARFVKAYQALRGVSLIVSTTVAAEIGDMRRFPNPKQLMAYLGLIPSEHSSGKTVRRGPITKTGNSHVRRALIEAAWTYKMQARISTVLLKRQQGLPKSVCDISWKAQTRLCARYRRLMARGKTKQTVITAIARELSAFIWAIDQEMQVAHE

SEQ ID NO: 286224 - protein, 176 aa, unidentified
MMIIGCDFHTRFQQIAMLDTETGEIVERRVEQERGEAQAFYAARPGPAQVGMEATGYARWFERILREHGHELWIGDASAIRAARVRQQKTDARDALHLLHLLLEDRFPKIRVSSPAERFRNSRKLVSYLGLNPRECSSGGQQRLGSISKPGNPLVRFLLGEAVQTAARTDPPLRRV

SEQ ID NO: 286225 - protein, 400 aa, unidentified
MILVGVDVASVKHDVAIMRDTGETIKANFTIPNNASGYKKLLAEIEKAEKLYPKDTIRIGLESTGVYSAALTEFLAGRFKESVILINPILTSMFELSIHVHYAKTDRTDAQGICKFLSKNQDIRPYAPVSYHTRQLRSLYRERTKINKRINQDSNRLKGMLHIVFPEFLSKKHNTLGLFELEFLSRYPTADSVKKETVKSMTKSLSSVSYIRAGREKIQKIIDTAKNSIGSTALGDGFIIAETARRILFYRGQIKEINEMIVGLVEKEYSYLLTIPGVGAVTIAGIVGEIGDVRNYHGSDSIVALAGLNPYVYESGNYQATHTRITKKGSSYLRNAIFMAVQSMYLHRAEPIYGYVNRKRKEGKKRVCALDHAARKFCNIIFSMMKSKAEFRPETISTKS

SEQ ID NO: 286226 - protein, 338 aa, unidentified
MKTYAGIDLHSSNNYIGVIDAKDKRLYSKRHDNRIEDVLNVLGKFKASLQGVVIESTYNWYWLVDGLMDHGYTVHLANPNAIQTYDGLKHTDDKWDSFWLAHLLRLGILPEGYIYPKHQRSVRDLLRRRVMFVSQRSSQILSLQSMITRNCGLNFSGAQIKRLRDEFIEKLFSDRHLVFTAKRNIETIRFLDRIVDDIQIEVASQIKLKKQFIKLLTTPGIGNILGLTIMLEVGNIGRFPKAGNYCSYSRCVESKKTSNGKKKAKNNQKNGNRYLAWAYVEAANHAIRCCRKAQTFFQRKMAKSNRVLATKALANKLSKATYYIMRDQVAFDEDKLFG

SEQ ID NO: 286227 - protein, 417 aa, unidentified
MNTMTMQPYAAFVGIDWADTKHDVCIQSADSLRREFAVIPHKVEEIDEWAQSLHRRFSGPIAIALELSKGPIVYALQKYDYFVIFPINPSTLAKYREAFQPSRAKDDPTDAELALDLILRHPERFEPLQPQSVEIRKLAALVEQRRRLVNDRVRLTNRLRNTLKQYYPQTLEWFDRINTKLFCDFIERWPTLTQVKRARTTTLTTFFRAGHTRNPALLETRLASIRSSQHLTLDEAVIAPNKLHALMLVGMLQVVLDAIKTYDQTIAELAPKHDDYDLFSSLPGAGPSLAPRLLVAFGEQRNRFKNAAELQKYSGIAPVTERSGTKHWVHWRWRCPNFVRQTFVEWAAQTINKSYWAGEYYRQQREKGSAHQSALRALAFKWIRILYCCWQTKTQYDEATYLKALQRRGSPLVAKAV

SEQ ID NO: 286228 - protein, 415 aa, unidentified
MLKIVYPICCGIDVHKTFVIATIATTDHENITTYQTKRFSTFTRDLKALAAWLSEHQCVDVCMESTGKYWIPVRNVLEPSCQITLAHPKYVRAIRGKKTDKKDSIWIADLFKHGLVPGSFIPPADIREIRELLRYRSKLVSFKSSEKNRVQNSLTVSNIMLSSVVSDTFGKSALAILEHLLKNPDEKDFDFLPLLHGSMLKKEADIALAIDGTITKIQADKITLCLCHMNNLKSYIADIESKAMQLARPYSGSLAIIQSVPGVSELSALIILSEIGADMSAFHSAKHLCSWAELTPSNDQSAGKKKSVRISRAGIYIKPILVQCANAAIKDKSFIHYRTRYEAIKHRRGHKRAIIAIARMILTAVYYMLSSGEFFNPGLYEKAQCKPGFVASSEAHAVKLLQRLGYVVVKEPESA

SEQ ID NO: 286229 - protein, 342 aa, unidentified
MLIIGCDYHPSMQQIAWWDNQSGESGEQRLEHSTGAAEKFYRELKQRGVQVRVGIEASGHTRWYERLLAELEMELWIGNPAKIAAQRVRKQKTDRGDAQLLLQLLQEDRFPRVWVPSPENRDLRQLLWHRHRLVQMRTRVKNQLHAIALNEGVQRRSRLWSQSGRAQLESFALDRWTARRRHDLLQLFDQLTPQIAELSQAVEREAERRPEVRRLMTHPGVGPITALAFVLVLGTPHRFRCGKQVGSYLGLIPCEDSSAGKQRLGHLSKQGNTLLRYLLVEAAQAAVRCDPQWRRRFVHLAMRRQRNLAIAAMARRLAVSLYWLWRKAEDPPAASQSGSHVG

SEQ ID NO: 286230 - protein, 416 aa, unidentified
MKIVRPICCGMDVHKNIIVATIGITNKKTRITEYIQETFSTLNPDLLNLKQWLINHKCFDACMESTGKYWIPIFNILEDEINIYLAHPKYVKAIKGKKTDKKDSKWICDLFKHDLIKFSFIPPKEIRALREISRYRYKLVGMRSSERNRYQNCMTVSNIGIGSVFSDPFGKSAQAIMKEVLESDIIEDEKILKCIHGSCKNKDKILDSIKHCNIETDQRFKMNESMTHMEELQVHINNCEIEIMKRAAPMFDQFMHITQLPGISTLSAILIISEIGVDMKQFESDKQLTCWAGLAPANNESANKKKSVRISKAGQYLKPLLVQCALGAIKDKEGYFGIKYSRIKKRRGHKKAIIAIARMMLVSIYHMILTGETFNPSDYESFRNPKPPIKQQVLTEESAIEFLKKSGFDVSKLTKP

SEQ ID NO: 286231 - protein, 310 aa, unidentified
MGQSFVGIDVAKAAVEVCVRPTGEAFAVPRDEVGLARLVERLTALGPALVVLEATGGYEASVAAALAEGGLAVVVVNPRQARDFARSTGKLAKTDRVDARLLAHFADAVRPPVRPLPTAAAAELGALVARRRQLVDMLRAEKTRAQQARSREVQRRITAHLQWLERELAGLDDDTRRLIRSTPVWRETDEVVRSAPGIGDVTASTLIADLPELGHLDRRRIAALVGVAPMNRDSGAWRGQRMITGGRAQIRQHLYMATLTAITHNAAIRVFYHRLVAGGRPKKVALVAAMRKLLTILNAMVRDRRQWQNA

SEQ ID NO: 286232 - protein, 347 aa, unidentified
MKFYTKQHTHYCGIDLHARMLYVCILDSQGETVVHQNIKANPEALLRLITPYQDNIVIGVECMFSWYWVADLCREKGIAFILGHALYMRAIHGGKAKNDKIDSHKIATLMRGGMFPEAYVYPSEMRGTRDLMRRRMHLMRKRSELLAHVHNTNSQYNLPEIKKNLRYAFNREGVADRFNDPSVSKSIDLDLNLIDFYDKQLSKVEWHIQQHAIDCDQHSLIILRTVPGIGKILSLVILYEIHTIERFPSVQNFASYSRLIKCKRESAGKSYGTAGAKIGNAYLKWAFSEAAVLFLRKNPDAQDWLKKKTNQHNKARALTILAHKIGRAVYFMLKRHTIFDQEKFLNI

SEQ ID NO: 286233 - protein, 339 aa, unidentified
MSIITVGIDLAKNIFAVHSVNEASKPELVKPKVARADLLPLIANLPPCLIGMEACTGAHHWARLFRQHGHTVRLIAPKFVTPYRMSGKRGKNDAADAAAICEAVTRPQMRFVPIKDEHQQATLTLHRTRQGFVEERTALYNRIRGLIAEFGVVLPQKVERLRHEIGAHLEDLPGWANRCVGDMLSHADRLNEHIHEYDHAIAEIAREDARCRRLMQLPGIGPTSATALVSSIGQGHDFNHGRQLAAWLGFVPGQYSSGGKARLGRITKAGDGYIRSLLVLGARAVLNSLKDKQDRFSRWARSLLERRGYWRATIAIAAKNARLCWAVLKYGEEFKLNAA

SEQ ID NO: 286234 - protein, 389 aa, unidentified
MKIFVGIDIAKLNHFAAAISSDGEILIEPFKFTNDADGFQLLVSKLESFDKNSIIIGLESTAHYGDNLVRYLVAEFYQVCVLNPIKTCQMRKNNVRKTKTDKVDTFVIAKTLMMQDDLRFITFFDLDMMDLKALGRFRQKTIKQRTRLKIQLTTYVDQVFPEIQYFFKSGLHQNAVYALLKEAPSPKEIASMHMTHLANLLKVNSHGHFTKEQAKELRILAQKSVGANDSAISIQITQTIQQIELLDSQLEKIEVEMTDIMKFNDSVIMTIPGIGYINGGMILGEIGDIHRFSNPNKLLAFAGLDPSVYQSGNFQAKTTRMSKRGSRVLRYALVNAAWNVVRNNATFKAYYDAKRAEGRSHYNALGHCAGKLVRVIWKMLTDEVEFNLE

SEQ ID NO: 286235 - protein, 353 aa, unidentified
MEQFIGCDAHKKFSVFVAVNEKGHAGEALRVAHERELYREFLARLPPHSTIAVEASGSYSWLVDEMERSGHCPRLCNPVEAKRRMGLTNKTDKLDARGLAILLRNGTLPEVWIPPSGLRDQRELLRLRIFLVRLRTRVKNRIHGTLARHNVQVPGADLFGVAARLELAARLPELPVHSREAVEQELATLDFLEMQIESAEQRLEAIMKVSVEADLLKTLPCVGKILSMVLMLEIGRVDRFPTAAHLASYAGLVPRVRSSGGHTRMGQICSNVNRNLKWAFVETGNLVVINQRRLAGTHVVRLYQRLKRSKNHQKAVVAVARHLAEAAWWVLTKQEVYREPQGPRQKALSSTHG

SEQ ID NO: 286236 - protein, 346 aa, unidentified
MNSDDPRYKLYLGVDTHLELHVATLINELGQVVKSKAFSANLSGYCELLAWCKSYGFLQKSGIEGTGSYGAELTKFLIKNGIDVYEVMRPNRMERRLKGKTDSLDSENAARSVLSGEAKVIPKSHTGPVESLRSLLVTRNSAVKARTQAMNQIRALLVSGPDELKQSLYLPKPGACATACLTRCSNSSEPLMISLVLLAQRWSFLNEQIKALEKVLKKLTLNTAQSLVSRFGVGANVAATLLVAAGDNANRLRKESSFAALCGVNPIPASSGKTTRHRLNRGGCRSANNALWTVAMVRMRSDPRTKDYVTRRTTEGLSTKEITRNLKRYIARELFPLILKDLAKLA

SEQ ID NO: 286237 - protein, 343 aa, unidentified
MLTNNVIAIDLAKNVLQVCHISIHGEMLSNRPLSRQKMKEFLAKAKPSIVAMEGCCGCHYWGQLAEKYGHEVRIINPKKVKGYLEGHKTDHNDALAIANAAIQIGIKFSRPKSLEQQSMQSLESSRRFLSRTVASLGLHIRSTILSYGVANPRGEKGLKASVYAALDGETQIPKTVVSVLSMLWEQYKELKAQLISYEKEKNALTRQIEPCQRLMKIEGVGEATAAMLYNTLGDGKQFKNGRQASAFVGLTPKQHSSGGKVIMIGIDKCGGVKELRSLLYLGAMSYVGRLPERPKTQKDKWLRSIIDRIGFKKACIALANKVVRTAWAMLRHDTEYKPVLLTE

SEQ ID NO: 286238 - protein, 318 aa, unidentified
MDDDAEVVEEIRVANANLDDVAEEYAGAKAEIEATSNYYTVYDTLDEHLDVVVADPSQTKSIGYAEVKNDRLDANLLAQLRRAGMIAESYVPSEELRERCALVRGRKRLVEKRTDVKNEVHTLLDKHGITYDWDPFSVNGRDILAGEDVSLGIVGDQLMESFLLIIDELTAQIEELESLIEETAASLEETQLSMTIPGVSFYSSLLITSEIGEIDRFDEAKQVVSYAGLDPVVRESGDSRTEGSISKRGSGDLRWILVQYVQTAIHRCNDPYLGRFCARLKQRKNHQIAIVATARKLLVSIFHMLEREEVYDPPEVSA

SEQ ID NO: 286239 - protein, 341 aa, unidentified
MQAITTIGLDIAKSVFQVHGVDADGQVVVRRQLKRRYVLAFFEKLAPCLIGIEACAASHHWSRQLRALGHTVRLMPPSYVKPYVKRQKNDATDAEAICEAVGRANMRFVPTKTPEQQSGLVLHRTRHLFIRQQTSVINAIRAHCAEFGIVAPVGRRGVEELLNVIANEKRVPEIARACLSALGDQLRRIKEQILEFDRMIRAWHRSCETSRRLDEIPGVGPALATALVASIAEPRTFRSGRDFSAWIGLVPKQSSSGGKPRLGSISKQGDRYLRGLFTAGALAVIRYAKIHRIGHRPWLTALLARRPTKVAALALANKIARIAWAMMARGERYREPITLAA

SEQ ID NO: 286240 - protein, 411 aa, unidentified
MPKLHVGIDVSLKAHHIQFMDEAGQDLASFQVSNDPHGADTLIHKVLETTQTKHMDRVVVGMEATANLGWHLAHYLKQQLEDHAPHLDAQIHVLNARRVARFKKAYDHLPKNDRIDAWVIADHLRFGRLPQAMTDTIRYEALQRLTRTRFHVMQTMSRDKTFFLNQLFLKFSGLRQDNPFSDTFGATSLAVIQELEPEQIAAMPLEDLVALLVDKSRNKFDDPKQIAQELQKVARRSFRLDKVMQDPVNLSLSVTLNLIQHMDAEVKKLDRAIARLMKAIPNTLESVKGIGPVYAAGIIAEVGDIRRFKNHNALAKYAGLVWNQYQSGEYEADETSRMRTGNKYLRYYLIQAADQVRRHDSEYAEFYRKKHDEALKHQHKRALVLTARKLVRLVFTLLSTDQLYTPPERRR

SEQ ID NO: 286241 - protein, 415 aa, unidentified
MYYVGIDIAKSFHVVSVIDDNETKVINKPFKINNDAKGFEKLITVLNSITLDKNKFTIGLEATGIYGENLQEFLKSKVYLVKLLNPFQTSRYREQITLKKVKNDEIDSLVIALLLKSGKFSSGYITDDEYQSLRTLYRNRATIQADMKDVKKRILTQITVTFPEFEGFIKPFNVTGLVLLDKYPTAHHYKHSSVDRIMKLFHHIQGNNFTQSKAIQLLKLSKESIYSGKAKDARAIAIRSTIRLLQMYLSELDIIESEISSLLENSSVETTVDEAGIEIQKANNLLANLKSIPGVAEKTIAALISECGDIMRFPSIPKFIGYIGLFPTENSSGNSKHIGHLSKRGSPLAKHALYMSAVSCLIHNTQLKQIYDTKRSQGKSKKEALIVVSRKIAVIIYSIIKYNVPYDPNRVFAKS

SEQ ID NO: 286242 - protein, 438 aa, unidentified
MISAAIERCAGIDVHKKFLAVCVMVGALEGEPRIEKRRYGTTVAELNDLREWLRSQGVTHVVMESTGSYWKPVFNVLEDAVRVYLANPQEVKNRKGHKTDDKDGWWLAHLLRHSMIQPSFIPPRAIRELRDLTRRRKRLLGNSTSERNRVQKILEDANVKLGNVLSDVFGASGQLMLDALLEGQATPVQVAQLAQRKAKKKIPQIIAALEGHQMSAHHRQLIRYSLDHLQFLEEQILKLDKDIAAKIREAQLEPQWQLLQTVPAIRETSAATILAETGGDMTTFPSVKHLSSWAGLCPGNNRTAGKNKSSHTTGGNPWLRSSLVECSWAATVKRNCFLRDKFWRIVSKTRDHKKGPALIAVAHTLLQLVFQVLSTGKPYAERGQPPLDERQRNRMIRHHVRRLGKLGIGIYSMQPAATAGLGRPLKAVLLEPRPQATS

SEQ ID NO: 286243 - protein, 426 aa, unidentified
MRAIGLDVHLEFCEVAIAEQGEVRSAGRIETKPEQIELFARSLGAADRVALEVTGNAWEIKRLIEPHVAEVLVVSPNDTGIRQARAKTDRLDARTLARLMASGELDSVWVPDRATWAMRRRLQRRGQLVWARSRAKNQIHAALMRCLVGRVPFADLFGVKGRRWLAELELPEEEREAVDSAMRQIEFLDSEIAAVERLIAAEALESPEIRRLMSVPGVNVICAATFVAAVGDIGRFGSARKLTGYLGLDPRVSQSGSGPASHGRISKQGSVRARHALVEASWSTVRQPGPIRAFYERIRARRGHQVAIVAAARKLACLCWCLLTREEDYAYAQPSLTAKKLRRLELTAGAKRNDPKARGTFATRQRMRAAERQLAEQAEAAYRRTVADWQRTQAKRKGAGATPGRASGGPSSGQAARQVQAPGPAL

SEQ ID NO: 286244 - protein, 352 aa, unidentified
MEMIALDCHKHYSVASVQSPEGRSLAECRIEHRRGSIRAFLASYSPGCPVAVETIGNWYWIVDEIEQAGKVPRLVHARKAKLMLGSINKTDKLDVRGLNRLQQTGTLPTVWIPPAGLRDQRELPRTRMVFATARTRLKNRIHSVLDKYGLQDQLTGVSDIFGAGARERLEGCIKQLPPQAAYTSDLLLEQLDAVQERIEALEQRMAEVFRPTEELKRLDTLPGVGLILGVVLMLEIGDIQRFRCAERLASYAGTVPRVHASGGKTHYGRTRPDVNHYLKWGYTEAANAVAVHRESLAHRHVSQLYSRIRNRRGHASAVGAVARHLAEATYWMLTKKESYRERGITEVSPQGL

SEQ ID NO: 286245 - protein, 371 aa, unidentified
MGITDTNGRTEYKQARFSSFTKGLQKLADWLAKYDCNDVCMESTGKFWIPVFNILEKTCWVTLAYPKYTKPQKGNKTDHKDAKWICDLYMCDMVNPSFIPPPDIRQLRDLMRYRSKLTNIMTSEKNRALNCLTVSNLKLDDVFSDVFGKSSRSVIRYILEHPGETFQVAPFIDRRCKHPVEEIQAVIDGTISHQQAVKLRECLQHLDELEVHKTNVEKEILCLVQQYPYQLELLQTVPGFSGNIMTAIALISEIGADMSVFPSAKHLVSWAGCCPRNDQSSKKVKSTRISRAGVYLKPLLVQVAIQPFTANADKLSAAGALEIRCQICDGRFLSMWAALFIFLGCPLPPCPKDLHVHNGRIVILASVAWIF

SEQ ID NO: 286246 - protein, 320 aa, unidentified
MERSGFVGIDVSRDCLDVAFRPSGKRAQVSNDRSGIARLIRMLERSKPELVVLEASGGYEIAALEGLLTKNIAVALLNPRHVRSFARASGRLAKTDVIDAEVLAHFADVMKPSPTRLADPETRTLRAFVNRRQQLVHMVTAELHRSRRSLEVVRAGFAATLRCLKREIAAIDKQMAALIERDSAFRPKAVLLRSAPGIGAVATATLLARLPELGSLDRKRIAALVGVAPFNRDSGRFKGKRMIWGGRRDVRGILYMSSLVAIRFNPALREFYDRLRKAGKSPTIAITACMRKLIVMLNAMLKSSSPFVEPGVPLLPATST

SEQ ID NO: 286247 - protein, 384 aa, unidentified
MKQTQETLRIEDSMKEAILYIAFELSHRKWKLGFSNAEKMRTVTIEARDLDKLHAEIEKAKQRFGLEGQIRMVSCYEAGRDGFWLHRYLLSCGIENVVVDSASIEVNRRKRRAKTDRIDVRKLLHKLLRYHGGEQLVWSVINVPSEQAEDGRQLHRELEVLKKERTMHRNRLKSILIQQGIVVSNPSSRKFLIQLETFRTWDGKELPADLKSRIIREHDRLRMVEEQIYALGKEREKRVAAADTDAMKQVEQLMTLVGIGMNSSWKFVMEFFGWRDFKNGKQIGALSGLTPTPYDSGSSVREQGISKAGNERVRTLAVEMAWVWLRFQPQSKLSQWYLKRFAEGGKRMRRIGIVAMARKLLIDLWRYLEHGVVPEGARLVGGVK

SEQ ID NO: 286248 - protein, 363 aa, unidentified
MNQRTSVGLDVHARSVVACAIDGETGEIHRRRLTPEYGEILGWIQSLPGLGKVVYEAGPTGFGLARFLLAAGIMCVVAAPSKLQRPVGDRVKTDKNDALHLARLLHLGEIVEVTIPGVAQEAARDLVRAREDARGDLMSSRHRLSKLLLRQGIVYYGGKAWTAKHEMWLRSHRFDQPALQMAFDSSFEAMLMTVQRRERLDEAITTMATDSEFTAVVNRLGCLRGISTLTAFGLAVEIGDWHRLTGRSIGAYVGLVPTESSSGASRSQGGVTKTGNGHVRRLLVEAAWHHRQPYRTPGATMRRRWELAPPAAQARGHAGNRRLHDRWEMFNTRKKRSVVANAAIARELAGWCWSLAVLDEPTQ

SEQ ID NO: 286249 - protein, 343 aa, unidentified
MDHFAGLDVSVKETSLCIVDDAGRIVREVKVASEPEALLAVLTNPACHFKRIGLEAGPLSQWLFNALAEVGLPVICVETRHMRAALKAQINKTDRNDARGIAQMMRAGLYRPVHVKTLRSQKLRMLLTHRKLLQSKAIAIENDLRATLRNFGLKVGVVGTVKFEARIKELVDNTPDLVVLVEPLLIVRRVLREQIGILHRRLLAIVRNDAVCRRLMTVPGVGPVVALTYRATVDVPYRFRNSKAVGAVFGLTPSKHQSGESNRTGGISRCGDEMMRMMLYEAAHIMLVRSAKWSWLKAWAMKIARHRGLKKAIVALARRLAVIMHRIWVDGTEFRWTREVAAA

SEQ ID NO: 286250 - protein, 411 aa, unidentified
MSVHAAPVTASTVVVAVDVGKSSAVLSVTDAVGRRLLGPVGFTMTRSGLLRVVDRVRGVLPAVGVAVKVGVEAAGHYHRPLIELSTWPGEWELLELNPAHVTEQRRVQGRRRVKTDAIDLEAITELLLAGRGLPVSGRGVVIGELVAWAAHRARRIQTRTATKNQLLGQLDRSFPGLTLALPDVLGCKVGRLVAAEFADPARLASLGVARFVRFAGARGLQVRRPLAERLVAAARDALPTVDAAVARQVLVADLALLADLDAQVAAAEAELARLLPLSPFQPLTTVPGWGVVRASGYGAGVGNPDRWPGPRQVYRAAGLSPMQYESAGHRRDGSISREGSVELRRALINLGVGLWQCDPAAKAYAAGLKARGKRGGIIACALAHRANRIAFALVRDQTDYDPARWTRPAGH

SEQ ID NO: 286251 - protein, 386 aa, unidentified
MKRNDLSRSLVAFDQASTMVSVVELGFRSWLVAGLVPGLTRQPLKKLGPDAEALLTLLRRWQGEATKAGNAINRIVVAFEAGRDGFWLARWLRARGIEAYVIHPTSIPVSREHRRAKTDRLDAGLLIRAVLGWLRGEPKHCSMAAIPTIAEEDARRPNREHQMLVQEQTRIVNRMKATLIRFGIRNFKVKLRKAGDLLVALRGPEDEPLPPNTIAELSRHMARLHFIREQIKAIEQARLEQLKQAPRKGTHPMLLMLAQIIGIGVETADMLVHEVLSRHLRDQRAVARYAGLTGAPDESGIKRREKGLARAGNARVRRGMVQLAWRWLLHQKNSELAQWYETRTAGAKPAMRKTMIVALAHKLLIALWRYVTTGELPAGVALREAT

SEQ ID NO: 286252 - protein, 320 aa, unidentified
MQSILDLGADVDSRYVMVACAAGSFKPHRIGNERKAIRAWLRTVPRGSRLAMESTGSYHELLADLAHQAGLQVFIVNARDLRRYGQGIGRRGKTDRMDAEVIARYIAREHEQLHAYVPPTDEQRLLARLIGRRAKLVQAKGSVRQSLGGVPALQSEARRLIGHIDRVIASLDLLMQRTVKQMPAVHEAVGHIATIPGFGALTSACLGHRFTRVPYSTSDAVVAAAGLDPRPDDSGLREGRRRLSKRGPAEDRRLLFNCARSAAQTNIWRPYYEAQLTKGLSKTAATVVLARKMLRVAFAVYKHRQPFNPLLIGGGALQRP

SEQ ID NO: 286253 - protein, 349 aa, unidentified
MNIVAIDLGQSKSVFCKFDTTTGNCRFGGLTTTAERIRTLLQRERPDQVVLEICPLAATVHDVATELGLEVIVADTTQDAWRWKNNKRKTDRDDALKLARLAALGQLNPVHIPSPTMRQRRRAVEHRQTLVAEVTRCKNRIRALLLPQGHRLPRGKNGWALKSVEQLCVLSKPLSACEPDELWRGLLQLELCRLESVLHLRRELDAKLDELARADARTRRLVTIPGVGPRTAEVIVAVLDDARRFRSRRQVAAYAGLTPRRYQSGQMDRQGRISKRGSPLLRQVLNQAAWVAVRCNPHLRGVFLRISAGRKGRRKQAIVAVMRRLLVIAWALLRDETCYRPRAVAASAA

SEQ ID NO: 286254 - protein, 347 aa, unidentified
MRKIAYLSMDVHARNCVLGDMDGNGKFRGNRSFITCENNIINALKAVKAKRKYLVIEAGPLANWVAQTASDYLTQVFISDPRENALIYKSSQKYDKVDTKKLCRLLRLNEFKEVYRPESDQRAIFKAAAQHYLDLRDQLTAVKNKIKAKYRQWGVIDVFTDSVYSVSGRDKFLKQVEHHPICLQLKRLYELMDHIGAIKQDAQKAMISLGRNYPEIKEFKKIPGMGPIGAHTFDAYIQTPHRFAKRNRLWRYCRLAVTDRSSDGKPLGYKRLDKSGVGELKALSHRAFMSAMKSDNEVKRFYLQSLQRTHNHKHARLNTQRKILSVMRNIWKKGKAYRAELFLDPSI

SEQ ID NO: 286255 - protein, 344 aa, unidentified
MSEVSMIGLDISKHVFHAHGVDGRGRAMFRKRISRGKLLDFFATQPSCTVALEACGGAHHWARQLAQLGHQVRLIPPAYVKPFVKRQKNDAIDAEAICEAAQRPSMRCVAVKSEEQQAAGMVFRTRDLLVRQRTQLMNAIRGHLTEYGWVAPKGPSHVAMLAGLIDEEEMANSLPGAARMMFRVMLDLLSGLSRKIADLDKEIARRAREDEVSRRLMTVPGIGPISATAIVALAPPAESFAKGRDFAAWLGLTPLQRSTGGKQKLGAISKMGERTLRRLLIIGSSAVVKQASKRGAPRGSWLEQMLARKPRLLVTVALANKMARIVWALLVKQENYRAPVAAKA

SEQ ID NO: 286256 - protein, 472 aa, unidentified
MKSKSSRKRNPVDPVAEEIPDAEHELVIERVAAIDVAKASGKVCVRLPGKTGRRFSRVWDVPARTGAVSELAEQLIESGVEKVTIESTSDYWRIWYYLLEAAGLDVQLVNARDVKNVPGRPKTDKLDAVWLAKLTEKGLLRPSFVPPAEIRQLRDYTRLRVDLTRERTRYWQRLEKLLEDALIKISAVASTLDTLSTRDMIEALIAGERDPGRLADLARGKMKAKRSELIAALDGRFDDHHRELARMLLDQIDTLTAQIATLTSRIEQLLAAMPDTRSRGDGGTGGDPDRPSTGHGVEPETAARFTDATLLTPVERLDEITGIGELNAQVVLAEVGLDMTRFPTPAHLVSWAKLCPRTIQSGPATRGGKTGRGNPYLKGALGEAAAAAARTDTFLGERYRRIVKRRGKLKALVAVARAILVVIWHLLANPEARFRDLGPDYHTQRIHTERKLRNHIAQLTAMGYRVTLEPAA

SEQ ID NO: 286257 - protein, 353 aa, unidentified
MKYVGLDWAYRSAQWCALAPGGELAGEGRIAADRDGLARLVLELGDEVKACLEMMSGALCVRDELVACGWQVEVADARKVKTVAPLAAKTDKVDARLLAELSRRQLVPALWLPSLDERALRERLRRRMHLVRLRTSAKGRIFGLQTQWGVRVSLARLRRRDGLTLLERAGVPEVWRRSISECLALIDFLDARIAPLEAELRPFAKADPRALLLDTIPGVGELLALTIAAEIGEISRFASPEKLVSYGRLAPRVHQSGQARPRSGPLSKSGSRLLGWAAVEAAQQAWRESNPWHDLYLDVGRRSGHSNSAKAAVARKILLAAWHILSRNEPFKPAPRSTGGTSVPESSRLALAA

SEQ ID NO: 286258 - protein, 425 aa, unidentified
MSVMVQVETTNQKKEGNKMISIGIDIAKEKFTVCALEQGSKIIWKPFDVHLNKTKVEEFLKKLDTLNEEVKIIMEATGKYHLPILYELKDKEYFVSVVNPLKMKQFCRVLNFRKAKNDNIDAIQIAEYGLMYWKELQEYKVDSESFRILKELNRSYQHYMDLRINQMNFIDQTISQTFPRIKKLIPHASGDFSKDKLLDFLEIWWHKDLVLEKPEEKFIEDFKNWAKEKRYHPNADKAKSIYKLAEESISIQPSNSSYIKTSIQEGIELIKHINQILHTILSQMIEISEPLEEYQEAKKFSGISDKLAVQITAEFGDLSKFKNKKSLISFVGIDSPPYESGNFKADQRKITKRGNAILRKVGYQAMKCMMSAKDTENDIYLYMVKKEKDGKAKKICKFAGLNKFLRTYYAKVMASKQEKKLLKVA

SEQ ID NO: 286259 - protein, 411 aa, unidentified
MLMETIVKKACGLDVHQKIIVACIMRQGIKKQIKQFGTTTKELLLLKHWLQKNKITHVAMESTGVYWKPVFNILGDAFELLLVNARHIKNVPGRKTDVKDCEWICRLLRAGLLSGSFIPKEDIRRLRDLTRYQKKLQHQIQNEKNRAHKLLQDTNIKLTSVLSDIFGVTGRKILDMLSKGITQPEKLAEAFNKYVSDKKEDGLEALEGKFTMHHQLILKSMLSHIDFLGHQIDGLEKQVMQLIKPYYLEYKLLQTIPGVKGKAANTIIAEIGADMETFADEKHLVSWAGLCPGHNESAGKKKRSRLTHGNNYLKAMLIECAWCAIRQKDTYLRAKYYSLIPRMGKKKALAAIAHKMLKACYFILKYKLEYKDLGPEYLSRNKKEELLKYYLKRLGKLGYTADLQPDQQEVA

SEQ ID NO: 286260 - protein, 418 aa, unidentified
MTKKLDTTFIQIVHPVCCGLDVHKKKISACLITIDEQGKEQYEIKEFGTFTNDLFVMRKWLTDNNCPIVAMESTGVYWRPVHNVFEGFMEVILVNARHIKNVPGRKTDISDCKWLAGLLRHGLLRGSFIPPKEIRQWRELTRLRRSYTESLADYKRRIHKLFETANIKIDSVVSDLFGVTGRNLISLLCDESELSLSNIKKNAKGTLKSKSNELHSSIHGFFEDHHRFQLIGMMEIITNFEQKITEITKMLNSLTAGHQNLLDRLDEIPGINKKSAQSIVSEIGVILDDFICMAALASWAGLCPGNNESAGKRKSGRSSVRSHPFKTILIEVAWAAIKKKGSYYRAKYFKLKARRGAKKAIVAIAHRISKAIYNIIKHGATFKDLGEDYLTTQTKQRAIKNIKNRAKQLGYKLVPCMN

SEQ ID NO: 286261 - protein, 345 aa, unidentified
MEHYVGLDVSLKLTAICIVERTGKIQREGVVHSDPEAIAEFIKSNAPHVVRVGLETGATSTWLWTELKKLGLPVICIDARHAKAALKMQINKSDRNDAVGIARIMQCGWYKEVRVKDLDSHAVKALLVSRALLVKIKRDLENQVRGLLKNLGLVIGPAKMNTFALRAAGLTEDRPELAAAVTPLLKARMAIEQQIAELDRKVMKSARNNAQVRQFMTAPGIGPITALCFLATVDDPGRFRRSRSVGAYVGLTTRRFASGEIDWTGRISKCGDKMLRSYLYEAANVLLTRVAKWSALKAWGIRLAKRSGLRKAKVAVARKLAVILHRMWIDGTDFRWSKETAGQTA

SEQ ID NO: 286262 - protein, 418 aa, unidentified
MTAINSIASTVLVAIDISKHRHEVLIGIPGKKRRRRLTIMNTLEDFERLAGFIAGYQMPVRIGFEATGNYHRPLAYHLGQAGFDLRLVSSVALARTREALHNSWDKNDPKDAQVILHMLEIDAVQFFHDPLVTGTADIQELSKTHEIVSRSKTELWHRILTHYLPLYFPEADRFHRSARSDWFLAFLEKYPTPHMITAMTEEAFIADAWRVVGRKVSKERLLSDIYATAAGSVGLPVQPNSDAVRMFRLVLAEGRSLVRQRNEIEARAVELLSDHADYQLLTTIPGIGPINAMTVLAEAGDLRRFRHHRQFLKFCGMDLATVQSGMFRGQSKISKYGNARLRRTLWMAGQTAVLKRTNSFRDKFERYISKDRHNAHLRRKAYTAIAAKMARTIHAVVKHGEPYRPFFEGVSPGGKTSL

SEQ ID NO: 286263 - protein, 312 aa, unidentified
MSMSSRYLGVDVAKDTLVIAFERHRWEYPNSKTGHRKFIAELKKHSGPLHVVCEATGPYHLPMCLALQAAGFAVTISSPARIHYFGRSEGVLAKNDPIDAALIERFANAKRPPADPPLSPQQIALGEMLSHREQLVEALKVIRTHRQQVLDAALAKEIDRSIAAFEQRIKAIERRLRETIEADPRWQQRYQILTSAKGVGFVTAVTLLVKMPELGSLNRGQCAALAGLAPYAADSGQHHGRRSIRGGRTQVRNVLYMAAISAARSNPILKQIHQRLLAAKKPFKVAITAIMRKLLIYLNALLKQSAPAATPA

SEQ ID NO: 286264 - protein, 308 aa, unidentified
MRFVGIDVSRDWLDVHVVPEGESFRSPNNSDGIDQLAARLRELSPERVALEASGGLETLAVAELSAAGLPVAVVNPAQVRSFANALGRRAKTDTIDAAVIAAFAAAMKPPVRQLPDEATRLLADLVSRRRQIIAMIVAEENRARRATARQTLKSIRRLLLALKRELESLDEEMDGHIRKSPIWLVRLKLLTSMPGVGEITARTQLAELTELGRLDRRQIASLVGLAPFTRQSGKWRGKSFIGGGRSGVRASLFMAALTAIRFNPQLKAFRDRLVAAGKPKLVALVATMRKLVTILNAMIRDNQPWKSA

SEQ ID NO: 286265 - protein, 355 aa, unidentified
MDSTKYIGMDVHKETVSIAVMNSGGKLLMESILETKAATILQFIQGLQGNLYVTFEEGTWAAWLYDLLKPHVTKIVVCDPRRNALLKEGNKGDQVDARKLAELLRAGLLRPVYHGENGLRTLKELSRSYLTISKDLTRVMNRLKALYRGWGIACEGATVYAPHYRSEWLGKITEAGVRRRAEFFYQQLDGLQALRQQVRRDLLAESRRHSERELLRQIPSIGPIRAALLMALIQTPHRFRTKRQLWAYSGLAIETHDSAQYRYVAGQLQRSKKPQQLRGLNRNHNHDLKAIFKGAATKASSGAGPFHDFYEALLTKGMRPSMARLTLARKIAAITLVVWKKGAHFDAEQLKPQAA

SEQ ID NO: 286266 - protein, 324 aa, unidentified
MDGKLYIGIDVSKDWLDIAGHDAGQAVGRGVRIANTAAAVTAWRVTLEPSQIGLIAFEPTGGYERVLRQDLVAAKLPFARVHPNEVAAFRTRCGVKAKTDARDAQLLAEFAARELSRRELSRRALGCGVEGDLALREMTVRRRQLVDLLQAERCRAAIAQAGIVRADIGGIIGVLTASLDAIEAAIAARIAANAELAQRAANLRTLKGIGPVTVHTLIAELPELGLLTGKEIAALVGLAPRNRESGKRVARASTGHGRPGVRRVLFNAARSAMRWNSIMRDFYQRLVSHNKRPGKVALTAVMRKLLVTLNAIARDNQPWAHRDT

SEQ ID NO: 286267 - protein, 422 aa, unidentified
MENTAARKRKQVPEGYLIIGIDPHKKRHAAVAITQDFTIRDKFKFDNTREGLEVLVRRVRMEMVKAGCRGVMFAIETGGHYWRNIAYFLDEQGIPFRFINQYTLKRRREGKDLNRRKNDYRDSEVAAQLLCTGEFVESTLPQGVYAELRTAHNAYRRLVKERTRITNLIKALLDSLFPEFTHVFKDPCGVTAMKVLTTGCVPSVMSAMTEEEFVAAIEAKYEGRHLMRRKLKALHGIAKRSIGIAAGARSLSLEVAFLCEKIETIRRHISAIDEDLAKLVHQTEEGKYLLSIRGLNYISVAGLLAELGSFKSYRSAKQMIKMAGSNPTESESGGKRSTHTPMSKQGRPVLRYCAWTAVVPMLRFNADFRAWAKQRRERPVHANPLNGREVIGAALNRLFRLAFALVEKQVYYQPSEPAESVA

SEQ ID NO: 286268 - protein, 400 aa, unidentified
MRVVFGIDVSKVSSEVAILVNGEKVHNYTMSNDAIGFSRLLGDLRTVHKPEIIFEATGVYSRRLQAFLDEHGYAYTRRNPLEAKKQLDSLRVRKTDQIDAEKLAQSQFVLNRKPTYVQEEVYQNLRDLSRFYQNLTEDIVRAKNRLHKVLQVTFPELENILSTPSGEQYWNLVIAFPCKDCVLELSKDKLSESIRQSTSKRISDKRVAYLAEKLTALANQSYCAVKKTSPILEEVRYYAKELLRLYEQRQAVLDEMVELAQPLPEYDILLSIPGIAETTATSIIGELGDIRRFQSANQINAFIGIDLRHYESGNFLAKEHITKRGNPYARKILFKCIHNIASASNTNPCHIADFYEKRKRQSQTTSTKPHTIASIHRLIRTMYYLIMHNKLYDYASTQNR

SEQ ID NO: 286269 - protein, 394 aa, unidentified
MKLIGIDIGKNKHFFCVMDQQTGEIISQPVSFSNDKEGFDFLVQKIKSYPKDSILIGMEDTGHYHFALLKYLLDLQYTVALINPKTTDFNRKIQGGITKNDKLDTINICDVLDTPERKKQYRITKVNSFDLYEQKQLTRHHHNLKEEENVYKNRLQKCIDIVFPEFNKLFNSKYGIVYMNILKMFGSAENIANTDIRTIRKCFEIEGRGNRISLTPERLKECARSSIGISSSAEVIQIKHLTAQIELIEEQLTEIDKKIEEFSIQNNSPILSIPGISHFSGTSILAELGDISNYSKPSQIIKFAGVAPLHYESSQFNAQHTAITKKGSKYLRKTLYQIILPVIRHNPVFNKYYQLKISQGKGHRCAQGHCVRKPLRIIYHLLKTNQQFDPQLLR

SEQ ID NO: 286270 - protein, 464 aa, unidentified
MGHARARKIPAQLVEDEEYQLRHERVAGIDIAKAKADVCTRLPPQRDGGRRASRVEEVPATAKAILALAVRLIADGAELVVMESTPDYWRMWYYLLEGAGLSVQLVNPAHARQLAGRPKTDRLDARWLARLAEMGLLRPSFVPPPEIRALRDLTRTRLQLVRDRSREWQRLEKLLEGALVKLSSVVHSLAKVQSARAILEAIAAGERDPKALAALAHPNVKGGRAAVEEALGGMALGDHHPMLIRVHLDHITLLDRSVAEVEDEIEAALDAIPAAWGTDPGGETGPGAGRGPDPAVLPAAERLAEIPGVSPALARAIIAETGLDMTRFQTADHLVSWAGLAPVARQSGPRSRKPKKGQGDAYLRGYCTQAANGAARTDTFLGERLRRLSRRLDGNRARCAVARSILVIVWHLLASPDDRFADLGPGWHQRKTDTDRRTRSLMNQLRALHPDADVNITIVPGTAA

SEQ ID NO: 286271 - protein, 389 aa, unidentified
MLLDHPSDGLTAIRTHIGAIFVSLELSRSNWLVTSLSPGKGEKMSKHSVTAGDVAGLMKRFADLRRKAEARTGESYPIITIQEAGLDGFWLHRVLQQNGIESHVVDPASIAMPRRRRRAKTDRLDGETLLRALLAYKRGEPRVCAMVVAPSPEEEDRRRICRERRSLIAERITHVNRIKGLLFAQGVSDYEPLRRDRRARLEALRTGDGRELPAHLKAQIGRELDRTELLLEQIKSVEAEQDALLAAARKPASEEAAPDPVTMLLALKGMGANFAAVLWSEAFYRRFSNRRQVAAYAGLAATPWQSGGIRHEQGVSKAGNPRVRTTMIQFAWLWIRHQPQSALTRWFKQRSPQGRKRAIVALARKLLVALWKYVTQGVVIEGAVMKPAA

SEQ ID NO: 286272 - protein, 308 aa, unidentified
MFVGIDISKLTLDICILKNENDFIHLKIKNNLVDISKFISKLSTDSFVVFEATATYSYTVSSLLTEHSIPYSELNPNKLSHFLKYFSDKKTDKEDSYILAFYAFMFKDTIKTTKFNHSNKLLKCNQSAINILNKISTQLKNFLDGQRTIINLDLEKKILYILENIETNKTELESDLFDYICLTIPETLEILKNEKGIGKNLAIHLFPILDDNRDKSYKQIISYLGLSPKIFESGTSVKKRSSINKKGSNLIRRSLYMSSLSCVRFNPKFINFYNRLVLTGKPKKLALIAVCNKIIRHLKNQYFRDSYE

SEQ ID NO: 286273 - protein, 363 aa, unidentified
MTDGICFVGLDVHARKTAAAAVQLGSGEVFKAQLSGAPADALQWFATLPGPVRAVYEAGPTGFGLARAARAAGVEVMVCAPGAIPRQPGDQIKTDTRDALKLARLLAAGQLRPVVVSAPELEALRDLVRAREDLRGDLMGARHRVGKLLLRRGLVWDGPGAAWSQRHLRWLGTIRFDDELVEVVFGEYLAHHEVLLARRDRLDKLLLEQSTQGSWAPTVARLRCLRGVDTLTAVGLVAEIGDITAFRHPKQLASYLGLVPSERSSGTKRRQGAITKAGSGHARRLLVEAAWHYRRPPRVSEPLKRRQDGQPPAAVDAAWRAQIRLHRRWAHLDAARAKKRTTVAVAVARELACFVWEIARQPD

SEQ ID NO: 286274 - protein, 406 aa, unidentified
MLNAVGIDVSKGRSTVAVLQPGGVIVHKPFDVPHKSKDLHDLAQYLGALEGDTKVVMESTGRYHEPIRNVLSEAGFFVCTVNPHLIKNYGNNTIRKVKTDSADAKKIARYTLDNWAELREYTSMDTTRTQLKTLNSQFSFFMKQKTAAKTNLIALLDTTYPGVNKLFDSPVRADGSEKWVDFAYSFWHVDCVRKAGITAFTDRYKRFCKHHGYEFQENKANTIYKNSKNLIATLPKEAVYKELIQESIRQLNLLSENVEHLRKMMNELASTLPEYHTVMNMYGVGPTFGPQLMAEIGDISKFQHREALTAYAGVDPGKNDSGQEVHNSSHASKCGPSRLRHTLFQIMTTMLQNGVKENDAVSSFLFKKKAENKPYLVYMTAGENKFLRVYYGKVKECLRNQEEAEQ

SEQ ID NO: 286275 - protein, 413 aa, unidentified
MSTASSPTRFVALDIHRKYLVVGAVDAGQQVVLTPRRFGFEAFSAWATTHLTSSDAVVLEATSNAWLLYDQLEPVVGSVTVAHPLAVKLIAAARVKTDSRDTIKLAHLLAANLVPAVWVPPVQVRELRALVSHRKRLVNQRTQVRNRLHAVLHRHNLTLPPGKPFAAHQQEWWLSLDLSSSEKLRVQQDLSLSASLEELIGAVEAELGRLSTCEPWVKQVPFLVQLPGLGVLSVMSILAAIGDITRFPSAKKLVGYAGLGASVHDSGETHQGGHITKEGRRDLRGVMVEAAWVAVEHHPHWKGQFERLTKRIGKQKAIVAIARKLLVAVWHVLTEQEADCHADAQAIARKLMNWIAHHGLTPGQHRDRLLLLYQQLDQLGLSEELEEIDYYGTTYRLSVRQQLLREAQKRQSS

SEQ ID NO: 286276 - protein, 391 aa, unidentified
MIYVGIDVAKDKHDCFITKSDGEVLFKAFTIANNLDGFNELHQKITSVMDDVTKVKVGLEATGHYSYNLLGYLIDKGLPTYVINPLHTNLYRKSLSLRQTKTDKVDARTIASMLMSDVNLKSYSDISYHNEDLKSLTRYRFDKVKERAKLKTSVSRLVCILFPELEKLVPTLHITSVYALLSEFPGAKHIATAHLTRLTNLLSEASKGRYGKDTAITFRDAARASIGSNMPAKSLELKHTIKLIQELDSEIDEIENEIKIIMDEINSPILSIPGINYRMGAMIIAEIGDFNRFDSPDKILAYAGFSPSTYQSGQQDSAYAHMEKRGSRYLRYALYNATKYVCHWDPTFAAYLAKKRAEGKHYNVAISHAVKKLVRVIYHLEKTKQQYIKAA

SEQ ID NO: 286277 - protein, 420 aa, unidentified
MPATFSIPRTNDLERAMTAVMIGVDPHKGSHTAVVISPAEEPLGEIRVRASAAQAGKLAEWASAWPERTWAVEGAAGLGRLLAQQLVAAGERVLDVQPKLASRVRLLQAGDTNKNDPNDALSVAIAALRSRTCREVAAEDHPAVLKVWSKRHRDLARLRNQVACRLHAVLCDLVPGGIAKEISAAQAARILGQATPSGAVEVARAELAAEFLEDMRRLDAQLRGTRKKLAAAVKVSGTTLTQVFGVGPVIAGTIIGDIADVSRFPGRDHFASYNGTAPVEVSSGNRKIHRLSLRGNRRINHAIHMAAITQLRHKHSEGRAYYEKKLAEGKTHKEALRSLKRKISDAIFARLQADARQAAAAAPKGPGGHPGNDSASSAAGSHPARQLFGQATPGPGTSLRPATPAGTPSKPVPRKTQATT

SEQ ID NO: 286278 - protein, 341 aa, unidentified
MKHEMHVLGIDIAKRVFHAVGMDDRGNIVYRKRLSRHDLIPFIAKLPPVRIGIEACGGAHYWARRFRAHGHEVKLMAPQFVKPYVKSNKNDSRDAEAIAEAVTRPTMRFVPIKDVDQQDIQALHRVRERLIGERTALVNEVHGLLHEYGIVIPKGVAKFRQAVVGKLESEKDKLTPLSQELFWKLVDEFALLEKQLAYYQEKLDTVATTHPECQRLMTIPGIGPLTATALVAAISDASAFKNGRQFAAWLGLVPRQHTTGGKERLLGISKRGDTYLRKLLVHGARATIRWVGRKTDRRSQWMRQLLERRGKNRTAVAVANKNARIVWALLTSHQDYQPATS

SEQ ID NO: 286279 - protein, 388 aa, unidentified
MIYVGIDIAKLNHFASAISSDGEELIKPFKFTNDNDGFQLLISKLDPLDKDSLIIGLESTAHYGDNLVRYLVAKNYKVCVLNPIKTSTMRKNNIRKTKTDKVDTFIICKTLMMQEPLRFVTFYDLDLMDLKALGRFRQKTIKQRTRLKIQLTSYVDEIFPELQYFFKSGLHQKSVYALLKEAPTPEAIASMHMTHLAHLLKVNSHGRFNKEMAQQLRVLAQKSVGASDSSLSIQVTHTIQQIELLDSQLESVEAEMTEIMKFNDSVIMTIPGIGYINGGMILGEIGDIHRFSSPNKLLAYAGLDPSVYQSGNFQAKKTRMSKRGSKVLRYALVNAAHNVVKNNATFKAYYEAKMAEGRTHYNALGHCAGKLVRIIWKMMTDNVEFNLD

SEQ ID NO: 286280 - protein, 401 aa, unidentified
MNAVGIDVSKGKSMVCVMRPFGEVVLEPFEVLHTAQSLNDLAGKLKALDGETRVVMEATGNYHKPVAFVLHDAGLFVSVVNPVLIHDYDNNSLRRVKTDRKDAVKIANYTLDKWTRLRQYLPEDDTRLALKNCYRQYQQAVAIRTMLKNNLISSLDLTFPDANKLFSSPVKNNGCEKWVDFIGDFWHSECVSSLSANAFAKKYLKWCQKHGYVFTRSKSDEIYACAVNSASLPKSPTSKLLIQQQVAQLKAVSQSVAAFRQEMLRLSQQLPEFDTVMEMYGVGPSLGPQLMAEIGDVRRFSSKKSLIAFAGIEPQPNDSGKVVGNDKGISKVGSAVLRRTLFLIMTVILQTQPQDEPVFQFMNKKRSEGKPYKVYMMASANKFLRIYYAKVKAVMDSERSQ

SEQ ID NO: 286281 - protein, 391 aa, unidentified
MKEFTKYVGLDVHKSTIAVAIAQAGSSEVRYFGEIPNTPEDINKVMRKLSSSEATLSVCYEAGPCGYEVYRHLSGRGIDCMVVAPSMIPRKPGDRVKTDRRDSQMLARLHRAGELTSVWVPSAEQEALRDLVRARADFVLLQTQSRQRLNAFLLRHGQRFGGKSKWTQAYFRWLETIKYDFPSQQIVLQEYIDTVLHMQKRIKALDTQIELAGNESALWPLIQNYMALRGISRLIATALAAELGDVTRFTTAPQLMAYLGLVPSEYSSGPSKVRGGITKTGNGYIRRLLTEAAWTYRHMARKSACVQRRAEQTPEPIQEIAWKAQQRLCARYRGYIQRGKVLVQACTAVARELVGFIWAIGQATGPLHEMSANARVQTHSRVIHRAARLAP

SEQ ID NO: 286282 - protein, 354 aa, unidentified
MDTTPSLAVTPAVATPNAFVGLDVSKDTLDVCLVIESKRHEKQFVNDAPGHRQLLRWAHSLAKNGSCHFCLEATGPYSQSVALFLVEQEQRVSVVNPARIRFFGLAQNQGNKTDKADARLIADYCRMQSPPPWRVAAQEVRLLQEMVRRLHALSDLAAQEKNRMQAPGQSKTVLASSKRVVTALEKELLRLKKEVRAHVKAHEELQRDSKLLQSIPGIGEITSWDILAEMPDVQEFDSAQSVAAYAGLAPREQRSGSSVRKQTQLSKRGNSRLRKAFYFPAVSAMTWNPLVKAHYERLREKGKPKMVALAACMRKLLMICYGVLKHQKPFDAQWLSQPATHPSSTQNDLLILPD

SEQ ID NO: 286283 - protein, 340 aa, unidentified
MGVFVGIDVSLENSAVCAVDEHGKLVKETKVASDPGALSDCIRGMPGVVEAIGIEAGPLSQWLHKSLTDLGLPVVLMETRQVKAALRAAPVKTDRRDAAGLARLLQMGWFRPVHCKSLSAQELRVLLGARRCVQSAAVNIELSIRGMLRNFGLRLGRIGKVSFEDRVRELTEGNRLIQLSIEPMLRARSALRSELVRLERMARDITREDPVCRLLMTMPGIGAVVALTVRSSIDDPGRFRRSKDVGPAIGLTPRRYQSGETDIVGGITKAGDLDMRTALYQAATVVIHRSKKQTWLRAWAERVVRRRGAKRAAVALARRMGVILHRMWVDNTEFQAVRQV

SEQ ID NO: 286284 - protein, 438 aa, unidentified
MPNNVVFNFDELFISVGIDVGADFSWMSIVLPNQQFVGKPYKILHNSMDSLASAVSKIKEAEEMYSLESRIFLESTGIYHYPLFCYLRDKGFNCSVINPIITKNSTNINIRKVHNDRFDSKKAALVGLKPDLKVSLMPSDLALNCRNLCREYYDLMDSRNAYVNKLIDELRMVFPQYLGIFSKVTIDTSLILLETYTSPSAFINADKQEIIDLIRSTARFGLTYACNKYNAIIQAANDADEFGYILDSNIKRIRLYIGFIRKYDEEINSILESMHELAAANEDTDFVKQIRLIETFKGAGFLSAMSLMGEIGDFSAFSKPKQLFAYFGLDPAVKQSGKFEGTKIQMSKRGSAIARRVIHTLTLQSISASRTGESKNPVLLDYYLKKCESKPKLVAMGAVSHKVCNMIFAILRDSKPFEIITPQEHIKKYNAAKCDVAA

SEQ ID NO: 286285 - protein, 326 aa, unidentified
MTQNTSTYVGMDIAKATLQVHLRGHQIEFQNNAQGHAQLCKRLAKLSQPQVICEATGGYEYPVVQAFHQSKILVSVLNPAHTLAATKAQGIRAKSDCGDAEGLTDYGQRFQPQPTVPTPPELRETTALARWLQQLIDQRAVAKTQAEHHDHAFVRQQHQQLLAHYQGQIQAVEEKIKKQVQSQPEFQRRLDCLDEIRGVGFRTALMMLVLMPELGQINRGTAAALAGLAPWTRDSGTMKGKRCIGGGRAQVRPVLYMSALCASRCNPVLAPFYAALKKRNKPSKVALTALMRKLVVHMNQKLKELATTPPAQETKTATKPKKTLAS

SEQ ID NO: 286286 - protein, 408 aa, unidentified
MSTPDDVDVWIGLDVGKEDHFADVLDDDGESLFARSVANDEADLVAVIERACGHGTPGLVIDQPGSIAQLAIAVANRHEVPVAYVPGLVMRRAADLYPGEAKTDRRDAFVIADTARTRRRSVHWLDAGSDELLDQLRVLNGFDVDLAADLTRLTNRLRDSLVSVSPALERAVGSRLHQAGVRDLLARFPTPTALRAAGRARINTAVKKRSPRVAAKVVDAVVAALDAQTVTMPAEAAVGRVIAELAVELDRIHTRRDALAAEIEEVFLAHPFGQVLVTLPGIGPRTGARILAEIGDGTRFANGSKLASYAGLAPVTRQSGTSIRGESQSRRGNHRLKNAMFLAAFASLRSTESKAFYDRKRAEGKKHTAAVICLARRRCDVILAMLRNLEPYRAPATPANDDTTSIAA

SEQ ID NO: 286287 - protein, 385 aa, unidentified
MEKLVVKIAIDPHKRINAVVAVDATGSVLARGTFPQSTTGFADLMGFARRWPRREWAIEGATGVGKNLAQRLVVKGEIVFDVPSKKSSLVRAFSATSGRKSDEVDAYSVALASLHSDLLQVRVDERAETLRLLSNRRDELVGLRTQAVCRLHRELQILIPGGASRALTAAKAKTLLASVRPRDEVGKVRKALALDQLVDLVAIDKRLKDIGTQIKTVIAETRTSVTDVRGVGPVVAAIVLGEVRDVSRFPTKHHFASYNGTAPTTWGSAGDARPCVNLHGNRRLNHALHIAAIVQLRFDCEGRRYYLRKIADGKTPKEARRCLKRRISDAIYHQLVADAQAAERGPGGQMGATTKISAADPAPTVDSSIKPQPGPHQEIAAPRAS

SEQ ID NO: 286288 - protein, 367 aa, unidentified
MAPLLGLKRKVYVGMDVHKETIQIASLTSNTKDLVKEQQIKHEEVQIKKFIQKLKLEKSEIHCCYEAGVTGYPLYRYLKTLGVNCTIVAPGKIPRQSSDKIKTDKRDAIKLARLLRSGELESIHVPSEEDEAVRDYLRSRDSLRLDLGRNRQRLMKFLLRKGIKYSTTKYWTTSHYKWLNNLHFENEILQTTFNDYYSRVRVQEENLKAMDKKIQEIAESEPYREKVGILRCFRGLTAMFLLSEVNDFKRFKTAGSFMSFLGLVPGEYSSGSKRKQTGITKTGSPRLRRILTEAAWQHRFSGTGSKVVVARRVGQSALVVSLAEKASLRLHKKFKNLQLRGKSPQVMITAVSRELSGFLWAAMNLVV

SEQ ID NO: 286289 - protein, 342 aa, unidentified
MEHTTIAVDVAKSVFQIAVSQRVGQVSSEHRLRRSQMMPFFAQQPAATVLLEACGSAHHWARQLQQLGHTPRLLPAHDVHRYVRRNKTDRADAKALLEAARNDDIHAVPVKSLEQQAIASLHVCRATWMSTRTARLNTLRGLCREFGLCIPVGATRVIPAVRAQLTVDSPLPILLHATLETLCAEVLQLEAAMRATEQQLAALAEQMPDVIRLQTIPGIGLLTASALVARIGDAARFPDGRHFASALGLTAKETSSGQQRRLGAISKRGDVYLRQLLINGARAVLCHAKRHRDPLRVWALQTQERRGHNVAAVALANKLARIVWAVWTQHSEYRGVTQSPAT

SEQ ID NO: 286290 - protein, 420 aa, unidentified
MDEITEEPGTLVQRVAALDIGKAVLTACIRVPHESRPGARRQEVRTYATTTPALLGLRDWLACQGVALVVMEATSAYWKPPFYLLEDGIECQVVNARDVKNVPGRPKTDALDAVWLCKLAERGMLRPSFIPSRPQRQLRDLTRYRRTLTQERTREKQRAEKLLEDAQIKLSSVISDIFGASGRAMLAALISGQRSPTVLADLARGSMRAKAAVLQEALTGHFTEHHAFLLGMMLDRIDALSAQIADLTTRIGQAIAPHAAQVAQLDEIPGIGIIAAQDLIAETGADMSRFPTAGHLVSWAKFAPRARQSAGRSKAAVTGKGNPWLGGTIGEAAAGAARTKTFLASRYRRIARRRGKKRALVAVGNSILVIAWHLLSNPAARFTDLGPDWHDRLAPIRRKRQLIAELERLSGKKVTLNDAA

SEQ ID NO: 286291 - protein, 338 aa, unidentified
MKVYAGIDLHSTNNYIGIINDKDQRLFKKRLPNNLDVILSALEPFQQDLQGIVVESTYNWYWLVDGLQDHGYTIHLANPSAIKQYEGLKHTDDRWDSFWLAHLLRLNILPEGYVYPKEERPVRDLLRRRMMLVRQRVTHILSLQSMITRNLGINMSGSVIKSLTGDDAEQLFKDPCLVLAARNSISIMKFLKEKFRLIEQSVLSRVKLRKEFAPLLTLPGIGTILGLTIMLEVDNINPFPKVGNYSSYCRCVKSERLSNGKKKGTGNAKNGNKYLSWAYVEAAHHAKRSYPYAQRFFQRKEAQTNGIVAVKALSNKLCSASYYVMRDQVPFDQEKLFR

SEQ ID NO: 286292 - protein, 373 aa, unidentified
MIVLGADTHKRSHTIAAVSAATGELVDEQTVQVGAKGFAALVVWARELGGERVWAIEDCRHVSGSFERFLIARGERVLRVTTKLMADSRRRARGRGKSDRIDAVAVARAALREGLDALPAAQLEGPELDLRLLVDHRERLIRQRVALNTTLQWHLHDIWPELELPGSSLFYGNWGPRIARRLARAEPTMRVRIARDERRRIRELSHTIKTLEPEIAALVVTVAPQLLTEPGFGPLTAAKLVGEVAGARRFSSDAKLARAAGVAPIPVSSGKTNRHRLDRGGNRQINATIHRIAVTRLRCHPETQDYITRKRAEGKSTKEAIRCLKRHLARRVWRLLQPAGPTPAEEHRHHHQSLDKGAAIATLTRGRPLMLLA

SEQ ID NO: 286293 - protein, 371 aa, unidentified
MKQNTVSERVCDNGQHQASEERKSKGVLKLGLDVHYRQVTVAMQEEAGAIKAVGRMGHDGLGNWVERKLKAGWELYSCYEAGASGYWLHRELVKLGVKNLVVAPKAMGQDKRQKTDRRDSAELVDQLDRYLRGNRKALSPVAIPTTEQEQKRALIRYHRQIMADRTRYEARGKGLLCAQGIEVQGRWWQPEAWKELKTHGRFQGWMETQLKGWRRKLLSAEQEQQKLRKQIEALAPALLPKGVGAYSAVALEYELKGLARFKTARALSSYTGLCPGIHSSDGRGKEGSINRCGNAAVRWNLVEMVWRLLKWQPDYQPVRQLAAGLVRSKRARKRLVVKAARQLAIDLWRLETRRVTAQELGLVMQPTSTAK

SEQ ID NO: 286294 - protein, 413 aa, unidentified
MGHKTAEVELHYERCCGLDVHKELIVACFRNGTKSTVREFGATSKELQKLAEWLDSVDCEMAVMESTGSYWKPVYNILELLGLEVMVSNARDVKNLPGRKTDVKDSEWMARLLAQGLLKPSFIPDRPQRELREVTRYRKSLTEERAREINRLGKMLEGANIKLTSYVSDVLGKTSRKLLEAALAGEPITGITIEGMLKGKMNGKSALLVDAMDGVLSKTQRLLIKAVLDHIDDMTRRISDLDDIIRGEMEKYDEAIRRLDKAPGIGVQSAQTILAEIGLDMIRFPTAGHLAVWAGVCPGNNISAGKSKGGKTRKGNQTLRATLVQCAQSATNTKGTFFRAQYDRLVVRRGKNRAKMAVAHSMIIAIWHMLKYESDYVDLGGDYYNRFNPEKKINMYLKKLKELGWVPPVPAVA

SEQ ID NO: 286295 - protein, 317 aa, unidentified
MTQSSTTTAGIDTSKGKLDVAVHGRTGHWQVANSLAGWRVLATRLTEAGVSRIGIEATGGYERGVVEHLRATGFTVLVLQPIQVKAYGRVHLRRAKNDVLDAVLIAACAAALDQVRTAPDRRLAELAERLTFLEQVEEDIRRCKTRLEHIDEPRLRRLVLGDIARSKARRLAQIRHLAKQLRSHPDLAARLDLVLSIPGIGERTALALLIRMPELGQVSREQAAALAGLAPFDNDSGQQKGRRRIAGGRARLRRSLFAAALPAAFRWNKALIALYARLIAAGKAHNAALVACARKLLIYANTVVQRGTPWADRPLST

SEQ ID NO: 286296 - protein, 340 aa, unidentified
MKEVITTIGLDLGKKVFQVHGVDAVGGVRVRRSLRRSQVLGWFGKQPACLVGMEACATAHYWGRELSRLGHEVRLIAPAYAKAYVRRNKNDAADAAAICEAVSRPGMRFVAIKTAAQQAAGGLHRVRDLLQKQRTMLINQLRGLMAEFGIVVAGGPQHVKDLLAVLADPADARVPELLRGPLLGLAQVLGDLERRVATLERQIVAWGRGNATYRHLITVPGYGPILAGAFAAFVVEPSALRSGRDFAASLGLVPRQEGTGGKLRLGSISKRGNGYLRRLLVNSAMSVLNTRRARQDPWIARLLASKPRKLVAVALANKLARIGWAMMVRQEDFRPRSAAA

SEQ ID NO: 286297 - protein, 345 aa, unidentified
MEKTKYFIGLDISADDFSASCITTPDNIIFSAQKFQNNLDGFSEFFAFLLSREIKPTETIVCMESTGVYCEGIAYFLYSKGFNVSIEAPHKVKQKIKDTPRKNDFIDSLAIAEYSYRYLDKLPIWKPQMEILQQLKTLLSTREHLVTQKTASENALKTLKRKYIKTPLALAIYEENIKKFNEQIKQIDKEIKALIKKDDNFKMKMDLAMSVPGIGLLLAANLFVLTNGFTEHLNYKEISSYLGICPYEQISGRSLHKKPRSKRYGPSRLRKLLYLAALSVATYNLNFRKYYLRKVEEGKSKRLVLNNIENKLLKIIFAVIKSGTKYIENYRPVNPIYLKKCLTMS

SEQ ID NO: 286298 - protein, 350 aa, unidentified
MNILALDIGKFNTVFCDYVCENGEHDFGKVKTTPQAIHDLIVNKEPKRVVMEVSEIAGWVVDIASALGKETETANTSHDAWRWKNVKKKNDKEDALKLAKLSAMNQLPTVHIPAKNVREMRSLIKYRQRLVKNRRSIQLAIRAIFSAQGITGVPRGKSAWTKEGLGWLRKHAQPLEEISDVEQLWRGRLHVELETFEAISKALKRVEDKLNNLGSVDARIKRLQTIPGVGPRLAETVVAFIDDPKRFENGKQVGSYAGLTPKQYQSGQMERQGRISGQGNKLLRNLLVEVCWVSLRYNPWARDTYNRLLRGSPSRKKIAITALARMLVVRCWAMLRDEEDWKCDIREDAA

SEQ ID NO: 286299 - protein, 326 aa, unidentified
MNYFLGIDISKAKFDIHLIGDQQTWSGQFNNTNQGFKQLNKWLKKRKVDQLHACMEATGSYGEALTYFLHEQEYKVSVVNPKIIKHYGHSKMQRNKTDKLDARLIAQYCQKESPRAWEPPTEAQRTLKALTRRLEALQANRTREKTRLKAKTHPDMVRESIEESVAFYDQQIEKLEAQIQDHIHNNPDELEEKHQLLTSIPGVGDKTAAILLGELPDIQLFESSKQVTAFAGLTPKQLQSGQVHHYGGIYKLGSRRLRNALYFPALTGKVHNPILRNMAERLAERGITGMSAVAALMRKLLQLVYGVLKSERPFDPDYVVNVQVTA

SEQ ID NO: 286300 - protein, 484 aa, unidentified
MNNRSIFQQQSQDLMKIYEQATHSKKVMVVAIDYAKKEHTVMFCNGNGDILRKPFPAKNTLEGANYLIEQVHKTAHYHKIKSQHVFFGGEDCGTYKDNFAHALREQGWLVAGVNAKDAKTQRENMQASTDSLDLLGIAHMLINRRGNCSPAQSGCYKNLRTLVRHRRKLVGLTTEQRNRMHTVVDRLFPGFLDESKSGLAPFEEPSLRLMEKAFSADQIRRRKNATLLDLLARSGAQKPQEKALQLQAYAETVLHAPKTYVTTLQTSLKQHVALYRCLSESINSLEQEIAITLAQTQGAFLITIRGTGLVLAAGLCGELGNPTLQKPVNHLVSYAGIIPRVSQTGGTEGQAHVGSVAKRCNRILKDYLVQCASHQGLHGTEDFMADHHRRKANGQHADFGVARRYLRMAMYLMRHSCVYLPDNLRTGSSFQDRKTYYLNLWPFLLGKWKKYHAENIAFAPENPLGQWRDMVQEIYQIRLPMKLR

SEQ ID NO: 286301 - protein, 401 aa, unidentified
MKRLVGGIDVGSEYHHIFIMDEEEKILYDQKIKHRVSEFYKAVEEFKGVEEREGGIISFAIEGKNGYGSPFDRILVENGFTLYNVDNLKLKQFRNVFGAEWRNDQRDARMLAKLLKLREHLEGEKEKAFLLIEKTIGLTEELKILSRHQQTLIDEKVRLQNRLRKRLLGICPEILELGDIDSKKLLRFLVKYPDIREYKKLTLKALLKIETIGKKQAPVMLEGLRTIKSAEELADVYAKIILSHSRRILELQEEIEEIDKQLEGIGEKSTEVKRLKSIPGVGVKLSSRLIGELGGIKRFKNESKLAVYCGVACIDDDSGKKKSSKEVYKANKICKATMIEIASCTIRYIPESMRYYVKKRAEGKEHNHALRCLARQLIKVIFKMLKEDRNYILKEEMEKAA

SEQ ID NO: 286302 - protein, 343 aa, unidentified
MQVITTIGLDIAKSVFQVHGIDAEGNVQIRRQLKRRYVLAFFQKLSPCLVGIEACASSHHWSRELKALGHTVRLMPPAYVKPYVKRQKNDAADAEAISEAVTRPNMRFVATKVPEQQSCLMLHRTRHLFIRQQTAVINAIRAHLSEFGIVAPIGRNGVEELLNVVANPSDKRLPELARACISALGAQLRRLKEQVLEFDRMINAWHRSNATSKRLDEAPGIGPVLATALVATIADPKAFRSGRNFSAWIGLVPKQHSSGGKDRLGHISKQGDRYLRSLFVAGALAVIRYAKIHGTKHRPWLTALLARRPTKIAAIALANKIARMAWAMMVKGERYKEPVALAA

SEQ ID NO: 286303 - protein, 486 aa, unidentified
MAKGKESTFERLQKGQRLNRREKRELAHRLNAVDPGLEVVNRHAAGIDIGNESPYVAVPAGRGAQPVREFGSWTGDLERMAQWLQSCGIETVVMQSTGVYWMAVYDLLQSHGLQVNLVDARGTKNLPGRKSDVQECQWLLKLHTYGLLRSCFLPPEPIRRLRTVWRLRDQHVKEAGRSVQHMQRALTEMNVQLHNVISDLAGVTGQAIVRAILNGQRDAVQLAGLRDRRIQAREEELVESLRGNWKEDVLFELQQAVEAYDFHQQQMAQCDVRLQEYMAALPSREAPPAEATPEGSVPRGPSRKRRAARPPRKPKGNQPAFALQPELQRILGVDATTIDGIDVMTVQTVLAEVGPDLSAWKTERHWSSWLNLAPKRDISGGRVIRHTREHRTNRVGNAFRMAAQSLLRSTSYLGARFRYLRAKLGGIKAVKAMARHLACLFYRLVTRRQTWVDRGAAEFERRRQEREFAMLQRKARDFGMALVPAA

SEQ ID NO: 286304 - protein, 316 aa, unidentified
MNTKTDQNINVGVDTGKSQLDIYIRPLDIYFTVSNDGKGIREAIIKLKKFNPVRIVIEATGRLEFNFIVACAKADLPFVVANPIHVKRFAGAIGQHAKTDKLDAKLIAHYGEAIQPNLSALKPETMQAMSDLVTRRNQLLTMQTMEKNRLNIMPKYLAMTIKPILTAFKNQIEKIENKIAALITSCPDYQAKSDILQSMPGIGKIAAASIISNLPELGYINNKQAASLVGVAPMNRESGRYKGLRTIQGGRPQVRTVLYMAMMSAMQCNPVFKTTYQRLIAAGKPKKVAIIACVRKMVVILNSMLRDGVMWEAPKA

SEQ ID NO: 286305 - protein, 355 aa, unidentified
MESTKYIGMDVHKDAISIAVLNSSGKLVMESIIETKAITILEFVHGLRGGLHLTFEEGTWAAWLYDLLKPHVTKLVVCDPRRNGYLKQGSKSDRIDARKLAELLHSNMLRPVYHGEHGVRPLKELARSYLTITQDQTRVMTRLKAVYRSWAIACAGKQVYGQRHRLEWLGKIQEPGVRHRAEFYYLQLDALRSLRLEVRRELLLESRKHDASRLLCQIPSIGPIRAALLIALLQTPDRFRTKRQLWAYSGLAIETHDSAENQYVDGQLQRSRKQTSIRGLNQNHNHDLKNLFKSASAVAAVKAGPFQKFYDAQIGKGIKPEMARLTLARKIAAITLIVWKRGVSFDAKYLNPQTA

SEQ ID NO: 286306 - protein, 386 aa, unidentified
MRVNDLSRAVVPFEQSTTMVVVVEMGAKSWLVAGAVPGVERQPLKKLDPDALAVLRLIERWRGEAIKAGKTISRVVLAYEAGRDGFWLARWLIVRGIEVHVIHSASVAVSRERKRAKTDRLDAAMLMRVFLGWLRGERGHCGMVAIPTLEDEDARRPSRERESLVNEKSRITNRMKSTLARLGIRGFKAHLRKAPQRLEWLQTPEGTELPPNITEELRRDMIRLALVREQIAAIEKARMERLQRAPNTGPHLMVRLLARVVGIAIETADMLVREVLSRNWRDRRAVARYAGLTGSPDESGTKRREKGLAKAGNARVRRGLIQLAWRFLQFQKESALAKWFRLRTEGPSGVRRTTMIVALARKLLIALWRLVTTGEVPEGVVLRPVP

SEQ ID NO: 286307 - protein, 391 aa, unidentified
MNRYVGRDWASEIHAVCVIDATGEVLERLRVPHTRLGLAELVSRLARHAEPADLPVGVERSDGPLIEALRAGGFPVVVIPPHVVKAARPRFSAARAKSDPGDARLLADLVRTDGGRFRVLAPSDPTTAALRRLVRTRGELVAERTRLANRLRGLLEDAWPGAAEIFARVDSPIGLDFCERYPSPRAARTLGEARLASFLVRHHYSGRRTVPELLARLRAAPVVAEPAIVDDASADAVRALVACLRAILARLADLEGAIRAALAAHDDGALFRSFPRAGEISAAMLLAEIGVDRERFPSADSLAAQAGAAPITRASGKSSVVGFRWACDRRLRQALTQFADNSRHASPWADDVYRRARQRGADHPHAIRILAKAWARVIWRCWQDRTPYTGG

SEQ ID NO: 286308 - protein, 350 aa, unidentified
MDQQQHYVGLDVSLQTTSICVIDDKGTAVWRGKCASTPESITEAVHTYAPAAVRIGLETGQLSNWLTLNLRRRGLPVVCLDARHAKAALSLQINKTDANDAFGLAQIVRTGWYREVAVKSMDAHTLRMLMVARAQLVSQRQTIANTIRGLLKTFGLVIVRGSGGLFAVRVREQIAGNDVLVAIVEPLLVVWHALREQIEMLDRQILGRARADAAARRLMTIPGVGVVVALAYTAVIDDPARFRRSASVGAYLGLTPRRYQSGEADSSGHISKCGDGLLRAYLFEAATVLLQRHSRASTLKTWGLALAKRIGMRRAKVAVARKLAVIMHRVWSDRSEYRWGDVPVAANHRR

SEQ ID NO: 286309 - protein, 349 aa, unidentified
MAGRRYWVGLDTGVAETAVCLIDEFGEILFEGKRETHAGQIKDILRPFGVEAVQRITIEAGVGTHMVRELQAQGFPVYVAEVRRASKFLAIRRQKTDSNDARGLAELGRVGRTIGAEVFVKPLDCQNLRSLLNVRKNLIQQRMKIDALVQSIVRLHGGKLKTSSGVGRLASGIEDQLEILRADGLDVDADVRPLISIAENLRSHIAGMDKRLRAAALAHPVCSNLMTVPGVGPITALSFYSAIGDPSRFQRTRDVGPYFGLTPTIHQSGVLARVGRISRFGSKLTRTHLVSAATVLLCSTKTESALQAWGLTLRKKVGLSKARVAVARKLAVVMLHMWKSGSSFDPART

SEQ ID NO: 286310 - protein, 328 aa, unidentified
MQITTIGLDIAKNVFQIHGIDAAEKVVVRKQLRRGQVMKFFAALSPCLVGMEACATAHYWARELTKLGHEVRLMPARDVKAYVKRNKNDAADAAAICEAVRRPTMRFVGVKSAEQQGRLMQHRTRDLLLRQRTQLINALRGHMGELGMVAAQGREGLKTLLAIVAKGADEHLPVDARASLIVLATQLEALQTMIRAIEKRIVAQHRASEASKRLATIPGIGVLGASAITATVTDPSAFRSGRDFAAWIGLVPRQDSTGGKQKLGPISKQGDRYLRRLLVIGAHSVLRRAKPAKLSLANTTARAATVQGRGRCARQQDGTRCLGAVGQG

SEQ ID NO: 286311 - protein, 410 aa, unidentified
MIKENYIYVGIDLHKETHTAVMIDCYNQKLGEITFPNRPADFPKLVAKVKKCNTDGKTIVFGLENAYGYGRALAVWLIDKGYLVKDVNTAISHRQAKHRGAMYRKSDSDDAEAIALATLNMLDKLPDAYPNDAYWSLGQLVHRRDNIMKQRTRLVNQLHEQLCIAYPSYKQFFNDISRPTALYFWEHYPSRKYLKGKSVEDLRAELVPVSHNKCSTRTCEKILDAIAGDKVKNNAYQDARDMVTLSIVSDLQHYDKQLAEVDKMLEQMYKMLGCTLTTIPGVNVITAVKILAEIGDIKRFSNANKLAQFAGIAPLHLSSSGKGKDLATKQGNRRLQATIYFLAIQMVQISSKGTPRNPVVRAYYEKRKAEGKTSQQALICISRRLISIIYGMLKHGTEYRMPVVESAGEK

SEQ ID NO: 286312 - protein, 322 aa, unidentified
MAMLSFAGIDVSKDRLDVMVLPEEQRSSVSNDPTSWAELVEQLRALSIAAIGIEASGGYERGIMRALLSAGMPVRHVNPFKLRQFAKASGVLAKNDPLDARMIASFVAIMPTRPAQSRPPAVERLLEVLAVRRQLSAEKVAAENASRLLENAMLQRLSRRRIARLAADIEMLDERLVEIVAADAALAHRYRMLTSMPGVGPVLACTLIALLPELGRMSRKQVAALVGVAPYAFESGKLKGKRCVWGGRAPVRHVLYMAAMSASNWNPVLKRFHDRLKAAGKLPKVIIVAVMRKMITMLNAMVRDGVVWADRYSGRHSVPTTR

SEQ ID NO: 286313 - protein, 410 aa, unidentified
MPINKLDMQNNKIGFKGQNIYLGIDVHKKNWQVSVSADMPINRDEFHMTSNNVEGLLSHLEAKYPGATYYSAYESGFCGFSSHRRLIEAGIRNIVVNAADVPTTQKASVTKTDAVDAKKLSEALKNGMLNGIHVPTEEEEGVKNLQRKRDDYVKKLGGTKSQIKHFLHRNGIDFESELREGMHWTSSFIQWLKELDLSTHLRLTLDGYLEDYDYLKRQTSKFEGYLRTYMREKRMDDLEKIASVPGIGIITSMTFLSEIGDFSRFSNQRAFASYIGLSPTCHDSGEKKNTGEITFRSNRRLRSSLIESAWVAVREDDSLRADFLAYKRRMDSCNAIVRIARKLANRILHVMKERDVYVIKEANGGVRVKNTSLITRKKIDSIFLPQQTNEQISGESNNREGAAPRQPKEI

SEQ ID NO: 286314 - protein, 314 aa, unidentified
MANSADVFIGIDVHKDTLEVCIDGRDEHWECRNDTAGIDELLTTLEALSPTLVVVEASGGYERRLVADGHAAGLPVVVVNPTRVRRMAEAFGIIAKTDTIDAYVIARFAERVRPPVREPQSAEQQHLNALVTRRRQLLEIRTAEKNRLSTCPDLIRIDIEEHLIWLNSRIELLEDEINDMLANNPSWRERTALVSTVPGIGPVTAATLMAELPELGTLNRQKIAALAGLAPYNRDSGPRTKRRRIFGGRASVRCVLYMAALSATRCNPVIRRFYQRLTDKGKPSKVALTACMRKLLVIVNAMVRKQESWSYAPA

SEQ ID NO: 286315 - protein, 321 aa, unidentified
MQEPTLCIGVDVSKAELVIAMGPERRPCSVANDAVSISNWLRAIPAHALIAMESTGRYHALLAHLASQAGLKVYVLNARDVYFYARALGTRAKTDGVDAGVIARYLVEHRARLHPWQPGSSLQQRLQDLLARRAQVTTHRSALRQVFTGIDTKGIETAKLQAAFDALLQSMDQQVQALIASDAQMAQGCERLRTITGIGPQTSALLATLLSRFDFANADALVAYSGLDPRPNDSGTKRGRRRLSKKGPPLLRRQMYLAGFAASHSKALKPLYQSIRAKGFATTAALMILGRKLLRVAFAIWKGNEVFDPARLIPKNDLQKT

SEQ ID NO: 286316 - protein, 371 aa, unidentified
MSELPAGTKPARLKVGGSPRPTWACKPGTELGAAPTFAVPNPDSRLGLSPHSQGRVMDKPSAVFVGIDVSKDRLDVYLRPTDEAFCVPRDAKGLDSLTGRLNDLPVALVVLEATGGFEATVAAGLAGVGLPLCVVNPRQIRDFARAMGRLAKTDTLDAEVIALFAERVRPQARPLPEPERSHLAELVGRRRQIIEMIGMETNRRGQAAGKHLARRLDRHVVFLEKELAEVDRDIGQAIKTSPVWREAEALLKSVPGIGDVTARTLLAELPELGTIGRHQLAALVGVAPINRDSGLMRGRRTIAGGRTSVRNVLYMAALTAIRRRSPFRAFYDRLTSRGRPKKVALVAVMRKLLTTLNAIVRDRTPWQPLNT

SEQ ID NO: 286317 - protein, 315 aa, unidentified
MTQTIALFAGIDISKETLDLAFSNDAAVVQFDNTKAGCRRLVALLAKYQPERTVFEATGPYHRELEMALASAGLAYVKANPRKVRRFADVIGIHAKTDRVDARLLARFAAMVDMTPTVQKSSSLQNLGELINARHSLIADRTALKNRSHVQRSKLIIRQNQARLKLIESQIKAIDQEAITLVKQDETLAARFDILISIPGISTLTAIVILAEMPELGTLDQRQVASLAGLAPHPRESGTWKGKRFICGGRANLRQALYMPALVAARFNADLKAKYEALIAARKPPKVAITAIMRKLIILANALIREQRKWRPKPA

SEQ ID NO: 286318 - protein, 361 aa, unidentified
MEIERTFVGLDVHARSVVACALDDETGELSKARLVPDNETVLAWLRGLNGPVAVVYEAGPTGFGLARFLTSQGLRCVVAAPSKMHRPSGDRVKTDARDALLLARLLRLGEITAVTVPSVAQEAARDLVRVREDVRADLMRARHRTSKLLLRQGIVWSGGTAWTGTHQRWLGQQRFDLPGLQAAYDTTLETVLLAESRRDRLDKTIAEMAHEPQWWPVVSRLQCLRGISTLTAFGLAVEVGDWTRFTGSTIGAFLGLVPTEASSGEGRHQGSITKTGNTHARRLLVEAAWHHQRPYRPSKTMRERWDLAPATARARGHAGNQRLHDRWLAFRARKKRPVIANVAVARELAGWCWSLATLEVT

SEQ ID NO: 286319 - protein, 351 aa, unidentified
MRMDNQVTIGMDVSDKRSHIVVLDEHGEVVVEDSVPTRKPAMRKRLSGFAGARIAIEVGPHSPWLSRVLADMELEVIVANPRRVGLIYGNDRKSDKQDALALARLARFDPALLHPVRHRREDTQAVLAILRAREALVRSRTLLINSVRGLVKASGGRLPKCSSESFHRHIDDVPELLRDAVAPTMDVIECTSARIAEQDRLVHELCCDVYPETEMFTVIDGVGDITALTFLLTIEEPGRFRSSRQVGAYLGLRPRRDQSGEVDKELPITKAGDNRVRRLLVQAAHRILGPFGKDTDLRRWGLRLVERGGRGAKRKAVTAVARKLAVLMHRLWVTGEVYEPLRRAQPDDQTV

SEQ ID NO: 286320 - protein, 442 aa, unidentified
MTTDKETRLERRSDRRLLVMPRVVTTHTRGRWESVLLVGIDWADKEHVYCLMDDAGTTLATGTVEHTAEGLERFMNAVRARVQTPHDILIALETPHGPLVGALLDQGFTVYAINPKAVERHRERFRVAGAKSDLRDAWVLAALLRTDRALYHPLTPDSDVAQELRALTRDRADLVRTRTMLSNQLTACVKAYFPEFLTLFSDPDRPVALALLQAFPTREHLQAAPRAELETFLRRHRCPHSRKRAAAIHERMQAPGFHIASPIVRAKARLAATLVAQLQTLGEYVDAYEREIQRVLRLHPDGELYLSLPGAADVLAARMVGELGDNRDRYRDPNIAQCEAGTAPVTKKSGSTRTVHFRRACIHPLRETLWQFAFSSLRRCGWAQAYYNQARKRGKKHAEAIRMLGNVWLRIIIAIRRNRRPYDEEVLQKARLRHGTPGLCFA

SEQ ID NO: 286321 - protein, 372 aa, unidentified
MNHTTVYVGMDVHKVSFSLCCYTIEDDSAKYVQKIQANYKLVISYISKMRSIYGDTADFICGYEAGCLGFSLYHQLVDHGQKCIILAPTTMMAEKGRKRVKTDKRDAVVIARCLACHTYHPVHIPTDQDEQVKEYIRMRDDHKLQLKKIKQQILAFCLRHGYVYDDGRHWTIKHLQWLRSLTPEAIYAEVLSEYLLTYTNLSDKLERYDKRIGELASKDEYKASVNKLSCFLGIKTATALSTIVEVGDFKRFAKPENFASYLGLTPGENSSGGDRNQLSITKAGNTHVRRLLVEAAQSFGKGQIGYKSKALKERHSANPPETIAYADKANERLRRKYYRLTLHHGKKANVAKTAVARELACFICGMMNEQYA

SEQ ID NO: 286322 - protein, 415 aa, unidentified
MEGMEVLHEHVAGIDVHRKSLSVCVRHVGADRRIRQEVRTFGTMTRDLLELRDWLQAERVTHVAMEATGVLWKPVYNLLEDRVQVLLVNARHVKQVEGRKTDVKDCQWLAQLLACGLLRASFIPPKPQRELRDLTPMRAQLVAGRTQVVNRLHKVLEDANIQLGAVASDILGKSGREMIEALIKGEQNIETMAQMARRRMRAKLPQLRLALDGRVNEHHQFLLEILLDQYDGIDHQIERLTARIEKVCASFAPAIEKIVEIPGYDQTSAQNVVAEIGIDMSRFGDDEHLCSWATICPGNHQSAGKQTNGRTVKGNRWLKAALCQSAWAAARTKNSYFGAQFHRLAGRRGKKRAVIAVAHAQLKVIYHLLSSAQSYQDLGADYFLKLNADRAARYHRKVLESLGYTVIAPGADKAA

SEQ ID NO: 286323 - protein, 342 aa, unidentified
MSEYVGFDVSEEETSFCVKDVSGKILARGKVATDPVALFEVLRAHCVCPERIVLETGTLSGWLSRELGKLGIAVEVIDGRQAHAVMKLQHNKTDANDAALLAEIARTGFCRPVCVKSEAAQADRILLKARAHLVGQRRATQNTIRGLLGSLGIRFAKGSGKLAGLVREALEGRDELRATIDPLLRAAAALEREIARLDKAVSGRAKDDPAVRLLMTVPGIGPVTALAFAATIGDAERFAKSRTVGAYIGLTSRRWQSGEMDYSGRISKYGDAMLRALLYEAANSLLTVVRKAHPLKDWARRVKKRTSHKKACVALARKLAVILHRMMITGEPFRWPQKEAAA

SEQ ID NO: 286324 - protein, 424 aa, unidentified
MNCTQNERINQVSEQTLVIGVDIASELNYARAFNWRGIEKGKVFKFFNNLEGFQAFNEWAHQVMSANKLTNIMVAAEPTGHYWFGLADYLKDEKLKLVLVNPFHVNRAKELDDNHPSKTDAKDPKTIAKLVIEGRYMEPYIPEGVYADLRIMYNCRQKVTKAMISLENQLKRWFKIYFPEYLSVFGNLSGQGSMAVLEKAVLPEDIISLGVDGINKLWRERKLRAVGMKRAESLYEAAVKSIGRREGSVGGRAEFRMLWEDYCHKMEQMEKLNIELESLLHKVPQAEEVLKMKGIGVVSVAGFFAEVGDLRRFESPKQIQKLAGLAIRENSSGKHKGQTTISKRGRARLRAVLFNAAIALVGRNGAFKSIHEYYIGRKANPLKKKQSIVAVSCKLIRIIYAICRHKEAYDEAKMLRDIRREQLA

SEQ ID NO: 286325 - protein, 344 aa, unidentified
MLYVGLDLSRKRLDWQALTGEGERVGIGAVPPDRDSLARLGQRLGDTRVLAVIESMSGARFVHDQLELSGWDVRIADAAKARGLAPLACKTDRIDCWVLAELARRDLVPEVWLPDPAVRAERERARFRLHLVKHRRSLKQRVHAILFQHGVPCPQSDLFGPGGRCLLERLELPEPWASTVRASLALIDQLDAQISDCERDLRRLGATHPYIPLLTTIPGIASVLGYTIAAEIGDIHRFPTPRKLIGYTGLTPRVDQSGERDRRGALRKNGPNHLRWALVEAAHTAGRHPHYRPVVERMRSRHGRKRGSKIAAIEIGRRLTEAIWHMLTHDRPFAPAGAPTPVAA

SEQ ID NO: 286326 - protein, 459 aa, unidentified
MGKGSGTTRGDRRRNARRERLRALLARDGAVVGIDLAEDKQALAVVDHEVRVLARKTVKVKAFRLGEALDWAVAQARMKGFAHVAVACEPTGARWMQVQRLCAERGLPLVCIQPLMSHIAREQQDYTAHKTDESDCVMIGRLAVELHCYLPEELDETWAHLRHLGRRRAQLITAATASVQRIRDFLSVAWPVVTEACAGPFDSVTWLAAVQVVADRCGGDPGTVTAIGEEAFTDLVRAAVEDWGGRRALRRITGRVFAATADTEGVVAWSRRGLLRRVADELDDLQRVRAQIRVAEAAMVAVLDELGLSRLREIPALTAVGAAAILAEAGDPRRYDSSSSLVKHAGLSPSENASGAFEGQARISRRGRPGLRLTVWRAVFPMLQFNPVIAAKYQAMTADAAAAARTGSRQAAAARARRAKARVACAASLLRWIYSMVVHGTSWDAAVASGTASSQIEAA

SEQ ID NO: 286327 - protein, 471 aa, unidentified
MKKRRNSKRKKRRSRGKSWDSFPIINVNAAGIDIGSEEHWVAVPADRDEEPVRSFGCFTADLHAMADWLEACGIETIAMESTGVYWIPAFQILESRGFEVKLVNARHVKNVPGRKTDVLDCQWIQRLHTYGLLSGSFRPEDSTCVLRSYWRHRDNLIRYSSAHVQHMQKALTEMNVQLHKVISHITGLTGMRIIRAILAGERDPLKLAQMKDPRIKNSTEVIAKALEGDYRQEHLFALQQAVELYDFYQQQIEACDRQIESCLNQLDSKIDVDSNPPPPSKRRRNKPQGNAPHFDLRTHLYRITGVDFTQIDGLEAYSVHRILSEVGLDPGPFPTEKNFTSWLGLCPDNRITGGQVKSTKTRVVVNRASNIFRLAAQSLVRSSSALGGYYRRMRARLGAPKAITATAHKLARIFYHMWKNGVEYCDLGAHYYDQTYKHRVISNLKKKARALGYNITLEPIENTQLTEANTG

SEQ ID NO: 286328 - protein, 415 aa, unidentified
MSENIITAVGIDVSKGKSMVAVRQPGGKILLGPFQVEHNALGLKQLTETLKCIDGEIRIVMEHTGMYWRPVALTLKEAGLFVSVVNAILIRKFSDNSLRKVKTDKADSLKIANYALAFWNELKEYSLEEENRQMLKVQSRLYERTIKGSVSLRNGLISLVDQVFPGANDFFSGSPKESNGHFKWVDFIRHFWHKDCVTRLSLNGFAEKYRKWCNREGYRFISSDVARIYKAALESTATFPKSDSTKILIRQAADSLNAVYDTLHILRAEMLRLARLLPEFDVVMSMYGVGNITGSQLMAEIGDVRRFHSKSALVAFAGIDAPPFQSGNFEGSNCHISKRGSPHLRRTLFQISSTILKKSNPDSSIYQFMDKKRAEGKHFYVYMVAGAAKFLRIYYARVTGYLDAIEATENNNLTG

SEQ ID NO: 286329 - protein, 341 aa, unidentified
MTYYTGIDVSLEVSHFCVVDIAGNIVKEARVASEPEAIITWFEGLGLEMTAIGLEAGPLSQWLYAAMTDAKLPVVLLETRQVRDAFRSMPVKTDRKDARGIAQLMRLGWYRPVHCKSQQAQENRTLLAGRKMLQSRYIDLEMCLRGLLRGYGLKVGQTNRKTFEGRVRELAASIPGLDCAVDALLKARATLLEQFRRLDSLVVSRARQDERAQLLMTVPGVGALISLTFVSAIDDPKRFSSSRSVGAHLGLTQRKYQSGETDVTGRISKCGDQEVRTALYEAANIILTRPVKGSQLKSWAAKISCRAGMKKAKVALARKLAVIMHRMLCDGTCFDAGLAAA

SEQ ID NO: 286330 - protein, 350 aa, unidentified
MNYKEVSMNRYYYIGLDIHKKVIAYCIKALDGSMIDQGTIVADRQSLGVWVKGLPGPWVGAMEATLFTGWVYDLLKPHAVALKVAHPAMLQAITVAKKKNDRADAEKIADLLRVNLLPECHMLSEEIRQLRRILRYRNHIVRTAVKMQNKMSGLLMEVGISYSKKRLHGKKYFHELLERVDEIPPSVRELLLLSRSSYEMFRSFQKRLVETLRADSLIRDRVHRLMTIPGVGEITALTWVLEIGDPDRFSSIRKAVSYCGLCSAQKESAGKEQRGPISKKRNKHLQTMLIEAAKLAPHWNEQLAIVHERELKQGNRNRATLAVARRLVAYMLAVDRKGADFKLPSEIRAA

SEQ ID NO: 286331 - protein, 450 aa, unidentified
MTSKPREIVDEEHEQVIERVAAIDVAKASGMVCVRVPHESKPGRRVSRVWEVPATTGAVIELGDHLICQGIEKVTVESTSDYWRIWYYLLEAAGLDVQLVNARQARHLPGRPKTDTLDSVWQAKCTERGMLRPSFVPPAEIRRLRDYTRLRSDLTQERTRHWARLEKLLEDALIKVSAVASTIDTMSVRAMIEALIAGERSPRVLADLAIGKMKAKRAALIEALTGRFDQHHAELARILLDQIDALTAQIDTLNGRIGELIGAMPAARGVDADGTTGPSAGTGPDAAVRPAIDRLDEIPGIARLTAQVVLAEIGLDMSRFPTAGHLVSWAKLSPRTIQSGPKTRSGKTGKGNPYLKGVLGQAAAAAAKTGTFLGERYRRLVKRIGKLKALVAVARSILVIIWHLLSDPAAHFNDLGAGYHASRIDTDRKARNHIRQLEALGFTVTIAQAA

SEQ ID NO: 286332 - protein, 369 aa, unidentified
MHIASIGIDLGKTTFHLVALGERSKVLVRKKFSRAQLLAYTANLPSSLIGLEACAGAHFMGTALRERGHEVRLIPAQFVKPYRKSNKNDFIAEAIAEAVTKQNMRFVQIKTEEQLAVQAMHRVRDRLVQRRTALINEIRGFLLERGITFPVRPIHLRKNLPTVVEDAEQHLSPRLRWLLDRLWQEWKQTEIDIQTITDEIERICNEDERCQRLRQIPGFGPLVSTATVAAIGNGTAFRRGRDFAAWVGVVPKQYSTGGKQRLFGISKRGNVYLRRMLIHGARAVLFRIKYDTAGLGQWVHRLSQRAPRNKVIVAIANKLARIAWAVLSSGRDYRHQPLLRAAARLAVEKTLRLESTKRFPLFHRHDDGC

SEQ ID NO: 286333 - protein, 346 aa, unidentified
MSSSNVHIYGIDLGKNWFHIVAMDRQGHILWRKKLTRSQLKTFVINTPPTIVAVEACPGSQYWGRLFNDAGFTVKIIPAQFVKPYLKSNKNDFNDAAAIAEAGSRGTMRCVSLKTHEQLALQAIHRVRQRFIVERTATVNQMRALLLEYGITVPVGRKVFERNLPGILEDAENGLPDFIRALVFRLRERWQHLDVQIDEMSEQLQQASIASEKCRLISSVPGIGPIVATGLIAAVGSGTQFKRGRDMSAWLGLVPRQYSTGGKSNLGGISKRGNVYLRRQVIQGAKALKIHMKRDKSALGRWVAKLEATHHHHVVLIALANKIMRICWKVLTSGHEYQPYPASAVK

SEQ ID NO: 286334 - protein, 346 aa, unidentified
MEYIALDVHKKYTWVRVENANGERLYESRLAHRHGTIKNFVHRWTEGSPVAVETVGNWYWVVDEIEAGGGKPQLVNARLAKLMMGRVNKSDKLDAQGMNRLQRTGTLPTVWIPSSSVRDLRELPRTRMVLSRQRTQLKNRVHATLNKYGLAVEGASDAFGKRGRELMSELMTKLPPHTEQALRRVLDQLDHVADNLKGIEGQMMEAFAPCPQTQWLKTLPGVGDILAVVIWSEIGSIERFGRAEQLASYCGLVPREHSSGGKIRFGAVRRDVNVYLKWAFVEAANSSLLNAERCGYGHINQLYQRIKTRRGHGKAKVAVARHLSEASFWMLNKGESYREPVSSTQR

SEQ ID NO: 286335 - protein, 402 aa, unidentified
MGENPKRFIGLDIHKEYFVAVGVNAQREVILGPQKVSNYHLDKWISQYLTKEDSMVLEMTTNAYQFYDTLLPHVESVLVVHPAHVALVSNVQVKTDKKAALALAQLHAVGMLTGVWIPPHPVRDLRALIAQREKMVRLSTIAKNRLHALLHRKHLTLPEKPFAPEQRSWWESLPLSATEQLLVRSDFDTLEFAQRQVEQVETYLKQESAQDKRMPLLIQLPGVAMLTAITILAAIGDITRFPTAKKLVGYAGLGTRVHDSGMTHTSGRITKTGRRDLRRAMVNAANTAVEHHAHWKQEFERLEPHLGRSKAIVAIARKLLVAVWHVLSQQGADRFADPSNVASAFYRYAYRVGVKNLPEKQSALAFTRTQLDRLGIGMDLQEIPWGSQHPKLPPSKLSGQKG

SEQ ID NO: 286336 - protein, 346 aa, unidentified
MEKLIAGIDLHGNNLVIALINETGQRLKHRKLDCDLKQVVEFLEPLKPQLKCMAVESTFNWYWLVDGLRAQGYPIDLANPAAIEQYSGVKHADDTHDAYFLAELQRLGILPKAYVYDVQLRPVRDLLRRRLNLVRHRTALMLSFKSLYARTTGATMELKRLKALTSKEVPELYKHPANQLIAQVQTEHIEALNQSVARVEKAVQQSARELPIYQKLLTLPGIGRILAMTVTMEVGEIGRFKTDGDFASYCRTVDSRRMSNGKRKGENNQKCGNKYLSWAFVEAANFARRSDEHCRRWYDRKSAKTSKVIATKALACKLAKAAWHVMSQEVDYDPTRMFPELAMKKT

SEQ ID NO: 286337 - protein, 409 aa, unidentified
MQVMYQRCAGIDVHLRFLVVCLSIIEAGQRRKEIRSFRNETADLLALRAWLLQEQCSHVGMESTGVYWLPVYRRLEGFFELVVANAQHMKAVTGRKTDVQDAEWIADLLQHGLLTASFVPSQEQQDVRDLTRLRVSLVQERARLVNRVQKVLEEAGIKLSTVLSDVMGLSGRAILQALCDGESDPERLASLMHSSVHASREQVVAALTAEVREHHRFLLRELLTLIEAQDRSIKCLEREIERHLHPFEEQMKRCEQINGVSQHVLYVLMAEVGTDLSRFPDAEHLSSWAGMCPGQKESAGKRLSGRSRPGNRYVRAALVQAAHGVRRSHTHLGERYRRLKKRRGSKRAALAVGHSILVIYYHMMKTGQEYQEKGEEFFQRKDHGKVERQLIQRLERMGYQVTRAPQPAA

SEQ ID NO: 286338 - protein, 316 aa, unidentified
MAKKVTEITLGVDVCKAELVIYDWDTEDTVTLENKDSTIEAWLEALYGPVRIAIEPTSSYHLAFVELAHALGYEVYLINPRQLAHYREAVDVRNKTDPLDAWLLARFLTHEADSLRPFKPQCANAQQLWSLLKRRATVIKARTQLRQSFAEIKLPIKAVFSEIQRVLDRIDQRIQALIRKLGWWADYQRCLTIPGAGPLNAAALVTVFHRGAFAGADAFVAFIGMDIRVRESGKFKGKRKLSKRGEAELRRLLYCATQGARSYQPFDDFYQKQLDKGLPKIAAKVILARKIARIAFALMTNQQSFKKKEIVYSFSP

SEQ ID NO: 286339 - protein, 391 aa, unidentified
MIFVGIDVAKDKHDCFILNSEGTVLADVFTIANNRIGFETLLSRIQSCSQGESKIKVGLEATGHYSYNLLGFLLDSGLATYVINPLHTNLYRKSLSLRRTKTDRIDARTIAMMLMSDVDLKSYSNTAYHNEELKSLTRYRFDKVKERAKLKSSVARLVNILFPELEKLVSSLHIAVVYALLSNYPGASYIANANTEELAETLCTASKGRYTKSKTAEIQVVAGVSIGSKMPAKSMELKHTIALIRELDKEISEVESAIDKITSQMDSPIFTIPGIGRHMGAMILAEVGDFSNFASADKLLAYAGLSPSTYQSGQLQNCYAHMEKRGSRYLRYALFNATKYVCLWCPTFSAYLEKKRSEGKHYNVAISHAAKKLVRLIFAMQRSGKAFLADY

SEQ ID NO: 286340 - protein, 377 aa, unidentified
MEKDSRFVGLDVHAETIAVAVAEPGGEVRSRGTIPNTCEAMRRLVKQLGPPETLRVCYEAGPTGYVLYRQLTALGVPCAVIAPTLVPVKAGDRVKTDRRDAEKLARSYRSGDLTPVWVPDPGHEALRDLVRAREAAKKDQLRARHRLGKFLLRQGRRAPTGSKAWGVKHRAWLQTIRFAHPAQDVTLLDYLTEIDHAADRIVRLERAIATAADVAPAPVRAVIAGLQALRGIAKLSAVSIVTEVGALSRFAKPRQLMGYSGAVASEYSSGSQTRRGSITKAGNAHLRRIVIEAAWAYRHRPAIGGTLRTRQEGLSEEVKALAWKAQHRLHGRYVRLLAKGKAPTQVVTAIARELLGFIWAIGVHIEQHPAGGAPAAA

SEQ ID NO: 286341 - protein, 305 aa, unidentified
MDYTTIGIDVSKAKLDIFFSSTGEWVTLPNNNDGFTKLLHICKESYPYIQRIIVEHTGSYQEQLVNYLYDNKLPVCLVHPIRVRSYAKAIGKLAKTDKIDAELLAKYGIIMNPKLSQEKSVILIKLKSLIKYRKQLTDNLTLTKQWLEKRPNSDIQNKIIELVQLLNTQLSDLDKEIKVVVQSDEHMQHNFDILTQTKGIGKITAYILLAELPELGTLCRNKVVAICGLAPLNRDSGTMRGKACIQGGRKVVRNALYMAVISALKSNKIIKNYYNKLKQNGKPTKVAITACMRKMIIYLNTQFQK

SEQ ID NO: 286342 - protein, 437 aa, unidentified
MKQFLECCAGIDIGKREMTVTILTGSVEVEPIPQMGTFGTTVQELNRCLEWLLGNHCSTVVVESTGTYWVPVWNVLHERVAVIVANPEHVKARRGEKTDPEDSRRLAERLRVGDVRGSFVPSAQIVELRDLTRRRKRLLSAANSERNRIQKLLEQANVKIGNVVTDVFGVSGQRILHALLQHPQLPPAALADLAKGRLRRKRQALIETLQGHRLNDHVRWMIQHSLDHLVFLENQLTELSQRTLLKLRPFEREYELLQTIPGIAAETAAVILAETGGNMAQFPSPKHLTSWAGVCPGNNRSAGKQKSASIKRANKWLLAALVQSAWATVRQRGSIFKKRFYRQMQHRGRKRALIAAARSLLEVVWQVLQRMTPYNEPANEVLQEQERGKKIRHHLQRLRQLGIDISALQLPPLSPSDGTRLLTGTPHPLGVLGIHAR

SEQ ID NO: 286343 - protein, 388 aa, unidentified
MNAVAPRAAEKTAIRTQLGAIFVSLELSRSTWLITSLSPGGGEKMSKHSVRAGDVAGLLERFSSFTEKACARIGETFPIIVIQEAGLDGFWLHRVLMDEGIESWIVDPASIATSRRRRRAKTDKIDGEALVRALLAFKRGEPRVCAMLRVPTPEEEDRRRIGRERKTLIAERIQHVNRIKGLLFSQGVFDYEPIHRDRRTRLDELRTGDGRPLPHYLKAQVSRELDRLELLIAQIKAVEAARDALVTPGQPDNPISPQVAMLVGLRGIGQEFANVLYSEGLFRHFDNRRQVAAYSGLAPTPWQSGSIDREQGVSKAGNPRLRSTMVELAWLWTRHQPESSLSKWFRERTKIDGRRKATIVALARKLLVALWKYVTAGVAIEGAVMKAA

SEQ ID NO: 286344 - protein, 427 aa, unidentified
MSYRIAAIDVHKRMLAVVVTDVEGAGEYQFERRKFGATPGELHVLAQWLVELEVEEVVMESTAQYWRPVWGTLELFWRPARQQREGANQKSGTLHLCQAKSNHGPRGRKNDFLDAERMVKRLVAEELVLSFVPDEEQRLLRTVTRRKYQLTRAKIGFKNQLESLLEQGHIKLSSLVSDLLGVSARRMLKALAEGETDAGVLAAMADHQLRATPEQLRDALGASSHLSGAFRRLLKLSLEELQLIEAHIEQLGREAMELLKGHEDVIQRVAEVPGFGPDCAVQMIAEVGLEAAKFLTAKKLSSWVGVCPGNEESAGESQSTRSPKGNRPMRRLLNQAAQSAVKVKGSIFEVTFHRLLPGLGYKQAIWAIAHRLCRLLWVILHKGVRYEERGPAVSAKSKRTRTARMIRELKKLGYRVEGGPLPAVARA

SEQ ID NO: 286345 - protein, 365 aa, unidentified
MSKDIKKPAGETRRYVGIDLGDKKSRVCILDEGGQIVLQEWVVTTPEAFFKRFHGETKMDLAMEVGAHSRWASDLLRRCGHRVVVADPRQIGLITKSNAKSDKRDARTLAQLLRADARLLSPIEHRAEKLQMDLTVIRMRDNLIETRTRLVTSVRGVVKATGGRLPRGETTSFPQQVRDLIPEPLRPAVAPVLEVIDGLNEAAYEYDCLLEHWAGTRYEESSRLTQVKGVGTLTALTFLLTVGDKERFSRTRDIGPFVGLRPRLGQSGDNEPELRITKAGDGLLRKTLVECAQYMVGAFGQDSDLRRWGLKMIAAGNGSKRARQRAVVGVARRLAVLLMSLWKSGQSYDPLRHSRAQERSQEVAA

SEQ ID NO: 286346 - protein, 346 aa, unidentified
MCSLPVFVGLDYHDSSVRICVLDTDGSELANADRPNDWKAIAQFAERFGRPVRAAIESCCGAADLAEELVSCAGWSVDLAHPGYVQRMKQNPDKTDCQDAQLVADLERVGYLPRVWLAPHYIRELRRVVRYRLQLAEQRRATKLRLRALLREQRCHAPEGLNAWTKAWVHWVLQGAELSEQGRWLAKQHLRELARLATRIRQVEKRLEHMTANDVEVQRLQQLPGIGPITAWTIRAEIGHFDRFRTGKQLARFCGLSPRNASSGQRQADAGLIRAANPALRTVLIEAAHRLVQYDPPWQKFAQRLRAGGKPGSLVAAAVANRWMRRLYHEMKTPCGELAEAVGPAR

SEQ ID NO: 286347 - protein, 382 aa, unidentified
MRLILIKASSPSAGRGTVAVTHNDLPTGERGGALMNFYTQQHQHYCGIDLHARAMYVCILDSAGTVLVHRNLSTTPDAFLQAVAPYREDLVVAVECMFTWYWLADLCAREGIAFVLGHALYMKAIHGGKAKNDRIDAHKIAVLLRGGMLPQAYVYPAAMRATRDLLRRRCHLMRKRGELLAHIQNTTSQYNLPALGKKIAYKTNRAGVAARFADPSVRTSIEMDLALIDHYDALLTTVELQIVRTAKAHDAQAFQRLRSVPGIGKILALVVLYEIHDIARFPRVQDFASYCRLVKCAKESAGKRLGSSGNKIGNAHLKWAFSEAAVLFLRQSLPGQRYFAKLERRHGKGKALTVLAHKLARAVYYMLTRARAFELERFVSAH

SEQ ID NO: 286348 - protein, 406 aa, unidentified
MTVMIGIDPHKGSHTAVAVTAAEEPLGKVRVRACPAQAGQLVAWAAAWPERIWAVEGAPGLGRLLAQQLIAAGERVLDVQPKLAARVRLLQTENTGKSDPNDALSVAVAALRSKAARPVLADDHATVLKVWAKRHRDLSRAHNQVACRLHAVLCDLVPGGIANEITVSRAARILGQITPAGPAAKARRELAAELLADIRHLDAQRREVKKKLAAAVKASGTSVTAVFGAGPVIAATVIGDVVTVARFPSRDHFAAYNGTAPVEVSSGNKKIYRLSLRGNRRLNHAIHMAAITQIRHKHSDGRAYYDRKIAEGKTHKEALRCLKRRISDALYARLRADARNAAAACVKDPGGQPGNHSVSRAAGSHPAHRLFGQATPGPQTSLRPAAALTPAMPPSGPPANKTRRPT

SEQ ID NO: 286349 - protein, 374 aa, unidentified
MRDHSEAYVAIDTSKSRNSVAIAEGGRQGEVRFIGEVDNTPAATSKLVKKLAAKYDRVVFCYEAGPTGYELYRQITGLGHDCTVVAPSLIPKKPGDRVKTNRRDALALARQFRAGELTAVWVPDPRHEAMRDLTRARMAAVEDVRRKRQQISAFLLRLGRSYAGVKTWTKAHLKWLASQKLEHAEQRIAFEEMLLAVHQAQDRVARLEMAIRAAVPDWSLAEVVVALMAMRGIDMVSATAFLAEIGDLSRFGTPRELMAYLGLVPSEHSTGETVRRGPITKAGNRRARRTLVECAWSYRHPPRVGRKKQDKVAAAPRPVREIAWKAQTRLYARYRALLRRGKLKTVIVTAIARELAGFIWAIGREVVPAPVLAR

SEQ ID NO: 286350 - protein, 431 aa, unidentified
MDTQQFEVIRPKCAGLDVHKKSVVAAVCTSDPVTLTASYKTKVFNTTNSDIAALRDWLLAQDCPDVCMESTGKYWIPIFNILEPHMHVVLTHPKYVKAIKGRKTDKRDAKWIANLFRFDIVKASFIPPADIRALRELSRYRLKLSYMRTAEKNRYQNSMTISRIRIDCVLSDPFGLSATRIMDYLLSGEPFDEEKCRSLIDRRVKASKDKVMDAVHGYHILEEQKFKMAHAKAHMDFINKSIGEIEAELFLRSRQYDLHIKRIATVTGITELSALFILSEIGADMSVFESDRHLCSWAGLTPANNESANKKKSTRCSKAGQYLKPLLIQCALAAVKSKKEPYFAIKYQRLSKRRGKKKAIIAIARMMLTSIYHMLSDNEDFHPDDYEATIHPPKQKPVVLTLDNTLQFLREQGADPETLKLIQQQCVAQAG

SEQ ID NO: 286351 - protein, 349 aa, unidentified
MEIDTIGIDLGKTVFHLVGLNVAGEAVVRRKFSRLQLLRFTANLRVRLVGMEACGGSHFLGRSLREQGHEVRLMPAQYVKPYVKTNKNDYIDAEAIAEAVGRANMRFVPIKSDEQLDMQSLHRVRDRWVARRTSVINQIRGLLLERGITFRKGRRHAAASLPAVLEDADNRLSGLLRMLLAQLQGELRQLQSQIDDSDALIAKAAGEHEPCRRLMAIPGIGPLTATAVAASIGNGSEFRKGRSFAAWLGLVPKQESTGGKQKLLGISKRGNHYLRRLFVSGARAVLQCRDKQSAGLSAWLGQLASRVHTNVAAVALANKMARVAWAVLAKSEAYRPPLSAISAEALACN

SEQ ID NO: 286352 - protein, 347 aa, unidentified
MSYRIAAVDVHKKMLAVVVTDVAREGEYQFERRKFGATRGELRVLAEWLVQQEVEEVVMESTAQYWKPVWGALERDWKPVRQKREGASKMSGTLHLCQAKSNRGPRGRKNDFADGERMIKRLVAHELVLSFVPDPEQRLWRTVTRRKHQLTRAKVGFKNQLESLLEQAHLKLSSFVSDLLGVSARRMLKALADGETDPATLAAMADCRLRATPEQLRDALGACTQLNGVFRRLLKMALEELELIETHIEQLEREAMDLMQEHQDAVQRVAEVPGFGLDSALQMIAEVGPKAAAFEVAKALSSWVGVCPGNEESAGESHSTLAEGQPPHAAAAGSGGTIGGKGQRKHI

SEQ ID NO: 286353 - protein, 353 aa, unidentified
MRTYYVGMDVHRASIVIVVLNGAGKVVMEYVTETSAGRVRDFLKQLKGKVYITFEEGTQANWLHDIVRPLVTEVVVCDPRQNKLLQSGNKSDRVDAQKLAELLRNGALKAVYHGDHGMRMLKELVRTYDCLVSDTTRVMNRLKAIYRGRAIACSGHDIYRPDRQKQWLKKLREPGARQRADFLYRQLAALKPLRHEAKRLMVKETRRQTAYPWLLSVPRLGVVSVAQLLAIVGTPHRFRSKRQFWTYVGLAVVTRTTADHEVINGVMQRSRRPIATRGLNRNHNHVLKRVFKNAATTACHSGPFKAAYEARVKQGMDASLARLTIARQLAAITLALWKRGQRFDPERMKQQAA

SEQ ID NO: 286354 - protein, 494 aa, unidentified
MKAKACKAKGKRSSSSKRGAKIAARRGAEGMEIVHPHAGGIDCGAQEHYVAVPPQSVKPDEPYVRCFSAFTEGLDALVEWLKACGVTTVAIESTGVYWIALCQKLEAAGIEVFLVNARHVRHVPGRKTDVKDCQWLQRLHSFGLLSASFRPEDIICRLRSLQRHRLNLVSTAGAEIQHMQKALQQMNLHLHHVVSDITGVSGLRILDAILAGQRDASQLAKLRDHRVYKSTLAQMEAALVGDYRPEHLFVLGQSLQAYRFYQTRTQECDAEIERLLQQLAERFESSSAPGAELSQPEVLNDAQFQNPRPAKRKVKRKPQANEPKIELADYLRRICGVDLTQVNGLNVLSVLLIVSEIGVDMSKWRSAKAFCSWLGLCPRNKISGRKVLDTRTCKVISRVATTLRLAAQAVGRTDTALGIFYRRKKAHLGPAKATTATARKLACLVYHLLKYKEQYREPDPATYQLKVQKTILAKIQKQAAALGYKLLPTALVPA

SEQ ID NO: 286355 - protein, 412 aa, unidentified
MEGETVIAGVDTHKDVHVLCLLDGLGRKIWSGGFRADPEGYDRLAEAIGDPASCAVVGVEGTASYGAGLTRRLVELGYNVVEVLRPKRDKARPGEGKSDPLDAERAARKAASGRGCSVPKSQDGWVEAVRQLYVARRLAVATSTSCVACAKSMLTTAPSALRERFRGRERPKDLMPLLARGRKAGDALEESVLASLRSVATVWKEARSQVESCDERIRALLEANAPALLGVEGCGTTTAAALVVAAGDNPGRLKGEAAFSMLCGASPIPASSGKTERHRLNRGGNRQANWALYEIAIKRMAYDERTRRYVARRTSEGKSRREAIRCLKRFIAREVYRVLMDPNPDGAAPEGPELAKMRKAMRVTQKQAAEGLGMSAAALGHLERGKRRSTKLERRYYELLCELKGVLPQTAS

SEQ ID NO: 286356 - protein, 335 aa, unidentified
MQVYGIDLSKEKFDVNFIDAKGKEKNREVKNAVVSISRFLSSVSEDSILCAEHTGAYGDLLVYLCNQLNIPIALVPGYTIKHSLGLLRGKSDPLDSKRIREYGERFTDKLEYAEYDEENIAELKQLYALRNQLVKQRRALRTVDTGRGHLPMQSISVHNHIHAVFSSLDNEITAVEDEIEALIKANQDLNENYELAKSVFGIGPVIATDLLIKTGNFQAIDTHRKAASYAGVCPFPNTSGKMVGKSKTSSHADKKLKSLLYMGAKAVVKNNKEFRLYYQKKQLEGKPHYVIMNNVSNKLLRIVFSVVRNKTPYTSDHVCLDPREKNNNSSTKKVA

SEQ ID NO: 286357 - protein, 374 aa, unidentified
MRFYNRVHRFYCGVDLHARTMYLCILDHGGAVVLHREVPAEPGAFLEAIAPFREGLVVACECLFCWYWLADLCQAENIAFVLGHALYMKAIHGGKAADDKIDSSKIAHLLRGGNLPIAYAYPKGLRETRDLLRRRMYLVHKRAEVVAHVVNANSQYNLPPFGKKLIYARNRQVLKIAQRFGDASVRKNIELDLALLDSLDELIGDVELYLDRTVKVDDADSFYRLRSIPGVGKILALVLFYEIHDIGRFASEGEFLSYARLVRPLKTSAGKVKGGGGAKIGNAHLKWAFSEAACLLARESDQAKRFLARKEKQHGKPKALGILAARLGRAVYHMLRQKRAFDRNRFWNGEPKVAPEKLGRQKVAPRAMQPLVNK

SEQ ID NO: 286358 - protein, 358 aa, unidentified
MADKVTVAAVVGSVDTHKDLHVAAVVDQNNKVLGTQYFATTRQGYRLMLAWMTSFGALKRIGVECTGTYGSGLLRYLQNAGLEVLEVTAPDRMERRKRGKSDTIDAECAAHAAFSGIRTVTPKTRNGMIESLRVLKTCRKTAISARRVALQIIHSNIISAPDDLREQLRNMTRMQLIRTLGSWRPDASEYRNVTNVYRISLKSLARRCLELHDEIADLDVMIAAIVDELAPELIKRNAIGYESASQLLITAVDNPQRLRSESGFAALCGVSPVPVSSGKMNRYRLNRGGDRAANSALHIIAIGRLRTDDKTKEYVARRVAEGHTKMEAIRCLKRYISREVYTLLRNQNRQVNSIPIMA

SEQ ID NO: 286359 - protein, 348 aa, unidentified
MAMTIVEPARTIVGGVDTHLDVHVAAALDPIGGVLGVEAFTATPHGYRALLEWMGAFGSVAKVGVEGTGAYGAGLSRFLARAGVEVIEVDRPNRQMRRLTGKSDPADALEAARAVLSGRATGAPKSRTGNVEAIRALVVAKRSAREARLRAVHQMRQLSYTAPDQLRVRLKGLATTEFVDEAAAMRARGGGDTVVLATKIALASLGRRVHALEAEAAHLDERLAELVEATAPQLLALFGVGIDTAAVLLVAAGDNPERLRSEAAWAHLCGVAPIEASSGKVTRHRLDRGGDRTANAALWRIVMTRLSFDPRTRDYMERRQKEGRSKREVIRILKRYVAREVFKVLPRA

SEQ ID NO: 286360 - protein, 356 aa, unidentified
MSEGSCVGLDVHARSLVAGVIDMGSGEVRSLRVRPGSEATVAWLKTLPAPVRVVYEAGPTGYALARLCAEAGISCVVAAPSKIRPAADRVKTDRRDAERLARLLRLGEITPVRVPGPVEEAARDLVRAREDARGDLMRARHRLSKLLLRHGAVYDATAWTRAHDAWLRKQRFQDGPLAIVFDECYSRMIDAKTRRDTLDKAIAELAASEPYVDVVERLVCLRGVSTLTAFALTVELGDWNRFRPESLAPFLGLTPSENSSGERRRQGGITKTGNTHARRLLIEAAWHQRSAPRLSVTLERRRTGKSLAVRAQADRSARRLHGRWNALEARGKPRLIIVVAVARELAGHCWALATME

SEQ ID NO: 286361 - protein, 304 aa, unidentified
MEIRIIGIDLGKTVFHFVGVNARGEVVVRKKGSRTQLLRFTANLRECLIGMEACGGSHFLGRALREQGHDARLMPAQYVKPYVKTNKNDYIDAEACAEAVTRPTMRFVPIKTDDQLDLQTLHRVRERWVVRRTAVINQIRGLLLERGITIRKGRNHIEQSLPGILEDADNKLSGALRVLLTQLRLEMQYLHGQIGETDKLIGRICGELEQCRRLVAIPGIGPITATATVAAIGNGAAFKKGRGFSAWLGVVPGEHSTGGSPTTTTDLSLEIPTRFCWRTMRWHNGRSRRSREPVSGKCLQRQRY

SEQ ID NO: 286362 - protein, 390 aa, unidentified
MIFVGIDIAKLNHFASAISSDGEILMQPFKFTNDDDGFHLLASKLESLSLVSDSIIIGLESTAHYGDNLIRYLVASNFQVCVLNPIKTSSMRKNNIRKTKTDKVDTYIIAKTLMMQDSYRFVSFYDLDLMELKTLGRFRQKTVKQRTRLKIQLTSYVDQVFPELQYFFKSGLHQKSVYALLKEAPTPKAIASMHMTHLAHLLEVSSHGHFTKEMAKELRVLAQKSVGTSDSAISIQITHCIAQIELLDSQLKQIEAEMADIMKFNDSVLMTIPGIGYVNGGMILGEIGDIHRFATPGKLLAFAGLDPSVYQSGNFQAKRTRMSKRGSRVLRYALMNAAHNVVKNNATFKAYYDAKMAEGRTHYNALGHCAGKLVRVIWKMLTDKAEFNLD

SEQ ID NO: 286363 - protein, 342 aa, unidentified
MLNHYREGEVVEEITTVGIDLAKNVFSVHAVGSQGEVVVRRTLSRAKLSELIAQLPPCLIGMEACSGAHEWARRFAASGHTVKLMAAKFVMPYRKSGKNDGNDAEAICEAVARPNMRFVPVKSLEQQSDLTLHRVRQGFVEERTATLNRLRGLLTEFGHVLPLRASEVHRRVPQLLGKLPTRVAACARDLLEHAARLQAKTLEYEHEIKIHVRSNALACRAQTRLGIGPITASALVATVGNGHDFKNGRQFAAWLGLVPRQYSTGGRTRLGHITKRGDPYLRTLLVMGARAVLQRAASLTDPLSRWALAVRERRGYHRACIAIAAKNARVAWALLAKEPVAA

SEQ ID NO: 286364 - protein, 343 aa, unidentified
MDHFAGLDISVKETSVCIVDDTGKIVREVKVASEPEALLAVLKDCAYRFKRIGLEAGPLSQWLYSGLAEAELPVVCVETRHMQAVLKARINKTDRNDARGIAQMMRAGLYRPVHVKTLRSQKLRMLLTHRQLLLSKAIAIENELRGTLRNFGLKVGMVGTVKFETRIRELVENLPDLAVLVEPLLVVRRVLRQQIGLLHRYLLTIARDDDVCRRLMTVPGVGPVVALTYRATVDVPARFKNSKAVAASFGLTPCKYQSGEIDRDGRISRCGDEMMRVMLYEAAQVMLTRTNKWSWLKAWAMQIARHRGMKKAIVALARRLAVILHRIWVDGTVFRWTREVVTA

SEQ ID NO: 286365 - protein, 333 aa, unidentified
MEPKKTHTYLGVDVAKATLRVQTPKQNFEVGNDSKGIGRILKECGKVDAPLVVFEATGGYERLLMEQLHQHGVACAMISPDRVRAFIRSEGVKAKNDPIDARMLVCFASEKRLQAMAVPRQADRQLRELADRRGQLVEMRAQEKTRLQNSPQAVHANIQSMIRVLDKYIADLETQIAQIIENDPDLNARNQVITGIAGVGPVTSSMIIAYMPELTRVGRNTASALAGVAPFDRDSGTKSAKRHIYGGRAKLRACLYMATVAASIHNDVIKAYVARLKAANKPAKCAIVAGMRKLLLHIRAELIRLEKGTWAPLGEAAQKDQAQPLPELSAVNS

SEQ ID NO: 286366 - protein, 396 aa, unidentified
MRFAGIDVGGERHMVAMVGEEGEVLCRSSPFGEDASGYAHLFELLGPPEGCLLALEATGHYWRNLFVALVAKGYTVAVLNPLRTRRFAEEELQRTKTDAIDALGVARFAAQKRPPATELPDIATVELRELARLRERLQEDFASRLRQLHRAVDLGFPEFTRHVRTLESQLAATILSRYPTAVAFRGVSVKALARIVYDGSHKIGEELARALIETAAKSVGSHHSEPYRLRIKYLCEDLEVLRRRLKDLARDIERKLDDHEVGKLLTTIDGVGPLTAACLIAELGDPARFRSAAAIASYVGVAPRLRQSGKKRFSGSPTIPFGNARLRKALWMVVLNAVRCNPWLRQYYERLRAAGKPGKVAVIAAMRKLLAAVWSVATHRRPFVPIMPAVPVTKNA

SEQ ID NO: 286367 - protein, 423 aa, unidentified
MREVRPVLPGPQFAAFVGIDWADQKHVWCLQAAGSEQRESGELEHSPEAVEAWVGQLCQRFASGPIAVAIEQSRGALVFMLSKYEPLHLFPVPSQMSASMRQALYPSGAKDDPKDADLLLDLLLQHGDKLRRLSPDSEATRRVQNLVEERRKLVEEKTAQSNRLTSQLKIYFPQMLDWFELDTDLARGLLERWSSLEELQRVPPSRLRVFLRKHHARNQEGMEKQIRQAIPAIRDRAVIQAKSSVVKVIASVLQRLTQGIRDLDRQIEEAAAAHPDFFLFVSLPGAGAVMAPRLLAAFGSQRERFGSAREVQSFSGIAPVTERSGKMKWVHFRWACPKFLRQSFHEWAGHSIAYSTWAYAYYQQQRKRGKGHHAAVRALAFKWIRVVFRCWKDGIAYDENKYRAALAQRGSPLSAMLVQEKTL

SEQ ID NO: 286368 - protein, 382 aa, unidentified
MTGTEPHAWGTGLMDDITFVGLDVHKATVCIAVAEGGRGGEVRQLGVFENRSEILSKVASRLSKGGRRLSFCYEAGPCGYGLHRLLTGYGHECVVVAPSLIPMKAGDRVKTDRRDALMLAKLHRAGELTAIWIPDAAHEAMRDLVRARATSVRVLAKARQHLQGFLLRHERIYCGARAWTLAYRRWLTTVRFEHPAQQIVLQDYIHAVQEAETRRDRLTQQIEELLPNWSMAPVVAALQSMRGVALVVAVTVVAEVGDFRRFANPRQLMAYLGLVPSEHSSGSSVRRGGITKAGNALARRVLIEGAWTYRMSARVSRKLHDRLEGLPAAVRDIAWKAQLRLCARYRRLAATGRPKVVVTTAIAREMVGFIWAIARLAQPAPV

SEQ ID NO: 286369 - protein, 341 aa, unidentified
MDEYIGLDVSMKETAVSIRRAGERIWRGKCASDPSIVAELIRKRAPSVKRVVFETGPLSVWFYHSLRIEGLPAICIDARHAKAALDMATNKTDANDADGLVQLAEVGFFREVRVKGFDSMLTRTLVAARTRLVRITTELSNQIRGVMKTFGLLVPAGKGSTFEKNVRSLLADQDKLASIVLPMLEAWRGIRVRAAELGRQLVRDARQSRSCRILMSIPGIGAITATSFTTAIEEPDNFRKSRSVGAWIGLTTRRYQSGEVDYDGHISRRGDRSLRGLLYEAAAVILTRSSTHSTLRTWGLQLRERIGFKRAAVAVARKLAVIMHTMLKTGELFNPNAGAAA

SEQ ID NO: 286370 - protein, 426 aa, unidentified
MKVLYERVAGIGVHKKMIKVGIRVPGDKPWTRKSEVLQYRTFYGVLQQMAAELRKRGITHVVMEASGVYTEPVYYALAERDFEQVAVINPAHAKALKGHKTDARDCLRLAELFECGLLRGSYIPAPELKEVRDLTRYRIKTVQARTSEIQRLAKALESAGIKLGSVASDITGKSATAMIEALTGGERRGAVLADLARGRMRTAGKLADLSQALAGRFTDHHALLCRLHLDRIAIFDSAVAGLEDTVTRKAARWQREQDLLKTIPGFGDAVAQAWLAEIGPAPHSYFAGHDKLASWVTLCPGNHMSAGKRKHGRTGDAGAYIKPMLVNAAWAAVKAPGRLQAKYHRLVRRFGGQKNPAAKKKAIIAIAHTLLKIAYQVLQSGQPYQDLGADFYTRRESPEQRQAYLLRQLQQLNPGCTITITPAEAA

SEQ ID NO: 286371 - protein, 443 aa, unidentified
MACSGMILIREVADAPVIMGISKPAGLKSPCGEVKIVNPLFVGIDVSSRSNVAYLMKPDGNKHSSFSVQNNLGGAKLLAEKIVSALHSMHLSAVVIGLEATSIYGDSLVYALREDGCLGQFQRKIHVLNPKQVKKFKEAYPDLPKNDWVDAFVIADHLRFGRIAKEVYMDDYRYQALRTLTRARFDVIQNLTREKQRFANYLFLKCSGIAQDKDIQNTSATTIALMERFETVDDLANADLDELTAFLDEKGRNFSDPAAKAKAIRLAARDSYRLPITLNNSVNQAMAVSIASMRALEKQVKVLDKAIEHQFEIIPNTLTSIPGIGKVYSAGIIAEIGDIHRFDSQASVAKFAGLVWHKNQSGDFEAEHSQMIKSGNRYLRYYLLEAANSVRRCDSEFRRYYNLKFKEVNKYQHKRALALTARKLVRLVFRLLKDNRLYIPPEG

SEQ ID NO: 286372 - protein, 439 aa, unidentified
MHFSGEVEEREERLNKQKVVAWVGIDWADEGHEVWEYTVQTDSATCYAIKHTAESLQEWVNQLRIRHGGKPVAVVLEQARGGLIYALMNTGFMEIYPVNPESLAKFRKALYPSGAKSDPTDAELLGQMVRQNPGRFRAWVPGDEQTRSLQLLAEGRRKLVEDMTALTNQLTSVLKTYYPQALNWAGDLSSEQACSFLEKWPTLADLQKSRPFRIRNFYEKYGRPPREVLDERVTQMEKAQPLTADPAVVMAGKMMVNAVVAQIRPLRAAIEKYDVEIERIFRQHPDRAVFESFPGAGKVLAPRLLAAFGADRDRFEAALEVQQFSGIAPVTERSGKTIWVHRRLACPKFVLQTFHEFANQSRRFCVWSKLYYQQQRARGKQHNAAVRALAYKWIRILFRCWKDRRLYDDSRYEKSLIKRGASLAPLLNVLDCGNGVQAL

SEQ ID NO: 286373 - protein, 338 aa, unidentified
MTYGAIDLHMRYSQIRIVDGEGQVLRDQRVPTTAERLVAACAGYPELRILVESSTESEWVAQVLEAAGHAVIVADPNYAPMYGEVRRKVKTDRRDAAALAEANRRGWYRAVHRVSATQRGRRQVLRSRRHLVQQRSGTISLIRTLLRQDGHRLPRCSAPAVPDRVAALVRPPARQATLAPLTRVVRMLNAEIAALDRELAATATSDPVVRQLMTVPGIGPVVALTFRAFVDDVRRFATAAQVSAAIGLVPREDSSAERRHRGHITKAGPRELRSLLVQAAWVCWRRAKASGTLAAWTEHLAARRGRRIAVVALARRLSRILYALWRDETEFNAATLAA

SEQ ID NO: 286374 - protein, 393 aa, unidentified
MVSVGIDIAKDKHDCFILGSDGEVLADVFTIPNTAEGFETLWKAICRCTHPEDKIKVGLEATGHYSYNILGFLLDKGLPTYVINPLHTNLYRKSLSLRKTKTDRVDARTIAAMLMSDVDLKSYTDTAYHNEELKSLTRYRFDKVRERAKLKQSISRLVTILFPELEKMVPTLHMASVYSLLSEFPGARQIAGAHLTHLKSLLNDASKGHYGRDMAMELRDAARCSVGSVMPAKSLELQHTIRLIRELDAEINDIEAAIQTMMEEIQSPITTIPGIGVRMGAMILAEIGDFSRFDSPDKILAYAGMSPSTYQSGQLSLSGAYSHMEKRGSRYLRYALYNATKYVCLWDPTFAAYLAKKRAEGKHYNVALSHAAKKLVRLIYAMEKTRRPYNSAA

SEQ ID NO: 286375 - protein, 324 aa, unidentified
MFFLGIDVSKAKLDCALLGSDANKRKTKVVPNSIAGVQTLLQWCAKQGAEPAQLHAVLEPTGQYHEQAATALHDASVSVSLVNPAQVRDFAGALAVRSKTDGIDSYVLARYGQALKPGLWRPAPLHARQLRALLARRDALAKDLQRELNRQEKTQFSDPPVLVEGSIAKTIAFLREEIKRLDHAINDHIDRHPDLKEDRELLTSIPGIGDRAGNSILSIMHNRPIESAEGLASYLGVVPVQRQSGTSLNSRPRLSKTGPSTVRATLYMAAIVSKRFNPHVGALYARLLAAGKSKMAALGAAMRKLVHLCFGVLKTRTPYRPDYA

SEQ ID NO: 286376 - protein, 366 aa, unidentified
MSSLFYIGMDVHKESVRIAVLKGKGKETVYEGTLGNNVEKIVRFVRFYADKGPTVAGYEAGCMGYTLQRALAAAEVECRVIPPNKIPRVGSQRIKTDSRDAVLIARMLKNNEGGNIQIPTADDEATRDLLRCRDDLKVELHRCKQRLSKFLLRLGFVYGKEHAWTMEHRKWMKGLVFSHPLHVETFEQYYALLETLEERLDRMDRRIEELAASEAYQEKTAKLRCFKGIDSLTALALVCEVGDYSRFSDAQAFMSYVGLVPSEYSSGGKRRQGGITKTGNTHLRNLLIESSWHYRYYGSASTALKARRNGNSEIVIEYTDRALRRLQNKHVRLVRRGKSPKTATVAVARELAGFVWGMMTENYGRT

SEQ ID NO: 286377 - protein, 457 aa, unidentified
MPQPKRSRSRTGLSAVHPAAAAIDIGATMHVAAVGPDRDTEPVRTFRTFTEDLHRLADWFARCGVKTVAMESTGVYWIPVFEILEQRGFEVMVVNARDAKHVPGRKTDVSDAEWLQRLHEYGLLRPSFRPQAEIAGLRAYLRQRERLLDYAAAHIQHMQKALMQMNLQLHHVVSDITGVTGMNIIRAIVAGERDPNVLASHRERGCHASVETICQALVGNYRDEHVFALSQAVELYDVYQTKVTACDKQIEVILKRLKKSATPPASKLLPPRHRSRQPNAPSFDARAALHAILGVDLTQIHGLGPYLALKLVGECGINLTAWPTAKHFTSWLGLAPRNKISGGKVLSSKTPRTSNRAASLLRLAAVSVGRTDTALGAFYRRLAARAGKAKAITATARKIAVLFYNTLRHGMSYADPGATYYEERYRRRVLGNLQRRAKSLGYVLQQADRDPTQVVVS

SEQ ID NO: 286378 - protein, 422 aa, unidentified
MRILEPLQIFILEESVMLNAVGIDVSKGRSTVAVLQPGGVIVHKPFDVPHKSRNLHDLVQYLDSLEGDTRVVMESTGRYHEPIRNVLSKAGLFVCTVNPHLIKNYGNNTIRKVKTDSADAKKIARYALDNWAELREYTSMDTTRTQLKTLNSQFSFFMKQKTAAKTNLIALLDTTYPGVNKLFDSPVRADGSEKWVDFVYSFWHVDCVRNAGIKAFTDRYKRFCKHHGYEFQEAKANAIYKDSRELIATLPKEAVYKELIQESIRQLNLLSENVEHIRKTMNELASTLPEYNTVMHMYGVGPTFGPQLMAEIGDISKFQHREALTAYAGVDPGKNDSGQEVHNSSHASKCGPSRLRHTLFQIMTTMLQNGVKEDDAVSSFLFKKKAENKPYLVYMTAGANKFLRVYYGKVKECLRDQEQAEQ

SEQ ID NO: 286379 - protein, 451 aa, unidentified
MPLSAEPDFVAFIAIDWADREHAWAMQVAGSSKRETGKFEHTPEAVDAWAMQWAKRFAGRPVAVAVEQSRGALVYALLKFQHLVLYPVHPSTSYDYRKAVFPSGSKDDPKDAELLLDLVMLHRDRLRVLQPDTEQTRQLQILVEKRRQLVDDRTAHLNRATDQLKLYFPQVLGWFDDLASPMCKHFLERWPTLPQLQAQDPELVRQFFYQHGSRSADRIETRLRQIRQTQPLLQDAAIIAPGVILVRTLLEVVAALNAGIRVLDNSIQQVSCQHPDYFIFESFPGAGPVMAPRLLAAFGSLRERFASANEMQSFTGIAPVMQASGRQRWIHFRWACPRFLRQTFHEYAGLSIQQCSWARQFYDSQRAKGKGHHAAVRALAFKWIRILFRCWKTHQTYDDALYLAACAARACPFPRPTAAPIPNSHIAVCGKQPDSKLKSAGQILKSLIAEA

SEQ ID NO: 286380 - protein, 344 aa, unidentified
MPSIVGGMDIHRKQVTFDYLDVVTGEVKCGQIAPADRANLRAWLKRFAGVPGVTFAVEACTGWRYVTEELQRAGIEAHLAEPADTAAARGRKRRAKTDRADARLQRDLLAQGRLPECWIPPSQILEYRALLETYHDLRREHTAWVQRVHAVLFHQGAPVFCDLGRAGAPQELAALARAHLSPAGQQQIALYLRMLEVTGGELDALRRQLVSAAGQLRGARALAGELYGVGPVTALALTCWLGGAGRFSSARKAVRFTGLDITVYSSDSKRSPGHLSRQGPAVLRWCVYEAGKTHARAGAPDHDYYAAVKDRKGGKRAALSEARKIVRRACHLLGELGDDAFATA

SEQ ID NO: 286381 - protein, 348 aa, unidentified
MTEAYDGREVVGMDLHRRRSVLVRMTPDGRKLETARITNSPAELRRAIAGAGTHPRVVLEATYGWYWAADTLAAAGAEVHLAHPLGVKGFAYRRVKNDVRDAADLADLLRMGRLPEAWIAPDQVRELRELTRYRVKLVRIRTSCKDQVHAILAKLGIPVTCTGIFGVWGSSWLDGLGLPQPYAGKMASLRKICAVLAGEIALLEAVIAGLLKDHPGYQAVRTLPGIGPVPGAVIVAEIGDITRFPRPAELCSQAGLTPRHRESGTKVSRGHITRQGSRNLRWALIEAIQHVPAGHPLRQRKDGIMTRRGAQARNIAKVAMARQLLTWVFYAMRDGQVRSLAAATRQAA

SEQ ID NO: 286382 - protein, 383 aa, unidentified
MSSLAVVPVAARSIIYLGMDVHKDSITIAVLPAGATTPTRLERLVNDLPKLKKWLDRVARDGEVRACYEASGAGYVLHRALRDWGYACAVIAPSLIPQRSGMDRKHDKRDAADLARLYRAGELVAVRIPSEADERVRDVVRCRETFQREILKSRHYILKFLATRGFVFREGTNWCAPHLKWLQHLTTGNSPLAREDRLVDREYHALLMYKLQRRDELDRQIEQLALLPALAPMVARLQCFRGISLHSAMVLATEIVDWRRFERPAQLACYLGLVSREHSSGDRQRLGSITKAGNSHCRHVLVQAAWSYRHRPQTSVDLKRRQQGQQPSVISHAWKAQQRLHQRFNHLSYRKRPQIAVVAVARELVGFLWAVMQDVSPLTQHAA

SEQ ID NO: 286383 - protein, 313 aa, unidentified
MHYTGIDMSKDTFHAAFDDTEVVVFKNTTGGIAKFIESLIGHGCTKDNTEIGTEATGVYHLLLCEQLRQQGWNVKVINPLITNRMFKSDLRHAKTDKNDAVAIRKTLQTGAGYTYTDTPEILALKSLVQEREALCRMRAETKQRIHAHKIREKASGFELHDSFSGSIKVFTYEMKRIEKKMDEYATDTQKLLRSIPGIGKVTAASLVAYIGDIKRFSSPEKLVAYIGLDCRVHESGTSIHGKGYLTKRGNRYLRYILFNAAFIAQRRNPDLRKFMVKKLAEGKHHFSVLCAVERKLVHIIYAVWTRGTPFEAH

SEQ ID NO: 286384 - protein, 359 aa, unidentified
MEGQERSPGRIVGGVDTHKDLHVAAVVDELDRVLASQCFATTRHGYKQMLAWMRGFGSLQRVGIEATGTYGAGLLRYMQKAGIEVLEVTTPDKHDRRKRGKNDDLDAQNAAHAAFAGKRTVTPKSRNGMIESLRVLKACRKTAVAARRVALQMIQNTIVCAPDELRELLRTMTRMQLIRTLAAWRPDLTDYRNVTSAYRITLKSLGRRYLELHDEIADLDTMIIAIVDELAPNLVARNSIGHESAAQLLLTAGGNVQRLRSEASFAALCGVSPVPASSGKTTRHRLSRGGDRAANSALHIIAIGRLRTDPRTQAYVARRITEGHSKLEAIRCVKRYIAREVFSLIKQRPKESHPASSLV

SEQ ID NO: 286385 - protein, 348 aa, unidentified
MSKYSVPGGDVSGLLRRFAELRRKAAARTGQDFPIIVIQETGLDGFWIHRVLQSEGIESHVVDAASILTSRRRRRAKTDRIDGETLVRTLMAFKRGEPRVCSMARAPTPQEEDRRRVCRERRTLVGERVRHVNRLKGLLFAQGVFGYEPLRKGRRERLEDLRTGDGRPLPMHLKAQIIRELDRLEIVLEQLKTVEAERDALLKPTTGEAASPAAMLAQLKGIGPETAAVLWSEGLFRQFDNRRQLAAYAGLAPTPWQSGSIAHEQGVSKAGNSRLRATMVELAWLWLRNQPTSALSLWFHERVRRLGGRMRKTTVVALARKLLIALWRYTIAGVVIEGAVMKPATTTI

SEQ ID NO: 286386 - protein, 352 aa, unidentified
MSSHKSAPAKVSTIGIDLGKNSFHLVGLDQRGAIVWQLKCSRAQLERRLANIPCCLVGMEACSGAHYIARQLAALGHDVRLIPAQYVKPFLKGHKNDYRDAEAIAEAVQRPTMHFVAIKTPEQMDLLALHRVRSRLVGQRTGVINQIRSFLIERGITVRQGVVPLRKALPDILSSNNDALSPRMVNLIAELIQDWRRLDERIAAVSAEIETLAEQDEGCQRVMTVPGVGPIISSAVVAAIGNGAGFTQGRDFGAWLGLVPKQESTGDRTILGKISKRGNKYLRTLFVQAAHVVLARRPNAAMRGLWPWIEQLSRRLHRNMLAIALANKLARIVWAVLARGRSYQPRIAAEVA

SEQ ID NO: 286387 - protein, 345 aa, unidentified
MRELIYVGLDLGSSHCCQSIINADGSLKFSRFIPTSEQHLREAFTGLNGEVRVHMEAGELADWVHSVIGPLVSRVVVSHPRSLAWIGKDSVKDDKIDAGKLAELLRLGRVHEVYCERDNERRTFKHLVTHHEQMSREQARRKSKIKARLRTLGVIRKDARLFTGNGQVDLLDAIESVEIKQMLAQSFAVLNRMLECEREAKAAMLEFSRRFPEVRLLQTAPGVGAITACRFVGYIQTPLRFSNKRKLWRYCRLGITRRESNGKRLSHPRLDNAGVGSLKDVSRKVFEAARRCKGDNSFKRCYEQSLENTKNAVHARLATQRKILGCLRAMWLSNQPYRDFGSLKR

SEQ ID NO: 286388 - protein, 315 aa, unidentified
MSQSNQSFVGIDIAKQHLDVCLLPERRGFQLSHDEKGLKELIAQLRRIKPTLIVVEATGGYERRLAAELCQAELPLSVVNPARVRHLAKGYGTLAKNDRIDAYNLALFAQVVRPAPQRKSSQKQAELNDLVGRRRQLVEMIVMESNRLEKLPGVSVRQSITRIMTLLQEQRREIDNQIAGHLRSDDEWNGKVRVLQSVPGVGPVTAATLVAEMPELGELNRHEIATLAGLAPFDDDSGRWHGRRFIRGGRRSVRVALHMATLTATRCNPLIRPFYERLIAKGKGFRRAMVACARKLLILLNTLVKEKRPWRPLPG

SEQ ID NO: 286389 - protein, 308 aa, unidentified
MDAPVVGIDVARDRLDIHVHPSGANFAVDRTTEGVEQLCERLRPLKPKLVVLEATGGLEAMVARALTTWRLPAVIVNPAQVRAFAHALGQRAKTDRIDATVIARFAAATNPPVRARADAETQALADLVTRRRQIVGLIASERQRASQAPSCIRDSVRRVIEALEQEQDVIDRSIDAEVDRSLEWRRKETLLTSVPGVGPTIARTLIAQLPELGSLNGKQVAALVGLAPWTRQSGRWRGRSFIAGGRACSHGAVHGAMVASRHNAALKTFRDRLIAAGKPKLVALIATARKLITILNAILRDGTPWQPA

SEQ ID NO: 286390 - protein, 331 aa, unidentified
MAVHVGLDVGSRSTVMGWREKGRNAGSWEILQTPKARQAAIKKLLALKPLSVVMEATGIYYLDLAIDLSKAGLPVSVINPKSSRNFAKVMLEHSKTDAIDAQLLAEYGERMSPRLWTPPSPVQLELRAIGRHINRLVGHRTRAKNELHALKATETSSALLIEDQEEAIATLDKRIERFRQAGRALITSCATLNAQFENMLAAPGMGEVSTLAALAEMTALPTFLKAPQVSRHAGLDVRLTQSGVSIDKPGRLSKCGNAYLRSSLFMPAMSAIRSDARVKAFYEGLVARGKRKLQAICAVMRKYLTGLWACMQSDQPFDTAKLFSEKHLLKA

SEQ ID NO: 286391 - protein, 400 aa, unidentified
MFCGWDWGSTQHGVCVVDDHGTVVGRWLIEHTESALARLFVELGELTVATTLPIAIERGEGLIVGAIADAGHPVWMVEPAAFKAARPRWGSAGAKSDLGDAFMLADYARTDGHRLRRVEPVEQPTRELGALVRARTSLVEARTAASNQLWAILAEHWSGAGVVFQKLISQIALAFLTDYPTPHSAALLGEGRMRQFCRRHAYRGGKSPAELLGRLRATPASANPIAPVVLAAIVHGSVAQIRVLNAEIAQLERDLATSLAAHPKARLLETLPRVANVSLAQVIAEIGPLLERCDNPEQVAAMCGAAPVTRASGKSHTVAFRYAANKPARVAITGLADNSRHSSAWAGDCYRRARERGARHPHAVRIVARGWIRVIWACWSTDTIYDPSRHRGEQLFATRT

SEQ ID NO: 286392 - protein, 347 aa, unidentified
MLIIGCDFHPGFQQIAIFDKGTGEVEEKRLQHRAEAEEFYGSLAGQEVRVGMEACGHYPWFERLLAERGFELWFGDAAQVRASVVRKQKTDRRDAEHLMELLREGRFPRIWVPSLEVRDVRQLLVHRHKQVQARTRTKNQLQAMALSHGVQKKYKLWTQAGRPELEQLPLLPYASERRRRLLQALDGLEVEIDELNRRVEEEVRKRPEAVRLMTHPGVGPVTALAMVLTLGPAERFASAKQVGSYFGLIPSEESSGGKQRLGRISKQGSSFLRFLLVEAGQTAARYDPQLKRFYKRLAVRKNRGVAKVAVARKLATRMYLMLRENWTYTQLNQAVMLASPSHSVAGE

SEQ ID NO: 286393 - protein, 354 aa, unidentified
MLAELVDHVIGVDPDRDWITAAVVDARTTGVVAKQKFPADAVGYNEAISWAEEFTVAGERAWAVEGTASYGRGLTAALARASEWVIEFDRPREKASKDGAKSDELDAVRAAREALGRDRLHIPRAHDGHREALRVHTVTRAGVVRARTAAINELKALVLTASDDLRQELRHLTTKALVKRCSAFRDTPQRPIAERCSRNTMRLIARRIIGFNEEIAVHDTAMKQLIDEAAPQLVAEPGIGYVTAAMFYIAWSHPGRCRNEAAFARLGGAAPLPATSGQSQDRHRLNRSGDRQLNSALFVVALSRARSHQPTRDYRDRRRSEGKTDREIRRCVKRYIARRVWRLLEHPPVLEITA

SEQ ID NO: 286394 - protein, 311 aa, unidentified
MMNDSIGVDISKDKLDCYRLSDGMYTQFPNTKAGFQKLRRWIGPVLPARVIYEPTGAYHGAFEAALADHLPLIKVNPRHARRFAESKGQLAKTDRADARVLARMGAAHGLEPDTPVAKDRPILRELQAARTALVKDKVRLQNQLDRQHQQLTQKLTRRRLRQIVADLTELDHAIQEQLEACPVRKRALYLIKSIKGIGAVAATTILIEMPEIGRLRKKAVASLAGVAPITRQSGRWRAQSFIQGGRKPLRDALYMPAIVAARYNPDLKAQYQRMRSDGKPPKVALTAIMRKLLILANTLVKENREWEAIRA

SEQ ID NO: 286395 - protein, 368 aa, unidentified
MEKLSEVFIGLDVAKARHAVAVAEDGRQGEVRYIGEIGADTESVRRFVAKLEKRHGQLHFCYEAGPTGYGLHRQLTTLGHRCTVVAPSLIPRKPGDRVKTNRRDALQLARLLRAGELTAVWVPDEAHEAMRDLVRARQVAVDDIRRKRQAISSMMLRQGRSYPGKKTWGARHVQWLQTQRFDQLAQHLVLQELLLAVRHAEERRERIEAAIGELLPQWSLVRAVEALQALRGINLVTAVTVMSEVGDLRRFENPRQLMGYLGLVPGERSTGESVHRLGITKAGNGRVRQALVESAWCYRHPPRTGRAKYYVHERVPHAVRDIAAKAQTRLCARYRALSKRGKKLTVAITAIARELAGFIWAIGREVQA

SEQ ID NO: 286396 - protein, 406 aa, unidentified
MSQPQASPNRFVGLDVHKHYLVAVAVDRELKEVLSPRRVSLARLDDWARKTLTPQDAVVLEMTTNTFQLHDDLLPFVFSVTVTHPPHVALITRAQVMTDKIAARTLAKLHAAGLLPPVWVPPPEVRDHRALVAQRSKMKRLVNQAKNRLHAVLHRHHLQPPEGDPFLSSKHEWWLSLEVSALERVRIQCDLDALVFAETQIAHLEETMLALAAQDERVLLLVQIPGIAWRTALTLLAAIGDIGRFPTAKHLVGYAGLGAGVHDSGQTHRSGRITKAGRRDIRAAMVEAAHTASRTHVHWQAELARLAPRLGKNKTIVAIARKLLVTVWHVLTDGCADRFADVEQVARKLLRHAYCLGREHRPKGQSAPEYVRQQLDRLGYGGDLTAISLSDRTVILPPSRLGTEGD

SEQ ID NO: 286397 - protein, 370 aa, unidentified
MTQSSTLYVGMDVHKDSIAVAYVVQDHGAEVISLGNIGTRQCDIDKLIRRLQSKSPRLVFVYEAGPCGYWLYRYLTKKGHVCWVVAPSLIPKKPGDRVKTNRRDAIKLARLMRSGDLTPVYVPKVEDEAIRDLCRAREDAIHDLKAAKFRLKAFLLRHDIRYTGRATWGPAHLRWLSEVVCPTPAQQIVFQEYVRAVTEHTERLARLEQELTDQVQTWRLRPVVDALQALRGVQFTVAVTTVAELGDLTRFENPRQLMSYLGLTPSEYSTGARRRQGGITKAGNTHARRALIEGAWAYRYPAKVSRHLQLRLEKVPKPIQDLSWKAQVRLCKRYRQLLARGKNANQVVVAIARELSAFMWAIAQEVSPTP

SEQ ID NO: 286398 - protein, 451 aa, unidentified
MDKGNNGLSRGDRNRNARLAALRVVLPRDHAILGIDLAQSRQAAVLADHDSRVLARWRPRCSPWKLGELLDRALRKALAAGFSGITVACEPTGHRWMVIAQLAAERGMPMVCVQPLVVARGREAEDYTRGKSDDRDAVLIARLAAQLHCYLPEQADQGWARLRHLGARRSRLIEASTACGQQLRDLLEVAWPAVLSAAADPLESATWLACLSVTLERGDGDLGAVHAMGQDAFTAAARARLGALGARRICRRIAAAVYAALAGPAGVAAQRPGALERAFSVLGDWTTVHGELAAVNARMLQALDVMGVLAVAGSIPGVSALQVAAILAETGDPSRFPTARAMVKHAGLAPCENSSGNHTGETGISRRGRPALRLAAWRAVWGALRHNPVYAARYEGLTGRTRDQLTDQQARAAIAAALIRQIHAIITRRVSWDADIAAGRRRPGQEVNAAA

SEQ ID NO: 286399 - protein, 337 aa, unidentified
MKDIIYDHYIAIDWSIENMAIARMTSKSNKITLIDVPSDIVEMTVYLKKLKGSKIVVVEETTTSQWLYTELRDYVDRMVICDPQRNKLLNDGPKTDKIDAAKLVHLLKAGLIKEVYHSSDKFVYLRRFVSGYEDLVKAGVRLKNQRYSLLRACGKRGFEWAGTRLESEGDQFVLDCMDRQIEAQGQEKQGYEKEFDRLAKDYPEISHQKSLPGIGPIHAVKIVARVVTPYRFADKGHFLSYTGLIKLEKISGGRSYGRKSPRYCRQLKSVYKTSTWAAIGGNNPINDYYEYLIQEKGYPEHNARHKACRRLAILSLGVFKSGKKYQPYRRDHVKGTQ

SEQ ID NO: 286400 - protein, 372 aa, unidentified
MSSRILFVGLDVDDQAFHGAALERESGETGEFRCRATLKALERSLVELASRFPGREIRICYEASYVGFHLQRDLARLGTFCEVISPSSVPRVRGNAVKTDRIDARKLAQFYANGQLKAVAPPDADVERDRDLLRSRQRLLHQLSQIRSHVHSLLRRQGIHYKAETGNKSHWTKHHLGWIEKKAQSLEGSLGLNLRLLLQQMKWMDHTLGEYGRAIEELAKSPRYEKPVRALLCYKGIKHIFAMTIATEIGNIARFDHPRSLASYMGLDIREYSSGGKHHRLGITKQGNRYLRRAFVEANQRGWAWGRVSRDLKNRREGAPPEWVAIADRCLNRLCKKGRRLLRAGKHPNKVKVACAREMVGFVWESLRAVAA

SEQ ID NO: 286401 - protein, 362 aa, unidentified
MEFFCGLDVGMDETAICVVDDKGKVALEVAVVTDPEAIKAALTPYLGRLRRLGHEAGSLSPWLPPELLKLGLPAVCLETLHVRAALKAQRNKTDRTDALGLAHLMRTGWFRKAHIKSAACYRLRLLLTHRRNLKRKFVDLENAIRHSLKVFGIRLSHVGRGGFAQAVREAVAGDALVSELIDAMLNARAALWKEYCRLHDLVVKLVAGHELCRRFMQIPGVGPVAALSFMTAVDDPSRFKRSRDVAAYFGLTSRRWQSGTSIDVQGRISKAGDADVRRALYEAASALLTRFKRKDKVKTWGLAIAKRTSHRKATVAVARKLAVIMHAMWVDGTFYCGDPAASQADVSARAAVKERKLLGAHA

SEQ ID NO: 286402 - protein, 340 aa, unidentified
MNHTTVGVDLAKSVFQLHWVDPVSGEIINKQIKRAVFLEHFANRERCLIGMEACGGAQHWARRLIEMGHQVRLMSAKSVKAFVTGNKSDAADARAIWSATQVRAGKQVAVKTEEQQAILALHRMRAQQVKFRTAQMNSLRGLLAEYGEVAGRGRAALDRAMPDILERLAQRLYAGVVDAMREQWNYLRALDAQIAQIELRLQICMTENAACRAVADIPGVGVLTATAAVATMGDPKTFKSGREFAAWLGLVPAQTGTGGRVKLLGISKRGDVYLRTLLIHGARSVLSHAKAPGPWIEQIRERKPANVAAVALANKMARMIWAVLAHERPYQKDYISVKRA

SEQ ID NO: 286403 - protein, 394 aa, unidentified
MKLIGIDIGKNKHFFCVMDQQTGEIISQPVSFSNDKEGFDFLLQKIKSYPKDSILIGMEDTGHYHFALLKYLLDLQYTVALINPKTTDFNRKMQGGITKNDKLDTINICDVLDTPERKKQYRITKVNSFDLYEQKQLTRHHHNLKEEENVYKNRLQKCIDIVFPEFNKLFDSKYGIVYMNILKMFGSAENIANTDIRTIRKCFEIEGRGNRISLTPERLKECARSSIGISSSAEVIQIKHLTAQIELIEEQLTEIDKKIEEFSIQNNSPILSIPGISHFSGTSILAELGDISNYSKPSQIIKFAGVAPLHYESSQFNAQHTAITKKESKYLRKTLYQIILPVIRHNPVFNKYYQLKISQGKGHRCAQGHCVRKLLRIIYHLLKTNQQFDPQLLR

SEQ ID NO: 286404 - protein, 338 aa, unidentified
MEQITTIGLDLAKNVFQVHGVDAAGKVLVRKQLRRAEVLRFFAPLPPCLVGMEACGTAHHWARELTKLGHTVRLMPPAYVKPYVKRGKTDAADAAAIAEAVTRPTMRFVAVKTVDQQSVLMLHKVRDLLVRQRTMLINALRGHLAEFGIVAARGPGGVSAAIAALHQAQDDLPELARQVLHGLIDQMRAIGGEIAKAEKRIMAWHRASEASRRLATIPGIGPITASAIAAAVPDATLFRSGRQFAAWLGFTPRARSSGRKERLGGISKQGDGYIRRLLVIGATAVIRLARQDNPSKTWAARLLERKPARLVSVALANKTARIAWAVLARNQSYTAPAV

SEQ ID NO: 286405 - protein, 356 aa, unidentified
MEYIACDTHKFYTLVEREDAQTGRARQYRVDHGPGAIRRAFAGAQAGTAVAVEATGNWYWVVNEIEQAGLVPRLVHPRKAKMMMGMINKTDKLDVHGLNRLQRNGTLPTVWIPPGPLRDLRELTRTRQVLVQQRTRLKNRIQATLCKYGLLMSEFSDPYGRKARVAMQGLIEQLPPQTAYVTTVLLQHLDLLEPQIAQLEHRLGELLKVTPEMEWLMSLPGVGLILSAVIAWELGDIRRFLSALHLASYSGTTPRVHSSGDKTRYGRLRPDVNRYLKWGFVEAANSICLNHTRQPDRHVSRLYKRIRDRKGHPKAIGAVARHLSEAAFHVLSRKEMYRDPALNKGPIQGGVSATAS

SEQ ID NO: 286406 - protein, 407 aa, unidentified
MTITCGIDWAEAHHDVAVMDGDGTVLGRRKIDTGIVGFGELMSLLAEHCEDPRVVPIAIETDKNLIVVALQTAGLTVFPINPRAVARYRERHGQSGKKSDPGDAALLADVLRTDRHQHRPLPMISNGGRAVKALARQHQEAIWSLHQTTSRLRSVLLEFYPQALQAFPNLKHKTALTILAAANTPELGSKMTARKIVALLHRCGRRNDPALVDQILTDLKTAALRQPAVVESALGLTVVGLLGIITAMHSAVEQLEAALAVEFDQHPLTPVLRSAPGLGPVLAARVLAEIGDDYTRFTSAGGLRAFAGTAPVTRSSGRSRHVSARRVRNKRLGDACHWWAFAALTKSPGARAHYDRRRAAGDHHNAALRNLSNKLVGRMWWCLHNNQVWDENAAWNLPPSGDTQLAA

SEQ ID NO: 286407 - protein, 345 aa, unidentified
MEITTVGLDIAKRVFQLHGVDAAGKVVLRRKLQRSEVLAFFKALPPCLVGIEACGTGHHWAREIRELGHEVRLMPPSYVAPYVKRGKTDAADAAAICEAVTRPTMRFVPIKTAEQQAVLMLHRTRDLLVRQRTMLVNALRGHMAELGIIAPQGIARVADLMAVLLGEGTTNVPALAREALRGLAAELEALDRRVKEIEVAIVRWHKDNQASRRLATIPGVGPITASAIVATITDPFQFHSARHLAAWIGLVPRQHSSGGKQRQSGISKQGDHYLRRLLVLGATAVIRHSRSKSTAEAGWLKSLLERRPARLVSVAQANKTARIVWALLVRGGAYRMPAALPSGVA

SEQ ID NO: 286408 - protein, 401 aa, unidentified
MNAVGIDVSKGKSMVCVMRPFGEVVLEPFEVLHTAQNLNDLAGKLKALDGETRVVLEATGNYHKPVAFVLHDAGLFVSVVNPVLIHDYDNNSLRRVKTDKKDAVKIANYTLDKWTRLRQYLPEDDTRLALKNCYRQYQQAVAIRTMLKNNLISSLDLTFPDANKLFNSPAKSNGCEKWVDFIGDFWHSECVSSLSTDAFAKRYLKWCQKHRYNFTRSKSDKIYACAVNSASLPKSPTSKLLIQQQVAQLKAVSQSVAAFRQEMLRLSQQLPEFDTVMEMYGVGPSLGPQLMAEIGDVRRFSSKKSLIAFAGIEPQPNDSGKVVGNDKGISKVGSAVLRRTLFLIMTVILQTQPQDEPVFQFMNKKRSEGKPYKVYMMASANKFLRIYYAKVKAVMDSERSQ

SEQ ID NO: 286409 - protein, 481 aa, unidentified
MANRTTSRTDLKVLPMHPHESIYIGVDIGKFKHVAGFVSKTLLERHLHFESCPAFLFEQSREGFQAFVERIRAYCPLEQCFIVMEQTGHYHRPLLQYLLEMDLPVYVMHVQSREFGMLKTDKRDALRLANHLYNQLALGVQVENKLQVIRRAIPPSEAAAQLKGLMRHRYELVNEATQRKNKLTAICDELFPELTKVFKNPNLAVALDLREKFPTPHAVATASLIALREVRQRNHPSETVLVQLQSLADQSIGTKDLARQRGLLLEQDLLIKELRLIQNHLERLEAEICQIVEQCREGKILLSIPPISPLAAASMIATIGHIANFEDAGHLKSYFGWAPKRAQTGVTFDRTSLTRGGSREMKKVMYLVAWHAIKTETEWACLYKRLVPRLCSYDERTQTYKGRGKALGHVIGRLITLIYALRHRKMMKRSVILPLEHGHRNQYSMIESCTSTIALVTIIQSERNIQSIGLSRSSRKGTSVR

SEQ ID NO: 286410 - protein, 433 aa, unidentified
MKNNRRRFSGKPRVSSSVLDRINPNAAGIDCGSAEHYVSVPPDRDPVPIQSFPTFTADLMRLADWLVACRVTSVAMEATGVYWIPIFEILEARGIEVLLVNARHLKNVAGRKTDVSDCEWIRELHSVGLLRGSFRPTAEIAALRAYLRHRQTLIETAGSCVQRMQKALVQMNLQLPLAVSDITGVTGLRILRDIVAGQRDPERLAEHRDHRCRASKAEIAAALTGHYRPEHLFALRQNLELFDACQTQIAACDQTIEAHVQSLTKPIKPPASPLPSPRTRKKPRDNEPRFDIRTPLHHITGGVDLTQIDGIAPYTALKLISEIGTDMSRWPSEKHFTSWLTLAPNNKISGGRLLSSRTQPSANRAAAAFRMTAMALSRTQTALGGFYRRLAARIGKPQAITATARKLAILVYRALKGELLYKDPGAAAYDAQQ

SEQ ID NO: 286411 - protein, 373 aa, unidentified
MTKNLRYLGLDVHAETIAVALAEPGGEVRSLGIIPNEPSAVAKLVRKLGGREQLRACYEAGPCGYVLYWQLTKLGVACDVVAPTLVPTKPGDRVKTDRRDAEKLARCHRAGDLTAVWVPDAAHEALRDLVRAREAAKADQLRARHRVSKFLLRHGRRAPGDVKPWTQRHRRWLDTVTFAPVAQQTTLADYIHEVDHAGARLERLETALDVAIAAAPPAMQTIMRALQCLRGVRQLTAATIVSEIGPLSRFAHPRQLMGYSGTVPSEYSSGSSVHRGAITKTGNAHLRRVLVEAAWAYRFPPKCGDALRTRQRGEPPGITAIAWKAQQRLHTRYRRLLGRGKPVPHVITAVARELVGFIWAIGIAAEREVAIAA

SEQ ID NO: 286412 - protein, 416 aa, unidentified
MTDQKRWYVGVDWASESHHVFLTDADGRKIAERGFKHGGEGLTEMAAWLVATSGAAEASQIHVAIEVPHGPVVETLIERSFKVHAINPKQMDRFRDRYTMAGAKDDSRDAQVMASALRTDPRCFRLLAVADPAVIELREWSRIAEDLSAERNRLTNRMREQLWRYFPAMLELESDLGAEWLLDLWEIVPTPNKAARSRETTIAKLLKRNRIRRYDAAHVLEVLRQPPVQVAAGTIEAATAHLVTLIARIRLINHQLKVAHQRLDSLIARLVPARETETGQQKQRDVEILASLPGVGRIVLATLLAEAFDALQRRDYAALRSLTGVAPVTKRSGKSCIVVRRQACHDRLANAMYHWARVAVQHDPRSRSKYAALRGRGHSHGRALRSVADRLLNVACAMLKTGTSFDPALAAPKTSC

SEQ ID NO: 286413 - protein, 345 aa, unidentified
MNIHTIGIDLGKTSFHVVGMNERGEVVVRKHFSRAQLLRFTANVQVELIGMEACGGAHFLGRSLREQGHEVRLIPAQYVKPYVKTNKSDYIDAEAIAEAVTRPTMRFVPIKTDDQLDLQSLHRVRERWVMRRTAVINQIRGLLLERGITLRKGRCYVDAALPGILEDAEAKLSGALRLLLSQLKIELDQLGMRIHEADEVIKRTAQQHDACRRLVAIPGIGPVTATAVIAAIGNGAAFHKGREFAAWIGLVPREHSTGGQQKLLGISKRGNSYLRRLFVQGARAVLQQRTKQSSGLGTWLAQLTLRTHHNVAAVALANKLARIAWAVLAKNEPYRPSVLADVAAV

SEQ ID NO: 286414 - protein, 367 aa, unidentified
MEKSSKVYVGMDVHKDSIEVTLAEQGGELRRLGQIGGDRGSLLKMARRLQSRGGERVFVYEAGPCGFWIHRELAALGEHCMVVSPALVPKRAGDHVKTDRRDSERLASLARAGELEAIHVPDVRDEAIRDLVRGRDDAVIAQRRVRQQLKALLLRNDIRYVGKTSWTGAHRRWLSELKLPEPAQQIVFEEYVDAITVATGRIERLTRAIQTETLTWRFAPVVAALQAMRGIQFVHAVTLIAELGDLTRFPSARQLMGYLGLVPREASSGEQRRQGSITKAGNSYARRALIEAAWAYRHPARVTRIIATRQTGLPKAACDIAWRAQLRLSAKYRRLNARHLHHNKIVVALARELSGFVWAIGQSVKPQ

SEQ ID NO: 286415 - protein, 338 aa, unidentified
MSILYVGIDLAKSVFAVHGVNEAGKPELVRPNVARAKLVELIAALPPCEVGMEACTGAHHWARLFMSHGHTVKLMAPKFVAPYRLSGKRGKNDAADAAAICEAMQRPNMRFVPIKSVEQQARLMVHRARQGFVEQRTATLNRIRGLLSELGIVMPLKAATVRREAALALEDLPGRANLVIGDLLSEVHRLDERIEQYERQIVQMAREDERARQLMRLSGVGETTATALIAMIGNGHEFKSGRQLSAWLGLVPGQYSSGGKTRLGRITKAGDPYLRSLLVMGARAVLNAAKGKNDSVSRWAAQLAERRGYWRAIVAIAAKNARMAWAVLSRGDRFVMPG

SEQ ID NO: 286416 - protein, 387 aa, unidentified
MPQPNDLSRSLVALDQNSTIIAVLEMSQSSWLVAGMLPGIERQPRKKLEPSPERLVAVLHSWRDEAVRAGRTITRIALAFEAGRDGFWLARWLEARGVEAHVIHASSVAVSREHRRAKTDRLDTELLKRGFLGWLRGERGHCTMARVPTIAEEDAKRPNRERECLVGERTRIVNRIKSTLARLGIRNFKPTLRKASERLATVHTPEGMPLPPNTLAELQRDMARLGFVMSQIREIEVARQKRLEQQPETGPHAMVRLLARIVGVGVETADMLVHEVLSRPMRDRKAVARYAGLTGSPDESGAQRREQGLARAGNARVRRGMIQLAWRFLMFQKESALAVWYRTRTADSRIGTRKTMIVALARKLVIALWRFVTTGETMEGVILRPAG

SEQ ID NO: 286417 - protein, 397 aa, unidentified
MLDDGSQPTKLFNADNNQLGAETLVERIYSIAKEHCVSDILIGTEATSMYDWHLLEYLAESKLALEFNLKLYRFNAKWIKNFKKSLAPRGKTDPIDSFAIAERLRMGRLPKEYIPDTKYQPLRKLTRFRFHMMQQIAREKDFFLANLFLKKASAYSRVSPFGSTFSATSLSVINDFFSVDELAAMSVEELTAFILEKGKSHFSKPAEIVDNLKRVARESYRLKPELAPTVNLILASTFNNIRCYKDQVKLVDQAIAENLKAFKHTLESIPGIGPVYAAGILAEIGDVHRFSNDSSLAQFTGLTWPKHQSGKFQAEETRMSHAGNQYLRYYLVEAANSVKRCDATYKAFYEKKYKEATKHHHKRALVLTARKLVRLVWTLLTRQVLYQPGYSSTSLTV

SEQ ID NO: 286418 - protein, 409 aa, unidentified
MPGRKVYYMIDKEAPILAFDVSKGSSHCQGYCSFGKPSSKPIKAAHSRSGMAAAEEISEALEEKTGRKPKVVMESTGVYSKPVARWAELNGLEVYLISPLESAKVRKSRVRPTKTDALDCGVIAEVAYTRGVRKLTAASSLYSQLYALSRRRAAIVDRLVASKNQYRKSLDAVWPLLDESCDPFSGYAMWAVGRYRHPEALAKAKEGSIVSGLERAKVRTGAISKAAIASKLSAYARDAISGCGPEDGEVDSLLSALDDVIRDMRALDEITGRLLRLAKGLPHFALIASIDGTGDALAALICAEIGDPSRFASRNGIVAYAGLDPTILQSGKNDGLHYSITRKGNAFLRKYLYLAVGNMAMHKADNAITRFYSKKKSSGLCHKAAATAACRKLLVTIWGMLRSGSFFER

SEQ ID NO: 286419 - protein, 373 aa, unidentified
MHYTTVYVGMDVHKETFSLCCYTNEKEQAEYPQKVDGHYSKVLNYIEAMRFHYGEDALFICGYEAGCLGFTLYHQLMDHNVKCVILAPTTMLQQRGKKKIKTDKRDAALIARCLAHHDYSPVHIPTDQDEQTKEYLRMRDDHKLALKKVKQQILAFCLRHNYRYDATNNHWTQAHLKWLRALKPEGLYEEVLKEYLLTYDTLTDKLERLDKRIEELAGGEEYHENVKKLSCFLGVKTVTALSVLTEVGDFNRFASAQHFASYIGLTPGEDSSGEDQTRLGITKAGNRHVRCLLVEAAQSYTRGQIGFKSKALKARQEGNPPEVIAYADKANERLRRRYYRMVLKNNKKTNVAKTAIARELACFMWGMITGNVA

SEQ ID NO: 286420 - protein, 340 aa, unidentified
MVDVIVERCAGLDVHRDTVVATVRLPGKGKSRLRRSQETRTFGTTIGQLERLSEWLGECGVTRVGMESTGCYWKPVFYALEGRFDCWLVNAKHLRNVPGRKSDVIDSRWCCELVELGLVRPSFVPPPEIRRLRDLTRLRSTQVQERTRTIERLEKVLQDAGIKLTSVASGVYSVSARAMLEALLGGVTDPFVLAELAKGRMRKKIPQLQEALASRFDVGHHGVLVAGLLAHIDALDQATANLEARIGIATAPYADLIELLCTIPGVGARIAEILIAECGVDMTVFPTVAHLASWAAICPGTNQSGRKRGSGKTRNGDTCSRPASSDSRSASRRRRRSSAS

SEQ ID NO: 286421 - protein, 317 aa, unidentified
MGKTSTIVAGIDVAKPKLDVAIHDCKLRWQVTNDPAGFRELVGLLRSRKVISVGLEATGGYERGVVEALRKAGFNVVVMQPRQVRAFAEFILCRAKSDRIDAGLIAACVAHHRIERDAPDPRIAAFADQLTFIEQIEEDIVRIKVRLEHTRDPKLCGIMLADIERLKTRRAKMIAKLVFALRIHEDLARRLDLVGSIDGIGPRTALAFIIRMPELGRMSREQAAALAGLAPFVHDSGERKGERHIAGGRDRLRKSVYAAALPAAFRWNTQLIALYKRLTSAGKPHKLALVACARKLVIFANTVLARGTPWTKSTAAA

SEQ ID NO: 286422 - protein, 338 aa, unidentified
MMNFSHFILINEVMKKIIIGIDISSKTLDICVKKDLVVKHSVIENEVKTIKSFFSRYSKEDVIVAMENTGRYNWNLLEVLAGFTFKVYVIPPLHLKKSLGLIRGKNDKIDALRICSFIEKNQQELPLWKPAGLGVKKLKVLLTERNSRVKMKRQLLKQQHDYKLMKPISLDKELLKLNKKLIETLDAQINQLEADIEKAIQLEDQLRVQSELIRSVPGVGKVVSWMMIAKTEGFTSINDPRKMACYCGVVPFDFQSGTALRHKPRVSVYADKSMKSVLHLAAMSAIRLNNDLRTYYKRKVGEGKNKMSVLNAVRNKIIHRIFAIIKSQTTYKNDLVLS

SEQ ID NO: 286423 - protein, 311 aa, unidentified
MQEIFVGVDVAKDWLDIHHPGRGARRIENTPKAVRTFARSSARQGDWIIFEASGGYDRLLREALEVAAVRFTRVNPRQARDFARAMGVIGKTDRVDARMLSELGTRLRPAQTLPLAASRRALQAQVTRRRQLVEMRKQESTRRQQTADIEARADIRSLVTVLDRRIAKVEARITTLVAADAELAAIDRRLQTAPGVGPIVSVTMIAELPELGQLDRRRIAALAGLAPIARDSGKRTGRRRIGGGRPIVRTMLYIAALHASRRCDTFKAFRNRLESSGKPVKAAITATARKLLTVLNAMLAASADFRHEAHE

SEQ ID NO: 286424 - protein, 433 aa, unidentified
MNRKQTERIEAITATTLVVGIDIAKKVQWASFADYRGIEIGKAMSFSNNRAGFEKIIAKIEQLRNSKILRTAYNNVVIGMEPTGHYWKTLAHYLMKAGYRVVGVNPHHTKKSKELDDNSQTASDKKESLVIARLVKDGRYFDPYLPEDVYAELRGMANARVNVMKRNNAVKNNIIAIMDEYFPEIFEVFGNPLTGKSARQVLKKCPFPSMVMTLGAEGVLAAIKEAVKKSVGAKKARELLEAAKVSVGVTYGMESAKIRLCHLLCELELIEAQLAVIESFMEQRLQETGYSESLLSIKGVGIVTAASFLGEVGDPLRFDNARQIANYAGYNLVEDSSGKSKSGTSISKRGRSQLRSLLYKMAFVMVGQNPEMKALHKYLTSRDKNPLKKKQSLVVISKKIITVIYSLLKKQALYDPALALGMVRREMILKAAA

SEQ ID NO: 286425 - protein, 366 aa, unidentified
MAITHVALDDSKRVIVAGILRADASEPNVREIPNDPRQIRRLFERLLREGPVRACYEAGVSGYDLYRQLVALGVDCVVIAPALTPRRPGERVKTDRRDAVKLVRLFRAGELTAIHVPTEAEESVQDLTRCRDDIRAEIVRWRHRVLKFLARHGRVYQAGRNWSQRHCDWIRAQQFVDPTLAYTLSVSLDALEQALRRRSDLDRAIEALAETTPYQPAVEALRCFRGLNTLSAMILIAEVVDFQRFGRPRQLMGYLGLVPSEYSSGDHHRRGSLTKAGNTHARRVLIEAAWHYRHRPAVSARLAQCTAGQPAAIVAEAWRAQQRLHRRYRHLVGHGKRPTVAVTAVARELAGFVWAAMTRTPPGMAA

SEQ ID NO: 286426 - protein, 343 aa, unidentified
MEDTLYDHYIAIDWSIENMAIARMTKKSNKITAIDVPSDITDLQAYLKNLKGTKILATEETTTTQWLYTELKDHVDRIFICDPTRNKLLNEGPKNDKIDARKLVHLLKAGLMKEVYHSNDKFLYLRRLVSGYEDLVKAGVRAKNQRYALLRACGKKGKEKKNLNLDSRGAKFVLECLDRQIGAYEEEKKNFEKEFDRLAKKYPVIRHQKSLAGIGVINAVKIVARVVTPYRFADKGHYLSYTGLIKLKKESGGKIYGKKNPRYCRQLKSVYKAGVMAAIGGNNPINDYYEYLIQEKGYPECNARHKACRRLAILSLGVFKSCKKYQPYRRDHVKESKGNTSSL

SEQ ID NO: 286427 - protein, 430 aa, unidentified
MEIVYPRSCGVDVHKSFIVAVICISESVKPKYIKKRFSTFNNQLIQFKNWLIENNCQNVCMESTGKYYIPVYNALEGHISNVVVANPKWVKAIKGEKDDNKDAKWIADLFKFGIVRSSYIPEKDIRVLREFTRYQYKLVNMRSSEKNRFQNALTTGNCKLDIVFSDIFGKSASAIVDTILSNDPYTSEDILSKVHAGCKASHEDILSAVDGIQLNQFQKDRIKIVQKHMEYLDSLLDEIQHHIDLMVANYEEYIQILCTIPGINRKSAITIISEIGTDMSQWSSHCKLASWAGLAPGCNESAGKKKSVKVSKAGVYLKPCLVQVAHAAVKDKNCDYYAAKFKKISKRRGKKRAIIAIARKILTAVYHLLKTGEVFNPTDMADVETTKKQRIEYVKNNLRNAFNQLSRTGLSEAEILQLIRKESTNSPQIE

SEQ ID NO: 286428 - protein, 394 aa, unidentified
MSTLFIGIDVSKDVSTAKGLSIEGKSKFYIEFKMDSEGFSQLLAAIKANCKNFSEATVAMESTGCYHINLFSFLTNKGIQSVVINPLLISNFCKLSLRKTKTDKKDATVIAQFLLVHRESLSQLSFSQDVQNLRDLARERESLITLTSALKNDIRRMLQITFPELESICNIFSETILHFLTQFPSARIIATADKKTITKALVHADRRKRVSISSDDIIKAAQVSVATPGAAKELILPQKISTLLYLAEKRKNITKVLVKTCKSMMVQDLEIITSIDGISNQSGSLFLAEVGDYRAFKSYKNLIAFAGIDPSTHQSGKFVGKSRISKRGNRHLRRIIYNMTFCSVRGNNAFRDYFLKRKLEGLPFKMAILATAHKLVRVLFAMLLNKSTYKINNA

SEQ ID NO: 286429 - protein, 392 aa, unidentified
MSLQHCHFDASRSLTALEQDNTIIAVIEMSQSKWLVAGLVAGVKRQPLKKLDAQEQGLLKLLHRWSDEADQAGREIKRIVVAYEAGRDGFWLARWLRARDVETYVIHPTSIAVSREHRRAKTDRLDTELLMRAFLGWLRGEKRHCSMVAIPTIEEEDARRPNRERQNLVTEQTRIVNQLKAALVRFGIRSFRPTVRKAEEKLKNLRTAEGSPLPENTRAELRRLLARLRVVREQIRTVEQERLRKLAVAPAAEKGSHAMVRLIARVLGIGIETADMLINEVLSRRWRDRKAIARYAGLTGSPDESGKRRRERGLARAGNARVRCGMIQFAWRFLRFQKNSALAQWFAARTADGRASTRKTMIVALARKLLIALWRLVTTGEIPQGLTLRPAL

SEQ ID NO: 286430 - protein, 325 aa, unidentified
MPTGKVLREGKVSSEPTALIAWLSEVGVTLTRIGLEAGPLSQWLYAAMRQAGLAVELLETRHVRNAFKIMPVKTDRKDARGIAELMRVGWFRPVHCKWMEAQETRAMLTARKLVQKELLETESSLRGILRGFGLKVGKTTPLAFEGRIRELVVGHPNLEVITSALLSVRAVLRRQFNDFEKRLRAIARTDTRARLLMTTPGVGVIVALTFACAIDDPSRFKSSKAVGAYFGMTPKRYQSGETDYTGRISKNGDDSVRAVLYEAGHVILTRPLKGCTALKSWAMRIAKRAGMRKAKVALARKLAVILHRMLADAKPFNPMAKLAAT

SEQ ID NO: 286431 - protein, 355 aa, unidentified
MNDTKYIGLDVHQATISVAVLDSSGKLVVEAILETKAETILQFIHGLRGSLRVTFEEGTCAAWLHDVLKPNVAQVLVCDPRKNALIKAGNKSDRIDARKLADLLYLDKLHAVFHGETGNRALKELARSYLALTRDTTRVMNRLKALYRSWAIPCAGQRVYAPRYRSEWLAKISEAGVHRRAEIYYQQFDALRSLREQVRRDLLAEGRKHKAMKLLRQIPSIGPIRAALLIALMQTPHRFRTKRQLWAYCGLALKTSTSGEYRIVEGRLKRARKFLAIRGLNVNHNHDLKNIFKGAATRAAAVPGPFQEFHAGLVARGMKPTMARLTLARKIAAITLIVWKKGVDFDAEHLKQQAA

SEQ ID NO: 286432 - protein, 377 aa, unidentified
MTVNSAATSNEQSIYAALELSKNSWLLAIQVPGRDNPSLHPLPGGDADGLMAKLDAARDRVAKDTDQTPAVTLCYEAGYDGFWLARFLKQRDVTCQVMEPASLRVNRRARRVKTDRIDVENILHTLVAWCRGERHVCSMVVIPSVEEEDLRRCHRERDRLIRERTAHTNRIKGLLFGQGIRGINVKAHYKSLKPAELITADGRPLPDRLGREIAREIERLAQVQSQIVAVEHERDHPATSCEATERKRHDLLRLKGIGPSLSSTLAREVYYRRFANRRQVASYIGIAPSAYDSGEGHRSQGISKAGNRLARVAIVEAAWLWLRHQPDSALSQWFHDRTQGQKGRIRRIMIVALARKLAIALWRYLETGLIPEGAVVK

SEQ ID NO: 286433 - protein, 479 aa, unidentified
MESKPKEKNNQPTQPHWREMNRKQRRDTMRKIQSEDLSLELVHRDAAGIDIGNESHYVAVPPSRDNQPVRRFGCTTAELKAMAAWLKQCGIRTVAMQSTSVYWIAVYDILEQAGLEVYLVNARDTKNLPGRKSDVQESQWLMKLHTYGLLRNSFRPSQEIRTMRTYWRQRNDLVQSASRHILRMQKAMTQMNIQLANVLSDLNGATGQSIIKAILAGERNPHKLAEFRDPRVKASEEEIARSLEGNWQPDLLFVLKQEQDGYEFCQKQMAECDRQLNQHLEQSEDHSRGASLPEEKRQGRLKKKKGNAPRFDLREGLFRLTGTDLTRIDSVDVMTATTVISETGYDMSKWQTENHFVSWLRLRPDNRISGEKIIGKGRLPTNNRATVALKMAATTLRKSNTYLGAQFRRLRTKLGAPCAIKAMAAKLARLIYRMLRYGMKYVDQGAAVYELKHRELQVHQLKWKAASLGYQVTPIPVAT

SEQ ID NO: 286434 - protein, 271 aa, unidentified
MEYYAGIDVSLESASVCVVDATGRIVREAKVASEPEILIGWFRSLRFAVTRIGLEAGPLSQWLYAGMRDAGLAVELLETRHVRDAFKAMPVKTDRKDARGIAQLMRLGWFRAVHCKSLPAQEARALLAARKLLQTKNHDVEMSLRGVLRGFGLKVGPTTPRTFPGRIRELVATHTTLSTVAEALLAARSTLFEQWQKLEKRLRSLAREDGRVRLLMTAPGVGAIVALTYASAIDDAARFRSSKSVGAFRVDPQEVSVGRDRHHRTHFEDRR

SEQ ID NO: 286435 - protein, 348 aa, unidentified
MSTMTDTTRRVTAGVDTHRDVHMVAVLDERGAELGCAPFAADPAGYRKALAWVRGFGPIERIGVEGTGSYGAGLTRYLHNQKVEVVEVSCPDRRRRRSHGKSDPVDAVAAARAAQSGEATAQPKTRTGNVEAIRALRMVRRSAGHSRTDAINQMRALVVTGPEPLRAAFRDTTVWQMVSAAARMRPGDPTTPVGATKFALRQLARRIQGLEEEIETLDAILAPLVRATAPDLVARHGLGPDTVGALLVSAGDNPERLRKESSFAHMCGSSPIDASSGLVTHKRLNRGGDRSANQALWRIVMVRMVSDPRTRHYVERRTKEGKSKKDIIRCLKRYVAREVYPYLVETGP

SEQ ID NO: 286436 - protein, 423 aa, unidentified
MENSAARKRKQVPEGYLVIGVDPHKKRHAAVVITQDFTTRAKFKFDNTREGLETMLHRAQKEMVGSDCRGAIFAIETGGHYWRNIAYFLEERGIPYRFINQFTLKRRREGKDLNRRKNDYRDSEVAAQLLCTGEFTESKIPQGVYAELRAAHNTYRRLVKERTRITNLVKGLLDGIFPEFTHVFKNPCGLTALSVLSTCSIPRVVAGMTEDEFVATIEAQHKGRLMRRKLRTLHHSARTSIGIEAGARSVSCEISFLVEKLELIRQHIRIIEGTLVKLVDETEEGKYLLSIRGLNYIAVAGLLAELGCFKAYRSAKQMIKMAGSNPTESESAGKKRSRTPMSKQGRPVLRYCAWTSVIPMLRFNSDFRAWAKQRRERPAHANPLNGREVVGAALNRLFRLAFAMVKNQTYYQVPEPESALVAV

SEQ ID NO: 286437 - protein, 314 aa, unidentified
MPESERAVGIDCGKDFLDVAVFPGAGWYRVANTSEGHRELVAWITERAIGVVGLEASGGYERPVRNALRAAGVSVRVFDPARVRHFAKAKGRRAKNDRLDAAVIAEFTATQTAELLLPADPAREELAGLIKARRLLVSKRADLGKGIPHAPAAAREALTNAVEHLAQEIATLDAAIAQTAKTLSSLSRTVQDLQTAPGIGPLTAVTLAVLLPELGRISGGKIAALVGVAPFDRDSGTLRGQRHIAGGRADVRRALYLATLSAATHAKGVIADFYEGLIGRGKPPKVALAACMRKLIVRLNAMVAQGANWEAKPA

SEQ ID NO: 286438 - protein, 387 aa, unidentified
MPQPNDLSRSLVALEQDITLIAVIEMSQSSWLVAGIVPGIERHPLKKLEPDEAALLRLLWRWRDEAAQKGRTIMRIAVAFEAGRDGFWLARWLRARGVEAYVIHSTSIAVSREHRRAKTDRLDTELLKRAFLGWLRGEQDHCSMAALPTLEEEDAKRPTREHQTLVGERTRIVNRMKGTLARLGIRGFKPTLRKAPERLETLRTPESAALPPNTRAELQRDMARLHFVIDQLREIERTRLERLEQRPAEGQNAMVRLVARVVGVGIETADMLVHEVLSRNLRDRRAVARYAGLTGSPDESGSKRREKGLAKAGNARVRRGMIQLAWRFLLHQQNSALAHWYRARTAEARGGMRKTMIVALARKLLVALWSFVRTGEVPSGIVLRPIA

SEQ ID NO: 286439 - protein, 381 aa, unidentified
MRKVCGLDVHKDSVFMCILSENGDKIQQKYGVLTTELDSLRELLIFHDVGEVAMESTSVYWIPVWRALEHDFELKLVNPYFIKQLPGKKSDVKDAEWIASCLLKDLIRGSYVPEEKIQRLRQLNRRIFDLNREIVHKLAKLDACLQRCNIRISNYVSSTDSKGYKGVVECLSKGITDPLILVKEIHGRTINTWGRQIIIGSLTGLINETDEEVIRQLKEELDLAEKHKEESQAKMYEMCQEYYPNQLANLQTMPGIKERSATAIIAELGVDMKTFATASALVSWCGLKPRNEESAGKIKSRRITHGNKYLRKTLIECAWGASKKQGCFYNRFSYIQTVVRKKNQMKVRVAVARKMLTAIWHILSKDQPYRELIDHHTLLAG

SEQ ID NO: 286440 - protein, 445 aa, unidentified
MKRKRTYRSVDVEKVSVERLLPRLEKRVVVAVDVAKERMVAGLADGSGKTLELVRFSHPRQTMTFVELLLRLRQEGHDVEAVMEPTGVYGDALRFQLRSRDFAVFQVDPKRVHDSAYVLDGNVSSHDPKSCTLIAFLHAQGLSRPWRERTPEERRVRILLKEHQLESKLEMELYNELEAMTSASWPELNAMMQHAVRWPLELLARYPSARAVRDAPSAEVRAHLRKVSCGALREQRIADVLSTAKTTTGEPLEAEEERFIANLCKRLLEQRDKLSELDKRMSAAAASNEETRRIREVVGPAAALALLALVGAPSSYASAGALEKACGLNLKVRSSGQTRGKLSITKRGPARIRQLLYLAALRFVQDDPLARAWYEQRSAYKGGMKVKAFVAVMRKLLRATYHVARGETFDSAKLFDARRLGAATEAAPTETAPTETATATTSSAV

SEQ ID NO: 286441 - protein, 303 aa, unidentified
MPEAVEAWVAQMSQRFAGRPIAVAVEQIRGALVFMLSKYEQLHIFPVPPAMTANLRKAFYSSGAKNDPSDADLLLDLLQMHREKLRRLSPDTEATRRIQNLVEERRKLVDEKTAQSNRLEAHLKIYFPQIPCWFEDIGTPLVCALLERWPTLEALQKAEPDTLRKFFRKHHSRKEELIKSRIKAIGEAKPALKDRAVVEAKVAVVKVLVQLIQVLHEGIEGLGRQIQEAAEAHPDFFIFDSLPGAGAVMAPRLLAAFGSQRERYQNAAEVQTSSGIAPVSENSGKSSWVHFRFACPKFLRQSF

SEQ ID NO: 286442 - protein, 351 aa, unidentified
MTVTLGVDPHKASHTVVATDLVGRQLTQTTSGGTRTSDHQELIGWARQRWPERTWAVEDCRHVAGRLLADLLAAGERVVLVPPRLMAQVRQASRVPGKSDPIDALAVARAALQEPKLPQARLDGPARELKLLVGHREDLVAERTRVENRLRWHLHDLDPERAAMLPTRHLEQRRVLDELEAWLAELPDSVQVGIVRELVGRCRELTLRANKLQAELSDRVARVCPRLLGLPGCGVLTAAKIVAEVAGVGRFRSEAALAMHAGAAPLECSSGAWQRHRLSRVGNRQLNAALHRIAVTQLRVHPPAQAYLTRLQAAGKSKREALRVLKRRLVRVVFNLLHADLDQPGLDFRPM

SEQ ID NO: 286443 - protein, 328 aa, unidentified
MYQIGIDVSKKKLDICLLFDGILGKRKTKVIDNDAHSSRELISWLGKQKCRPEDARIVLEATGTYHETLCGQLFEAGIYLSIVNPYRIREFAKGMGILSKNDIVDAYALACFGTLKRPGAWVPPPPEVRELKALLRRRDALLADVLCEQNRLEKAEVTRTPKIVMRSIMKILKTLEKEKKGIEEEIAKHIDKYPGLKKDMDLLTSIKSVGPQLGGNMLMVLRCREFHSAEQVAAYLGVVPVERRSGTSVNSHAHLSKAGPSDIRAKLFLAALTATRFNPHVKALYDRLLAKGKTKMSALGAAMRKLVHLCYGVLKTQQPYDVNYAVSG

SEQ ID NO: 286444 - protein, 414 aa, unidentified
MRDIDTAVVVASLKVLDPKRPIREATELPRRREMTRMGWTGRAPAPDGSESAWGLARIRSTAMPRTFAVHAVTTTIGIDMGKNTLHMIGLDARGGIVLREKVSRGRITSRLANLPTCLIGIEAGMATHYVARELAALGHDVKQVPPTYAKPFRQGHKNDFRDAHAVAEAVQRPTTRFVPAKTDEQLDLQALHRVRSRLVSERTAVINQIRAFLLERGIIVRQGLRFLRQTLPDIIAKRTDVLSPRMVRIVADLAGDWRQLDERIEAVTHEIKTLAKSDDSCRRVMTVPGIGPIISSAMVAAIGSGAAFATGRDFSAWIGLVPRQMSTGDRTILGRISKRGNGYLRTLFMQAARVILLRPASWPKHGFGIWLARAAQRLHPNVLAAALANKLARIAWTVLAQERSYEVRIMKAAA

SEQ ID NO: 286445 - protein, 386 aa, unidentified
MQKLNDLSRSLTALEPDGTLIAVIEMSLSSWLVGGILPGVERQPLKKLAVDESALLKLLHRWREEAKKAGRRIERIAVAFEAGRDGFWLARWLKARGIEAHVIHAASVAVSREHRRAKTDRLDTELLKRAFLGWLRGERDHCKMVAIPTIKDEDAKRPNRERESLVGEQSRIVNRMKAALIRLGIRGFNPKLKKAARRLEDLRTPEDEPIPPNTLAELRRDMERRRLVRDQIRQIEEARLECLEHAPCDGPHAMVRLLARVIGVGIETADMLVHEVLSRNMRDRRAIARYAGLTGSPDESGRKRREKGLARSGNGRVRRGMVQLAWRFLMYQKDSALAQWFRARTENARGTRKPMIVALARKLLIALWRLVRQGVVPNGVVLRPAQ

SEQ ID NO: 286446 - protein, 348 aa, unidentified
MNQYIGLDGHSKSCTFVVVNEKGKVKRKAVLETEEKQLLQFVKSIPGRRHLCIEEGSQSQWLYEIFSGQVHDLAIVQGRKTRGNKDDVRDAHRLAERFRLGDLGPRIQKVPESLAALKDLVRGYEMLNTDLTRVKNRIKHLYRSRGIAYAKAGCPFCTGRGGCKKPGFHQTLELLRTQQEGLKPLKAEAQKTMVAEANRHPITRILKTAPGFGPVRSAELLSIVINPRRFRTSRQFWCYCGLAIVQRSSSDYVQQPNGQWIWAPTSQTRGLNRNFNRMAKAIFKGAAVTVLTSMPTEPLRADYDRLLTNGTKPNLARLTLARKIAALVLSMWKNQEAYDPGKYRLTSI

SEQ ID NO: 286447 - protein, 349 aa, unidentified
MTEQRRSYAGECVYVGVDVHKETYTVTCVCHQQIVKTATVQAEPAGLAASLLRWFPGATLYSAYEAGFSAFVLHRVLTTAGITNIVVNPASIAVAANDKVKTDRRDAKKLAIDLADGRLRGIYIPTEAEELARLLPRTRAQIVEHRATIARQIKAKLHQFGLIAPSSRRMISNRYLREIAAWSLAPELRVSLTLLAEQWRFATRQLIEIRRLLQEQAAAQAELETVYRSVPGIGAVVARTLATELGDMTRFANERALFSYTGLTPSEYSSGASVRRGHISRQGSGRVRHLLIETAWRALPRDIVLQEIFDRIAATRGKKRAIVAIARRLTGRIRACFRQGTTYAVGTYA

SEQ ID NO: 286448 - protein, 427 aa, unidentified
MNCTQNHKIDQVTDETLVVGMDIAKRKHYACFVDARGRVLQTSFPVIQSKQGFEQLDQRIRQAMNEFGKTKVIVAIESTGHYWLNLAYFLEEKGIPLVMVNPAHVRRSKELDDNLPTKHDAKDALVIARLAKDGRFSFPRLLRDIEADLRVGSTLRETFMNEHTAVRNAMIRWTDRYFPEFSAVFSNLGKMALAVLELTPFPEEITGRTVEELVEIYRQSEGLKAPQKPKIRKLLEAASHSIGVTEGQQMARFEIAALVRRYRQLEEEIAALDAELTALAQTTVEYQWLKTVDGLGDATIVDLLAEIGSFAHYRDPRQLIKFAGLTLKENSSGQHKGQKRISKRGRKRLRSVLFRTMIPLIRHNEAFRELHNDYTTRAVNPLSKKQSIVVLCGKLLKVLLTICTKKQAFDGERMRQDVFAHVQVRAA

SEQ ID NO: 286449 - protein, 347 aa, unidentified
MSHKTAATVAHTIGIDTGKNTLHLIGLDDQGAIVLREKIARGRIATRLANVPRCLIGIEAGMATHYVARELSALGHDVKQVPPAYAKPFRQGHKNDFRDAYAVAEAVQRPSTRCVPVKTDDQLDLQALHRVRSRLVGQRTAVINQIRGFLLEHGIAVRQGLRFLRQQLPDILAKRGDVLSPRMIRIMEDLSGDWRRLDERIQHITEEIEVLAHGSESCRQLMTVPGIGPLIASAMVAAIGNGAAFAKGRDFAAWLGLVPKQMSTGDRTILGRISKRGNRYLRTLLMQGARVILLRPANWAKHSFGPWLTAAANRLHHNVLATALANKLARIAWTVLLQARSYEARVN

SEQ ID NO: 286450 - protein, 415 aa, unidentified
MDVLHDACAGLDVHKKTVVVCVLRSSPGGIPDRQVRTFGTMTAELEQLRDWLIECGCRHVAMEATGAYWKPVYNVLEERGDLQLQVFNSQHLKTVPGRKTDVKDAEWIATLLRHGLVRASFIPDRHQRELRELTRYRTALIRQRADEVNRLQKTLEGANIKLAAVLSDVTGVSGQRILEALIDGVTDAEQLAELAHTRVLLHKRAALEQAVVGRLSHVLRFVVQQQLRHLHDLEAQIEACDAKVEELLRPFEQLLERLRSVTGVGPRTAQIILVEVGLAIQRFPTARHVAAWAGMCPGNRQSGGKRQHARARKGSPWLRAALCEAAWGASKSKKGGYLPALFRRLAARRGNKRAIVAVGHSILVTCYYLLTRGGTYQDLGETYFDERDRQVVVRRSVRRLQSLGYAVHLEEIQAA

SEQ ID NO: 286451 - protein, 343 aa, unidentified
MSIVILGIDLGKNVCSVVGIDAAGGVVVRRSMRRQTLIDYVAKLPACVVAMEACCGAHYLGRLFAAQGHEIRLMSPEYVRPYVKAQKNDDRDAEGIAEAASRPTMRFVELKSEEQLDIQTLHRVRSRLVNERKSLINQMRAILLERGTTFPVGRRKFGQGIDAMLADEDTTLSPRLRQLMNQLRAEWRELDTRIEALNGEFVELARNDAAARRLTSIPGVGVLNATALIAAVGNASSFAKARDLGAWLGLVPRQHTTGGKPRLLGISKRGNTYLRTLLIHGARAALPSLARSETPLGRWLTGMIERGVHRNAIVVALANKLARIAWAALRKEATFERGYPVAA

SEQ ID NO: 286452 - protein, 392 aa, unidentified
MRFIGIDIGAESHVVAVVDEAGGVLVKSTPFSEDAEGYAKLRALLGSPEETLCAMEATGHYWQNLFAFLAAEGFQVALLNPLRTHRFAGEDLRRAKTDAIDAVGIARFAQQKRPVVTPLPDEATLELRELVRLRDRMVQDMGDRVRQLHRTLDLTFPEFPRLVRDLTSFKATGLLLAFPTGTAFRDTSVEAVAELKYDGRHRIGEDLARDLCELAGRSVGRHDGPSYRLQTRYACEDIATLRERIKGLDGDIQRSLDQHRVGQLLTTIDGIGSNTAARMIAEVDLLAFRDAGALAAYVGVAPSVNHSGKRTPQRGAISSIGHAKLRAKLWMPTLQAVRKNAWLRRFYEGLVARGKPKKLALIAAMRKLLSAMLSVARSGKPFEPRLPEAPTA

SEQ ID NO: 286453 - protein, 409 aa, unidentified
MDIIYKSCCGIDVHKNKLVACLKIKGKKDVIKEFSGQTEEIKSMANWLLENKCEKIAMESTASFWKPLVNIFEIKKLDYTVINAKEYKNVPGKKTDVKDSEWIADLLQHGLLKDSYIPTREQRELREATRYRKSLTEERARGLNRLQKMLEGANIKITSVLSNVYGVTSRNLIEYVLEHDEDLTMEKATELVTTRIHAKLEEVVRAMDGIVTPFQKTMMKEVIKHIDELTNRIKEMDDLIDEYMKEYEKNKKKLEKMPGLGKRSSEIILAEIGQDMSRFPTAGHICSWAGVCPGNNESAGKRRSGKTRKGNKILKSTLVECARSAVLHKNSFFYAQYQRIAMRRGKKRATLAVAHSILIAIYYMIKEDKEYQDLGANFYNKFNKEKKANSYLKKLKELGYDVQLIAQVS

SEQ ID NO: 286454 - protein, 343 aa, unidentified
MECYVGLDVSLKQTSICVVDRTGSVVREGVVDSNPEAISAFVRSKAPNTVRIGLETGPTSTWLWTELKRLGLPVICIDARHAKAVLKMQINKSDRNDAIGIARIMQTGWFKEVHVKDIDSHSVRALLASRALLVKIKRDLENHVRGLLKNLGLVIGRAKFNVFAVRAEELIEGRPELIAAIRPLLEARNAVEQQVSELDRKVMKLARHDAQVRRFMTAPGVGPITALAFKATIDDPARFARSRSVGAYVGLTSRRHASGEVDWTGRISKCGDAMLRSYLFEAAGVLLTRVPKWSAVKAWGVRLAKRNGLRKAKVAVARKLAVILHRMWIEGTEFNWSKMEIAA

SEQ ID NO: 286455 - protein, 445 aa, unidentified
MARKSKKQRLTVVHPHCAGIDIGSREHWVAVDPECCDEPVRRFTTFSDDLYELADWLQSLQVDMVAMEATGVYWIPLYEVLDARGFQVHLVNSRSTRQVSGRKSDVLDCQWIWQLMSYGLLKGAFRPADAVCTLRSLVRQQDGKVQEQSRCIQHMQKALTQMNVQLDNVVSDLMGKTGAGILRAIVAGERDPHELAKLRDRRLRADEETVARSLHGNWREEHLFALSQALAHYDFLTEQIEACSEAIDRTLASLPTLSVEEAPKPVKRLCSKRRTAQQQTRLHQALHAVMGVDLCAIPTIGIDTALVLAGEIGPDLSRFPTQANFCSWLGLAPPTHISGGKPLPGRKPKTFNRAGQALRQAASNARRSDSFIGACHRARLARMDSAKAIKATAHQLARLIYSMLTNGQSYVEQGIDAFEARTKDRQLRALERKARKLGLALVEAA

SEQ ID NO: 286456 - protein, 404 aa, unidentified
MFFAGIDWADDHHDVLVLDETGQKLGALRVAHTRDGLIKLNAFLEQKRGTHSKEFMACIIETTHGLLITHLLEAGWPVYPVNPRTVDRRRSASGAKTDLIDAYLLAKTGRADFADQRRLTPDSEVVAELKTLTRDQDALIQMQTRLVNQLTACLKEYYPAALSLFAKLQQRSTLLFLQSYPTPQAALEASRDQLAQTLKEAGHPTAEKVAPKIFETLHQPQLLATVITTRTKSRLMLALVAQLLPLVEQIAAYDKEIAALFLTHEDNEVFSSLPRAGKRLAPRLLAEIGDDRSRYADAASLQALAGTAPVLFESGNYSKAHRRLGCIKPLRNALHQFAWQSTQSEAWAAAYYQRKRAEGKSHTVAVRALANVWVRIIFAVWHKRESYQTETFEAAQRTHARRAA

SEQ ID NO: 286457 - protein, 395 aa, unidentified
MVEGTKGSHHKEGSKKMSKNSTVCAGIDTGKYKLDVAIDESADQLQVDNSPAGYRCLSAWLRQREVERIGIEASGGYEQAVVSFLRADGFVVIVFQPVQVRAYAKFVLQHAKNDNIDAVLIARCTAAATDIHEPPDARLAPLAQRLTMIEQLTQDVAQVKTRREACWDQRIREFWKQEIDRFKRLLQAELKQLVAAIREHRDLSTRLDLIASVDGIGLRTAVAILVRMPEIGRVSREQAAAIAGLAPYDDDSSQRRGLRHIKGGRQRLRQSLYAAALPAVFYWNAQLKALYKRLIAAGKTHKLVLVACARKLLNLRQYGRCPRDPLEVRASNHLMVAQREDLRETPDAPPGSPGRHHRIEPSRSLADTHTTPCCAYSMRRWKPECVAWRSSVSAR

SEQ ID NO: 286458 - protein, 447 aa, unidentified
MYKQSRLWLRRSVNADTPYNLIEPDWFGKEVPMALKIVYKICCGIDVHKTFVVACIATTNSQGVTIYKRKRFSTFTRGLKELMHWLLDNNCEDVCMESSGKYWIPVYNILEKNCKIVLAHPKYVKAIRGKKTDKKDAKWIADLFKHDLVAGSFMPPADIRQLRDLMRYRYKLTCFMSSEKNRLQNSLTVSNIQLASVVSDTFGKSSLRILDKLLEDTSNTTFDVEPLIHGSMKGKIPELELAIDGFITPEQAGKIKVIKKHFEDLEARKAELEELILALASPYQQELDLILTTPSLKSIFTAIGIISEIGTNMESFPSAKHLCSWAGLTPTNNESAGKKKSVRVSKAGCYIKPLLVQCANSVVKSEKHPEIRNRYLRLKRRRGHKKAIIAIARMLLTALYNMLKNKEPYNAELYRKSDVLPVNREITVEQAVLMAQFQGYKIKSAAS

SEQ ID NO: 286459 - protein, 393 aa, unidentified
MIYVGVDVASKKHDIIILNEVGEIFNKHFTIPNSMEGYKKLLSEINLAKEFFNDSQVRIGLESTGHYSRNILHFLILKGYSVTLINPLLTNMDRKASSVRKTKTDSIDAKAICMFLLRNQNDFKPYTLLSYHIDELKILVRQRKSLKKQLNRTMNQLHAFIDQAFPEYYKVFKKINSNSSLKLLAHYASISEFKRVRVNTLAQLVKKASKGHHGLNKAQLIKSFIKDSIGIDSCALSLSIKHSVNMIEEINYQINQINISIKDHIDNSNTTLLSIPGIGYQTGAIILTEIGDIHRFKSDDELLAYAGLDPSVYQSGNYNGSFKISKRGSSILRWAIFQAAKIAVIHDPVFNDYYLKKLSEGKHYLTVIGHVTKKLLRVVRSILKNNSVYSISH

SEQ ID NO: 286460 - protein, 346 aa, unidentified
MTIVGGLDIHRKQLTFDYLDTVTGEVKRGQVAPADRPHLRAWLARFAGREDVAFALEGCTGWRYVAEELAAAGITAHVAEPADTAFARGRKRHAKTDKTDSRHLRELLAEGRLPECWIPPSRILDCRALLETYHDLRAEHTAWVQRVHAVFFHQGAPALADGALRAGRCDLEALRAAAACCLSPAGQLQVTTALGVLTALEARLEELRHELLDAARHLAGARVLAARLYGVGPVTALAMTCWLGGAGRFSSSRKAVRFAGLDVTVYSSDGKRSPGHLSRQGPEILRWVAYEAGKTHGRASAPGHDYYAAVKDRTDGKIAALSQARRLIRQACHILAEPGDDALTAA

SEQ ID NO: 286461 - protein, 373 aa, unidentified
MENIITYVGMDTHTKEHIVALHYPGKEVIENMTVRNIASEILKMVKKILKKAPGTVQFCYEAGVCGFDLKRKIESLGCKCAVIAPTLTPVKPGERIKTDRRDALKLLAMFKAGLLTEVYAPEPDQEAARELTRLHQTARENLMRIHHQLLKFLTRYGYIYHEGDHWTQKHLRWLRSLEFSEPILKEVFDSYFTEMQHCMQRLESLARQVEQLAESEPYKEIVGLLKCFHGIKTLTAISIITEIFNFGRFASPRDLMSYLGLTPSESSSGEKQKKGSITKSGNKRVRRLLTEVAWHYRHPCNISKELKRRRKDQPLWAVEIADRAGQRLRKRYWYLVNRGKMPCKAITAVARELVGFIWSVMREHQARKMDKAA

SEQ ID NO: 286462 - protein, 378 aa, unidentified
MHKDSVYLCILRENGEKIERVYGVLTPQLDSMRDFMAENKVSEVAMESTSVYWIPIWRVLVDSFELKLVNPYFIKQLPGRKSDVKDAQWIAECVMKELIRGSFIPSPLVQQLRLYDRRIFEINAELVRKYSKIDAILQRCNIRLSNYVSNTDCKSYKAVVKQISEGVTSPQELLRHVHKRIINKHGEDTILAALTGVVSEAEIDMLAQYVAESAILEDNKNKCIEKMREICNREFEEQMKNLQTIPGVSERSALTVLAEIGPDVNAFPSAKHLVSWCGFNPRNDESNKKIKSNKITHGNRFIRIASVQCAWAASRTKDCYFSKFYAFHTQVRKKFKLKVVVAVARKILVCIWHILKFNVSYKDFEPQKSVAKDCTQLA

SEQ ID NO: 286463 - protein, 514 aa, unidentified
MSEGTAQPPFSRLCPRLLRKHSAWLIRHIPLTQKFHPQPLAPAKMADWVHAHYARVRSPYAAQDKPFASGFTNPYRNGGDIMLKINYMSTLFVGIDVSSKSNSVYAMDFEENKYLSTSFGNNQPGADELVNRIAACMQKHKNLDTLLIVLESTSVYSVHISNFLASSEVLMPYKPYVFCVNPKATANYRKSYIGMEKTDPTDAYLIADFARVGRTKKLEPWRGGQFIALKRLTRHRMHLSECITREKTYMVSNLYLKFSELQLLEGDDKPFGNLYGATSSAILTEFLSPQEIIDMPEEDLLAFLAQRSRNRICDLSKTSELLRKAARDSYRLDKCMYEPLNISLASSFNCIQAYQKEIRLIEQAIEKCIKGMNPNALIILQSIPGIGPVWASGILSEIGDISAFHSSDALAKYAGLYWPKGDSGDFISEDNQMSKAGNPYLRHYFGEAANSIRKYIPEYADFYARKYAEVSKHQHKRALALTSRKFVRLVFGLLAKNQLYTGEKLDTEHNTESN

SEQ ID NO: 286464 - protein, 440 aa, unidentified
METTARPEMVLAIDFSLDRLDVALRGPAPPWIWGHRAYANNWTGYQQLKQDLLAELQRVNPVQFTAVGESTGPYWWHAFYQFSHDAELAPFDPQLALLNPAHVKGYRKALAEQDKTDPDDARLIEHYYRSVGIEHPYQFADRYLRLRTFSRAYARVLHTLAAEKAYFVSVLYLWGSEYQRCAVRPFSDLLGVTSQFILDEYADIQQLSAIPEAELAALLEQHSHHTLRQPQETAQKLHQVAQHSYPLPAPLGQALHQVLHLTLELLRVLSDNQNAYRQLLEAELALLPEAQRALAFKGLGPVLVAGCLAEIQDTTRFTTGTKFDRRTQTDRPRTYRDGQAAVAKLAGLWWPKQDSGHAQGIQPHLARERNPYLRFWLVQAAYTLQRYQPEYQQFYWQKYREAHDHHHRRALILTARKATRLIFALLHKGRLACLEEGTLT

SEQ ID NO: 286465 - protein, 310 aa, unidentified
MTSPLVYLGLDVAKATLAGHLAGERFSLSNQSSGHAALCQRITAFDQPVQVICEATGGYEQPVVTALRSAGLSVSVLHPTRARHLARGLGYLAKNDPLDAEVLAKIGSLLAPAPTPAPAEGVSELAALVGRRDQLAELIRREKHHRETTSSKLLLRDIDQSLAALQKRLAKCETLIAQHLQTHPALAQKAQRLQEAPGVGFVGAVTLLAELPELGTGSQARMTSLAGLAPRDHDSGAYRGPRRVYGGRPKVRRILYLCALSAVRHHPSLKTFYARLRQAGKPPKLALIAAARKLLTYLHSALKNPQFKLA

SEQ ID NO: 286466 - protein, 352 aa, unidentified
MKKIVVGIDISKEKIDASAIDVRASQLGVVKLDYQVFENRPMGFRRMLVWARRLVKGAGLEDVLFCCETTGGYDRCLCDYIYAKGLDIWREGALQIKRSMGVRKGKDDKADSLMIAEYAMRHMDKAVIYESPSKILRGLRALLLYRGNLVKEKTQMAVRLKELEATAERSESLNFILRDIRKVIRALDKSIAESVKQIQKVYDSDASLKKSYDHITSVSGIGIVNATALIAYTGNFAAIRTANKAASYWGCAPFREQSGTSVHKKAYVRCYSSSLLKAYLTQAAECTIKEHGIYHDYYLRLKAAGKPYGVIVNNVRNKLIHLVYSLVTDDKDYEQDHEYLRKQRKGEQKMSA

SEQ ID NO: 286467 - protein, 392 aa, unidentified
MIFVGIDVAKNKHDCFITNTDGESLFRSFTITNNLDGFHDLYRKIASVTENITKVKVGLEATGHYSYNLLGYLLDKGFPTYVINPLHTNLYRKSLSLRQTKTDKVDARTIASMLMSDVNLKSYSDTSYHNEELKSLTRYRFDKVKERSALKISISRLVCILFPELENLVPTLHMTSIYSLLYEFPGASFIASAHLTRLANLLSKASKGHYNKDTAVLFRQTARNSIGSVMPAKSLELKHTIKLIQELTSEIDEIEAAIKQIMDEEIKSPILTIPGISYRMGAMIIAEIGDFNRFDSADKILAYAGMSPSTYQSGQLDHCHSRMEKRGSRYLRYALYNATKYVCLWDKSFGAYLEKKRSEGKHYNVALSHAAKKLVRTIFAMEKSGAPYKSSV

SEQ ID NO: 286468 - protein, 344 aa, unidentified
MHQTTIAIDLAKSVFEVVISDRPGHVCEQQRLSRNQLPLFLANRPPSTILMEACSSSHYWGRQCRRFGHDVKLLPPSYVRPYVHRSKTDRADVKGMLEAWRNSDIRPVPVKTESQQQLTALHRVRSTWIATRTARINAVRGTPREFGIVIPVGASRVVPAVIGLIEDAHTDLPSVVRDLLHELVTEIRQLEGHIRKAERHIEALAKQTSIVERLRSVPGVGLLTATALVAFIGEVKRFPSGRHFACYLGLTPREHSSGQRRYLGRISKCGDVYLRMLLIHGARSVLLAARSKSQPDRLHCWALRIQELRGHNKAAVAVANKLARMIWAVWGSGKSYDSRQTPAA

SEQ ID NO: 286469 - protein, 459 aa, unidentified
MGDREPRQSEKDVPNHFQHLNPHAAGIDVGSRSHFVAVPEGADEKPVREFSCFTGDLHRLADWLHACGVKTVAMESTGIYWIPVFEILERRGFEVKLVNAHHVKNVPGRKTDVVDCQWLQRLHSYGLLEGAFRPPDQVCVLRSYIRQRMNLVRYAASHIQHMQKALSQMNLLLHNVVSDITGVTGMRIIKAILSGERDPLVLAGYRDPRCKNSKETIARSLEGHYKSEHLFSLKQAVELYEFYQAKIADCDRQIGEQLGVFDDRTGGQQTTPPAKDKVTGNGLGFDVRRDLYRMTGVDLTRIAGIDAYTALKVISEVGTDMSRWKGPKQFASWMGLCPGNKVSGGKKLSGKTKSVANRAATALRIAANSLTRSKSALGAYLRRQKARLGAPKAITATAHKLARLIYSMLKHGTQYVDAGQDYYEQRYRTRVVENLKKRALELGFTLVKTTLPCPEICNE

SEQ ID NO: 286470 - protein, 420 aa, unidentified
MKAWQELTHWTGFDWAKDHHAVVIVNREGHIVADFEFEHSAEGWKSFVAKTAAWPNLAVAIETSQGAAVDQLLQRGYTVYPVHPVAAQGYRRRKVPSGSKTDHLDALGLADALRVDGWDWKALQPLDPMTQQLRLLCRDEVALIEQRTALVNQLQQALAEYFPAALEAFDDWTNTFTWEFVLEFPTPQALVQAGPRRWQKFLHTHKLWRSTTADKRLEIFARADQFKASDPVVRAKSQLAVCLCKLLRTLAQQLDLYRQQIEALFQEHPDHDLFGSLPGAKKVLAPRLLAAVGPDPDRYGSHQVLQSIAGTAPVSYESGKFKKARVRWACDKFLRYTVHLWADSFRRTSAWGQTYYDQKRAEGMTHACALRCLGQRLLKIVFRMISDKKPYDAELHARNQQKHGSWVLQLVNKSTAQASA

SEQ ID NO: 286471 - protein, 338 aa, unidentified
MKLYGGIDLHSNNSVVALLDEQGQVVYRKRLPNDAAVILEAVAPYQEAIVGLVVESTYNWYWLVDALMETGYLVHLANTAAIVQYSGLKYSDDDSDACWLARLLRLGMLPEGYIYPKDERAVRDLLRRRSRLVQQHTANLLAIQNLFARNRGRSLSANEVKRLSAEAVNRLLPDPNQALAVQSTLLAMRGQEAAIDLLEREALAQVRLRPAYRHLLSVSGIGQVLGLTILLETGPITRFAAPGHYASYCRCVGSERLSNGKLKGRGNTKNGNKYLAWAYLEAANFAVRYNAVINRYYQRKRAKTNGVVAIKTIAHKLARACYHILRDGTNFDVARTFV

SEQ ID NO: 286472 - protein, 342 aa, unidentified
MNNIKVVGIDLAKNIIQIHGNDKKGKCVLRKRLSREKLVEFMAQLPSCLIGIEACGGAHHWARTFQVMGHTVKIMAPQFVKPYVKSNKTDRNDAEAIAEAVIRPNMRFVPVKTIEQQDTLLIHRARELVIKQKTAQANQIRGFLAEYGIVIAKGIQNLEKIAMIIDDNKEKLSIKAQGILEQLCKQFKAFDAEMEHYDKQIAQVIKENAMCQSLLKIEGVGPITASAIVATIGDAKAFKNGREVSVWLGLVPKQHSSGNTVRLGSITKRGDRYIRRLLVHGARSAIKVAGNKKDRRNTWITDKKERLGYNKAAVALANKNARIIWAMLATGESYRQQRLLAA

SEQ ID NO: 286473 - protein, 358 aa, unidentified
MARYSLSALKSFVASHHSEPFWVGIDVHKRSYHLALLRSDAKIFTLVAPACPEKLVEQLRHLEIIVTGVVYEAGPTGFSLARTLQTEEFPVIVAAPSKVPRSITAGAKTDRLDCIKLAQFASKGLIRPIAIPTEQEEAHRALSRRRHQLVDSIRRCKQRIKGFLLYHGFEETEVIKNWCSSYAEQIAALPMEIEGRLTVESQLRELSFLQNELSSVTNQLNQINLKPKHRAVIRSLTSVPGVGKVVATTFHTEIFRPERFNRGEEVTSYLGLAPTVRHSGGQTPRGCLVPVGQTRLRSLLIEAAWMWRAQDSYALELYNKLLSKTGIPQKAIAALARRLAIILWRLSIEQRAYRPIES

SEQ ID NO: 286474 - protein, 341 aa, unidentified
MKLYGAIDLHSTNSVVTLIDEQDRVVYQKRLDNDLTVILQQLAPYRSSLEGIAVESTYNWYWLVDGLMEAEYRAHLVNTAAVQQYEGLKYTDDHSDARWLAHLLRLGILPQGYIYPKEQRAVRDLLRKRSQLVRQRTANLLSIQNLVTRNTGSSISGNRIKQLTAESVETILSQRDQALAAQSNLLVLRCLEEQITKLERVVKERVKLRPQFRYLKTVDSIGEILALTIMLETGEIKRFAGVGNFASYCRCVGSEKLSNGKRKGSGNTKNGNKYLAWAFVEAANFAVRFNPEIRRFYQRKKAKTNGIVAIKAVAHKLARACYHIIKDQVPFDIAKAFARTV

SEQ ID NO: 286475 - protein, 358 aa, unidentified
MNTNKQSLRLERVAVETAMTVMTVKLGIDLHAADAVVSRQDGGQLPKPARRMEVAALEQMVRQLREAGVEVHSCYEAGPCGYGLHRRLVALGAHNVVVVPRRWDPQGQRVKTDKRDARQLCDALDRYVRGNTTAFSVVRVPSEEQEQQRAICRQRGMLVKERQRAVVRGHGLMLMAGLQAPPQWWEPKVWPEWAAQLPAALRGRVECWQQQAVALDAQVERWTGQVEALARGPRPKGIGALTAAVLGAEILDWQRFNGRRQVASYTGLCPGEDSSGPRRRQGAVTKHGNPRVRHYLIEAIWRMLEWQPDYPPLRKLRATVGKRQRKRLAVAAARHLAIDLWRLNTHRCTAEQLGLHLG

SEQ ID NO: 286476 - protein, 345 aa, unidentified
MLYIGIDVHKKNLQVCVLDGKGKRISDCRLENRPESVSGYFAKIDTPAGVALEATHNWGMLYDLLSERGLDVHICHSREAKLIGLSSVKTDRVDAYKLATLLRVGLLPEAYVPGVESRELRSLVRGRASLIAQSTAIKNQIHAILRTNWVSCPWTDAFGKSGRKFLENLDIGDSYKLVIVSKLVVLDKIWEQVSLLSAEIVRRAHLDARAMLVTTAPGFAEFRAVMLLSEVVDISRFASAEKLVSYTGLNPREHSSGEKTRRGKISKEGSSWLRWIFVEAAQQAIKEEGKIRELYLRVSEKRGHNRGVVAAAREMVVSIFWMLKRMEPYRASGKKAHIVSDSEVG

SEQ ID NO: 286477 - protein, 349 aa, unidentified
MSEIIRIGMDTSKYIFQLHGVDGSEQVVLRKRLGRNGMLAFFAKLPPTVVVIEACGAAHYLARELGKLGHTVKLIAPQLVKPYVPRNKNDGRDAEGLCEAASRPRMRYVPVKTAEQQAALMLLGIREQLVARRTQLSNMIRGHAAEFGLIEAKGLDKLASFLAAIERDENLPVLARELFAMLAREYAQVQVEVKAIEARLLAWHRADALSRRLAQIPGVGPVTAAALVMKAPDPHAFRSGRLFAAWLGLTPKDHSTAGKTRLGRITRAGDERLRQLLVVGATSVVKQAKARGRGPRWLIELLKRKAPKLAAVALANKIARIAWKLMTTGESYDGARIEARTEAQGAAAA

SEQ ID NO: 286478 - protein, 370 aa, unidentified
MTTAPASVTVIGGVDTHKHTHYAAAIDDQGRLLGHREFPANDGGYQRLLTWMRSQGQVLTIGVESTGSFGATLTRALSKAGERIVEVNRPNRVARHMDGKSDRLDAEQIARAVLGQTSTATPKTKSGMVEVIRTLRVTRASAVKARTQAFNTLWGVMIGAPSPLRDELVMLTKRTLVNRCLRLRPETEDFLVLAGDPDRLLLAGVKTALRDLARRWKVLDEEIKTLNKQIEALVRVAAPALVELHGVGVEVAGQFLVTAGDNTDRIRNEAAFAKLCGVAPQPASSGRTNGRHRLSRGGDRAANSALYIITIVRMRHHQPTRNYVQRRTAEGLSKREIIRCLKRYIVREIYANLPHQTTAALPLAAIQQAA

SEQ ID NO: 286479 - protein, 376 aa, unidentified
MSLQPDEFKRDTSLSIAKNAMEPVRISVTTLMDLGGAHMKVYAGIDLHSSNNYVGIINDQDQRVYQKRLPNQLEHILEALEPFKESMEGVVVESTYNWYWLVDGLQAHGYKLHLANPSAIKQYEGLKHTDDKWDSFWLAHMLRLNILPEGYIYPREERPVRDLLRRRLLFVKHRTAHILSLQSMVSRNLGTQMSCRAIKGLDEEAPETLFDSPHLLLAAKSNIAVIHFLKERIKSIEKAVKSHIKLQDEFKYLLTVPGIGDILTLTIMLEVGDINRFPQVGNYSSYCRCVKSERLSNGKKKDENNRKNGNRYLSWAYVEAANFARRFCPYAQAFYQRKMAKTNGIVAIKALSNKLARASYYIMRDQVPYDPKKLFS

SEQ ID NO: 286480 - protein, 368 aa, unidentified
MGRKSSKLFVGMDVHKESIDITLAEQGGEVRHYGRIGGEQSALIRTVRKLESLGKSLVFVYEAGPCGFWIYRLLRERGHQCWVVAPSNTPRRVRDRIKTDRRDSLKLAGLARAGELTPIYVPDAADEAMRDLVRAREDAVATQRQARHRLAALLLRNDIRYCGKTAWTEAHRRWIARLHLPGAAQRIAFEEYVLTVNEATASVQRLTDSMEQELGHWRWQPVVHALQACRGIQLIHAVRIVAEVGDLSRFSHPRQLMAYLGLIPSEDSSGERRRQGPITKAGNRSARRALVEAAWAYRHHAAMSPIIVRRQTGLAKPVLDIAWKAQLRLCARFRRLSARGINRNKIVVAIARELAGFVWAIGQRVKLN

SEQ ID NO: 286481 - protein, 391 aa, unidentified
MDKAWAGVDAGKEFHWAHVLDASGRELLSRKVENDEADISKLIDEVLFLAEEVVWAVDQPGGGAALLLALLRERNQRVLYIPGLTVDRARDAYRGESKTDARDAHLIADQARMRPGLAKLKPGEKEIVELQLLLARRRDLVTDQSRIVTRLREALLSLFPALERALDLNGKGPLTLLAHYQTPAQLRRAGHKRVAAYLRNRGVKGSANVAHKALSAARSQSATLPAQDVASRIVAELAEEILAFKERIARIDEELGQRFFARPEARILASLPGMGPILGAEFLVCVGDICAFESADRLAAYAGLVPASHDSGKRVGNRRRMRGGNKNLKRVFYQSAFASLRGSQESRAFYNRKRAEGKRHTQALIALARRRVNVLWAMLRDGNTYEARSAA

SEQ ID NO: 286482 - protein, 382 aa, unidentified
MSAREAVEQEPEFVAFVGIDWADQKHVWCLQAAGSTQRETGELEHKPEVVEAWVSELCRRFGQGAIAVAVEQVKGALVFMLRKYECLHLYPVPSTMSSSMREALYPSGAKDDPRDADLLLDLLLQHRDKLRRLTPDNEATRRVQNLVEERRKLVEEKTAQLNRLSGYLKVYFPQMLEWFAKLDTKLACEFMEHWPSLEELQSSSPAEVRKFFRRRRGRHGELTEWRVQGIGQAMPAIRDRAVIEAKRLVVQVIARLLRTLLEGIATLDSKIAEAAEAHPDFFIFQSFPGAGAALAPRLLAALGSQRDRYASAEEVQKYSGIAPVTERSGKKKWVHFRWACPKFLRQSFHEWAGHSIAQSVWARAYYQQQRQRGKDHDAACEP

SEQ ID NO: 286483 - protein, 494 aa, unidentified
MATHSATTAKQAPQRHAYQQRKARAQAKRSAEQEAEARRVEGLPVTQPHAAGIDIGSRSHWVCIGCRTDDHADVIREFPAHTDGLRQILAYLRQHHVTTVALESTGVYWIPLYELLEANGLEVLLVDPSYTKQVRGRPKTDRLDCQWIYRLHSVGLLAAAFRPDEKTCQLRSYLRQRGNLIRYGGQHIQHMEKALEQMNLKLTEILSDITGVTGRAILQAILKGTRDPQKLAKLRNFKCKATEAEIAQALNGSYRDEHLFALRQAYEAWQFYQKQLDKVEEQIQQQLGRMKQDRALPPLKHRPRTSGRKPNQPRFDVRTALYYVVGIDLTEIEGIAELTALTIISEIGPDVSKFATVKHFCSWLGLCPQLKKTGGRVKSSRTRPGTNRAATAFRLAANSLYASKGALGAFLRRQKARLGAPQAVTATAHKLARLVYLALKHGLAYVRQSQEEYETKVREQQIKGLKRKARQLGLEVIDRQPAASAAPESAAAPG

SEQ ID NO: 286484 - protein, 434 aa, unidentified
MIQPNSAGIDIGASEIYVAVPFDHSDEPVRRFNTFTDDLHDAAKWLKECGIDSIAMESTGVYWIPVFQILEAYGFDVILVNAKHVKNVPGRKTDVNDCQWLQYLHAVGLLRGSFRPSQDICAVRSLLRHRDNLVKSASSHVQRMQKSLTQMNLQIHNVISDITGVTGTKIINAILSGERDPAKLADLRDRRIKADKETIAKSLTGDYRREHIFTLKQTVASYRHCLELIQGCDAEIESHLKEFESRIEVDPPPTPPTKTKSKAKSNSPNFDIKTHMHRLLGTDLTAIDGISSLTAHVFFTEVGPDLSKFETVNHFSSWLGLCPNNKITGGHIISSHTRPGSNRLAHALRLSANSLWNSKSYLGDYFRRMRARHGAPKAITATAHKLARIIYHLVKNQKTFDKTIFAEQEQEHKKRLKKRLVSQAKALGLELIPA

SEQ ID NO: 286485 - protein, 335 aa, unidentified
MQIKHFIGIDVSKDTLDLSAVVNGKVLTHYCIGNNSKEIKSTVNKIMKSLGGSFDDIIFCMEHTGLYNRPIVKWLHNNQGKMWLESGAHIRKSLGLVRGKNDKIDSSRIAMFAYTNQHKIKLWTLPRQVIEKIAALLSQRARLVKVRKQLTTANKEQKKFLEKDVMHSLNIYTDRTVSVIDKQIEAIEREINALIKEDDKLNRMYQIITSINGIGFVTASYILVTTNEFININDPKKFACYSGVVPFGHTSGTSIRGKNRVSHIANKTIKALLHLSALSTLNTPGEIQDYYKRKIAEGKNKMSIINAIRNKLILRIFACIKQNREYEKKYCYKFA

SEQ ID NO: 286486 - protein, 338 aa, unidentified
METYAGIDLHSSNNFIGVINDKDKILYGKRHPNRLDDVLRALDPFKDSLKGVVVESTFNWYWLVDGLQEHGYSLHLANPSAIQQYEGLKYTDDPWDSFWLAHMYRLGILPEGYIYPKENRAVRDLLRRRLLFVRHSTSHILSLQSMISRNLGFKMSNNEIKKLKPEDIDGLFACPNLVFMANNSLAAIKFLKKIILAIEKKVKSQVKMRKEFMMLLTIPGIGNILGLTIMLEVGDIARFPKVGDYSSYCRCVESKRISNGKKKGENNKKNGNKHLAWAYVEAAQFCRRYCVKAQSFYQSKEAKTKPVVAIKALSNKLSKASYYIMRDQVGFDEEKLFV

SEQ ID NO: 286487 - protein, 420 aa, unidentified
MKAYNVDNFAVLIGIDWADKKHDICEHPTGTNKYHYTVIKHTPEALHEWAMDIKQRYPKQKIAIVCELKKGPLIYALAKYDHLTLFTVNPCAVAKYRQAFTPSGAKDDPSDAFVQVEILTLHMDKLSVIEPESAAMRTLSQLVEYRRSLVQDSVDLSNKITATLKNYYPQALEWFKEKDTYIFCDFIQKWPSLTAVKKARKQTLLDFFESHNSHYCAVNNARLDSIKNSMPLTLDEGVIVPNQMLVEVLITQFKVLLKGIEKLDKAIKSAYKAQQDKKIFDSLPGAGPQLAPRLLVAFGSNRARYNDAAELQKYAGIAPVIERSGQKMWTHWRYSCPTFLRQTFVEWAGFSIRYSFWAKAYYEQQKAKGKPHNSIIRSLAFKWIRIVFRCWKTNTPYDESTYLAALKRRGSPLLKFAVNS

SEQ ID NO: 286488 - protein, 360 aa, unidentified
MLYLAIDQHRKQLTVNLRNEQGDVILKRQVSTEWPRVRSFLDEVRKTSTPEGGVVAILEVCGFNDWLVKLLAEHGCLETIVIQPEKRSKKKTDRRDANALGELLWVNRQRLLAGKKVQGIRRIQLPTETEAEDRQITAWRKRLGQLRTRTINKIKHILRKHNLEQECPTKGLDTIKGKKWLGQLSLGAIDRLEMDQLLAQWKLWDDQIAKLELEIEKRQFKNATAAVLATIPGCGAYGSLALASRIGSIQRFPRPASLANYWGLTPGCRNSGEATDRLGSITKQGSAMARFILAQVILHVLRRDARMRTWYGRIKRRRGSKIARVAVMRRLATIIWHMVKHNEPYVVGGPPVRKLATQAA

SEQ ID NO: 286489 - protein, 310 aa, unidentified
MNDAKYIGMDVHQATISVAVRDSRGNLVMEAILETKAETILQFIRGLRGSLYVSFEEGTWAAWLHDLLQPHVARVLASDPRKNALLKAGNKSDRIDARKLSELLYLNKLSPVYHGEQGIRTLKELARSYITITRDLTRVMSRLKAIYRGWGIPCAGQQVYAPRYRAGWLAKISEAGVRRRAELYYHQFDALAALRQGTRRELLAEARKHPAMRLLRQIPAIGPIRAALLIALIQTPNRFRTKRQLWAYCGLALRTYTSGEYRFVGGQLKRSKRVLAVRGLNINHNHDLKNIFKGAATRAAATAGPFQDFY

SEQ ID NO: 286490 - protein, 339 aa, unidentified
MSKPIQSIQAMVFCGIDVSAASLAVAIQLQDRRFEERVFDNSASGHKALIRWLHKLKARARVSLEATGVYSLDLALALDGADGIEVAVLNPKLIHRFAQTLRRSKTDSADAQVLAEYIARMPFAPWRAPGRNGLELRAISRHIQSLVVEQARQNNRLHAAESSTSTPRCVVNDIKRSMASLKLRIVRLRGEALELVRRDEAMQKRFELLIGIPGIAAISALALLGELVLLSPEMSVRQWVAHSGLDPAHQESGTSVHKPSRISRAGNRHLRRALYMPALVAVRRDPHLKAFYETLLSRHKAKLQALIAVTRKLLHAIYGIFKSQMPYDGSKLFPQLQIA

SEQ ID NO: 286491 - protein, 333 aa, unidentified
MTCQPSYIGIDVSKRKLDFALRERSTVIQQTVFANSPQGIKQLCAEVVRQPGQVRVLLEPTSRHHQPLLLALADLPGSQVMAADPYRTRKFQETFGKRAKTDRLDARGLAHMAEKLGEDFLPYVPPTDAQRELQFLSRRLTTVVEQRAKLRNRRHSYNKADAACHFVLDSIEHELAFIDQECRELERRMRQLVQADDSEEQLFQLLVKVKGIGVQSALQLLAELRVLAETMGPRQWVACAGLDPRARQSGTANPPQRISRKGNRYLKKVLFMVALSAVQHNAVIKDFYVKLHTRKKSKKLALVAVMRRLLHGLWYVFHHQVPLDPAKCFPSTK

SEQ ID NO: 286492 - protein, 405 aa, unidentified
MSLFAGLDWGSTGHAVCVLDERGALVLRLEVRHDAAGLAELALRLRRLVPQGELAVAIERPSGLVVETLLAAGHPVVPIHPNIVKACRPRYRAAGAKSDPGDAFMLADILRTDGHRFAPLTPVSDAIKALRAMVRGRDDLVATRVGLANQLRSLLEGFWPGAGLIFADVDSPIALAFLARYPTPESACRLGLRRLAAFLAQHRYCGRRSSEDLLARLRAAPRGFAGAAEADAKGEVVRALVRALETIVAALRELSSRIEHAVEDLPDGRIVMSFPRAGRICAAAILAELGDVRERFQTDAQLAAEAGVSPVTHASGKSRGVLFRWACNHRLRAAVTCWADNSRHASPWADDVYRRARARGCDHPHAIRVLARAWLRVLWRAWTDRKPYDPTHHAAAKNILSPVGG

SEQ ID NO: 286493 - protein, 464 aa, unidentified
MVLHWLADSSFVIGALNPTQNLIPAAFKHHQLSPRPGESTRSNIFKPWAASQPVVWLPGESLEVIYQRCAGLDVHKKTVVAHVITPEAQKTRSFSTMTQDLLKLADWLHQHQVRDVAMESTGVYWKPIYNLLEGEFTLLVANAHHIKTVPGRKTDVKDAQWIANLLRHGLLRASYIPERPQRELRELLRYRRSLIQQRAQVVNRIQKVLEGANIKLSSVASDVVRASGRAMLEAMIQGIEEPEALAALAKGQLRNKAPALEQALRALMGPHQRMMLQSQLRHLEFLEEEIGRLNAEVETRMHPFEGAVAHLDEIPGIGVRTAQQVLAEIGVDMGRFPTAEHLASWAKVCPGNNQSAGKRKSSRSGRGNPWLRAALVEAAWAAVRAKKSYLCPQYHRLATRQGAKRAVLAVAHTILVTIYHLLRYGTIYQDLGPNYFDERSQLATVRRAVRRIERLGYKVTLEAA

SEQ ID NO: 286494 - protein, 373 aa, unidentified
MEMMQHRQVRYIGLDVHRASIAVAIADEGAPSSYGNIANDPSAIRKLMTRLGGADVELRVAYEAGPTGYALHRQLASMRIQCMVVAPSLIPKRPGDKVKTDRRDALKLARLLRSGDLTPVWVPDEAHEALRNLVRARADAKADQLRAKHRLSKFLLRQGCWPPVGVRNWSVRYFQWLRQLHFEHVADQIVFSDYLAVVTAAGERIKHLEAALHQCAQDSSQVAVIRALQAFRGIGFLSAVAIVAEAGDLQRFRTAPQFMAYTGCVPSESSSGRTQHRGPITKTGNGLLRHILGEAAQHARHAPRVAGTLKQRQADVPQPIVDLAWRAQLRLHARYRHLGCRIGTHKALTAVARELAGFIWAAGQLLEEAPAAA

SEQ ID NO: 286495 - protein, 313 aa, unidentified
MTSTKYIGMDVHMESISMAVMNFAGKVVMECIIETKASTILQFIHGLNGDLQITLEEGTWAAWLHDLLKPHVTKLVVCNPRQNALLKDGSKSDRIDARKLAELLYLNKLKPVYHGEHGLRMLKELSRSYLTITKDLGRVMNRLKALYRGWAIPCAGTQVYAPRYRSEWLDKIREAGVRRRAEFYYQQLDALRLVRQQARKELLAEARKHGATKLLRQIPGIGPLRAAQLVALMQTPHRFRTKRQLWNYSGLGLETNDSAQYCYVEGQLQRSKKPSQLRGLNDNHNHDLKNIFKGAAMRASTAAGPMRDSVRDF

SEQ ID NO: 286496 - protein, 425 aa, unidentified
MPYKIAGIDVHKKMLAVVVADIEKDEYQFEQVRFGSAPEELRRLCTWLLEQGVEEVVMESTAQYWKPVWGYLERFWKPGCQPGEEGNGRAGVLHLAQAHSNRGRRGRKRDFPDAERLVKRLVAQELVLSFVPDPTQRLWRTVMRRKQQLIRNRVQLQNRLEALLEEAHLKLSSLVSDLLGASARRMLKAMAEGEKDPAVLAAMADKRLRATAAQLCDALEATAELNPVYRRLLKMVLEELALLEQQVGQLEQEMASLLRPHEDEVKRLAEVPGFGVDSAQQIIAEVGAKAASFPRKEQLSSWVGWCPGEEESAEQNKNGRSPKGNRNMKRILNQCANAAVKAKGSIFELLYHRWIVRLGHKRTIGAIAHKLSNIIWLILHRGVRYEERGPAVSQKARQARTTKMIKELRKLGYRIELSNMQPAVS

SEQ ID NO: 286497 - protein, 347 aa, unidentified
MNYIGTDVHISTLDFKVVNDAGKVKMASNVQTSASNFIEFVKGVPKPRQVYVEEGPLASWLLELCVQNKEHLVITDPKRNRWIGSSGEKEDPIDAGKLAQLARGGYIKEIHHPIGQRRRFRELMTAYHDTVKSTVRIKNKIKAKFLQNGIQCSGATVYLPEHRNEWRKKLPQEAVLLVIIDSLWQQLDQTLENQETILSEAKSQAKRYPEIKLIDEIPGVGFIIAATIVAILETPHRFADKRKVWAYAGLGIDKKSSANKTYSERLGKEYNRLLKCVVEEAAQAAVNANNDNAFRRSYLDKTIWQGIAPHRVVLTIARDIIATAWAMWKKKEHYNPEIDKKKIDVEA

SEQ ID NO: 286498 - protein, 390 aa, unidentified
MIYVGIDVAKDKHDCFITDSDGIVLYEPFTIENNRNGFERLLSNLKSCSEDFGKIKVGLEATGHFSDNLLEFLITQSLSTVVINPLHTNLHRKSLSLRKTKTDRVDAHAIVTMLKSENLKPYSQSSYHVRELKSLTRYRLSLVQELAKEKTSFARLCVIVFPELEKLVSTLHQKSVYALFSEFPTAKAVTNCHMTRLKNLLSSSSKGHYGDDKAIQIREAAKTSIGSHSDIKALEIRQTILRIQMIKSQISEIESMINPIVDSLNSPLMTVPGISYRMAAIIIAETENFTNFDNPDQVLAYAGMEPSVYQSGQLTSTHAKMVKRGSKYLRYAIFNAAKFVCNWDPTFGKYLAKKRSQGKPYNVAVSHASKKLIRVMFHLVKTDQAFVSQS

SEQ ID NO: 286499 - protein, 407 aa, unidentified
MTTTTKKKVRFVRPNSSTSSTPRLDSGETAHVGVDVHKASHHVAVVTDLRGLVASRTPPADPESLSERPKPIGSQVARVVYEAGPTGFTLARRLRSSGLRAGVIAPPKTPTMPGPEAESDRLDRRKLAVFARKGPLQPVRVPEEREGADRRVLRLREQLARKLRAAQQQVKAFLLQHGIAEPAGLTRWTAASVDAPRRLELTPEPRLRPDVMLDERQHDRERVARAPRRLEESAGAGRHREAVATPRTAPGVGPITAMTSRVELHDPARFRDGGQVARVIGLAPQVSQGGPTRREGRRLKSGNARLRTALVEAARRWVAGDEAAKARYRRLVATTGNGKKAIAGMARRLAILLWRLSLSGEPYRAAAWRPGPAPATPERPGSRPRPLPERPSSGAGRPRASEDLRVR

SEQ ID NO: 286500 - protein, 403 aa, unidentified
MIGNQATFHQEGGPPMNYVGIDYHKKYSHVTAIDEEGRVIRSRRLENKPELFQEFFKGLGGPSETVLEASRTWGVMYDLLEAIDKVESVQLAHSQKVRAIAEAKIKTDKIDSHILAQLLRADLIPAAYIPGKQTRSYKEMIRQRVFLVRMRTRLKNRVHVLLDRLHIPLPSVTDIFGKRGTDYLRKLNLPGVDGEILKEDLDLLEVFNRLIKEAEREIATLMGEDPRVKLLRTVPGVGPILAAVVALEIDRIERFSLPSKLASYAGLVPSTYASGGRIFHGKLIPMTNKWLRWALVEAAWGSIRKSPYCRTYFESHKRHKGPHTAAIALARRLIEIIWHVLMEDRNYEERLPRFYRPEKAAAAQSLSESKPAAGDGLRSSQRGIAQRQREQNTNLSPAALTAT

SEQ ID NO: 286501 - protein, 415 aa, unidentified
MDVLYPRCAGLDVHKDTVVACVRVVSGGAAKTEVRTFDTTTPGLLALSAWLAEAGCTHVAMEATGVYWKPVWHILADGDVTLILANAAHVKNVPGRKTDVADAVWLADLLAHGLIRASFVPEAPVQEMRALLRTRKQLVREQASHVQRIQKTLEDANLKLGSVLSQIMGVSGRAILQALIEGESDPDTLLGLVQRGVKAPPEKLRAAFQGRITERHRFLLRLHLRQVDALDAAIAEIDAEVDRDLDPFRQAVRQLRTIPGVSDLSGQVIVSEIGTDMSRFPTAGHLISWAGLCPRNDESAGKRRSTRLRKGAPWLKTTLVQCAWAASRKKASYFQAQYQRLRNRRGPKKAICAVAASILTAVYHMLRDGTFYHDLGADHFNRASPQDQANRLARKIEKLGFSCMLTPSAAEAVSV

SEQ ID NO: 286502 - protein, 385 aa, unidentified
MTVVMIGVDPHKGSHTAVAIGSDEEPLGKVRVRASVTQAQRLVTWAADWPERTWAVEGAGGLGHLLAQQLVAAGERVLDVQPKPGSRVRLLATGARNKNDPNDALSVAIAALRTRTQRPVTADDHDAVLRVWSRRHRDLGRAKNQVACRLHAVLCELVPGGVPEEITAAQATRILERSTPSGAAGQARGELAAELLDDMRGLDTRIRESKKKLAVAVRASGTTLTDLFGVGPVVAAAVIGDTGDVNRFPSRDHFASYNGTAPIEVSSGNRKINRLSLRGNRRINHAIHMAAITQIRHAHSDGRAYYDRKLAEGKTHKEALRCLKRRISDALYARLRADARQAAETPVAGPGGQPGNDSDSSAAGSHPVSRLFGQVVVSLCDAVPA

SEQ ID NO: 286503 - protein, 421 aa, unidentified
MQTEPEFTAFIGVDWADQKHVWCLQAGGSTQRETGELEHTPEAVESWVAHSYQRLGQRPIAVAVEQSRGALVFMLSKYELLHLFPVPSQMASSMRQALYPSGAKDDPRDADLLLDILLKHRNNLRRLSPDSEASRRVQNLVEERCKLVDEKTAQINRLTDHLKVYFPQVLDWFGRLDSDVVCALLERWPSLEELQKAQPANLRAFLRKHRCRDQERIEGRMEAIRQGIPAIHDRAVIEAKSAAVRVIVRVVRVLGEGIEELDGQIEEAAAAHPDFFIFNSLPGAGPVMAPRLLAAFGSQRERYRSADELQSFSGIAPLTETSGKRKWVHFRWACPKFLRQSFHEWAGHSIVQSGWARAYYQQQRSKGNSHHEAVRSLAFKWIRIVFRCWQDRVAYDENTYLAALVKHGSPLATIVATGKTM

SEQ ID NO: 286504 - protein, 431 aa, unidentified
MLKINPLSTLYVGIDVSSKSNYVCALDFYKNKYIKSSFANNQPGAEELARKILECLKEHPDLNTIVAALESTSVYSIHIANFLSSCEELMHFRPYVFVLNPKCTANYKKSYIGLGKSDPIDAFVIADYARAGNIETEPWRGSQFLALKRLTRHRLHLVECMTREKTYLVSNLYLKFSELQMLEGDDQPFCDIYGATSSSVLTEYLSPEEIVDSSEGDLISFLAEKSRNRIKDISKAAELLRKAARDSYRLDKALYEPLNVSIASSFNCIETFKKEIRLIDTAIEREIKGLNPNAFIILRSIDGIGPVFAGGIVAEIGDISAFHSSDALAKYAGLMWKSNQSGDFNGEDTPMSKAGNRYLRYYLGEAANSMRKHNVEYGAYYRRKYNEVPKHQHKRALALTSRKFVRLVYGLLARNQLYSGVSLDTSIKEIK

SEQ ID NO: 286505 - protein, 344 aa, unidentified
MKYYAGLDVSVKETSVCIVDEKGKICRERKVISHPDDLVSFLSDPQWHFERVGLEAGPLSQWLYEGLAKAGFPAICIETRHTKAFLKAQPNKTDRNDARGIAQMMRVHLFKPVHVKTLTSQKRRALLTARALLQGKAIAIENDIRGLLRNFGLKVGMVGAVKFEDRIRELIEGVPDLAEIVKPLLAARRKLREEFERLDHKVREEARIDPVCQRLMTVPGVGPIVSLTYAATIDIPARFRSSRAVGAVLGLTPILNQSGESNRIGHVSRCGDGMLRTLLYEAAQTLLTRVARWSWLKAWAMNVAKRRGARKAVVALARRLAVILHRIWSDETEFRWTREATTAA

SEQ ID NO: 286506 - protein, 357 aa, unidentified
MKILALDLGKYKTVACDYELASGEHEFETTTTTPQSLHDLLVEREPDRVVIEICSIAGWVCDLTRALEIEIEVANTNDERWRWKRIKKKTDRTDALKLASLSALQQIEPVHVPAREVRQWRALINYRQFLLRRRNRMKNHIRDLLAREAILLPRGRSAWTQEAMIALEQLARPLAAVECHELWRGELSIELGELRRAEEPLKQVEKKLDELAKANQNVQLLQTIPGVGPRLAEALVALIDDPGRFAHGKEVGAYLGMVPKQLESGETLRLGHITHHGNRLVRALLVEVSWLGLRYNPWVREVYERTRAGKSARRKIAIVAVGRRLLIRSWAMLRDQQPWHGPAKQTAAQKTKLKRAA

SEQ ID NO: 286507 - protein, 357 aa, unidentified
MSQQSNNCAIAVIGIDIGKNSFHVVGHDQRGAIVLRQKWSRGQVEARLANLSPCLIGMEACVGAHYLSRKLQLLGHNARLMPAKYVRPYNKGQKNDFRDAEAIAEAVQRPTMKFVATKTADQLDLQALHRVRQRLVSQRTGIINQIRAFLLERGIAVRQGLRFLRVELPGILATRTDVLSPRMSRVIEELAGDWRHLDARIEGLSGEIETLAHQDQHCERLMTVPGIGPIISSAMVAAIGTGEVFPKGRDFGAWLGLVPKQVSTGDRTILGSISKRGNRYLRALFVQAAWVVLVKLGPKQWERYGLKSWIEAAKKRLHYNVLAIALANKLARIAWAVLNKGRAFMCVKTDAMASRPA

SEQ ID NO: 286508 - protein, 340 aa, unidentified
MDTIGLDLHKRESQLCVLTEAGEIVERRIVTSRERFTAVLGSQAPARILVEASTESEWVARHLESLGHEVIVADPNFAPMYATRRRGVKTDRRDARTLAEACRLGAYRPVHRASAPQRHVRAQLAVRDALIRTRTRYVSVVKALVRRDGLRLPPGNPVHTDAKLAALPLSAPLAGELAPLRALFEPLNNEITAADERLAAVAAADPVVERLRTAPGIGPVTAVAFVATLDDVTRFASAHHVAAYLGLTPREYSSGEQQHRGRISKTGNARMRYLLVEAAWRVLRTADPAAAALRVWADGIAQRRGRSVAAVALARRLAGVLYAMWRDGKDYLAPPPAAAL

SEQ ID NO: 286509 - protein, 317 aa, unidentified
MNKKLPTVYAGVDVAKVTLQLHFQGRQHCLENTPKGCAKLLRLVQASGQVQLVCEATGGYEKDLLTACHAAGQAVSRLNPAQVRHFARAQGQRAKNDPLDAAVLTAYGTALQPEPTLPTDAALKYLRDLVQWRDYLLEQLTRACQTIEHSVPAFIAKKQKQLVAHLNQQLLAVTKELAAALKRTPSLQAQVQALIQLDGVSTLTAINVLSRMPELGTLDRQAAAALAGLAPWVRQSGPWEGQRHIGGGRPLVRRSLYMSAVVLSRMKQTDLGKFYDRLRAAGKPAKVALTAVMRKLLLQMNRVLKELTIPKTTQQTA

SEQ ID NO: 286510 - protein, 461 aa, unidentified
MAKQSGKRKKGGAKADATEGLPPLNLHAAGIDVGSAEHYVAVPLDRDVEPVRRFGSFTADLHRMAHWLKDCRITTVVMQSTGVYWMALHDVLESHGFEVNVANARHTKTLPGRKTDVQECQWLQKLHTFGLLNNSFRPPEEIRVLRGYLRQRENLVAAAATCIQHMQKALTEMNIQLSNVISDISGTSGLAILYDIVRGERDPYKLAMHKHSRIRASRQEIARSLQGTWRQELLFVLEQSLDLYQTYQQKIQTCDERIDGQLRSMEPKIDPVREPIPEPRRGKDWRGHQSGFDLRGQLYRITGVDLTRIDGIEVQNAQTIISEVGVDMSRWKTEKHFASWLGLCPDNRISGGKVLKRGTRHVVNRASTALRLAASALLRSQSALGAKFRRLRSKLGAPKAITAMAHTLARLVYRMLKFGHDYVDRGIDFYEAKYQHQQLQRIRKQAAALHMQLIPLTGVVS

SEQ ID NO: 286511 - protein, 385 aa, unidentified
MTSLDHTDTPASVDYATVYVAFELSKAKWMLGVILPGSKKLSRYTITGGDMAALAVRLAEWRKKAALGGKPVRILSCYEAGFDGHWLHRWLTDQGVTNHEIDPSSIEVNRRARRAKTDRIDLERMMRAFLELLRGEPEACRVVHVPSVEDEDRKRRSRARERLLKERTAHTNRIKGLLHGQGIRDAFPLKPGFVKSLESVRTGDGHVLPPGLKEEIVYEHERLSLVNKHLALLEAKSKAERRAAVPGSAEAKIVQLAMLKGIGPVGGQRLVHEVFYRDFDNRRQVGSYIGLTGTPYNSGNSVREQGIGKAGNRRAREVAIEIAWLWLSHQPDSELSNWFRKRVGDIKGRIRRIAIVAMARKLMVALWRYLKTGVVPTGTVLRLTV

SEQ ID NO: 286512 - protein, 353 aa, unidentified
MEKVTRVGIDLGKHVYQVCGMDALGAVVFQRQVKAPRLMELMSRLEPCLVGMEASCGAHHWVEKLSDLGHDVRMMSPQFVRPYVKSNKSDYHDAEAICEAVSRPTMRFVPYKTKERRALQQIHRSRETMIGVRTQLANQLRGFLREYGIVLPQGLRVIKREVPAIASDPERELPGDFRALLCMQHQALMQVDEQVADLTAVLDRESKENPLCERLMSIPGIGPMVSTALVASVGSGWAFSSGRQMSAFLGLVPRQASTGGHTRLLGISKRGDRYLRALLIHGARAVLRTAHKGERTRLKEWALDVKRRRGANVATVAVANKLARIAWAVLRHDERYSDERHVGGRARVSRAAA

SEQ ID NO: 286513 - protein, 369 aa, unidentified
MHSINNTELSSLEETRRQFNGGRCTIKLGIDVHQDFYVVVEQVGGTNPKPPQRFHKQAFLHWAAKLKQSGAEVHAVYEACGFGFSLQRQLAALGIDCYVVCPQKLDEHNKRVKTDGLDAKALCLKLDRFVQGNRDALAIVCVPSEEEERSRAIHRQREQLVGARKRLEAQGRSLMVNHGLEPVQNWWKPRTFVSLPVPQWMRELLANNQPILLALQEKIAALTLQLQSVAAPDQPRGLGKMTSVVIDREIGDWHRFNNRRQIASYTGLCPGEYSSGNTRLQSCVTKHGNPRLRAALVELAWRLVRFQPHYKPIVKWRQILAKGGANRTGPTATGAARKKAIVAVARQLAVDLWRIKTGRLTAEQLGLTI

SEQ ID NO: 286514 - protein, 343 aa, unidentified
MKVTRVGFDIAKDVFEVHGVNEHGKVELRKQLRRVRVLEFFAKLEACLIGMETGSGAHYWARELQRLGHTVRLMAPRFVKPYRKSDKCDRNDAEAICEAVGRPNMRFVAVKSEEQQAILSLHRIHTGIKSERNALSNRLRGLLAEFGIVLPKGLERLRRELPLIISSARLPALVAPLMSDGLKRLDELDQLMKQHERDIRSLALQSEPARRLMQARGIGPITATAAIATIGDAKLFKNGRAVSAWLGMVPGRSGTGGKVWFGGITHRGDSYLRTLLVQGARSVMNTTRGKTDSLSLWVENLRARRGDNVAAVALAAKNARMIWAMLARGEAYRPTMASQCAEM

SEQ ID NO: 286515 - protein, 438 aa, unidentified
MRRVQEVSDEPLYRDRVCGIDIGKAGMAATIRVPSDKDPARRMAETRSFGTTKREVLALADWLRCWQVPAVVMEATGDCWKGPFYRLEAEGFDCVLAGAKQVKHLPGRPKRDPSDSRWLAVCFERGAVASCFVPTPEFRVIRLHTRYRRDLTGERTREKQRAEKLLESAAVKLSSVVTDLHGVTGRDIMDRLIAGERDPKALAQLARGRARRKIAALEAALDGAQFFNPEIAALLQSMLTRIDHINAEIDKLTAVIERLLAPHEEQLQQAGSMPGWGRRFAEDVIAETGVDMTRFPTGAHLASWAGRTPLDSQSGKRTGSAARKKGNRYIAAITGETAVAAGKTQTREGARYRRISRRRGKTKANVALGNTQMRVLHALLSHPGSRHHDLGPGYYERQHDHRRQVSQLVGKLGALGYEVTLCRLPEPEPGGPAATQAA

SEQ ID NO: 286516 - protein, 320 aa, unidentified
MMTQNDLVVVGIDVAKDKVDACIRRFKLRQTFPNNPQGRRKLIVWLRKYQVGKAVMEASGGYEREWRNVLHNAGIEVRIVDPRRVRNFALSAGRLAKNDPIDAEMIGWFAETFSQAPGQIPDASREELAGLAKARKALMDVKIRLQAQNEHAAPEPARKAHARILKSLAAEIDKLEIAISAKVKATPEFAERAEIIQSVPGLAQTTSAILIAGMPELGQVSDEVAAALVGLAPYDDDSGKRRGERHIKGGRRWVRNALYMPCLGAATQNNPVLRVFYQRLIANGKEPKVAIVACMRKLIIILNTMLARRQKWNPGAHAIA

SEQ ID NO: 286517 - protein, 391 aa, unidentified
MNSLTTAVSKIKEAEELYSLESRIFLESTGIYHYPLFCYLRDKGFNCSVINPIITKNSTNINIRKVHNDRFDSKKAALVGLKPDLKVSLMPSDLALNCRNLCREYYDLMDNRSAYVNKLQGELRMVFPQYLGIFSKVTINTSLTLLETYTSPSAFLKADKQEIIDIIKSTARFGLTYAQNKYNAIIQAATDANQFGYIIDSNIKRIRLYISFIRKYDEEINNILESLHELVDANEDADFVKQIHLIETFKGAGFLSAVSIMGEIGDFSAFSKPKQLFAYFGLDPAVKQSGKFEGTKVQMSKRGSAIARRVIHTLTLQSISISRNGEAKNPVLREYYLKKCDSKPKLVAMGAVSHKVCNMIFAILRDNKPFKIIAPQEHIKQYNAAKCDIAA

SEQ ID NO: 286518 - protein, 338 aa, unidentified
MTTFCGIDLHSNNSFVVVLDEADRVVYGKRLPNDLATILEALAPYREELAGVVVESTYNWYWLVDGLQEAGYRVHLANTVAIRQYDGLKHSGDAADARHLAHLLRLDILPTGYIVPKAQRAVRDLARKRLQLVRARTAQVLAVENLFARNTGSRPSANSVKRFTCEDIDRLGFDADVALALKANVAILGALNTEIERLEARLLERVAPQPEFMLLKSAPGIGDILAMTIWLETGTVARFAAAGNFSSYCRCVDSARVSNGKKKGEGNTKNGNKYLAWAFVEAANFAVRFCPQAKRFYERKKARTNAIVALKAIAHKLARACYHMLREGKPFELKRCFG

SEQ ID NO: 286519 - protein, 357 aa, unidentified
MTTQQKQGCMFVGIDVHKDTHTAVGISPYGEKMFEITVGNYQNDFEMLNLKVKEHSSVLSPYIGLEDVRGYGERLAGYLYERYPVYHVPSILVDRTRQNATHPEKSDSLDAFGVAKVMMNSIDSLLAYTISEESKKAKQLKEISIDREDLVLERTRLKNQVHALLYRIYNTEYEQKFKDPFSLKALRFWRNAKLKCDPFLLKTMKRKVRRLLDIHVEVTDLEKDMDKLLTEGKYTIQTASGCGLVLASTIIGEIGDINRFTSPGSLSKYAGCSPRERSSGKKIRHVKSRSGNRRLNCAFHRMALAQISRMGNDRARAYFKRKISEGKSKSQALVCLRRQMVNIIWMMLKHKTIYRNA

SEQ ID NO: 286520 - protein, 386 aa, unidentified
MSMIKPTSDEQVIVQNELTAIFLSLELSRSSWVVTSLSPGAGERMSRVQLAAGDMKALKERFSLLQAKCRARMKQDYRLVVIQEAGLDAFSLHRALEIEGVESHVVDPASIAMSPRRRRAKTDNIDGEALLRTLLAYKRGEPRVCAMVAPPSPDEEDRRQICRERRVLVTERVAHANRIKGLLFAQGITDYEPVRRDRRARLDTLNTADGRPLPPYLRQRISRELDRLEMIIEQIKAVETQRDALVTRQADPRAIPAILQQLRGVGPEFAAVLWSEGLFRKFDNRRQLASYAGLAPTPWQSGTVAREQGISKAGNAKIRTTMIQLSGLWLRHQPNSTLTRWFHERTKAANGRSKRVVIVALARKLLVSLWKFATTGLVPEGAVLHG

SEQ ID NO: 286521 - protein, 354 aa, unidentified
MLIIGCDYHPGFQQIAYVDTDTGELQERRLVHRQEAEEFYRALKQQQIGVRVGMEASGQARWFERLLAELQFELWIGDAAKIRTKRVRKQKTDRQDAQLILGLMLENRFPRIWVASWENRDLRQLLWHRHRMVQMRTRLMNQLQAVALNEGIRRKKGLWREAGRKQLQSVALAPWASQRRHDLLELLDGLSPKIAELSERVEEEARKCPVAQRLMTHPGVGPLTALAFVLILGQAERFGCGNQVASYLGLVPEEDSSGEHRRLGHISKQGNSLLRFLLVEAAQVTVRSDPEWRRKYFHLALRRGRKIAKVAMARRLAVRLYWMWRKEWDYARWKKFSPHAGQPGTGVGVQSNTE

SEQ ID NO: 286522 - protein, 362 aa, unidentified
MKNKSIVTHNAEIVIGADVHTKKHVVRVKIGDEYKKASNIAPNQESWKSVLRPYAQCDVTVVYESGPNGFCLHDMLLALAPMCRSLKVVMAPASQIPVAPGSKRVKTDRRDTKRIIMAWEMGAFMPVVVPEPEQREERALTRLWDQLKEKTRSVKNQIHGFLKNNGIEYPDKYAGAPWSGGWIATIKAATKATAKTKHLAFALKIYLDELATYIKHEKELRKRIDELGKTGRCALVAQRLKELTGIGMLSAVRIACEVADFAAFKNSDAFASYTGLVPGEHSSGDTVRHGHITKTGNRRLRPIFVECAWVWLRFDPEARRVFNRITAGKKERACLAIVALARRLAVMAYHAVLHPADAQQAA

SEQ ID NO: 286523 - protein, 355 aa, unidentified
MQKYKVSFKGQNIYVGIDVHLKTWHVTTLTESGYKYSFAQHADAKELFDRLNKKFPEAHFKSAYEAGFCGFSAHYALAEQGIENIVVNAADIPTTGKEKTMKTDAVDSEKIAWALKRDELKGIYVKDKRYMDDTNLIRLRQRFIMDLSRQKNRTKHLLYTQGVTYPERFRNSKTHWSRNFMKWLREEVELLSEQKLSLLLLCDQVENTRKAILKVTREIRRLSTTDRYKENYDLLFTVPGLGLITSMSMLTELDNDIMRFPNERSFVSMLGLIPTCHDSGEKKVSGEKTNRGNKHLGPLIVEASWVAIYRDYQLGAYYSSCCQIMKPHKAIIKVARKLACRTYAVLKTKTKYELS

SEQ ID NO: 286524 - protein, 483 aa, unidentified
MPEVQEIPDEEYEQALERVAAIDVAKMSGMVCTRLPRQGGKPGARVSRVWEVPATTRAVVELAVQLVELGIQKITVESTSEYWRIWFYLLEAAGLDVQLVNARDAKNVPGRPKTDKLDSVWEAKLTERGMLRPSFVPPAAIRQLRDYTRLRVDLTRERTRHYQRLEKLLEDALIKVTGVASKIDTMSVRDMLEALIAGERDPKVLAGLARGRMKVKYAALVEALTGRFDDHHGELARILLDQIDALTRQIDQLTTRIDELIAELPEAAAPQPGDPTDQGTAGLVDPLTGEILAPEPGDPTSERATPVVGNPHQHRGDRAALSAIERLDEIPGIDVRGAQIILAEVGLDMTRFATADHLASWAKVTPRTIQSGAKSRGGKTGKGNPYLKGLLGEAAAAAAKTQTFLGERYRRLVKRRGKLKALVAVARSILVIVWHLLADPTTRFQDLGPDYHTSRLDHGKKTRNHVRQLEALGYTVTLNPVAA

SEQ ID NO: 286525 - protein, 320 aa, unidentified
MKQAIFVGVDVSKKQLDVAIRPLGQVFGVSNDRRGIAQLVKRLKKLQPVCIAIDATGGLEKELAYALAAENLPVAVVNPRQVSNFAKSTGQRAKTDAIDAAVLAHFAEVMKPEVRPLPDAASRELSALVTRHRQLVEMMTAESNRRDLASKAVRKLINSLLRSLKDQLAVVDREIRKAISASETWRRKAELLRSVPGVGKVTTATLLAGLPELGELDRRQIAALVGVAPFNRESGTWKGKRMIAGGRGWIRSVLYMSTVVAVRRNPILKEFYERLRARGKPAKQALTACMRKLLVILNAMLRRQSHWSVPTPVVSLRVTG

SEQ ID NO: 286526 - protein, 339 aa, unidentified
MKVTTFGLDLAKRVFQVHWVEVETGEIGRRQLKRDQLMQFFANREPSVIAMEACGSAHYWARRLTGLGHEVRLIAGQFLRPFVKNNKTDAADAQAIWEAVQRPGMRLVALKSEGQQSVLMLHRRREQLVKMRTMQINQLRGLLYEFGAELPQGRQRGLERIASELAKLDGVLLAMVVEAIRTELQRITGLDQDIARIEKRLALWKKDDAASKKLMAVPGGGLLTATAAVAMIGEAKTFKSGRQFAAFVGLVPRQSGTGGRVKLLGIGKRGDVYLRTLLIHGARAVITRGKQREPWLEKLLARRPLNAAVVALANKMARTIWALLAHDRTYRKGYVARAA

SEQ ID NO: 286527 - protein, 347 aa, unidentified
MVVVGIDPHKHSHTAVAVDDNGRELGQITVGNTSAELIRLMTWAHRFPGPRRWAVEDCRHVAGALLRALIRAGQAVVMVPPKLMAQARASARTRGKSDPIDALAVARAALREPALPEAHLDTQALEIRLLLDHREDLVAERTRMINRLQWHLHDLEIELAPGQALNRIVALDRLRGQLGQLAHGVRVEIASELVEQIIALTRRIGQLKRRIEAQIKPLAPQLLALPGCAGLTAAKILAETAGIERFRSSAAFAMHAGTAPIPVWTGNRARFRLNRGGNRQLNAALHRIAVTQLRIHSPAQELVQRRIAAGKSKTEALRILRRHLADVVYHRLHTTSSTTTTCQQDAA

SEQ ID NO: 286528 - protein, 395 aa, unidentified
MGIDLHKETHTAVMLDCWNQKLGEITFENKPSEFSKLTRKVSRFVTEEKEPVYGLENAYGYGRALAVWLIEKGVAVKDVNTALSYAQRKSVPMYQKSDSYDAEAVALVLINMLDKLPDAIPDDKYWTLSQLVNRRDNICTHLHRLKNQLHEQLCIAYPSYKQFFSDISRATALYFFMEYPSPEHLQGKTAEELAEELRPVSHNNCSVKRAEKILSLVRADGDTKRDHQESRDTITRSLVSDLEHYRVQLEEVNQAIEMLMPEFDCTLMTMPGIELITAANMLSEIGNISRFPNSAKLAKFAGIAPVNFSSAGKGKDVCPKQGNRRLQAIFYFLAIQMIQVSINGTPRNPVFREYFLRKLEDGKNKQQALICIARRLVNIVYGMLKNHMEYREPGQ

SEQ ID NO: 286529 - protein, 502 aa, unidentified
MSERPFQLLWLRPRYEYEARSLDEHSSKFRPEPQPEHGYAFSGDDGQRPTLYGLRPVFFSTQKHNMNTIMNNPAEQFSPQTQPVAWIGLDWGDKEHAFLVRDSSGHEERDKLPHSAENLHGWLRQIGERYGGRPVALAIEASRGAVIHALLQYPWLIIYPINPVTRARYRTAFRPSGAKDDLPDAEVLFDLVRVHADKLRVLEPQDSATVQLTGLVEARRGIVDRRTAVLNELTALLKSYYPQALQLFSDLNSDLAVDFLRRWPDLISLKAAKPGTIKRFYYQHQVRSSQLLQKRLAFIEKSVALTTDEVRVSVARLQLNHLLDQVKVFQTHVAIFDDAIKETFATHSNAALFRELPGAGPQLAPRLCAAFGTMTSLYPDPASLQKYAGLAPVREKSGNQTWIHWRWRAPTFLRQTFVEWAGQTVRYSEWAKVYYDRMLRKGKKHTVILRALAFKWIRVLWKCWQDRKPYNEAQYLKQLIHRKSPNALRLSLKTTRSQNQFL

SEQ ID NO: 286530 - protein, 321 aa, unidentified
MTYVGIDVSKATFVVAYSSAKSSETKTFKNTTKGIREFIRTISPEENHCVLEATGNYSMLLVYLLSKAGFTVSMENPLKIKNFARVMLSVVKTDEIDARLIALYGERMQPAPFKLRSDSLLLLKQKRTVLRQLKKQLTANRNLEGSLKVLPFIDSKCKKVLEKTIKFLEKQIQEMEEELTSLAEIEYKKQMDLLTSIKGIGATLAAALIIATGGFTYFDNAKQLTRYLGLSPTYQQSGTSVNVKGHINRNGDAYLRSQLYIGAMASLRCNTECKACFERLRSNGKPGKVAIVAVANKLIRQAFAVVTQEKIYIDGYKSVKP

SEQ ID NO: 286531 - protein, 377 aa, unidentified
MKRIKFVGLDVHAETIAVAVAEQGGEVRSLGVIPNREESIRKLVKKLGPVEQLRFCYEAGPTGYIVYWQLTALGAKCEVVAPTLVPVKSGERVKTDRRDALKLARNHRAGELTAVWVPDAAHEALRDLVRAREAAKKDQLRAKHRLSKFLLRHGRRPPTGVKLWTLNYLTWVKQEVHFEQLAQEATLLDYLYEVEHGAARIARLDLAIEEAVKLTPPKMRAVIEALQALRGVAQVTAVTIVAEVGEVSRFPRARQLMGYGGIVASEHSSGESNWRGGITKTGNAHLRRVVVEAAWAYRHRPYVGETLRKRQEVVSEEIREIAWKAQHRLHTRYRKLMARGKEKGKVVTAIGRELLGFIWAIGVEAEAAQKKTERRAA

SEQ ID NO: 286532 - protein, 343 aa, unidentified
MQAITAIGLDIAKSVFQVHGVDAAGQVVIRRQLKRRYVLAFFQKLPSCLVGIEACASSHHWSRELKALGHTVRLMPPASVKPYVKRQKNDAIDAEAICEAVTRANMRFVEIKTPEQQSGMVLHRTRHLLVRQQTSVINAIRAHLAEFGIVAPVGRKGVEELLDVVADPSDSRVPTIARACIAALGAQLQRLKEQILEFDRVIMAWHRSNETSRRLDAIPGVGPMLATGLVANVADPRVFRSGRNFSAWIGLVPKQHSSGGKDRLGSISKQGDRYLRSLFMAGALAVIRYTKIHGTKHRPWLTALLVRRPTKVAAIAPANKIARMAWAMMARSERYKEPVALAA

SEQ ID NO: 286533 - protein, 398 aa, unidentified
MSRIWAGIDSGKGHHHGLALDTDGRTLLSRRVANDEPELLKLIGDVLALAGGDEVTWAIDMTGGEPALLLALLVAHQQEVLYLSGRLVNRASDGYRGEGKTDARDAYVIADQARIRRDLRSIRPGDEAAVDLKLLTGRRADLVEDRTRAVNRLRGTLLSMFPALERTLELTNVGPLVLLTGYQTPAAIRRAGVARLTKWLANRKVRNTKSLAETVVEAAERQYTSVPGEKTIAKLVHTLAEEVMALNERVAGIEKLIEGRFREHDLADIVQSVPGIGVVLGAEFLAGVGGSLDTFDSPDALAAFAGVAPAPKDSGKVSGNLHRPTQYHRRLQRVFYTSALVSIRCDPNSRAFYDRKRAEGKRHVQAVVALARRRVNVLWALIRDGRCYQVTPPVTSTA

SEQ ID NO: 286534 - protein, 414 aa, unidentified
MLKIVYRVCCGMDVHKSFVVACIASTNEQGVTTYKSKRFSTFTGDLRRCAAWLAANNCKDVCMESTGKYWIPIYNILEPTCNIVLAHPKYVKAIRGKKTDKRDAKWIADIFKHDLVAGSFIPPADIRQLRDLFRYRWKLTSFTTGEKNRAQNCLTVSNFKLDDVFSDVFGKAASAITSRILENPTEKITDVSSFRTKRLKATDEEILAAVDGEMCEEQAEKLRIIRSHMDNLELCKLNLESLILATAEKYLPQLNLVMSAPGIQSFAAIGIISEIGVDMSVFPTSKHLCSWAGLTPQNNESAGKKKTTRISRAGAYIKPLLVQCALNAIRAKKFPEVRNRYLTLKKRRGHKKAIIAIARMLLTAIYNMLKKNEPYNSELYRKADRPPTHRQVSVEEAIFILQRQGYLVAAPSTS

SEQ ID NO: 286535 - protein, 340 aa, unidentified
MDIKTLGIDLAKNLFRVHGVDALGRTKLQRSLRRRQLLVFMAQLKPCLVGMEACCGAHYWAREMTKLGHQVKLMSPRFVRPYVKSNKTDAKDAEAICEAVARPSMSFVAIKSQPQQDMLALHRVRALLIRERTALMNQMRGLLAECGIVVAPGVAHLRRALAEIRGADDDRISEVLRRVLVEMSDRLRSFEQRLTKYDQQITNMARCDDRAVQLMAVPGVGPLIATALIAAVGDAHQFKSGRQLSAWLGLVPREHSSGERKVLLGISKRGDRYLRTLLIHGARSALHYAVRRRDRRSVWVTALRERCGANVAAVALANKNARVLWALLSRNEKFRVPAAA

SEQ ID NO: 286536 - protein, 418 aa, unidentified
MNTTCVGIDVSDGQSTVSAYAWGDKIVMKPRNVPHTVTALRNLADEIGRLPGEVRVVMEHTGRFWLPIAQTLRAAGLYVSAVNPKLIRDFGNNKLRNVKTDKADSKKIARYGLRYWNDLQPYAPTEAPRQKLLEFSRQLDNSNKLLTAQKNNLQAIVSVTFPGVRKLLKSKAREDGHIKWVDFVCEFYHCGVVRKLGEAAFAQRYRAWCKRKGYYFTKSGCANIYALACDCVPSLPCDRDTKLLINGVARQLTAISAAVEACRAKVYELASVLPEFACVMSIFGCGKTTGPQLMAEIGDPTRFKDRIVDGKCVKGKKQLGQFAGVAPGNNQSGSYEQKSVKASKKGSAHLRKTLFQVVSTYLTNKPDDPIFHFLDRKRAEGKPYYAYMTAAENKFLHVYYARVMEALVSVADSSHCQG

SEQ ID NO: 286537 - protein, 401 aa, unidentified
MEQYTGSEQAVAPASTVGQVLAQRAAGEYGAYVGLDVHKETIVVAVARPGRAVAEDWGEIRHTAKAIDKLVTRLNATFAEQVLLFCYEAGPCGYDLHRRLLGYGHDCQVVAPSLIPTKPGDRIKTDRRDARRLATSLRCGDLTAIWVPDHEAEAMRDLVRAREDFKHAQRRARQQLGAFVLRHGHHWPGNRSRWTRAHYRWLESLTFADERQRWVMDDYLEAVHAATQRVADLDQRLEQALAQWSLAPVVHALVALRGIDRLSAMVLLAELGDLRRFSSPRQLMGYLGLVPSEHSSGEHRRQGRITATGNRRGRRILVESAWSYRFPARQTDHLARKAAAAPPEAQRIAWKAQKRLCGRYRRLLQSGKNTKQTTVSIARELAGFVWAIAQQTMPPANAQAS

SEQ ID NO: 286538 - protein, 425 aa, unidentified
MNIDGTDEPCFAAFVAIDWGDKKHAWSLQPADSDRRERGEIEHSPEAVAEWAAMLSARFANQPVALAVEQSRGALVFMLSKYEQLHVYPIHPRAASQFRAALVPSGAKDDPSDAELLLDLLVHHRARLRRLQPDSEQTRLIQHLVEGRRKLVNERTRQTNRLTANLKLYFPQLLDWFDAVDSPLACALLQRWPTLEALQKARPDTVRSFFTAHNCRSQELIQRRLEQIRQAVPAVRDKALIEASLAMTKVLVELIATLREGIASYDRQIAQAVATHPDFAIFDSFPGAGPALAPRLLAAFGSQRDRYRSAADLQTFSGIAPVTERSGKSKWVHVRWACPRFLRQTFHEWAAHSIGFCDWARAYYRQQRDRGKDHHAAVRALAFKWIRIAFRCWKDAVPYDDARYMQSLRRRRSPLMAALAKPVLP

SEQ ID NO: 286539 - protein, 379 aa, unidentified
MKEINTIGVDIAKGVFQVHGVDRSGAVVVRRAVRRSQMLSWFSKLPPCLVGMEACASAYYWARELRRFGHEVRLIPPAYAKAYVRRNKNDPADAEAICEAVSRPSMRFVAVKSEDQQAAAGIHRVREILMKQHTMLRNHLRGLMGEFGIVAAKGRRGLEELIAILADPDDRRIPSPLREGLAAIVETLRGVDGKLDALERQIVEAGREHATVRHLITAPGYGPILSSAMAAMVVNPAAFRCGSDFAASLGLVPRQEGTGGKTWLGPISKRGNGYLRRLLVNGATAVLKSKRAKQDPWIAKLLATKPRKLVAVALANKMARIGWALMMRQEDFHESRAAAEDALPATPAGCGDTASLGQRIRVAHISTAKAANADARCDR

SEQ ID NO: 286540 - protein, 369 aa, unidentified
MNKFSKYVGLDVHQETIAVAVADMGGEVRYMGEIVNTPEAIAKVVTRLKRGTDRLTFCYEAGPCGYTICRQLRELKQDCQVVAPSLIPKKPGERVKTDRRDALSLARLHRADELSPVWIPDEAQEALRDLTRAREDMKHLQRQAKQRLLSFLSRHGHRYTGRSRWTQPHWRWLEGIRFARPEQQIVLQEYIDTVQACGKRVASLDREVETAAHASTLWPVIEALMALRGISLLAAVTVVAELGDLTRFANAPQLMAYLGLVPSEHSSGKRERRGGITKTGNGHVRRVLIEAAWTYRHAARKTAILQRRAERTAPEVQEIAWSAQKRLCQRFRNLMARGKLKNQVCTAIARELVGFIWAIGQQVALLSRA

SEQ ID NO: 286541 - protein, 482 aa, unidentified
MKKRNIYQNQSQELLTLFEEAGNSEKVMCVPIDYAKTDHAVMFCNGHGDIVRKPFSVKNSPLGVDYLTDQVIRSCKSRGFNKRHVFFGGEDVGSFAANFVTTLRSQGWLVAGVNAHDAKKQRANLQASTDRLDLMGIASMLLNRRANSCPAQSGIYWNLRTVVRHRQKLVKLTTEVRNRIHAVVDRLFPGFLDEEKSGISPFSKSSLWLMQTRFSTPQIRRRKRSTLIKGLRKLGAKNPDLAAAKLQQYAAQVLKPPQEYIATLQFSLAQHVKHFSCLQENIDQLEKEMAVELAQTQGVFLTSFRGIGIVLASGVTSEIGNPYEQAPLNNLVSYTGIVPRVKQTGGPQGESYSGKVAKRCNRILKNYVVQSASHLGLHGPQELMADYKRREAAGQHADFGMGRRFLRIAMCLMRTSQIYLPHRLREPEAKLQERADYYLMNWPNLHEKWKRSGALEVAFDKNMPLGQWRNIVQHLYGIKLAL

SEQ ID NO: 286542 - protein, 424 aa, unidentified
MAYRIAGIDVHKRMLAVVVADVEIEGEYEFERQLFAATPQQLRSLAEWLLEREVEEAVMESTAQYWKPVWAALEQYWKPPCRKKDGAGRMSGALHLAQARSNRGRRGRKRDFPDAERLVKRLVAQELNLSFVPDAEQRLWRTVMRRKYQLTRNRARLQNQLESLLEEAHIKLSSLVSDLLGVSARRMLQALADGETDPATLAAMANKQLRATSEQLCDALGACTELNPVYRRLLKMALEELRFIEQHIGQLDQEMATLLCQHQDAVQRLAEVPGLGVGSAQQIIAEVGATAASFPSEKHLSSWVGACPGDEESAGVSQSHRSPKGNHQMRRILNQCANAAVKVKGSIFQILYRRLVPRLGHNQTIGAIAHRICRLIWIILHRGVGYVEHGPAVQESSKRARTSRMIRQLRNLGYRVELLAQNPA

SEQ ID NO: 286543 - protein, 414 aa, unidentified
MELLHERCAALDIGKKDLKACVRAPGPKGKRSRRQEIRTYATTTNALLELRDWLVAERVTLVVLEATGDYWRGAFYLLEDDLNVILVNAAHARGLPGRKTDVCDAAWLCQLGECGLLRASFVPPEPIRQLRDLTRYRTTLTAERTREAQRLEKELEDAGIKLSSVATDILGVSGRAMLAALIAGEDDAVALAELAKGRMRPKIPQLVQALTGNFGAHHAFLCRLHLERIDQLSATIGELSARIEEQMRPFSHKLDQLQTIPGVAQAVAEVIVAETGADMSRFPSPGHLASWAGVCPGHHESAGKRRSGKTRHGDRWLCGALGTAAMAAARTRDTTYLGARYRRLAPRLGKKKAIVAVEHSILTAAWHMLTDDVDYHDLGGDYFARLDPERAMRRIVRQANALGYTVRFDPIQAA

SEQ ID NO: 286544 - protein, 412 aa, unidentified
MKDLLEISCGLDVHKEKIVACILTGPLGKPTHSEIREFSTLIPDMIALRDWIVSQNCHHVAMESTGIYWMPIYEILEDAFSGDITLLVVNARHMKNVPGKKTDMRDSEWISTLLRAGLLNGSFIPEKRIREFRDLNRYRKSIIRDITSQKNRIEKFLQSSGFRLSSFISDIFGATGRNIILYLMEYGQIDRTALDSCLKTRTRNRIDEILMSVNGTLSEHQKAFLKILMNHYDSLKEHLNEIEKDLKQDMEPFTLQVEQLNSIYGISNTASCAIIAEIGVDMKPFKTAEHICSWAGLCPGNNESAGKRKSTSVTKGNPYIKSMLCEIAWVIAGKRNTYLSAWYWRIKQKKGAKKAIVALARKLLVIIYTMLKQGTLFDESCFEVRRKSCEQKQLSHYIRELEKHGYHVETQS

SEQ ID NO: 286545 - protein, 342 aa, unidentified
MQVTTIGLDIAKNVFQVHGIDAAEKVVVRKQLRRSQVLEFFKALLPCLIGMEACASAHYWARELTKLGHKVGLMPARDVKAYVKRNKDDAADAEAICEAVRRPTMRFVQVKSAEQQSQLMLHRTRDLLMRQRTQVINALRAHMAELGITAAQGNAGLRELLAIIAGAADERLPAEAHASLIVLAAELQAMRTLIASIEKRIIAQHRSDEASKRLRSIPGIGLVGATAIVATITDPKAFRSGRDMAAWIGLVPREDSTGGKQKLGPISKQGDRYLRRILVVGAHAVLKLARQKPEKYPWLTQLLARKPFKVVAVALANKMARIAWALLVKGGPYRARALVAAA

SEQ ID NO: 286546 - protein, 355 aa, unidentified
MKKNTPNQKTVIGIDLGDIKHAICVTDKHGSILKEFFVPNRHDCLEELADEYPKALIAMEVGTHSPWISRLFTAKGAEVIVANARKLRAIYTNERKCDRLDAQMLAKLVRVDPELLAPIRHGSEQSQQDLLSIKLRDTLVRQRVNIINSLRGSLKALGIRLASPSSSCFAKAARKTLREHPGILPSIEPCLGVLDGLSAQIREFDKAIREAGRTRYPQAEALQQIPGVGPITSLCFVLCIEEPGRFPEAREVGAYLGLVPRRDQSGNTDKQLPISKSGNRYLRCLLVQSAQYILGHFGPDCELRRHGLKLAARGGKAAKKKAVIAIARKLAVLMLTLWQRQSDYVPLRGTTAKAA

SEQ ID NO: 286547 - protein, 317 aa, unidentified
MTNVILGIDISKLTFDVTLLIDNKVKNRKFDNNKKGFDTLIQWLKTKGVDTGYACMEATGSYGLKLARYLYENNFKVSVVNPARIKGFAQSKLCRVKTDKADSDLIAHFCQTMKPDLWKPTSLHIQELQQLVNRLDALISIKNQETNRLEGLSDLVATNIKDHIIFLNKQIKEVEQLIANHIKTHQDLSEKSTLLASIPGVGEKTISQVLTFLSNIDNFNSSKQVIAFLGLNPKQRQSGTSVRGTSRISKTGNAELRKAFYMPAIVSLKYNPVIKGFVKRLSITGKPKMVIVIAAMRKLIHIIYGVLKNKTLFNEKN

SEQ ID NO: 286548 - protein, 412 aa, unidentified
MQLFVGLDVSSFDIKVCFLNGEGVTLSSFPPVSNDLPGATALRDAILQTIDGQTVEVLKIGLESTSVYSFHPAMFFHQDEELRALGAQVFLMNPKQIANFKKSYPDMDKTDEIDAFVIADYLRFGRFSMSVVKESQYVALQQLTRSRYQLVHQMTKEKQHFLQHLSYKCNTFQENVESSVFGQAMMELFFEKYSLEELAQMSIEDLAAYLPSKGKNGFHDPEKVAKFIQKAVRSSYRLDKVVEDSIDLILGTIIELIRTMKAQIKQIDKAITKIMAGLPNTLQSLPGIGPVFAAGIIAEIGQIERFKAEAKIAKYAGLYWQKHQSGRFTADDTSLSHNGNQYLRYYLVEAANSVRRHVPEYQAYYEKKYQEVPKHQHKRALVLTARKLVRLVDALLRNHQVYTPQGSVKLEA

SEQ ID NO: 286549 - protein, 343 aa, unidentified
MYYIGLDVHKKTISYCVKDAAGQVHREGKIGATRLDLDNWIKTLPQPRMMAMEATIFTGWIYDHLLPHAEKVKVAHPLMLRAIAAAKKKNDRIDAGKIADCLRCDFLPECHMASTEIRDRRRTLRYRNLVLRQTVQMKNRVSGLLMESGVTYDKQRLHKMGYFTELFSTNEEISDSIRPLLRLGREHILRGQRLDRALTSSLERDPLLSERLRRLRTIPGVGPITALTWALEIGDYTRFPSVKEAISYCGLCSAEKSSADKVMRMPISEQRNKHIQHVLVEAAKMAPRYSHELALVREREMQRGNANRATLAVARKMVCYLMAVERRKQEFVPAEKFRATAAA

SEQ ID NO: 286550 - protein, 351 aa, unidentified
MSQTPRTSITAVGIDIGKNSFHIVGQDDRGAIVLRQKWSRSQVEARFANMPPCLIGMEACVGAHHLSRKLKALGHDARLMPAKYVRPYSKGQKNDFRDAEAIAEAVQRPTMKFVATKTADQLDLQALHRVRERLVSQRTGTINQIRAFLLERGIAFRQGQRSLRAELPRILATPPDVLSPGMVRVIEGLAADWRWLDERIEGLSREIEELANRDAGCERLMSIPGIGPIISSAMVAAIGTGDGFAKGRDFAAWLGLVPRQISTGDRTILGKISRRGNRYLRVLFVQAAWVVLVKVKPTRWEGHGLKHWIEAASKRLHHNVLAVALANKLARIAWSVLSRGRAFEASKLQAA

SEQ ID NO: 286551 - protein, 354 aa, unidentified
MSQTLNTAIAVIGIDIGKNSFHVVGHDERGAIVLRQKWSRGQVEARFANLPPCLIGMEACVGAHHLSRKLNSLGHDARLMPAKYVRPYSKGQKNDFRDAEAIAEAVQRPTMKFVATKTADQLDLQALHRVRERLVSQRTGIINQIRAFLLERGIAVRQGQRFLRAELPRILATPPDVLSPRMVRIIEGLAGDWRRLDERIEGLSSEIETVARQDAGCERLMSVPGIGPIISSAMVAAIGTGDAFSKGRDFAAWLGLVPKQMSTGDRTILGRISKRGNRYLRVLFVQAAWVVLIKPKSWERYGLKPWIEAAKKRLHHNVLAIALANKLARIAWSVLARGRSFEVRKMDEAVVQSA

SEQ ID NO: 286552 - protein, 337 aa, unidentified
MPALTIGLDIAKNVFQAHCIDRHENVVMQRKLRRAEVLKFFAKLEPSLVGIEACHGSHFWARELTVLGHTVRLLPTQYVKPFLVGGKNDANDAAAICAAVTRRDIHFVTIKSAEQQSLQSVHRMRERLIQERTAKSNQIRSMFAEEGIIFPTGLAQLRKGIVALVSENETGITPLLRRLGSMYLDQMKVLQQWLDEINSEIAAIFKKNEACQRLATIPGIGPVIATALVSCVGDPSQFRNGRQFAAWLGLTPKQRSSGGKTRLGGITKRGDTYLRTLLVQGSRAVMHFVNRREDSHSLWIRRLMQRRHVSIAAIALANKTARIAWSVLTREEMFRAA

SEQ ID NO: 286553 - protein, 305 aa, unidentified
MISPIHKQFSNNPKGFEAFFLWINKSKKEVYTCLEATGIYSFDLAQYLSQKKINVMVVNPIITHAFFKMELNRNKTDKADAQLIARYCEHVVVTGGYEKKSYQPKGADYEAIQRLVTRCDQLEKSKTQENNRLEASANKQASCSIKRLQKAIDNEIVRVKKEIADIVKNNQYLCQQVELLVSIKGIGERTAWSILAYIGDINFFSNAKQIASYAGLTPKIIQSGTSIDKSSLSKLGHKRLRKSLYMPALVAIRYNPILKAVYERLVNNGKPKKVAIVAVMRKLLILSYGVLKSEKPFDINYQMTD

SEQ ID NO: 286554 - protein, 338 aa, unidentified
MSEYYLGIDLHKRRSYVVLMDAQGKVISEGGLSNDDMSEHLKEEVPHDTIAVIEATWNWQFMYDLLSDHCEGVLLAHPQKVKMIAEATVKTDKIDAHTLAHLARTGYLPTAYAAPREIRELRQLARHRSKLVADRTRHKNRIHATLARRNIHSPFSDIFGCKGREFMAEITDDKLSQIDRQVIEDNLGAIDLLNQLVDAAESTMAEQTVHDPKVSLLKTLPGVGLITAVTIRAELGEVERFSSADRAARWAGLTPKVHVSDETVRHGSISRQGSPYLREAMVGAALRAIRYSPRLRSFYQRIAKRRGSGMARVALGRKMLLIAYSMLMRDEPYSEDYC

SEQ ID NO: 286555 - protein, 457 aa, unidentified
MTRERKTRGKRAVRKFSAVNPAAAGLDVGSTFHVVAVSADRDDEPVRTFQSFTTDLHALADWLHEVGIRTVAMESTGVYWIPVFEILEQSGFEVLLVNARHTKNVPGRKTDVNDAQWLQQLHEHGLLRASFRPRDSIVGLRAYLRHQERLGNYAASHIQHMQKALMQMNLQLHHVVSDITGVTGMKVIRAIVDGNHDPAALAEFRDCRCKASKSTIAEALTGNYREEHLFALGQSLDLYDFYQTKIVECDQQIEAALNRLNLDRKTPTEPLPKMRHARNRKEPRFDLRSALYTLVGADLSQIHGFGPSTVLRLVAECGDDLSKWPTAKHFTSWLCLAPGNKISGGRVLSSKTRRSTNRASVLLRIVAVNVGKTQTALGAFYRRLAARVGKAKAVTATARKLAVLFYNALRFGMKYVDPGQNYYEERYRQRIFHHLSRRASEFGYSLVEDEALGSGVS

SEQ ID NO: 286556 - protein, 455 aa, unidentified
MRTEQRGSKLSLECIEPNAAGIDVGSRSIYVAVGAEREAEPVRCFATFTEDLRAMASWLKQSGITTIAMESTGVYWIPVYEVLEDAGFKVCLVNSHHVKNVPGRKSDVRDCQWLQYLHTVGLLQASFRPERDICALRALSRHRAGLVEVAAIHVQHMQKALTQMNLQIHHVLSDITGLSGLAVVDAILAGQRDPRYLAGLVQSRVHADRETVIKSLVGNYRAEHLFTLGQSLAAYRQYQKMLADCDREMEQYMRRLPDNGQGGSGLAQSGKEGKAKRRKNQFHFDMGKELHRVLGTDLTLVPGLNALTVHTLVAEVGSDLSRFENAAAFTSWLALCPGSKKSGGKVLSSKTRKTSSRLNRALRLGAQTLHRSHSYLGAFYRRMRSRLGAPQAITATAHKLARIIYHLVTTRTAYDESVFRNEEQKQTLRLQHRLQSNARALGFQLVPISPQEVVH

SEQ ID NO: 286557 - protein, 411 aa, unidentified
MRLFVGDDWAEDHHDVEVMDEAGKVLAKRRLPEGVAGIAQLHELIGRHLGEDADEAEVIVGIETDRGPWVTALVTAGYLVFPVNPLQASRYRERLGVSGAKSDAGDAHMLADMVRTDSHQLRAAAGDSAAAEGLKVLARTHKTLIWERTRAVQRLRHQLREYYPAALEAYDDLDAPDTLELLGKAPDPARAAKLTRAQVSAALKHARRRNITDKATAILAALRSPQLGQPAAVTAAYAATVRSLIAVITVLNEQVKILQRQVEENFGRHPDAEIYQSQPGMGAILGARVLAEFGDDPHRYADGKARRNYAATSPITRASGKKKVVAARFIHNDRLAGALNAQAFTALRASPGARALYDELRARGIEHNDALRRLANRLVGILHGCLKTRTLYDEATAWSHRQNLPQSSVAA

SEQ ID NO: 286558 - protein, 410 aa, unidentified
MSILEVAVDPATVIVAVDPGKVLNRVWVSNGAGLLEDPVSLPVSREGIGQLERLLTDHAAAGPVIAIEATGSLHRSWASELERLHPGAVRLFAPSETKAARVQLGSGRFKTDDRDCAALTYLARQGAGRRHCGELTVDALRAAVRHRRGLVADRKVAQQRLHDQLNALCPALSAPSGHGRSLAIETSTGQAVLACAAAFAGRPPTTRSLIARAPGRLTKATAEYWVRRWRGCLSPPADAEQRARRLGRDVERYRTLGADIAAVEDEIGVLLGATDGQILTSLPGVAVVRAAAFAAHSLPIDRFPDAEHLYSATGLAPALHESATLRRRGRISRQGLAEHRDALMGIAWGLSLSSPAFAQRDAELRARGMTPIQARVAIARNACRLAYRLLVTQQPFDEEAYLRGRLSRGR

SEQ ID NO: 286559 - protein, 474 aa, unidentified
MDIVHPRVAGLDVHKKIVWVAVRLPGEAPGERRVVVKSFKTFWRSLQKMAAWLAELGVTDAALESTGVYWWPVYHALAQAGTEVCVCNAAHMRNVPGRKRDISDCKWIAELHEYGLLRPSFIPADEVAGLRQRTRYRKKLIQQRSSEGQRLSKVLEDAGIKIDSVASKLLIKSGRKMIAALIAGERNPGRLADLAEGVLRRKTDELQMACDGRFTDSHGQMCRLHLDAYDHLTAKIAELDQLVAAAAAPFAPVIARLVTIPGIGQRTAEVIVAETGADMTRFATPARLAAWAGLAPGDNESAGKRKKAPTRKGDQHLRTAMAESAWATWRTATRPRPVPPPGPPVRQGQREQGRGRRRTHRLRIAWAVMKYDGGYADVGTDYYERRDQRNREHLVRYSTPWPGSASRSPWPRPVTAARHPAQTPRPPQPRARPPDPHRTSPAGHKSRLRRRCRAPGWGLQVSSQAVIQSPPLSV

SEQ ID NO: 286560 - protein, 342 aa, unidentified
MVVYYIGADVHSNNTELSIERNGQIVARHGVPTNVRAIRQVLTVLQGRKHLTFEEGPLAGWLYRNLKDHVDSLIVCDPRRNRLISSDGDKDDRIDAAKLARLLRGGYLRPVYHSDDPQRVTLKRWVALYHDRVRDATRAINKLRGCCRVYGERIPRRALRDPSARQAWWASLEPDLAEQIDMLWLSYETNATQVRIARGQLARRAWAFATIGHWSALPGIGPIRATTLFAYLDTPWRFQRKNQLWKYCGVGLQRSASGRDRHGRERQARLRLPWPVNGLLKNVVLGAAMSAIRSRDNMFRRDYERMLRDGALASNARHTVARKMLTVMWGMWKSQRPFEPWA

SEQ ID NO: 286561 - protein, 404 aa, unidentified
MKGPIVSIDVSKGKSDYQAFKNLNVKYTGSRSIKRTKEGFDEIVNLVKEMEKKLETEVCVVYEATGVYHRVLKKVLEDNNIKQFIINPLLSAKTRKNDSLRSPKTDKLDPKSIAKTYYSHSLHNSHKPETIYHELRELSRYYEDILVHIRKDKVAFIAQLDIVFPGYDALYDDLYGPVALAVIEKYPHPEMLQKKKINTVSKVIQNKTCHRQATSDTMADKAIEYSKTIYSGCDKDDIEVLILQRLIKKLKEDMAEAERTIGEMIKLAQELPDFSIIKSIPGIGDNLAARIIAELGDMTRFKKKNELVAFAGLDPRISESGKNDGDHMHITKKGNKRLRCLLYLAVTCSIRLKRDDNSIKDFYIKKKQQSNPMCSKAAKTACASKLVRIIYSMCKTGELYQYNK

SEQ ID NO: 286562 - protein, 345 aa, unidentified
MVYCGMDIASVSSYVYVADKQGRKLSAGEIATTEQAMRDRLGPFVGRKLSIAIEAGNQTAWIHEALVKMGSAVTVVNPAKVKAIAQSRRKTDKIDAKLLCDLLRLDGLPHPVHMPSERARAVRGLLRARKQLVSARTKLCNVVRGMLRQEGIRLRLRALSTYVGWQRVQADGFDRPHMATIVATYYESFVRLTKSIRELERELDAQERADKRAARLETMPKVGQITALTTISALDDPGRFRSSRKAVSYSGLAPTVRSSGERTVYGSISREGRSELRAVWVQVAHLVVLDRKRSTQALRTWFNRVARRRGKKTAIVALARKLLVIAYHILRDETVYDPTRLKRAG

SEQ ID NO: 286563 - protein, 341 aa, unidentified
MKNLFIGVDFSKEKVDVAIIFADGLTETAARVFNEFKTTVSGYRQLVKWVEQNSYGIDPSLWLFCGENTGGYSNGLCKFLYGRGYDMWLENAKSIKDASGLRRLKSDRADASMIAEYAMRNHDKAVMYKPLNESLEQLRELFLFRQTLVRYRCSFQVRREEKRLTMDKSPVKTMISQIGRHMVTTLEKEIEKVNKRIADLIKSDDELTEVFTIVTSIPGIGTQNAVCLMVYTDNFRRFNYDSRKIACYYGIAPFGKDSGTSVHSDPHVHYMANRQIKAMLTQAALAAVNYNLVIARYYKRLVERGKKKQVALNNVKNKLVHLVSAMVRNRQLFSPEYKISA

SEQ ID NO: 286564 - protein, 344 aa, unidentified
MDHFAGLDVSVKETSICIVDDAGKIVREVKVASDPEALLAVLKNPAYHFKRIGLEAGPLSQWLFSALAEAGLPVICVETRHMQAVLKAQINKTDRNDARGIAQMMRAGLYRPVHVKTLRSQKLRMLLTHRKLLQSKAIAIENDLRGTLRNFGLKVGMVGKVKFEARIKELVENLPDLAELVEPLLIVRRVLREQIVILHRRLLAIVRDDEVCRRLMTTPGVGPVVALTYRATVDVPARFRKSKAVGAVFGLTCSKYQSGEVDRNGRISRCGDEMMRVMLYEAAQSMLHSKKWSWLKAWAMQIARRRGMKKAIVALARRLAVIMHRIWVDGTEFRWTREQATAAA

SEQ ID NO: 286565 - protein, 425 aa, unidentified
MKKIDYLSTLFVGIDIGSRTNVVSAIDFNQDYFIKMKAVPNAQGGAELMESMIADVLEKNRQFKYLIIAMESTGFYGVHIANYLSACERLAVFSTHVYCLNPKEVKGYKKSFNSLDKNDGIDSFVIADFARVGRISVKPWRGPQYLALQRLTRHRMHITECIAREKTYMLNNIFLKFSEFAMLGKDEHPFSSKYGATAQAILTEYKTNEELVNASMEDLAAFISSKSRGRITDPEETAKLLKAAAKNSYRLDKCLYDPLTTSISCSFNCISSFEKELKAIDAAILRTVCGLNETDYTVLNSIPGIGKVYSAGILAEIGNIQCFPNDDALAKYCGIVWRQNQSGTFEADETPMSKAGNCYLRYYIIEATGSVINHCPEYRAFYEKKFAEVTTHQHKRALALTSRKFLRMLFGLLDKSQLYSAEKSR

SEQ ID NO: 286566 - protein, 415 aa, unidentified
MSHPLLVGVDVHRQTNTVCLMDAAGHVLGPRRTIDNNRPGAAVLVDQVAQKMAQGDFDAIQIAAEATGWYWWHFFQTLARDPTLQQWSLQLYPLNPRLTANFAKTYVDRDHTDVGDAFVIADRLRMGRDLPPPYQLDARYLALRLLTRYRFLVIHTLTREKAYALAILYLKASEYGRLKPFGNLFGAASRAVLQEFASLEAIAAMPFDELAEWLDVRGKRRFADPQDNARTLQQVARDSYALPDALQLPVHQILGWSLQHITFLEGQIKRLDSAISEQLTNIPHTLETIPGIGPVFAAGIVAELGDIARFAFDQAKVAKFAGFKWKKHQSGDFTAEETHLTRTGNRYLRYYFCEAANAVRMHDAEYAAYYDRKYREVRQHQHKRAIVLTARKLVRLVVRLLTSNQSYQVRRPASS

SEQ ID NO: 286567 - protein, 360 aa, unidentified
MSETITSFVGLDVHKDSTAIGEAEAGRENPDLGQLLKALKSLGKPETMLVVYEAGPCGYGLARQLRSRGYSCEVVGAGKIARRPGERIKTDRRDALTLARLARSGDLVKVIVPDEGDEAMRDLSRAREDGVRARLKARQQLKALLLRHGHRYGGKSSWTLAHERYLAAVSFAHPAQDIAFAEYRQAVREGHERVERLTEALRTQAEHWRLKPLVAGLATLRGIDFVAAVTLTAEIGDFGRFAHPTELMGFLGLVPSEYSTGDTRRQGDITKTGNSHARRVLVEAAWNYRFPARLSRVLQIRQEGQPKAVREIAWRAQLRLAHRYRRLSSRKLHPNKICVAIARELAGFLWDIARQVKLAT

SEQ ID NO: 286568 - protein, 413 aa, unidentified
MNPLYVGIDVSSRNNVVFLMKPDGSKIKNFSVPNSRDGSQKLVKEIRSALTSFALTDVIIGLEATSVYGDNLVCFLREDGSLTPFNRKIHVLNPKQVNKFKESYNDLPKNDYVDSFVIADCLRFGRINKEVYLDDYRYKALQNLTRARFVTVQNLTREKQRFMNVLFQKYSSLAQEKVFSDTFSTTALAVYEEFDSADTLAYMDLHELTVFLQEKGKNHFPNPEEVAKAIQKAARSSYRLPKTVNDSVNQVLSISITSMKALEAQIREFDKAIAAQMELIPNTLISIKGIGPVYSAGIIAEIGDINRFPNQAKLAKYAGLAWRQHQSGDFEAQNTRLIRTGNRFLKYYLGEAAMSLVRCDAEYSRFYHLKYKEVNKYQHKRALALTARKLVRLVYRLLKDNRLLGGCFAPCLQ

SEQ ID NO: 286569 - protein, 441 aa, unidentified
MQEVIPVSNRTPYSLVDVNEVSVPSLAQRRHGQDLVIGVDVAKGELVACVVGSDRSFERPWRVKSPGQVRTLVDQLTQLRRHCPLVVAMESSGTYGDVLRQALADAGVEVRRVSAKAVKDYSETFDGVPSQHDGKDAAIIGTLAQSGHGKTWAWHDRDDEASQALRYFVRRLDTAQRIKQVFCGKLESLLARHWPEASALLSQSGATLTRALHRWGNPRLLAADEQAPALLKGFGGHYLSEQKIGRVIDSARSTVGVRMNAWSIREMRDVAGAIVKQRKRILRCRRELKKLTRNNRVIQAQAPAVGLVTACVLWMCLGDPLNYPSAAAYRKAMGLNLKERSSGMHKGKLSLSKRGQRLTRKWLYFSALRWMKEPSVKRWMENKKQRDGGRGGKAVVGVMRRVALAAWHAGQGAVFDPKRLFPGSGARRSAQAAQSGGATMN

SEQ ID NO: 286570 - protein, 352 aa, unidentified
MRWVGLDLHKHYITACAVDDAGDVVAEHRRLPADVGPLVAWLQAVGDAVTVAMEATLYWAWLHDQLSAAGIAAVAAHPYQVKLIWQARCKTDPIDARKLAELLRTNLLPVIWVPDTEVRARRKLLRGRAYLVRVRTQFKNRIHGQLTAENRQTTVTDLYGRAGRAWLATVALSPAARVQVDLLLELVDALDVRIHSLDDRVKRLVHGDPVAQRLQTWPGIGTFGAALLLAEIGSMHRFRSAHELAAYAGLTPSTQSSGDKTRHGSVGRAGSPWLKWILIEIVQSLKLAPGPVGQQYQKLLRSKGKAKATVAAARKLCCYLYWCLKEEWSYEEWFQQHNKLEVRPRQALGSAA

SEQ ID NO: 286571 - protein, 429 aa, unidentified
MRTESTPGARGPVFCGVDTHADSHWLCVLDWRGRRVLSRRFPADAAGYEALAGAIAAAGEPACVAMEGTSSYGAGLTRHLASLGMPVREALSPARTQRRRPGQGKCDEADAERAARAAMSGSKLGTPKSQDGWVDGVRCMLAARSGAVKARTSAINTARSLLTTAPEGLRSRFRGMGGPRLMEELPSVRAEGALGAALGALADLWAAARDAALDMERAIEASLEENCPALLAMYGCGPVSAAKLAVAAGDNPGRLRSEASFAAICGACPIPASSGKTVRHRLNRGGDRQANSALHEIARQRVMRDPETAEYAERARGRGKSDREVMRCLKRYVAREAYRALMHPHEIRRPEDASELVAARRAAKVSQARAASILGTSEKYISMLERGQRELKPIRRAYEAWVEAGLPLDWDRRAFEAERKMDSKKHLAK

SEQ ID NO: 286572 - protein, 446 aa, unidentified
MRKTAEVKKEFVGLEIIYPHSAGLDVGSMLMAVSYQNQQGECVVKEYGSFTEDLQIMGKDLAQAGVRHVAMEATGVYWMSAYAVLESYDIEVCLVNARMYKNVAAQKTDINDCQWLHRLMAHGLLRSSHIADESYRELRTYLHERGILQKQKSDTLNRIHKVLTQMNIKYQHLISDIEGVAGMQILSRIAAGVQGVEAILSGINISRLKAGKEDLCKALTGLYKPHYLKILNRHLEAYAFYKQQMQAYEQEIEVVLKELMPEEQEINPKRKKTRKNQFGINLEGYLKAILGTDLTEVAGLEESTILTIIAITGTNMNKWPTAAHFTSWLNLAARPRISGGKVLGHERRVSNNPATQAFRLAAQTMWQNKGPLGALYRRLASTKGSKKAIKAVARRLAVIFYTMVKNKTKYDPTKIGLDQEQMNARKIARLQREAEKLGCTLKKVAA

SEQ ID NO: 286573 - protein, 421 aa, unidentified
MSKGRYHSVECKGVDWDALAAQVAGRGLVFAVDVAKHDFVACLRVAGEDPLVRVKWQHPEQTPAVLAGLGRLIAAGPVAAVMESSGTYGDALRWQLGQLGATLYRVSAKRVHDAAEVFDGVPSLHDPKAADIIAQLHDLGHSQEWLEADTHRRALTAQLKMLHQCKARHQQELNRLEALLSRHWPEALTLLELDSVTLHHLIAAYGGPAQVHALEGQARTLMQQIGRPGLAAAKIEALLDSAGHTVGMPCILEERELLRWQAKAVVETHTELRRIEKLIEQAVAGDPALASLRSVVGPVTSAVLLAAQGSPLSYPDADSYCKGLGLNLTERSSGKHKGRLKITKRGPAVARFYLYFAALRLIANEPVVAKWFKAKTARPGAIKGKQVVELMRKLAKALWHHAHGRLFQAEKLFDQRAVTGA

SEQ ID NO: 286574 - protein, 394 aa, unidentified
MAVMIGIDPHKGSHTAVAVGAAEEPLGKIRIRACPAQAEQLVAWAAGWPERTWAVEGAPGLGRLLGQQLVAAGERVLDVQPKLAARVRLLHTGNTGKSDPNDALSVAVAALRSMANREVTADDHATVLKVWAKRHRDLSRAYNQVACRLHAVLCELVPGGVPEEITAGRAEKILAQTRPAGAAGQARRELAAELLADLRHLDGQRREVKKKLAAAVKASGTTVTSVFGVGPVIAATIIGDVVTVARFPTRDHFAAYNGTAPVEVSSGEKKIYRLSLRGNRRLNHAIHMAAITQISHAHSNGRAYYQRKIAEGKTHKEALRCLKRRISDAIYARLRADARAAGLGGQPGNLSSSRAAGSHPGHRLFGQATPRPETSLRAARTPGTHVQDMVRARP

SEQ ID NO: 286575 - protein, 328 aa, unidentified
MIMLGIDVSKTKIDCCIFPQGLTGKRKNKIFTNTESGFGSLLKWLITLKIEPDQVTAIMEATSVYHENLGYYLYDAGVKVCVANPSRVRAFAKGMSMLNKTDKADSEALSRYGYTAKLIIWQPEPENVRLLKALLGRRDVYLGSLLQEKNRLEKAQSTHTSVVVIKLLEENIEHLNQQLEHIDKLINNHIDQDPTLKQDLKLLQTIPSIGERSGLILLGLFHSHKFEKASQAAAYVGLVPVHQLSGTSVNKQSHLSKAGDSKIRSVLYMSALTAIKYNPHIEALYQRLLSQGKNKMCALGAAMRKLIHLCYGVLKHQTAYQRDYLLVE

SEQ ID NO: 286576 - protein, 410 aa, unidentified
MQALVERGCGLDVHQATVVACLLIVRKDGKVQKQMRTFGTTTQELLSLRQWLLSEGCTQVAMESTGVYWKPVYTILEGALEIVVANAQHVKKVPGRKTDVKDAEWIADLLCHGLLRSSFVPPKPIRELRDLTRYRRKLVESQAAERNRLLKLLETANIKLASVATDVFGMSGRLMLRALVEGKATTQEMAELAKGKLRKKIPELEPALEGKVEEHHRFLLRLQLDRLEAAEKDLAVLEQRIQEKLKPYEAQLTLLDEIPGVDWTLAAGIIAEMGVDMSVFGSVSQLASWAGVCPGNNESAGKRKSSRIPKGNVYLKTALVEAANSAAKAKGTYLRDKFYRLKARRGYKRAAVAVAHKILVAIYYMLSHRVCYNELGDAYLDKRNKHQLTRNLIHRLERLGYSVTLEQKAA

SEQ ID NO: 286577 - protein, 342 aa, unidentified
MGEVSTIGLDIAKSIFQIHGVDADGVVMIRKRIRRAKLLEFFAALPACLVGIEACPTAHYWSRRLQILGHTVKLMPPSYVKAYLKRSKNDANAAAAICEAVTRPSMRFVATKSEEQQSGLMLHRSRQLLVCQRTMLSNAIRGHMAELGIICAKGRNGTAELLRIIADEHDDRIPAVARLSLDVLARQYTVVRAEIVAIEKRIHAWHRSCEESRRLEEIPGVGPIVATALVAEVGDWKEFTSGRSLAAWIGLVPRQHSSGGKERLGRISKQGNRHLRWLLVAGAMAVIRYARQHGTKRLWLARLMERRPIKVAAVALANKIARMAWAMMVRGERFKEPKLLPA

SEQ ID NO: 286578 - protein, 413 aa, unidentified
MDVLHPRCCGLDVHKSSISACILLREAGRVQKHQHRFGAMTQGLHELAEWLRQFDVTQVAMESSGVYWKPVWNILERQFTVVLANAQHIKNVPGRKTDQKDAEWIAQLLQHGLLRPSYVPCEIIRDLRDLTRMRASLSQEVSRISSRIQKVLEDANVKLASVATNALGKSGRAMLEDIIAGEDDPEHLAALALGHLRVKIPQLRLALEGKIRSHHRFLLRRLLDQMQFVEHEIALLDERLEDIGRQRPELSQAVARWDTIPGVDRVAAWTLLAEVGDNMAQFPTAEQLASWAALCPGNHESAGKRLRGSTRQGSPWLRRMACQCAWAAARTKNTYLSSQFRRLAARRGKKRAIIAVAHTLILIGYHLQKKQSNYDELGGNYFDRLHSDGLKRYLVRRLQQLGHKVTLEPMEAT

SEQ ID NO: 286579 - protein, 361 aa, unidentified
MDFLPISDEAEPLVVLGVDTHADVHVAVALDGLGRRLGGKTVPTTEAGYAALLAWAEGLGTLDRIGVEGSGSFGVGLSRFLRTRGVDVVEVNRPNRQHRRKFGKHDTADAEAAARAVQANTATGEPKAADGMVEMVRALRVVRRSAVKARTQAANQLHALLVTAPEELRAKLRGLSATKLAATASRFRPGTLTDDLAAATKLAMRSVARRHRQLSEEIAELDKQLARLVAEAAPALGSLRGVGTDTAASLLIAAGDNPERLKSEAAFAHLCGVAPIQASSGRIRRHRLNRGGNRDANRALYVIALGRMSWDERTREYVAKRTAEGKSKRDVIRCLKRFIAREIYRVLTAPTTTLSPSLSGP

SEQ ID NO: 286580 - protein, 412 aa, unidentified
MLVLVGDDWAEDHHDVELMDAGGRTLARARLAEGAAGVARLHAMVGEHAGHDDDEAEVRIGIETGRGLWVTALAAAGYAVFAVNPLQAARYRQRHAVSGAKSDAADAHMLAGMVRTDSRQLRQVAADSPGAQAVKVVARAHKTLIWERSRQVHRLRYQLRDFFPAALEAYDSLGLDAADVLELLAKAPGPASAAKLTTAQVSAVLRRGHRRHVSDKTAVIRQALRSVQLCQPPQVAVAGAAVVRALAAVITTLSQQIKALEGQVEAHFLQHPDAEIILSQPGLGSILGARVLAEFGDDPARYASAKARKNYAATSPITRQSGKKKTVMARYVHNDRLRDALGRQAYSALTASPGARAYYDQLRARKIEHDAALRQLANRLVGILHGCLKTRTLYDEATAWPQQNNGQFPTAA

SEQ ID NO: 286581 - protein, 293 aa, unidentified
MFKNDANGFDELQQWLKQQGAGTVHACLEATSTYGEGVAEFLHSQGHTVSIVNPARIKGFAISELSRTKTDKADAQLILRFCIALQPEPWQPPAPEVKQLQLLLRRLEALQQMVVQERNRLETATPKLQKSIQAHIDYLEQDIEEIKQQVKDHFDDHPGLKQQRDLLVSIPGIGEHTAAILLSEIVHWSLFESSRQLAAYAGLTPKERSSGSSVRGRPGLSRVANARLRKALYLPAMSARRFNPLIAAFCERLLAKGKAKKQVIGAAMRKLLHLAYGVLKSGCPFDPNFAILA

SEQ ID NO: 286582 - protein, 521 aa, unidentified
MGSEDRIDVYLGLDVGKGEHHGTALTPAGKKVLDKPLPNSEPRLRELFEKLQARHGTVLVVVDQPASIGALPLAVARDVGCRVAYLPGLTMRRIADLYPGEAKTDARDAAIIADAARTMPHTLRDLAPDDETVAELHMLVGFDDDLAGEVTRTKNRLRGLLTQIHPSLERVLGPRLDHPAVLFLLERYGSPAQIRKAGRRRLVSILRPKAPRVAERLVEDIFDALDEQTVLVPGTDAAALIVPSLAASLTAVLDQRKLLATRIEQLLEAHPLSPVLTSMPGIGVRTAARILIDVGDGSGFATAGHLAAYAGLAPATRRSGSSIRSEHPARRGNKQLKRAFYLAAFASLSQPDSRAYYDKKRREGKHHVAALVCLARRRIDVLFAMLRDGTFYEPPSSSQAALSRGRPRAPQCEPGNCSAAPSLSLPLSPRWPGCTVAWRGSPSPTCPSGLLLHCPHEERGPDDFDSMVDTELARHGMPVLGRLPHPPRRSPHRTVLDHLPAEQRAFVIEQSTRVRRGLGPA

SEQ ID NO: 286583 - protein, 337 aa, unidentified
MTIIRIGLDTSKHVFQVHGIDENEQPVLRRQVRRGEMEKFFAKLAPTRIGLEACGASHHWARVLGGLGHEVVLLPPQYIKPYVKRGKNDAIDAAAICEAMSRPGMRFVPVKSAEQQAALMVLRVRDLLVKQRTALINAMRGHAAEFGVTAAKGPVRVAELVQRAHTEEANVPAPALEMLRLLAGQLEAIETRLKTIEAQLIGVHKANPTSQCLATIPGVGPIGAVSFALRVADPKAFRSGRHFAAWLGLTPKENSTAGRHRPGRISRQGDGSLRKLLVLGATAVIRFARPGRASPWLLSLLARRPTKLAAVALANKMARIIWAMMVSGETYRRPQQA

SEQ ID NO: 286584 - protein, 404 aa, unidentified
MYNAVGIDVSKGKSTVAVLQPGGVMVRKPFDVLHISRELNELSKYLGSLEGDTKIVMECTGRYHEPMATALHDKGLFVSLVNPHLIKNFGNNSLRKVKSDPADAKKIARYTLDNWAELRQYSSMDNTRTQLKTLNSQFSFFMKQKVAAKANLIALLDNTYPGVNKLFDSPVRDDGSEKWVDYASSFWHVDCVRKIGLKAFTERYRAFCKKHRYNFQPSKPEVLFNAAKELVAVFPKEKTYKLLIQQSIQQLNLASEHIEQIRKEMDSLASTLPEYTTVMNIYGVGKTYGPQLIAEIGDVSRFTHREAITAFAGVDPGVDQSGQHNSTSNRASKVGSARLRKTLFQIMTTLLQNAPENDPVYSFLNKKRSEGKPYYVYMTAGANKFLRIYYGKVKECLRNLEQNN

SEQ ID NO: 286585 - protein, 472 aa, unidentified
MSKGSGSGMTRGDRRRNARRERLRALLPRGGAVVGIDLAEEKQALAVIDHDVRVLARKTVRVKAFGLGEALDWAVGQARAKGFDRVTVACEPTGPRWMQVQRLCAERGLPLVCIQPLISHIAREQQDYTTHKTDESDCVMIARLAVELHCYIPEELDETWAYLRHLGRRRQQLITAQTASGQRIMDFLSVAWPAVTETCADPVESRTWLAALEVVTARCGADPGTLAAMGREGFTALIRGAVAGWGITRAHGPICARVFAALTDTEGAVTWSRRGLLRRVADELGDLKRTRAQLRRAEADMVAVLDELGLSRLADIPGLTAVGAAAILAETGDPHRYDSSSSLVKHAGMSPSDNASGAFSGQAHISRRGRPGLRLVVWRAVWPMLQYNPVMAAKYQAMTRAADAAATGAGPRQGTAAQAAARARRAKARVACAASLLRWIYCMVVHDTSWDPAVASGAASRHDTARTQAEAA

SEQ ID NO: 286586 - protein, 347 aa, unidentified
MRFYTGQHQFYCGIDLHARSLYVCILDAAGAVVLHKNLLATPDTFLRAVAPYRADLVVAVECMFTWYWLADLCAREGIPFVLGHALYMKAIHGGKAKNDKIDAHKIAVLLRGGMLPMAYVYPAAMRATRDLLRRRCHLMRKRAELLAHVQNTTSQYNLPALGKKIAYKANRPGVAERFLDPDVRKSIEVDLALIDHYDRLLTDLELTIVRTAKQHDVNTFYRLRSVPGIGKILALVILYEIHDITRFPRVQDFASYCRLVKCAKESAGKHYGYSGNKIGNAHLEWAFSEAAVLFLRANLPGQRYFATLARKHGKGKALTVLAHKLARAVYYMLTRQTAFDMNRFLQG

SEQ ID NO: 286587 - protein, 392 aa, unidentified
MAITQDLAIRDRFKLDNTREGLEFLVRRVRTEMVKSGCRGVMFAIETGGHYWRNIAYFLEEQGIPFRFINQYTLKRRREGKDLNHRKNDYRDSEVAAQLLCTGEFTESIIPQGVYAELRTAHNAYRRLVKEKTRITNLIKGLMDGLFPEFVQVFKDPCAVTALCVLSCCAIPSKIAGMTESEFAATIESNYHGRRLMRRKIVALHDKAISSIGIAAGARSVAAEIAFLVEKIELIKRQICFIEHTLVKLVDETEEGKYLLSITGLNYISVAGLLAELGCFKLYRTSKQMIKMAGSNPTESESGGKRGTHTPMSKQGRPVLRYCLWTSVIPILRFNTDFRAWAKQRRERPVHANPLCGNEIVGAALNRLLRISFALVKNQTRYRLPVLASVTI

SEQ ID NO: 286588 - protein, 315 aa, unidentified
MANEEGRFGGVDSHKDTIHVAVITAIGKPVGDHEFPTTQTGYRRAVAWLIEHGPVQTVGVEGTSSYGVGVATAAIQAGIKVIEVNRTRPAERRKQGKTDRLDAYRAARSMLSGEASTDPKNASIEPLRALNNARRSAVKAQQAAWRQIQALLVNAPSGLRDRYRDLPQAKLITTLTRVRPEQTREVTEIDTLYALRSLARRHTNLGEDIALEQRMRDRATAANPGLMAIKGVGPVVGAQLLITGGDNPNRLRNSASFAALCGTAPIPVNSGRTDRHRLSRGGDRQANAALHHIAKVQLSCDPKTRAYRDARLAKG

SEQ ID NO: 286589 - protein, 419 aa, unidentified
MPQIWAGIDAGKGHHHCVVIDADGAKLHSARVANDEAALLELIATVTDLAGSDECLWAIDLSSGGAALILGLLAAHALPVVYIPGHAVHHTAKAYRGDGKTDAKDAAIIADQARMRRDLQVLTVEDETRIELRALTGHRKDLVCDRTRAINRLRGHLLEYFPALERAFNYSASRASLLLLTGYATPDAIRKMGESRLARWLRAQGCRTAVATASTAVAAAKSQQSVLPGQAIAAELARRLALDVIALESRIAEIDQLIAARVDTSRAAELLRSMPGFGPLLAAEFLASTGADLSIYVSVDRLAGVAGLAPAPRDSGKISSNHHRPRRYDRRLLRACYLAAMVSVQQKTESRVFYDRKRAEGKSHKQAILALARRRLDVIWAIFRDDRPYSPPAPPGKNVSLTMSSTVPQHASSGAALAA

SEQ ID NO: 286590 - protein, 354 aa, unidentified
MSQTLNAAIAVVGIDIGKNSFHVVGHDVRGAIVLRQKWSRGQVEARFANMPPCLVGMQACVGAHHLSRKLNNLGHDARLMPAKYVRPYSRGQKNDFRDAEAIAEAVQRPTMKFVATKTADQLDLQALHRVRERLVSQRTGIINQIRAFLLERGIAVRQGQRFLRAELPRILATPPDVLSSRMVRTIEDLACDWRRLDERIEGLSDEIEAIARQDAGCERLMSVPGIGPIISSAMVAAIGAGDVFTRGRDIAAWLGLVPKQISTGDRTILGKISRRGNRYLRVLFVQAAWVVLIKPTVWERHGLKPWIEAARKRLHHNVLAIALANKLARIAWSVLARGRAFEARKINQAARQSA

SEQ ID NO: 286591 - protein, 449 aa, unidentified
MRKVVPVNKSKAYRASDVKDVQIESIIRLASGREAVVGIDVGKFHKFAVIRWSDGEFERPWKVRSPEQIGLFVERLQRLSQYCRLKTAMESTGTYGDVLRWKLTQAGLPVLRVGGKAARDYAEVFDGVPSQHDGKDAAVIAELAAFGKGRDWAHRSAKEEEAELAYWIDWLDAQQRVRQFWQGRLEGLLARHWPELTRLLGLSHVTLLELLAHYGGPAALAADGEAATQLSSWARLAIHSPKIVNVLASARSTIGVAQQAQDVQRMRQTASLALAAHREVQQASGRLAELASNHETLKRLGEAVGMATACVLWATVGDPNDYTSGGAYRKAMGLNLKERSSGRWQGRLKISKRGPSLARRWIYFAALRLVQDQAVRPWYEAKKARDKGRGRGAVIAVARKLALALHAVARRNEPFEAARLFPGASPGGRPGPLNRDVEGVKIAESEIPY

SEQ ID NO: 286592 - protein, 387 aa, unidentified
MSEMFNPHAPATAYDHNTTIVAVLELSGKNWLLGAVAPGLSRRTKRSFEARNVEAVVRALEQAKWESAKARFEVARIVVGFESGRDGFWIARALQQRGLEVYVMHAASIAVERRGKRAKTDRLDVDLLLTTLMGWLRGEPGRCTMAPVPSEEEEDLREAGRRRETLVHARLKVENQIASLLIRHGIEGFKPRLKNAETKLCELRTFDGRSLPANTTNSLRLLLAQHRLLSAQLKEIEEARQRVVNVAEPDRLQRMIQALARVVGVGVETATVLVHEVFSRSFKDRRALGAFVGLTGTPYNSGSSKTEQGISKNGNGRVRRMLSQLAWRWLRHQPESALAQWFNARLGGAKGRMKKVLIVALMRKLVIALWRLAETGEVPIGARLAAR

SEQ ID NO: 286593 - protein, 367 aa, unidentified
MQVLRYGIGLDVAMEKFDACISVIDVDQNVAVKATRSFNNSSKGYQQLYKWVASQCCLAVPIVFLMEATGIYHEALAYYLHSHGCSISVVLPNKAKKYKQALGLRSKTDGIDAKSLSRMICEQALPPWAPMSKTIYLLRAITRQIESVSKDIARTKCQLHAQKFAMYKNKEVISCMTQQLKLFQKQKDQLQKQVLHIIESDAALSEKFEKICRIKGVGKLSLAVIIAETNGFSLFEKVGQVVSYSGYDVIENQSGKHVGKTRISKQGNGRIRRILHMPAFNVVRLKQKPFNDLYRRVYDRSKVKMKAYTAVQKKLLVLIYILWKKDTAYDPSYWETSREKEPVPSFVKADLLTEQKNSSAVEQSYTR

SEQ ID NO: 286594 - protein, 356 aa, unidentified
MQTQVTKKIDFKGKELFIGLDVHKKSWSVTIVVDGIEHRTFTQPPDPLALNNYLQRMFPGGDYNSAYEAGFCGYGIHRELNAIGIKNIVINAADIPTSQKDKLQKHDPIDSRKIARALEKGSLRGIHIFDRELEELRSLNRTRFYLMRDLRRSKNRIKSFLQYYGVSIPAEYDNNLWTLKYVSWLKQIKMQTMSGQDAFNNLIRSYEYHREQLLILSRQIRQRMREYDNELYSLLKTISGIGPLTSSALITELGDINRFPHIDHLSSFVGLIPRVRESGETIHTGGITFRCNSFLRTLLIEASWQAVRMDPAMMQYYQKHVINSKGHKVIIKVARKLLNRIRYVMKNRQPYVTGVA

SEQ ID NO: 286595 - protein, 360 aa, unidentified
MQTQITAIPKLYIGMDIHKKSWSVHFRTDLFDHRGYTMPAEAGQLAAYVAANFPEHEVQLTYESGCCGFSAARYFKELGWHTVVVNAADIPKMNKQNYQKTDRIDCRNLSKQLQAGQLRAIYIPTESQDHLRSLVRQRNSIVRQLRQVKLQIKGMLLYLGIKIPVQYDNPNWSKEFQQWLKDIAWTNSTATYSMHSKLRILQVLHTEYLTAANQLRSYCRKHHNKDYYLLKSIPGIGGYLAAALLGELGDIRRFENEKQFSSYIGMIPAMRNSGSSESTLGITPRSKSLVRSYLIEASWVTIRRDPEMQAYYRKHFGKNVKNVIVKVAHKLVKRILSVIKQERPYRVNYIHQTQASLKLD

SEQ ID NO: 286596 - protein, 409 aa, unidentified
MKLFVGLDVSSQDAKVCFLNGDGDRLQAFTITNDLPGAITLKEKILDTASRSTCKTIKIGLESTSIYSYHPAMFLHNDKELRTYGSQVFMINPKQIANFKKSYSEMDKTDAIDAFVIADYVRFGRHTMSIVKEEQYIALQQLTRSRYQLVHALTKEKQHFLQHLSMKCSQFSQDVNSSVFGNAMMELFLEQFSLEDLIQMPLQELALFLQGKGRNRFGNPEEVAKSIQKAVKGSYRLSKVVEDSIDLLLSTSIRIMRTYQTQIKEIEKGIESLMSTLPQTLESIPGIGPVFAAGIVAEIGQIERFTDETKIAKYAGLFWKKYQSGRFTAENTSLSRAGNQYLRYYLVEAANSVRRNVPEYRDYYAKKAAEVPKHKHKRALVLTARKLVRLVDALLRNNQIYAFGRSADR

SEQ ID NO: 286597 - protein, 363 aa, unidentified
MTNQKRFIGIDMSKRSFEVAIVSNDDPRILRKKYKTTQEDRQEFVFSLRKDDVVALETGNSSFVLAKLIQKQVGCTVYVLNAGKLHIIFKSLKKTDKEDALRIAKFIQRIPEEELPTVTIPSDEEMAMRSSATELIRVDRSRTQSINALHGLLWNNGITEFGRNDLKYKKNRDKVLQELPVEYRAQGIRLLKLIDVYEQCLGEIGEEQKEVLNNNREETTISISMLGIGPKAAFVILAYLGNMERFSNSRQVGYFSGYTPSIDMSGLQERYGSITKRGPKQLRRVMNQAAWAAIRSNDGILLRAFYDRVRSTKGKKKAIVAVARKMLEILYILHTRKELYQSPVVADHSRVIAKLKRYGLSFE

SEQ ID NO: 286598 - protein, 357 aa, unidentified
MVLMVGVDVHKDTHTAVVVDQLGVRRAQRRVQATDAGHLELLAWVQGVGEEFAVAAGPEIEWAVEDCRHVSLRLERALLAAGQRVRRVPPKLMAGARSSAREFGKSDPIDATAIARAALREPDLPLAEHTPASRELKLLVDHREHLVAERTAMICRLRWHLHELDPELERSIPARGLDKPTRLAWLAEHLPAAHPGLVGELAAELVGDIAARTTRIRALEREIARRVAVLAPQLLELPGCGPLSAAKLLAETARPGRFRSEACFAMHAGVAPIPASSGRTDRHRLARGGNRQLNAALHRIALTQTRLPESLGRAYYDKRRARGDRHNDALRALKRRLARVVFNLLRQTEPTPTPAAA

SEQ ID NO: 286599 - protein, 463 aa, unidentified
MTPHKDYGLDPRPPAPLLPPSPLLADALQVCHPHAAGIDIGEAEHWVAVPPHCDPQPVRRFGTFTADLDALADWLLDCGVTTVAMESTGVYWIPLFELLEARGLQVLLIDPRQAKRVPGRPKTDRLDCKWLQRLHSDGLLAGAFRPADQVCVLRSYLRHRQMRITSAAHHIQHMQKALEQMNLKLTQVVSNITGATGMAILKAIVAGERDPQRLAKLRNAHCHHDEADIAKALQGTWRAEHLFALQQAIALYDFYHQQVTLCDQQIKAHLETFADTSDGQPLPPKAHRHKKRNEPRFDARTPLYRMAGVDLTAIEGIEEGTALVILSEIGTDMHRWPSVKHFCSWLGLCPQHKISGGKVLSRRVRPGAHRVTVALRLAARTLHHSQSALGAFFRRMKARLGTPKAITATAHKLARLVYSLLRHGSAYVQQGLDAYEAQYRERKVTTMAKQAKALGYTLVPLAA

SEQ ID NO: 286600 - protein, 376 aa, unidentified
MSKQLQTSATLLRYCVGIDVSKDTLQVCISVIDTHGKVTIKGTCKVNNKVAGFDSLINWVKKHCKEQRLPMRFVMESTGVYHEQIAWYLFQHDLAVSIVLPNKAKHYLKSLGHKSKNDKIDAKGLSQMGLEQNLTLWRPLSKNIYSLRVLTRQHQRLQELKNQSENQKHAVLHSQFSDKFILKQLDKLIKLYEQQIQQIGQEIVKLLDKDQILKTKIDKICKIKGLALLSVSTLVAETNGFEGFENVRQLVSFAGYDVVENQSGKRAGKTRISKKGNNRIRRILFLPAFNAVRHGEPSCQALFKRVFERSQIKMKGYVAVQKKLLTLSFAIWKSNEEYNPMHYANNVKELETTDKKLVPINGTTQDVTIQKVLLLQ

SEQ ID NO: 286601 - protein, 462 aa, unidentified
MAKSRAKPRRRNQAAPTALPRVNPNAAGIDVGGAFHYVAVPADRDDQPVREFAAFTGELYRMAEWLKACGIETVAMESTGVYWIPVFQVLEERGFEVKLVDARQLKRVPGRKTDVSDCQWLQQLHSFGLLAGAFRPDDQVCVLRSYMRQRAMLVGYAGQHVQHMQKALVQMNLQLQYVVEDITGATGMRIIRAILSGERDPHRLAALRDERCKSSALTIAKALQGDWRQEHLFALAQAVELVEAYQAKVAACDERIQAHLQTFTDRSDGQPLPKGPPPRADRHDLSFDATAELYRMTGMDLTAINGLQAHTVLKVLSETGLDMSKWPTSKHFGSWLGLAPNNRVSGGKVLSRRTARNANRAAAALRVAAQALHHSKSALGAFLRRKAAQLGMPKAITATAYKLARIIYAMLTEGTEFIERGQDYYERAYQARVLKNLSRRAKELGFCLVKPDQSAAPQPAYA

SEQ ID NO: 286602 - protein, 337 aa, unidentified
MYYVGHDGHKDISVFCITSASGNVKETFEVPATPKGMDVLIEKMKGKKFKVLAEASTYTIDLHDYLVSKGVESYLAHPHALKLITDSCRKTDRNDSKTLASYLRLWDKHELDISISFVVDGDNRSLRELCRLRESISEMKGSTMQQIKSHMRINGQYVEFEDLKTIKARKHIREHFCEDLCLMMLLDMYVVFEDKGKILDAEIERRFGDRREVQLLATIPGIGITTAAQLMSMIVDVSRFPTADKMRSYFGMAPTVRDSGGSLKHGHITRRGDPMMRKILSRVVAQLIKNAPGDNLAVYRESHRSAMRPGMLMVACMNRLLDIIYAVLVRGTPYIHM

SEQ ID NO: 286603 - protein, 348 aa, unidentified
MGEISIIGLDLAKQVFQVHGARVDGSVVLRKKITRGQLLAFFSKLPPCIVAMEACATAHYWARKIGEFGHEIRLVPPAYVMPFVKRQKNDVADAEAIAEAATRPTMRFVEPKTPEQQARAMVFRTRELFVRQRTQTINALRAHLAEHGLIAPKGLWNLSSIRQLIDQAEDTVDGLIVETARIYLEQIETFSTRILSLEAVLKKEAARSGASSRMMTMPGLGPITAMAIEAFAPTLSVFRRSRDFAAWLGLVPRQHSSGGKQILGHTSKMGQRDIRRLLIIGAMSIIRWASKKTPVHGTWLHAMLLRKPRMVVAIALANKMARSLWAMQTKKEDYRDPLLTVAYVKPAS

SEQ ID NO: 286604 - protein, 388 aa, unidentified
MQIVADRAAAPTAIQTDLRAIFVSLELSRSSWLITSLSPGGGEKMSKHSVQAGDIAGLLRRFTQLKEKARARTGREFPIITIQEAGLDGFWIHRVLQSKGIESHVVDPASIATSRRRRRAKTDKIDGETLVRTLLAYKRGEPRVCAMVKAPTPEEEDSRRLCRERKVLTAERVLHVNRIKGLLFCQGISGYEPLRRDRHERLEELRTGDSRPLPEHLKAQVNREIDRLELLLKQIKAVEAERDALLVAAHTPVAMPASMLLNIRGIGPEFTAVLWSEGLFRHFDNRRQVAAYAGLAPTPWQSGAVDREQGVSKAGNPRLRTTLIQLAWLWLRNQPHSALTLWFHERVSRNGGRLRKTTIVALARKLLVALWKYVTAAVVIEGAAMTGA

SEQ ID NO: 286605 - protein, 407 aa, unidentified
MTAVMIGVDPHKGSHTAVVIGPAEEPLGEIRVRASAAQAGKLAEWAAAWPERTWAVEGAAGVGRLLAQQLVAAGERVLDVQPKLASRVRLLQAGDTNKNDPNDALSVAVAALRSRTCRQVAAEDHPAVLKVWSKRHRDLSRLRNQVACRLHAVLCDLVPGGHPKEISAAQAARILGQASPSGAVELARAELAAEFLEDMRRLDTQLRDTRKKLAAAVRASGTTLTEVFGAGPVIAGTIIGDIADVSRFPGRDHFASYNGTAPVEVSSGNRKVHRLSLRGNRRINHAIHMAAITQIRHKHSDGRAYYEKKLAEGKTHKEALRSLKRRISDAIYSRLLADARRTGQQPARAAREGNQGTTLTPARPAHTPNAGSSDKPLPDLGTTIRPGTRAATPPPSKPTSKKNPTTT

SEQ ID NO: 286606 - protein, 334 aa, unidentified
MNFKNFIGIDVSKGTIDIALLSESKTNSVVSAEYGNDFKGLVNLEEFVKKQGLNMDETLFCMEHTGIYCRLLSHYLVENKYHVWLEMPVQIIRSLGIQRGKNDRIDAGRIAEYACLKKDKAVLWQPPREMVIQINDLLTLRDRLIESRKSLKQPIKEFIDAGFRDTAKLIENMCLNTLKALDKEIEQIEKELDKIINKDSNLKKLYKLATSIPGIGKITALTLLYFTNEFKLYTNANQLACYCGVAPFEHTSGTSVKGKSRVSSFANKRLKKLLHMVAMSTISCDKQLSLYYKRKVDEGKNRMLVINAIRNKVLHRLCAVIKRGTPYQVEYQIA

SEQ ID NO: 286607 - protein, 348 aa, unidentified
MSKHSVPAGDIAGLLRRFAQLNEKARARTGRDFPIIVIQETGLDGFWIHRMLQSEGIESHVVDAASILTSRRGRRAKTDRIDGETLVRTLMAFKRGEPRVCSMARAPTPQEEDRRRVCRERRTLVGERVTHVNRIKGLLFAQGVFGYQPLRKGRREQLEELRTGDGRPLPVHLMAQIVRELDRLEVVLEQLKTVEAERNALLKPATGAAASPPAMLLELKGIGPETAAVLWSEGLFRQFDNRRQVAAYAGLAPTPWQSGSIDHEQGVSKAGNPRLRTTMVELAWLWLQNQPASALSLWFHERVRRLGGRMRKTTVVALARKLLIALWRYTTAGVVIEGAVMKSAPATI

SEQ ID NO: 286608 - protein, 420 aa, unidentified
MISVGIDVSKGKSMACFLDSDGEILYKPFLFEHTFSGIQRLTDRIQEQEKNGPVKIIMEATGIYHLPVAIHLHEQGFDVSVVNPLSTSRYRNIDVRNVKTDKADSVSIANYGRSYWHTLPAFKMHTDEYFWLNDAADDYLTISKSQNRLDLLFKNKLERSMPGIDKELASLNKETGKNKLLDFVMQYPHFAAITAMSEAEFIEDFCIWARKKGYRASKSKATTIYSLALNGIPSTPDSQYNRDSIQMYADLLREAETALIGILARMREIAKTLPEYELVGEMGGVGNILQVMLIAKIGDVRQFPKKGALVAYAGLDSPPNQSGVNPGTGMPITKRGKSKLRKILYQLVMTLLSHEEPADNVVYNFVKRKVAEGKPKKVAIIAGMAKFLRQYYGRVMNLYRQSGLLKFGYTRASQWKLPTA

SEQ ID NO: 286609 - protein, 430 aa, unidentified
MTNLKHTPSDSVLVAIDVSQRRNDVLIETPGVSRHRRLVVLNNRVEHDRFIDRLRDIGRPVIVGFEATGNYHRPLAYRLLQAGFELRLVSSVALARTREALHNGWDKNDPKDAQIILHMLKIGATQTYCDPICSGINDIQELSKTHEVISKAKTELWHRLLTHYLPLYFPEIARFAGNSRSDWFLAFLEQFPTPAGITVLAKEHFIDQAWDVVGRKVSKARLLGDIYETARSSIGLPVAIDSPAVTMFRLIIAEGRSLIRQRDAIEQQAHTALADNVDYRRLRQIPGIGPIIAMTILAEAGDLRRFRHHRQFLKFCGLDLATHQSGQFRGQTKLSKFGNARLRRAFWVAAQVAIRQRDNGFRAKYERYIARDNDNADLKRKALTAITAMMARTAHAVIRTGSDYRPFFEGPMPSGRTSLSRCREGATATL

SEQ ID NO: 286610 - protein, 402 aa, unidentified
MISVGIDVSKGKSTVCILKPYGEIVSKPFNITHTQKDLSELSSMLFRLNDEVKIVMEATGIYHLPVLTYLQEKGFFVSVINPYLMKSYRNESLRKAKTDKIDSRIIANYGIDHWFKMKEFQTSGEIYEELKLLGQQYRHYMKLHLLSLAELTHLLDLTMPGIKNLLASWNETNRKDKRSDFVERFWHYDVITSMSEQEFTEEYILWAKEKKYVPSQEKAKVIYTLAQESIPTLPSETSSVKILVTEAVRVLKEVDATLGLILSRMQEIAKTLPEYSVVREMGGVGNTLAPKLIAEIGDVRRFRNGKALVAFAGIDPPPYESGQFVGCNRKISKRGSASLRKVGYETMRSLKMRSRPEDPVYRYVVKKESEGKSKKSAKIAGLNKFLRIYYARVTELYKNIII

SEQ ID NO: 286611 - protein, 343 aa, unidentified
MEAYAGKQFVGIDLHRRRTVIVRTTEAGEVLEAVRIVNDVQRLASVMARAGDCPEVVLEATYGWYWAVDALQAGGASVHLAHPLGVKAFEYRRVKNDFRDAQDLADLLRMGRLPEAWIAPPPTRELRELVRHRAKLVGLRSRCKAEVHAVLAKCGVQVLMSDLFGVWGTELLDRLELPAPYAARIASLRRVMDDLDFEINLFAGIIRGRMAHEPGYTAVQKIPGIGPTLGAVLVAEIGDITRFASASKLTCWAGLTPKHHESDTHVRRGRITKQGSRLVRWAAIESVKTVSKTSEVGVLRERVADRRGRNIGSVAAARRQLELVFYALRDGHVRALEHLPRVA

SEQ ID NO: 286612 - protein, 339 aa, unidentified
MDYFAAMDVSLEQSSVCVVDGTGKIIREAKVASEPEALVAWFAESGLKFTRIGLEAGPLSRWLHAGLTAARLAAILIETRHLRAALGAMKVKTDRNDARGMAQLIRMGWFRPVHVKTVPAQEIRALLTGRKLLQIKLRDIELGIRGLLRGFGLKVGKVSEGKYDARIRELATGHPMLEPVVAAMLQARASLRAEYAKLHRMLLRIVRADAVCRRFMTAPGIGAVVAVSYRTAVDDPTRFHKSRDLGPYFGLTPSKYQSGEVDRTGRITKVGDVMVRTALFEAAPVILTRVTRFSTLQALRIAKQRGFKRAKVALAGKLAVVLHRMWVDGTDFRWRKAAA

SEQ ID NO: 286613 - protein, 479 aa, unidentified
MKKIGFLAADVSKGYADFVLWDQQGNLLESAFKLMDNKEGHQQAKQLVKEFMKHYELTEVYVGMESTGGYENNWFLLFRSMQSQGVSQVMRINPKAVKAMGTARMVRTITDAVSAENIAQYMLSFVKENKPVNKQDNQFRVVRHISAWTKNVNKQITQTSNHLEKIIYQTFPELLVYCRHGFPDWLLHMLQKYPLPSDILKAGKSRLTKISFITEPKAQSIIQKAKDTVAGSAADDLLAATIRSMITVLLCHRQQINMHKKALTKQFGEAQEVQLIDTMPGITAETAVLMMIEIESVDDYPGAKQLCSHFGMHPTFKQSGDGTWAARLSKMGRSSIRGVLYMPAITAIRTNEYFKTLYAGQRAKGKKHKQAICVVMHKMLCMIYGILRSKKPFDLSLHTKNQQQGEQKQKEAEKTAQQRKKERKNKRERYITANPLEAPISRKQTKQIKKELLAPIDKNQDIRGPEALNKDKQINCLSS

SEQ ID NO: 286614 - protein, 403 aa, unidentified
MQPSAGIDWGSEQHAVCVLDATGTMLSQFIVSHTAAGLKDLTQRLARLGPPDQLRVALERPSGVLVETLVAAGHPVVPIHPNAVKASRPRYRAAGGKSDPGDAYILADLLRTDGHRFPPLRPASDEIKALRALVRSRDDLVAERCALANQLRSLLESFWPGAAVLFADVDSPIALTFLDRYPTPQSAARLGVKRLAAFLAQHAYCGRRTPEELLARLRSAPMPLAGEAEAEAKGELVRALATVLRTLVEQLQKLSARLEHAVAQLPDGQIVMSFPRAGKINAAQILAELGDDRARFQSDQHLAAEAGVAPVTHASGKSRGVTCRWACNKRLRFALTTFADNSRHASPWAAEVYHRARLRGADHPHATRILARAWTRILWRAWQDRTLYNPLQHRAAAALAAGG

SEQ ID NO: 286615 - protein, 427 aa, unidentified
MGNDNATKYREFCQFRRQIRGSSEYLIVGIDVAKSPHHAFFGTARGQSLLRKLLFENSRAGFEKLMERVDQLKVGQGLGKVVFALEPTGNYHKPLSRWLQDQGQLLVLVSNHAISENRQTLDGRWDKNDTKDSANIADLVSQGKCLFFEEPGEDLVELRSLLSLRKRLKKQSHSLRMQIRNGLVAKHFPELDRCWGNCMTENLAIVRWCLDPRMIASLSFDSFVRRVTTKDRGLRQVKRLRTIHELAATSIGLPVDAAAVHEAKTLVERFNDLCERIEQTESKIEVVCRRFKAYRRLRSIPGFGPYVSSQVLARIGDPNRFAGRRQVIRLAGFDLNAKRSGKRSLSAVPVISKRGNSDLRYALYQAATIASYHHAAFRALFTRYQEGRQKERGIKTKMRVKLAAKMLVIAWTLMRADTDFDPNKLGV

SEQ ID NO: 286616 - protein, 367 aa, unidentified
MKQPPVAGSEPVTPEGGTCGRARDRSGVFLKPEQLHGRESPHEQGREWRMAQKTRFVGLDVAKSKVDACIRSEGLRLSAPSTPEGRAGLVAWVRANRVGRAVMEASGGYERGWAEALRAAGVEVRIVDPKRVRHFAKAAGRLAKNDPIDADTIAWFAEAFPDREAQPHDPARDEIDRLVAARTALKDAEDRIKQQGEHRPPAVVAKALAAIAKTIRAELRKVEGAIAAKIKANPGFARRAEIIASVPGLAAQTAAGVIAWLPELGHVTNEAAAALIGAAPYDDDSGGRKGQRHIKGGRRKLRNLLYMPVMGAATRHNPMLKAHYQRLRARGKEAKVALIACMRKLIVILNTMLARDQTWNPPVRAAR

SEQ ID NO: 286617 - protein, 436 aa, unidentified
MPKTQTSQPLAESAPKIQFFCGFDWARHDHYFVLKTRSHRVLHEGYFQNSASGFQEFFECLEAHRNGETVALIIESTRASAAVLLGMKDWIRLHPVNPAVTRKLIELDGSGKGKNDARDSNLLCDYVIGNHENLRVEHEHDPDILCLRELVETEDELVAERTRLKNRIKAQIAQICPDLAEMVCGKLDIKAYSEYLLRFDPREPVSDAKVKKHLKEHHVFGAKTLDNFLEKHRALQTLPLDGKLLAVHLEKLRSLVRQLQLIQGELCSCQSEIHAFFCALPCAEIYRSMAGLGDCLAPRMAALFGKNPEKTFANKREVNAYFGQSPVTESSGGKAKDRKKAGEHEKKTVNRRRSCNRFARQTTYLWSSSVARLGDDHAPWQRAFLKRCKERGDLRATRYRKLGQKLVAVLYTCLINNEPYSHDRYMNNIHTKPEIV

SEQ ID NO: 286618 - protein, 318 aa, unidentified
MESTGTYVGVDVSSDTLDIAAHPRQQVKNFRNDDAGISGAVTCLKRLAPVLVVMEATGGLETSLAAALAASGIPVAVVNPRQVRDYAKSMGKLAKTDTIDAQVMADFAAAVHPEPRPLADSQTQQLKDILTRRSQLNEMITAEKNRLYRSRRPVSDHIKAHIAWLEQELDDMNSNLRRFIQESPIWREKDNLLRSVPGVGPILSSTLLAELPELGTLNRRQIAALAGVAPLNHDSGKFRGKRTVWGGRAKVRAVLYMATLVATRRNAVIQCFYERLIAAGKAKKAAITACMRKLLTIMNAMMKHRTPWHYISNQAVIS

SEQ ID NO: 286619 - protein, 418 aa, unidentified
MFKIFRKNCCGLDVHKTWIYACIGITDANSRTEYFQARFSAFSKGLQELSHWLDKYNCKEVCMESAGKFWIPVFNILEKTCLVTLAHPKYTKPQKGNKTDRKDAKWICDLFMCDMIKPSFIPPPAIRHLRDLVRYRGKLTNMLTGEKNRAQNCLTVSNLKLDDVFADVFGKSARSITEYILAHPGEPFDVAQFVDRRCKSPLSEIQAAVDGAVSPEQAVKLRQCLDHIDQLRLLRQRLEQEILRICEPFADILQLLRTVPGLGNDPMTAIAVLSEIGVDMSVFPTAKNLCSWAGCCPRNDQSGAKVKSTRISRAGSYLKPLLVQVANALIHSRKHPEFAERYRRIKARRGHKKAIIAVCKMLLTAIWNILSKLVPYSPAGFLSDSHDLPPSKSLTVAQGLSLLRRRGFILTDDPLSAP

SEQ ID NO: 286620 - protein, 330 aa, unidentified
MGKTTDAGIDVSKAVLDVAVRWDERRLETARFGNEPAGHKALVRWLTKGGRTVRVVLESTGTYSLDVALALHRTPGIAVMVANPRAIKQFTGALMQRSKTDLTAAVALRDYAIRMPFVAWKPPVAHVLELRGIARRIAALVVERTREHNRLHALTATAEASPVVSNDIEVNIRHLERRGELLASQALALIGAHEDLQTSFELLVSVPGIAAHTAVQLLPELLVLPDTMTVRQWVAHAGLDPRAHQSGTSVDKPARISKVGNAHIRRALFMPALVAVQHNRHVRAFFDKLVARGKTPLQAYVAVMRKLLHAIYGMFTTRTPFLAAKFHAPA

SEQ ID NO: 286621 - protein, 346 aa, unidentified
MAYYVGLDVSVKETSVCVMDDKGGVVARTDISTDPDLITNFISNHAPNVERVVHESGILAIWLTRELEKRGVPIICIDARLAHKALSGRINKSDQGDAEGLAQLARTGWFTQVHIRSEASERVRVLIGARERLIRMRKDLEGHVRGVLKVFGVCMKSVEKGKLRKNFRDQLVVAADTDPAIEMMSETFIPLHKTLCIARDALDEEVRIMARESDLARRLMTVPGVGPIVALAYIATLDDETRFRKAIDVGAFLGLTPKRHQSGEVDWSGKISKCGDCDMRRLLYSAASTLISCTRKPSRLKEWATRLAERKGHKKAAVAASRKIAVILHCLWRNETVFEPGMEGAS

SEQ ID NO: 286622 - protein, 320 aa, unidentified
MNTIGLDISQKTIDATLHKTDGSTYYTKVGNNREGFQSLKDWIKVNKVRKCVIGMEATGIYYEAAAENLSETYTVYVINPLKIKDYGKSQFNRTKTDKADSNLIAEYTKRHADKIIPYSKPKNRYLQKLINLKQQLKDHQKQIKNRLHSSDDEMIQAIHQDLIQAYQEKIDQTQTAIEAQIKEQAETDGHYRNLQTIAGIGKDTAAILYAQLTDKNFQTASQFVSYAGLSPQTEQSGTSVNKKGRLSRYGHRRIKRSLYMPALVAYRTGAFPQLVRNLTNAGKPKMVIIVAIMRKLAKLAYYIVKTGKPYDSTRHKAAQA

SEQ ID NO: 286623 - protein, 333 aa, unidentified
MRGDDVGKVLCERKVRTEPEDIAVLLTSIGGDYVRIGIEAGPLSQWLVNGLTEADLPVVCVETRHMKALLKAQQVNKSDRNDARGIAQMMRVGLFKPVHVKTLASQERRMLLTSRKLLQKKLLDVEADLRGTLRNFGLKVGVVSPRGFEARVRALVEGFPRLAAIVEPVLTVRQTLRQQFAVLHKMLLGLVRQDTVCRRLMTAPGVGAVVALAYRATVDQPQRFLHSKAVGAHAGLTPKRRQSGETDYDVGISKSGDLMLRTLLYEAAQSLLTHSRGQWSWLKAWGLRVAQRRGMRRAAVGVARRLAVILHRMWVDETDFRWTRANKEAVLAA

SEQ ID NO: 286624 - protein, 317 aa, unidentified
MNNQNTTTWIGVDISKKELEIHCYDSAFKLPATAANTKLGINKIISKLKNCDNPHLVFEATGGYEKHLLVLLQSEGVKASRISPSLARNFAKAKGLLAKTDSIDAQILTDYGIQFSPRETAPLDPIFEEIQALIKYRRHLNDELHRERMHLEHLLPKSVESMVKSRMKSLQKQMEKVISMMINLKEKSSSLDQAVELLTDTKGVGDNSALSLLVAMPELGKISNKEAASLAGLAPFNRDSGKMRGQRKIFGGRREIRQSLYMAALSGSRYNPVLKEFYQRLLEKGKPKKLALTAVMRKLLCHLNSLMKKHLQKPQSA

SEQ ID NO: 286625 - protein, 344 aa, unidentified
MEYFAGLDVSLRSCAICIVDTKGTVMFERELTCEIEDIADCLNSFGCPIERVGFEAGTLSQHLFYGLSGEGFDVVCMEARQVNAALSAMRNKTDKNDARGIAHVLRTGWFSPVHMKSREAHGVRALLSTRKALLNKTIDLANEVRGLLKIFGLRLPKTVQHGSFDGLVRPMIEVDEILAHAIIPLLDARRVLYQHFLELDRRVKRAAAQDEVCLRMMTVPGVGPIAALTFKAAVDDPARFKRSRTVAAHFGLTPRRYQSGEHDNPGRISKAGDRDVRSTLYAAANALLMRTMAGSQIKSWGMRLVRTKGRRRAVVAVARKLAVLLHRMWADGTEFRPAEVEGTA

SEQ ID NO: 286626 - protein, 431 aa, unidentified
MDIVHPRVAGIDVHKKVAWVAVRLPGEAPGERKVILKRFKTFWRPRQKRAAWLAELGVTDAAVESTGVSWWPVCHALAGAGIEVCVCNAAHMRDVPGRKRDIADCQWIAELHEHGLLRPSFIPAAEVAALRQRTRYRKRLIEQRTSEGQRLAKVLEDAGIKIDSVASRLPGVSGREMIEALTAGERDPGRLADLARGVLRRKTEDLQMACDGRFTAAHAQMCRLHLDAHDHLTAAIAELDALIAEAAAPFAAVIARLMTIPGIGQRTAEVIVAETGGDMTRFAASARLAAWAGLAPGDNESAGKRKHAAARKGNQHLRAAMTEAAWATARTRTRPGARFRRLARRFGKGHEKKAAVAVAHTLICIAWAVLSRGEDYAEAGEDYYEQRDRRNREHLIRHHQQALARLGCQVTLTPPGDGPPPADGPGQQPAA

SEQ ID NO: 286627 - protein, 389 aa, unidentified
MYYVGIDIAKYKHECIVINDKHRVIKKSFTFSNDSSGFNSLLTVLAKLKAKSKIKIGFESTGHYATNLKVFLSSHKFTFMEFNPVLIRKFISTQSLRKTKTDKIDCEFIANYLMTVEYKPYPNRFYNIYSLKSLVRLYDSLVRNRTLYIVKLTNLLDHIFPEFKPFFNDRLGETALFILTNYPSLDKIANMSNDVFTDLHNISRGRFSSNQFVKLKTLAKNSIGNSNPFFELQLSSLISLLNECNKQVDLLKAQINKIMKALKPHILSIPGIGSITAAIIYSEIGNFKSFSSADKIVAFAGLDVGYYQSGIAEYTGKMVKHGSSLLRYALMNATIPLLQYSPTFSSYYAKKRSEGKSHRVALSHLAKKLIRVMFTLETKSIDFNSKLLI

SEQ ID NO: 286628 - protein, 414 aa, unidentified
MERAINKSCGLDIHKQFLIATILSRSGEKQQQRFTRDDDGILELKNWVTSEKCDVVACESTSDFWVPIYDSLTNHLPVIVGNARDMKAFTHKKTDKIDSEIIAKLALNQMVQPSRVFPKNHREFRSFVRLRLTLVRKRTDIKNEAHAILSSEMLHLGNVLKDIFGKNGRAILSGISSGKAVDQIIESLSPNVRKKSTQIREILDREISHTAAIRLQTCLNLIRHFDDEIKLLEREIFNYAYGKHKDKMEILMSVPGIGELGAAILIAEINDFNDFPSGDKLASWLGLVPSVYQSADKYHNGRITKRGSKVARWILTQIAQAAARKKNSKLKEFFNRKKKSIGHSKAVIALARKIVTIIWHLIKNNEMYEDETGYEKGEIQKRKIIETEVFSVDERIRIISGIFAIMGKEDREGT

SEQ ID NO: 286629 - protein, 314 aa, unidentified
MNNGTSFAGIDVSGDHLDVHITPPGEAFRVENNPTGIEDIARRLRKLRPDLVVLEATGKLEIPCLDTLRRAGLPVAAVNPRQVRDFARAIGRLAKTDAIDAEIIARFGQAIRPQVRPIPTEEERELDEMLGRRRSIIQMLTAETNRLKRTFSPRVATDIKAHVRWLQRALEKAEDELTETIRSCPAWQPRQDLIRSVPGIGEVTARTLMAEMPELGSLTDRQAASLAGVAPMNRDSGRMRGKRTIRGGRHVARRALYMAALTATRFNPGLRIFYRRLLAAGKPKKVGLVAVMRKLIILVNAVLTRGTPWTPAAS

SEQ ID NO: 286630 - protein, 318 aa, unidentified
MSDSVFIGIDVSSQTLEIASSAQAKTWQVSNDTSGIEQLVSQASALAPGLIVLEATGGYEFEAACALQAAGLAVAVVNPRTARDFARAMGALAKTDALDAHMLAAFARVLHQHPERERFVKPLADAELQQLQALVLRRRQLVQMLTSERQRLRLAHAAARPSIERVIEFLKKELGDSEAEVAAHVQRHHAQLAQALASVPGIGAASVAVLLAELPELGKLDRRRIAALVGVAPLNRDSGQMRGQRSIWGGRADVRRTLYMATLTAVRHNSALKICYERLLAAGKRKKVALVACMRKLLTMLNAIAKHGSTWDSTMHIA

SEQ ID NO: 286631 - protein, 378 aa, unidentified
MNRIIKIGMDVHTTNYTLCIFEPSFEHDATVHCITQVKPEVKNIIHVIKTFKKKHENEELNIVCGYEAGCLGYSLYHELKEKGIECVILAPTTMKTEKGGRKLKNDYRDAKMIAECLAYGGYSAVHVPTELDNSVKEFIRMRDDIKENLKSIKQQIIAFLTRNGKQFEGKSFWTRKHIDWINTVSFSEPLLQDTLKEYMIEYNHLCDRVETLDRQIEEISVKEEYVEKVQQLQCLIGIKTHTALSLIVETSDFNRFKKGNMYSAYLGLIPGDDSSGGHEDKLGITKAGNNHLRRLLVEAAQGYTRGRVGFKSKDLKSRQEKCSSEVVAYADRANERLRRKYYRMTLRGKKFNVAKTAIARELACFVWGIMTDHIDLCS

SEQ ID NO: 286632 - protein, 355 aa, unidentified
MTSTKYIGMDVHKESISIAVMNAAGKIVMECVIETKANMILQCIDGLRGDLHVTFEEGTSAAWLYDLLKPHVTELIVCDPRKNASMREDSQNDKIDARRLAELLRIDHLSPVYHGEHGLRTLKELVRSYLTVTKDLVRVKTRVKAIYRSWAIPCNGKEVYAACHRAEWLEKINELGVRRRAEFYYQQLDALRLLRQEVRRDPLAESKKHQAWKRLCQIPSLGPIRAAVLLGILQTPHRFRTKRQLWTFSGFGIETHSSADHRYVEGQLRRSKKPASIRGLNQNHNHDLKNLFKGAALVASSKPGPFQEFYAALLAKGMRPEMARLTLARKIAAITLTVWKKGANFDAQFLKPQTA

SEQ ID NO: 286633 - protein, 312 aa, unidentified
MDAIFVGIDVSKDRLDVAVQPIGESFSVSRTGAGIEELAKRLKAMSPKVVAVEATGGFETVVAAGLAGANLPVVVVNPAQVRAFANALGKRAKTDPIDAAVIARFAEATKPQIRQLPDETTRMLADLVARRRQIVEMIAAESQRARRLTSARLKKSIARLRKALEKELADLDGEISDHVRGSPTWAEKEDLLASVPGIGPTIARSLIAELPELGSLDRRQIAALVGLAPWTRQSGQWRGKSFIGGGRANVRRVLFMGAMVASRFNPTLKLFRDRLVAAGKPKLVAIIAVARKLLTILNAILRDKSPWQLKNA

SEQ ID NO: 286634 - protein, 408 aa, unidentified
MKDSGKRYIGLDVHKYYLIAIGVDDELNVVLPARRVELSHLDSWMKKTLTKQDGVVLEMTTNTWQLYDELCVHAGSVLVVHPPHVALITRSQVMNDKIAASILARLLAKGLLVGVWVPPQEIRELRGLVAQRKKMTGLATQAKNRLHAVLQRHHGVLPKGNPFGTSNKEWWQLLPLGKLEKLNLQSDLETLQFAEKQVKRMTSMMEEIANQNEQVTRLLQLPGFGVVTAVTVWAAIGDIQRFEDAQHLVGYAGLGMRVHDSGMTMRSGKITKAGRRDLRTVLIEAANVVANSHPHWKAELARLEPRLGRNKAIVAIARKLLVAVWYILAQHKTDRFVQPEAIAQKFLKFAYQLGKENRPQGQSAAQFVRQRLDALQLGQELTSIAWGSKKPIPLPPSTNKVSDVPNTK

SEQ ID NO: 286635 - protein, 369 aa, unidentified
MTVYIGVDLHKTQFTVHVRVGDRIESLSEIKQYPTTAAGYTKFLERIAGYKAVDFAVKIGVESTGNTRFFKNQVEKAGAEVTVINTLKFKVINESTKKTDKHDASTISWFLSKDMLPESHICSKETENLRRLLKSRERLVRSIVGQKNEVHALLVSMGLDDELRSLQSKKGRQKVLDTLLSHSDLVLEAQSVKLIFQIIEQMIESVKMIEKHLSELTEDDAMVNRLMTIRGCGKITAWIIRAYTEDIGRFANAKKYAAFCGLVPWVQDSNESVRHGKITKRGPQELRTAYVQLVLGIRRCKDTWGWRIMQRLDYMKKNKGSGKSIVAAARKMAEIVWALLTEGQDFDSKKMMGTYKPLTLTEQALAAMN

SEQ ID NO: 286636 - protein, 425 aa, unidentified
MNYKQNEKINQVKESTLVVGIDIGSTTQYARAFDWRGIELGKVFTFSNSREGFESFKAWMQHLQDKYKKLDAIVGIEPTGHYWFDLGAYLEDEGILLVMVNPYAVKQTKELDDNSQSKNDRKDPKVIAKLVTEGRYSAPYTPDGVYADLRIMVANRKRLIREMTQIKNRFARWFAIYFPEYTDVFGDYEAQSSMLLLKKVCTPEAIVELGAEKINQIWRDAKLRAVGMKRATTLCETAKRSIGLKKGSSAARYEMKLLLEDYEYKKAQLDAVMEEIEKLCRKIPESEQMLAIKGIGVITVAGFLAEVGDVRRFESPRQIQKLAGLSLRENSSGKHKGQTSISKRGRSKLRAVLFNAAIPLIAKNPEFKSLHEYYTTRANNPLKKKQSVIAISCKLIRVFYAILANGVTYDAQKMLSDIHRQPQAA

SEQ ID NO: 286637 - protein, 328 aa, unidentified
MAKHNMVCAGIDTSKGKLDVALDGRSEQLRVNNAPADHKALSEWLRQHGVTRVGIEASGGYEQAVVAALRREGFVVIVFQPGQVRAYAMFHLKRAKNDKIDADLIAICTAAVKKIHAPPDPRLAPFAEHLTMIDQIVDDIARHKNRLETCRDARIRQVWKEEIARLEKHRKIELKSLVAAIRRHQDLAVRLDLINSVDGIGLPTAVAILVRVPEIGRLTREQVAALVGLAPYDDDSGGRSGTRHIAGGRKRPRSALYAAALPASMRWNAQLIALYQRLIAAGKLHKVALVACARKLLIFVNTVVARGTPWQRHQNPRPSAIPHAATAR

SEQ ID NO: 286638 - protein, 343 aa, unidentified
MQAITTIGLDIAKSVFQVHGVDADGNVIIRRQLKRRYVLAFFQKLPPCLVGIEACGSSHHWSRELQALGHSVRLMPPAYVKPYVKRHKNDAVDAEAICEAVSRPNMRFVATKTPEQQSCLTLHRARHLFIRQQTSVINAIRAHLAEFGIVAPVGRHGVEQLLGVVSDASDKRLPDVARACVAALGAQLQRLKVQILEFDRMIRAWHRSSEESRRLDDIPGVGPVLATALVASVADPKVFRSGRDFSAWIGLVPKQSSSGGKDRLGHISKRGDRYLRSLFTTGALAVIRYAKIHGTKHRPWLTALLARRPTKVAAIALANKIARMAWAMMARGERYKQPAALAA

SEQ ID NO: 286639 - protein, 342 aa, unidentified
MRIIGCDLHARQQTVAMLDTTTGEVVRMTLTHEGDNVRKFYSSLPHPVQVGIEATGSMQWFVNLMEELGIECRVGHPAEIRAAEPRKQKHDRRDADLILKLLMENRFPAIWLPPKELLDLRALLRHRHQWVRLRTRIQNALQSIALANGLRRGSSLWSPAGQHTIASLPLGPHSAYRRSELQAMYAKFEAEIEKLNQRVQEQAYERPGARLLMTHPGVGPVTALATEVFLGDPARFADSKALASYVGMIPREYSSGERQRLGGLSKQGNPLLRFLWGRGRGTCRTSRSRAAALLPPQISPKRSGESERGRGSQTWDPTVDHVARSDRVQRVLSSWTEAAEKQ

SEQ ID NO: 286640 - protein, 333 aa, unidentified
MQHVIIGVDPHKLSATIEVVDKHEQRLGSRRFTTDQAGYAAMRTYAKSWPERMWAVEGANGAGRPLAQRLLEAGEQVVDVPAKLAARVRLFDTGHNRKTDALDAHSIAIVAVRTTTLRVLQVDGELEALRMLTDRRGPMTRRRVQSVNRLQALLAELLPGQGKKDITPMQAKGMLASVRPRDVAGKTRRSIAAEELAELVAVDAKIKKATAELKSIVLARGSHLMDHHGVGPVVAARVLADVGDISRFADRNRFASWTGTAPLDASSGEQNRHRLSRAGNRRMNHMIHIAAATRLRLDTEVGPTTDASAPRARNRWRRCAVSSAGSPTASTAS

SEQ ID NO: 286641 - protein, 412 aa, unidentified
MEVLYECCGGLDVHAKTVVACLIKKGHKQIRTFSTMTDELRQLRDWLTSEGCTQVAIESTGVYWKPVFNILEGVLTVVLVNARHVKGVPGRKTDVRDCEWLADLLRHGLVRASFIPPPEIRALRELTRYRQTVVTEHTAVANRLQKLLESANIKLGQVASDVLGVSGRLMLRALAEGEQEAEKLAALAQGKLKSKQGELQRALEGRVTEVQRWVLTELLTRLDELEAALQRVETRIGKEVESCADPFVQEAVELLDSIPGIGERGAQTIISEIGVDMSRFPSAGHLASWAGLCPGNNESAGKRKSGQTTKGSKYLRTALVEAAWAATRAKGTYLQAQYQRLVKRMPKKKALVAVAHTLLVIGYHLLSRRVAYADLGSDYVDRQHIERQRRRLVERLAALGVKVTIEEVAEAA

SEQ ID NO: 286642 - protein, 422 aa, unidentified
MDAETCHRCCRPNQLNLHKHFEARNQQHDSVDVFVGVDVGKGHHHAVALDRTGKRLYNKALPNDETKLRALITELKAHGQLLFVVDQPATIGALPLAVARDEGVLVAYLPKLAMRRIADLHAGEAKADARDAAIIAEAARSMPHALRSLRLADEPLAELTMLRGFDDDLAAQITQTSNRIRGLLTQIHPALERVLGPRLDHPAVLDLLERYPSPAELAATSEKTLANRLTKLAPRMGKSLAAEIVQALSEQAVVVPGTQAATIVMPRLAQQLASLRKQRDEVASEVERLVHAHPLWPVLTSMPGVGVRTAARLLTEVAHKAFASAAHLAAYAGLAPVTRRSGSSIRGEHPSRRGNKVLKRALFLSAFAALRDPISRDYYARKVQQGKRHNQALIALARRRCDVLFAMLRDGTLYQPKSASNA

SEQ ID NO: 286643 - protein, 342 aa, unidentified
MPQYAALDVSNEETAIHIINETGAVVWQGKRASDPDVLTTTLRRYAPDLVRVGLETGPLTPWLYHTCKALGLPIVCLDARHARAATALQRNKTDARDAATLAQLVRMGWYREARVKSYAAHAVRHLVGARAQLMGVAIDLSNQIRSTLKTFGLMAGKGAGRAFENRVTELIEARSTIAAIVEPLLAAWRAVRGQIGVLDRRLIALAKGDATCRLLMTCPGFGVIVATSFAAAIEAPEHFRHSRSVGAYLGLTPARHQSGEVDRTGGISRRGDRLMRTYLFEAAASLLVRVREDSALKTCGRALVERLGFKHAAVAVARKLAVVLHAMWRAGTPFQPWPVATA

SEQ ID NO: 286644 - protein, 408 aa, unidentified
MSLAVAVALFFVGIDWAAQSHAVCVMDQAGKVVARFTIAHSAEGIATLIRRLAKYAAPEDVPIAIERPNGKLVDLLLQAGHPVVPVSPNAIKTWREGEVLSGAKSDAADAEVIAEYLRLRQHRLQVAAPYSDPTIAARTVSRTRTDLVEQRVAATNQLSALLDAHWPGAKAIFIDVESPISLAFLTRYPTPTAAQHLGEKRLAAFLAKHGYSGRRHPAVLLARLRQAPAGSTGSAITAALADGVLALVGVLSALNAAIKNLDRSVAARLEEHPDGKIFTSLPRSGQVNAAQMLAEWGDCRQAYDGPDSIAALAGCTPVTKSSGKHKAVHFRWACNKRFRQAITTFADNSRHESTCAARVYDQARDAGKDHPHAVRILARAWIRVIWRCWQDDVPYDPTQHGAATKLTA

SEQ ID NO: 286645 - protein, 331 aa, unidentified
MYVCVVDKDGEILIHKNIKGNDFGYFLKITKPYLSDMTVVCESTFNWYWLADACCDADIEFVLAHALYLKHIHGGKNKNDRIDSKKLAHLLRANFIPPAYAYPAKHRPMRALFRLRMNYVWDRSSLLGHLKMNQYAEGLVPVPTKARGRKEWEKSILDQYTDPILKMSAKCDIEMIYSYDKQIALLEKTLVSQAKKFFSREYSSLLGVPGIGKIMALTILFEVDDINRFPTVKDFLSYSRLVKGSVASAGKIKGLTGGKMGNAYLRWAFGQIAITAKRCDPLIKIYGEKIINKHGKFKGNAILGNKIARCVYYMLKKGEVFDIEPLISKSF

SEQ ID NO: 286646 - protein, 342 aa, unidentified
MKIVMIGIDLGKNLCSVAGLDEIGAVVLRRRMKRESVLLFTAQLEQCTVAMEACCGAHHLGRQIAGQGHSVRLMSAEYVRPYVKAQKNDERDAEAIAEAATRPTMRFVEIKSEAQLEVQSLHRVRGRLVAERTAVINQLRALMLERGITVPQGRRKVERLLPEILGDERNGLGPRLRRLIADMREEWRGIDRRISDFDHELTERARAEETTRRLMRIPGIGVLTATALVAAVGNARTFTRGRDLAAWLGLVPRQATTGGKPKLLGISKRGNAYLRTLLIHGARTALPGLAKSETPLGRWLKGLLERVHRNVAIVALANKLSRIAWAVLAHDRQYVTIQVAGD

SEQ ID NO: 286647 - protein, 397 aa, unidentified
MGDYIMVGCDMSDRSLVLEAGRNSEEAEKRSFANSPEGRRKMLQFLVERSRECAAAQIVFAYEAGPHGFGLYDELTAAGIRTHVLAPSLLPQSVKGRKDKTDAKDALRILEVLRGHLLAGNRLPTVWVPDPITRDDREIVRSRLDVDRKTRRVHAQIRMLLKRISVGKPDGLGKGWTNGFRAWLRGLAKSPSPMGSGARIALTSLLRQLEMHEEEIKALDQAVANLAVEERYRAQVERLDAESGVGVLTAMVFLTEMGNLNRFSNRRQVAAYLGIVASKYLTGNAQNRYGRITRQGSSRVRALLCQAAWRRVKADPTERARYERIVAGKPYRAKRAIVACMRHLAIRLWHRARNANEETPPPVPQRGRRQFALPAQPRKYERRSPAHVSVEERRRAV

SEQ ID NO: 286648 - protein, 338 aa, unidentified
MLHSGIDLHKRTIALSTVTADGQPVRDAELPTTRAAVRAYFDALPGPHRAVVESTSNWYWLRDLLAGAGVDLRLGHSKYIKAISYAKVKTDAVDAATLAQLLRSDLVPEAHMVSAEWREARDLLRARLQLVSQQVRCKNTVAGLLAQYNVAAPAALPPLVQLRTAMLAEQCALLGAQAKRLAATLNPGLIPTPDVQRLLWIPGIGRVVAFTIWLEVDGIQRFPSARDFVSYCRLVPGAGNSGGRTRHKRTKDGNRYLKLAFSHAAVRAIQYYPEIQRFYRALARRKPPAVARAVVAKELARIAYFVLSKQEAFNGAFKGKPLSRTKQPKWPRLASPPV

SEQ ID NO: 286649 - protein, 381 aa, unidentified
MATETVQSTLPKPITEVLYLAFELSQKQWKLGFTIGIGQPPRIRNITARDLNALHWEIRQARQRFHLAENTSVVSCYEAGRDGFWLHRYLQQQGIANLIVDSASIEVNRRMKRAKTDCLDVTKLLTMLLRYHLGEQKVWRTVTVPDEECEDRRHFHRELADLKVERTRHINRIKGLLTGQGVCAPIQPDFLDFLSTVRLWNGNSLSKELRSRLEREYQRIQLVNQQIDELEAYRRETLRTSQQPHIQQVRQLMRLQGVGINSAWLFVMEFFSWRAFHNRREIGALAGLTSTPYQSGGTNQEQGISKAGNRHIRAMIIEIAWGWLRFQPDSQLSRWYQQRFGQGSSRLRRIGIVALARKLLIELWCYLETGIPPDGAVLQPQ

SEQ ID NO: 286650 - protein, 347 aa, unidentified
MMRFYDGQHRFYCGVDLHTKRMYLCILDHEGNKQLHRNMPAKPRDFLNAIQGFRDDLIVGVECMFTWYWLADLCLDEGISFILGHALYMRAIHGGKKKDDKLDSEKIARLMRGGTFPLSYVYPREMRATRDLVRRRMFLVRRRSELLQHVQLINQQYNCDPFEKMVKYASNRDVLDRFEEDSARLSVEADFQMVGHYDRLLKQLEANLLGQATRHDPRACSLLRTIPGIGKILSLVLLYEIHTIDRFPSVGDFLSYSRLVMPKQTSDGKVTGQGGAKIGNVHLKWAFSEAVLWMLRYSDEAKAFLKRKEKKHGKSRAMTMLGRKIARAVYFILKRKEPFDAVTFFAS

SEQ ID NO: 286651 - protein, 335 aa, unidentified
MGTKTATATATAFVGIDVSKDTLDACLLVASGKLKEATFANDPKGHAALTSWADRTANGQSLHYCMEATGPYSEAPATHLADAGRLVSVVNPTRVKYAGLARGRSNKTDRADAKLIAEYAQRERPPAWQPPPPEVRELQALVRRVDDLVEMAAREKGRLASPALTKSARQSITRTVRLLEKESARVRKQADELIATTESLSADRELLESIPGVGRQTATVILAELPAVERLPSAQSAAAYCGLSPREFTSGTSVRRRTRLSKTGNARLRRALFLPTQTAVRFNPVLRRFFEKLVDAGKPPMQAVGACMRKLVMIAYGVLKNRTPFDPNWSSRITT

SEQ ID NO: 286652 - protein, 359 aa, unidentified
MTNDKYVGLDVHQASTSIVVIDGNGKSVVEGVVRTRADAIGDFISGLSGTVHVTLEEGTQAAWLYEIIKPLVAEVVVCDPRQNKVLAVGNKGDRVDANKLAHLLRSGLLKHVYHNNRDTKALKQLAHNYGSILGDCTRVMNRIKALYRGQGIPCSGREIYYRRNRDQWLARLTEPSLRIRAQFLFDELDALKELRRAAKNIFLREARRYQAFKVLSKIPTLGPIRSAQIIAAVGSPHRFRTRRQFWAYCGLAVVTRSTDDYRFSENGALRRTRPPATRGLNRNFNRKLKHVFKSAALDGIKRDPFKSFYQARVVAGIRPEMARLTLARKIANLTLTLWKNGDQFDEHRMKEHQPYNARS

SEQ ID NO: 286653 - protein, 338 aa, unidentified
MKLYGGIDLHSNNNVVCLIDERDKVVYSKRLPNDLPAILMELAPYRLQMEGLAVESTFNWYWLVDGLMDEGYRTHLVNTTAVQTYSGLKYTDDTHDARWLAHLLRLEILPTGYIYPKEERAVRDLLRKRLQMVRLSTTNVLSMQNLFARNTGKSITGNEIKHMAAEDVALLLEQEEHALAMSCNLSVLQQCQAQIKLLEKTVLKRAQLRPEFKSLLTVPGIGRILALTIMLETGDITRFDKAGNFASYAPCVDSNRLSNGKKKGENNRKNGNKYLSWAFVEAAHFSIRYSDTIKSFYQRKSAKTKQVVAIKAVAHKLARACYYVMRDQVDFDVKRAFM

SEQ ID NO: 286654 - protein, 386 aa, unidentified
MRKPNDLSRSLTVLKEDMTLIAVIEMSQSSWLIAGIVPGIERHPLKKLAVDESALLKLLNRWREQAEKAGHRIERIAIAFEAGRDGFWLARWLKARGIEAHIIHASSIAVSREHRRAKTDRLDTELLKRAFLGWLRGERDHCKMVAIPTLAQEDAKRPNRERESLVSEQSRIVNRMKAALARLGIRGFNPKLKTAVERLEGLCTPEDEPIPPNTLAELKRDMERRRLVRSQIRDIEKNRVERIDQAPSDGPHVMVRLLARVIGVGVETADMLVQEVLRRNLRDRRAVARYGGLTGSPDESGKKRREKGLARSGNARVRRGMIQLAWRFLMFQKDSALAQWFYARTKNAPQSRKTMIVALARKLLIALWRLVREGVVPEGVVLRPVS

SEQ ID NO: 286655 - protein, 357 aa, unidentified
MDDNHHGIVGGVDTHKDIHFAAVVDTYDRVLASNSFPTTRQGYKSMLMNWMQSFGEVKRIGIECTGTYGAGLLRYLQQFDVEILEVTSPDKMDRRRRGKNDTIDAENAAHAAFAGIRTVTPKTRDGMVESLRVLKVCRKTAIAARRIALQMIQMNIISAPESIREPLRALTRMQLIRTLVTWRPDLGGYRNISTAYKIALKSLARRYLELHDEIADRDVMISAIVDELAPDLIAGKAIGYESAAQLLITAGDNPDRLKSEASFAALCGVNPIPASSGKVNRHRLNRGGDRAANSALHIIAIGRLRTDNKTKEYVDKSLTQGHTKLEALRCLKRYIAREVYYILKKRNNLINSIQIAA

SEQ ID NO: 286656 - protein, 464 aa, unidentified
MKDNKRRRQMKQRRISSHLEQVNLFAAGIDIGSLSHYVAVPEELDSEPVREFACFTGDLNRMADWLVEIGIQTVAMESTGVYWIPAFEILEERGLVVLLVNARHVKNVPGRKSDVQDCQWLQQLHTYGLLEGAFRPPEETVALRAYTRQREMLVQRASDHIRHMQKALRQMNLLLDNVVSDINGMTGMKIIRAILAGERDPTVLAKLRDKRCKHDDKTIAASLEGHYREEHLFALKQSVELYDVYQQQIANCDETIQAQLDRMESRGDKDDLPPTKKRKTKSSPDFDLRGELYRMTGVDLTRIDGLNETSVLKVLSETGVDITPWPTEKHFSSWLGLSPGNKITGGKILTSKTKPSANRAAAAFRLAAYGLFNSKSALGAYYRRQRARLGSPKAITATAHKLARTFYSMLKNGTEYVDQGQDYYETQYRDRVTKNLKKRAASLGFDLVPNKADENMPDTVLSTT

SEQ ID NO: 286657 - protein, 346 aa, unidentified
MDHFVGIDVSLESCAVCVLTQSGTVAREAKIACEPEALIAFLREMDVSITGIGLEAGPLSQWLHRHLCAAGLEAVLMETRQVKGALKAMPIKTDRRDALGIAQLLRMGWFRPVHCKSVSAQELRALLGARRTLQKSMISIELSMRGMLRGFGLKLGQITRRRLPERARELADGNEMLTAMVTAMLRGHAALRSELAKLENRLRRIARADRVCRLMMTVPGVGAVVALQVKAGIDDPARFRSSKMVGSHFGLTPRREQSGERDVVGAISAAGDQNVRTALFQAATVMLYQSQTKSWLKAWGLQVAKRRGMKRAVVAVARRLGVVLHRMWSDGTTFSLAHPAGASAAA

SEQ ID NO: 286658 - protein, 413 aa, unidentified
MVLFVGDDWSESHHDVEVVDAEGRRLAAARLPEGLVGITRLHGLIAGVVPAEWAELGPVEAASRVKIGIETDRGGWVAALVAAGYEVFAINPMSVARYRQRHSTSDAKSDAGDAHLLAEIVRVDRAHHRPIVTDSTDGQAMKLVARSHQSLIWDRARHVLRLRSALRECFPAALVAFEDLYAPDALELLGRAPDPDRAARLSAAKISGALKRANRRKITERTEQIQSALRAPALRQPPAVQAAFAVIAAGEINVIATLNTEIATLGEVVAEHFGRHPDAEVYASQPGLGVILGTRVLAEFGDAPNRYADARARKNYAGTSPITRASGTKKVVLARYARNVRLTDAVRQWALSSLRGSPGARCYYDALRARKIGHEAALRQLANRLVGILHGCLKTHTLYNESTAWAHHIPAAA

SEQ ID NO: 286659 - protein, 415 aa, unidentified
MEATVERCAGLDIHQASVVACVLVGPPGCKPRKETRSFGTSTRELEGLRAWLEGLGVTHVGMESTGVYWKPVHAVLEGGFELIVGNAHHIKAVPGRKTDVKDAEWLADLVRHGLIKPSFVPPPPIRELRDLVRLRRSLTAVRSTERNRTLKLLETANIKLASVASEVFGVSGMAMLRALVEGEAAPAEMAELARGKLRSKRERLTLALEGRLTEHHRYVLAFHLRRLAAIEEDLRALDARIEAEAEPFQAQRRLQQQIPGVDALVAVTIIAEVGVDMSVFGNAKRLAAWAGVCPGNHQSAGKRRSGATRRGNVHLKTALVTAAVSGSRRRGSYYKDKYHRLKARRGRLRAAVAIAHKILVAAYHMLAGGVPFRELGEAFLDQQARQRNVRHLLNRLNHLGYDVLLQPRAVEAAGP

SEQ ID NO: 286660 - protein, 390 aa, unidentified
MVYVGIDVAKDKHDCFIVNSEGEVLADVFSIPNNRDGFDLLLNRILECSGKSEKIKVGLEATGHYSYNILGFLIDNGLVTYVINPLHTNLYRKSLSLRKTKTDRVDARTIATMLMSDVDLKSYTDTSYHNEELKSLTRYRFDKVCERAKLKTSVSRLVNILFPELEKLVPTLHMKSVYALLNEYPSASCVASSNLTHLKKVLYDASKGRYNRDKAIELREAARNSVGSVMPAKSLELQHTIRLIQELNNEIKEIEAEIDKIMHEIQSPITTIPGLGNCMAAMIIAEIGDFSNFSSPDKILAYAGLSPTTYQSGQLTNCYAHMEKRGSSYLRYAIFNATKFVCKWDPNFGAYLEKKRAEGKHYNVAISHASKKLVRTIYAMEMSGQSYIRK

SEQ ID NO: 286661 - protein, 351 aa, unidentified
MNIKHYIGLDVHKKSISYCVKAADGKIVEEGKLRATRQVLRAWAEKRTEAWHGAMEATLFSSWIYDVLKPFAAELQMGNPSMMKAIGAAKKKNDQLDARKIADLVRCNLLPVCYVAPPEMRDLRRLLRYRNLVVGQAVQMKNRMSGLLMEVGAEYSKQRLHGAKYFSELLDQLDEVPESVKDLLRLSRGALETFAATQRQLLDRLQQEALLVKRVKLLRSIAGVGEVTALTWALEICDPRRFPSIGDAVSYCGLTSALNASADKQQRGPISKQRNAHLQTVLIEAAKLAPRWNRQLAEVHARELKCGNRNRATLAVARKLVSYLLAVDKSGQPFVVRNPPAREREEIAQVA

SEQ ID NO: 286662 - protein, 383 aa, unidentified
MQILTFGAPTAANIGTIFAAIELSQKTWLITVHSPDQGRMSRYKLEGGDHAGLLALIAKIRVRAAQKLGSEPRVASCYEAGYDGFWLHRLLVAAGIDNLVFDPASIAVEQRARRAKTDRIDGELLLRTLMAHLRGEPRVVRIVRVPTVEQEDARRISRERDRLVTEQTAHTNRIKALLRLSGLQVGNPRRRNWLTWLEQQRDWQDQPLPPHVMAEVKREHARLMLVREQLAALEQSQDTTQASAVPARMATRREQLQRLKGVGPAFATTLAGELFYKEFRNRREVASYCGLTPSPWKSGGIDREQGISKAGNPHVRQKAIELTWLWILHQPDSALSRWFRARTLNAGKRARRIAIVALARKLIVALWRYLETGLVPEDALMKA

SEQ ID NO: 286663 - protein, 371 aa, unidentified
MTKNSTFIGMDVHKNSIDIATADQGRNGEVRHYGKIDGTLSALDKIVRKLVSKGEQLHFAYEAGPCGYQIYRHLTSKGFDCAVVAPSKIPKPSGSQIKNDRRDALMLARLHRSGELTPVYVPLAEDEAIRDLVRAREDAKGDEKKSKQRLQAFLLRHGHRFTGRTPWSKAHMHWISDIKMPHRSQQIVLQESIDTMNQCKSRVQRLTEQIQKLLPNWHLFPVVQALQSLRGVSMLVAATTVAELGDLKRFQHPSELMSYLGLVPSENSTGTRIRRGPITKTGNGHVRRILVEAAWAYRLNARVSRVLLKRQEGLPQHICDISWKAQLRLCSRYRHLWNKGKSKQVVVTAIARELCAFMWAIANETKVPATV

SEQ ID NO: 286664 - protein, 345 aa, unidentified
MQTMYYIGLDVHKRTISYCVKDGSGTIHSEGTIPATRFDLDRWMKTLPQPWTAAMEATVFTGWIYDHLQPHAAALKVAHPLMLRAIAAAKKKNDRIDANKICDCLRCDFLPECYMASTAIRERRRTLRYRNLLVRQMVQMKNKIGTLLMEAGVSYNKQRLHKAGYFRELLATNPDIDEGLRSLLRLCRETVVRLGKTESALVRSLERDRLLLDRVERLMTIPAVGPITALAWALEVGEVQRFSSIKKAISYCGLCGEEKSSANTVQRTPLSKQRNKHLQTTLIEAAKMAPRYSPDLAMLYDKEKQKGNANRATLAVARKLVAYLMAVDRGQRNFQVMETRNCVAA

SEQ ID NO: 286665 - protein, 387 aa, unidentified
MRRSNAERIVGLDVHPDSFAGAILQGRDPWEARVVSTSTRVALPLLEKWALRHTRESDCLVMEASGNAFAVAERLRGLKRKVLILDSHSAGKVGKTYCATDRVDAIKIARIYLSALSPLVWQPDAKTRERREVFSAYQAVVKEGTRLKQQIKSMLNEHCLRLESGFRLSHPSAIRLLQRRNWTQAQKMLLSQLHAGLVGARARRQQLRHYMAQEVLADKELLRLTRLCGISLITLYGLIAAIGDIKRFATARKLSAYFGLNPSVEQSGQYEGPTSLNRHGRGAIRALLVQSAKKLLQVDNPLQKWGLAIAMRRGRNKAAVAVARKLCVAVWHVMQGHVIGAIERMDTLHTKLRKLATELGLPTIKELGYETKEAFVQKKLYVLRSYP

SEQ ID NO: 286666 - protein, 400 aa, unidentified
MISVGIDVSKTKSTICILKPYGEIISSPFEIQHTEKELTEVSNMLLRLDEEVRIVMESTGNYHYPILTFFLKKGLFVSVINSLAMHKYATCSLRAAKTDKIDSIKIANYGIDNWYHLQKYELQENEYHQLQILGRQYAHYIEMRVKEYLYFYSILDQTLPGIKKIIKSQNNDNFERDKLVDFAENYIHFDNISKMSESAFIEDYLNWNKKNGYQPSTTKALEIYNYAKNSIPTLDSQNPITSIMVSESVRVIKKINKTLNVILAQMNEYAKRTAEYSIVRNMGGVGNKLAVRLIAEVGDIRRFHSSKALIAYAGIDSPPYQSGQYLGLNRRISKRGSALLRSVGYEVMQSLKTHKPSGDAVYLYILKKEQEGKPKKVAKIAGLNKFLRIYYARVMEVYNS

SEQ ID NO: 286667 - protein, 320 aa, unidentified
MSTKKSKSYIGIDVSKQLLEVAAHESDYHFRCRNKASAFGELIAELISLRPALIVLEATGGLESAVASSLHAADLPVVVVNPRQVRDFAKALGQLAKTDRLDARVLAHFAAAIKPPLRPIKSKEEQELDALTGRRGQLIEILVDEKNRRASATSDTVRDQIEQHIDWLEKRIAELDQQLKALLQSSAAWQVKDQILQSVPGIGPVVSCSMIADLPELGTLNRQQISKLVGVAPLNRDSGQQRGTRHIYGGRAHLRSVLYMAAITAVRHNPVIKEFYERLRANQKPFKVAITACMRKLLAIINVMLRDRTCWKSRQEPVSA

SEQ ID NO: 286668 - protein, 309 aa, unidentified
MKQSVVYIGIDVAKAHLDVAWAGTFRRLPNERSGHAALVRWIKQSTTPVQLICEASGGYEQALLESLEKSAVKVTLVQAVRVRQYARAAGILAKTDRIDAKVLAAFGSAMQPQPTPPLSAEQKRLRQYEAQRRHLSRTLVAEENRLVQLSCTELRTLSRSLISKIKTQIKTIDRGISDLIAQDQTLCVKAQKLTAISGVGVRTAALLLAQMPELGQLNRRQAAALAGLAPFNHDSGSVRGKRAIFGARPALRSGLYMAALSAARFNPILSSFYQRLRTKGKPHKLALTAVMRKLLLALNQTLKPLPYSA

SEQ ID NO: 286669 - protein, 367 aa, unidentified
MKKSSTVAIEGIQIFKDNQLTIGLDLGDRTSHYCILNEAGEVILEQALPTTAKGIEQVFSKIPRSRIALETGTHSPWVSRQLTELGHEVIVAHARNVRLISESSRKDDRLDARALARLARIDPALLGPVRHRSAKAQIHLTVIRARAALVSARTALVNAARGLTKSYGARLRKCGTEQMNREIAKELKPELREALNPLLAEVESLNERIAEYDRRIEQMAKEVYPEVARLQQVKGVGPLIALTYVLTLDDPHRFRRSRDVGCFVGLRPGRRNSGMSEPQLHISKEGDRYLRTLLVQGAHYILGPFGQDSDLRRWGLKLSERGGRNAKKRAVVAVARKLAVLLHKLWVSKEVYEPLRNNNRKQMAAVA

SEQ ID NO: 286670 - protein, 426 aa, unidentified
MVDDEYRIYVGIDWATEAHQACVLDCTGCILAERSFAHTGEAVAGFTQWLHGVAGGDPARAAIAIEVPRGAVVETLIEHGFHLYAINPKQLDRFRDRHSVAGAKDDRRDAFVLSDSLRTDRARFRQIRLDDPLVIQLRELSRVDEDLGREINRLTNRLREQLNRFYVQALKLCPSADEPWLWALLERASSPAAGNRLQQKTLERLLRQHRIRRVNAQDVLAALRAPALRVAPGVVEAATEHIALLLPRLRLVHTQRQRCGVRLDALLDKLAAVDGDEGQQREHRDVEILRSLPGVGRVVAATVLAEASGPLAERDYRALRTHAGIAPVTKQSGKRRTVVMRYACNGRLRYALYHWARVAVTCDPASKTYYAALRQRGHSYARALRSVADRLLRILIAMLKSESLFDSTHPRRSPHPAPTPEAPCAA

SEQ ID NO: 286671 - protein, 311 aa, unidentified
MTQHTIGIDISKDSLDAHHLASGQDCRFGNDKAGHKALVAWIGKHPTRIVYEPTGPYHRAVERVLAAAGLALVKVNPRQARRFAEATGKLAKTDRLDAALLARMGSLLDLQARPVASDGLRELKELHGARQALIKDRTAARNRAKTLTLTLLKRHNAQRMTQIEHQITAIETAILARLKADPHLAQRLDVLTSIPGVSQLTAFALIIEMPELGSLDGKQAASLAGLAPVSRQSGTWKGHAFIRGGRAQVRQALYMPALVACRFNADLAQAYQRFRNAGKPPKVAITAVMRKLIVLANALLRDGRNWSPAIT

SEQ ID NO: 286672 - protein, 419 aa, unidentified
MNKLYVGMDVSQDDVKVQILDQDGNEATKRFAVENNPLGAQTIASRILECCRQLNVDKVFAGLESTSVYGWHLQYYLADHLELKPYQPMIICFNAKIVDAFKKSLGNLPKNDWVDAFTIAERLRFGRLPKSCPVDFRYLALQRLTRHRFHIVDNVVREKNYFLSNLFLKFSGLCQNKVFSSNFGAVATELSDEFLTLDDIAARPLDELVDFLVEHGNKHFDNPEATANALKDAVRKSYRINPSVDNSLNFVIKSCLDNIQTLERQKKAVEKAIAQEVAGFNNEYLCLTSVKGIGPTIAAGLISEIGGISRFENDNALAKFSGLYWSEYQSADFTAEDTYLKRTGNEYLRYYFIQAADQLRKYLPEFSDYYARKHKEAKTHKHKRAIVLTARKAVRLIFALLREEKLYKPSAMKGEDMKY

SEQ ID NO: 286673 - protein, 347 aa, unidentified
MAVTIVETRAITGGVDTHADMHVAAALDPVGGLLGVEEFQVTPAGYARLLEWLGGFGTVCLVGIEGTGSYGAGLSRHITNAGVRVVEVDRSDRQDRRRAGKSDPLDAVSAARAAQSGRARGAPKGRDGAVEAIRALMVAKRSARSERIQTINQARSLVHTGPDDLRARFTGHTTVALVAGLASLRPRPGSTIGYATRLALRELGRRAEFLDAQMERLDELIVPLVTAHAPRLLALYGVGPDTAALLLIAAGDHPERLRSEATWAHLCAAAPIPASSGKVTRHRLNPGGDRQANHALWRIVVTRMSSHPPTRVYVERRSKEGLSKKEIIRCLKRYVAREVYPCLRIAD

SEQ ID NO: 286674 - protein, 457 aa, unidentified
MNPKRSKPKNDRTMPMIHPNAAAIDIGATMHTAAVRADRMPEPIRSFGTFTTDLHRLVDWFTECGVETVVMESTSVYWIPIFELLDARGFAVFVVNARDAKHVPGRKTDVSDAQWLQRLHSYGLLRASFRPKGQIAELRAYVRQRERLLEYAASHIQHMQKALTEMNLQLHHVVADVTGATGLRIIRAILAGERDSKVLACLRDYRCHSSAEAIEKALTGNYRAEHLFALELALALYNIYQDKASACDARIEAVLKELSISRGRDACPLPSPRRRLHGKANGPDFDVRAALFKLLGKDLTQIDGLGSYLSLRLIAECGDDLSAWPSAKHFTSWLCLAPSNKISGGKVLSSRTRRSGSRASALLRLAAVTVGRTDTALGAFYRRLSARIGKAKAITATARKIAVLFYSAVRHGMEYVDPGSSYYETRYRTRVVENLHRRAKAFGFVLLPLESKAGAVS

SEQ ID NO: 286675 - protein, 462 aa, unidentified
MNNFYLGIDVSKGYSDFVIVDEKKQPVEPNFQLDDTFEGHCKLYEILTAFFSIHTDCTLYAAVESTGSYENNWLNRLLDFATAYPVKVARLNPLGVSRNSQADLKRNKTDKISAQDVAEYLIAHPEKVDYQNQKPGDTIKEQFNYIRLLNKQKVQLLNLLEIDIYKANPELTIYCKNGISEWILHLLKQYPTANHLAKANAKELTEIPYISAKKAKLIIQRANTSVASAIDSMTADRIVDLVDDILKKNEQIDNQKSRLKQNKNVLPEKVALLETVKGIGTYSAIGLLIHIECVERFATSKKIASFFGIHPVYKQSGDGVWGYHMSKKGNVIVRNILYMVTLSAIRCNPLIKEIYARNIAKGKKKKDAMGVCMHKMLRIVYGMLKNNTEFDPDIDRQNQNKQYNSSSKPSNNQSRRYQNHDSDAPISRRQTKKRKEQAQHGNIKNINNLKTFVPNLQKFEMN

SEQ ID NO: 286676 - protein, 355 aa, unidentified
MNDAKYIGMDVHQATISVAVRNSRGNLVMEAILETKAETILQFIRGLRGSLYVTFEEGTWAAWLHDLLQPHVARVLASDPRKNALLKAGNKSDRIDARKLSELLYLNKLSPVYHGEQGIRTLKELARSYITITRDLTRVMSRLKAIYRGWGIPCAGQQVYAPRYRAEWLAKISEAGVRRRAELYYQQFDALAALRQGTRRELLAEARKHLAMRLLRQIPAIGPIRAALLIALIQTPNRFRTKRQLWAYCGLALRTYTSGEYRFVGGQLKRSKKVLAVRGLNINHNHDLKNIFKGAATRAAAATGPFQDFYQATVARGMKPHLARLTLARKIASITLLVWKKGARFDAEHLKQQAA

SEQ ID NO: 286677 - protein, 344 aa, unidentified
MKQYAGIDVSLEYSSVCVMDADGRIVREAKVLSEPDALIAWFGEHGVAMKRIGLEAGPLSQWLHAAMAKAGLAVELIETRHVRAAFKTMPVKTDKKDARGIAQLMRLGWFRPVHCKSLPAQEVRALLTARKLIQGKLHDIEMSIRGILRGFGLKVGPTTPRTYAARIRELIEGHPTLEAIAASLLKVRDALADEFAGFERNLRAMARADDNARRLMTTPGVGVLVALTFVSAVDAPERFRSSRAVGPHFGLTPKKYQSGETDYTGRISKIGDVGVRTALYEAANVILTRPVKGSDLKSWALAVARRAGPRKARVALARKLAVVLHHMLRDGTNFIPHKAGAPTA

SEQ ID NO: 286678 - protein, 345 aa, unidentified
MNYVSTIGLDLAKHVFRVHGADTSGSPLFNRKLRRGEVLRFFEKLPPCLVGMEACGGAHYWAREIANLGHDVRLIPPAYVKPFVKRGKTDAADAEAISEAVIRKTMRFVPIKTAEQQADAMVLKTRALLVQQRTQSVNALRSHLAELGIIAAGGLPSVAALMAIVREGEELPAAARFALMAVADQIDSLADQIDELERAIVTEAKRDEDMRRLTTIPGVGPITAATIKALVPDPGGFKSARHFAAWVGLTPKPHSSGGKERLGGISKMGNPELRVLLVLGATAVLRIARNDDRARPWLKALLARRPFKVAAVALANKMARIIWALLNKGGIYHRPEPLSIAAVAR

SEQ ID NO: 286679 - protein, 344 aa, unidentified
MTLITTIGLDTAKQVFQLHGVDNEGNAILRRQLRRSEVLKFFSKVPSCVVGLEACGGAHYWAREIKALGHEVRLIPPAYVKPYVKRGKNDAADAEAICEAVGRPSMRFVPHKTVGQQATAMLLKARDLLVRQRTQTINALRGHLTELGITVSRGVGKVDDLAAIVRDEDDARLPPLARIALLPLTHQIETYTSEIVKLEKYMIRETRQDATLSRLTSIPGVGPITASSIAAFVPDPGAFKSGRHFAAWIGLTPKSNSTGGKTRLGSISKMGNPVLRSLLVVGASAVIQHARRGAKASAWLTELLKRRPYKVAAIALANKMARIIWALLVRGGHFQNTASKTMTA

SEQ ID NO: 286680 - protein, 355 aa, unidentified
MSTIYFGVDFHARQQTVCYLKTEDGELVIIELKHQNKEEVRAFYGQFKGPVIVGLEASGYSPWFERLLESLGHEVWLGDATEIRRRARWRQKNDRRDAELILELMVHDQFPRLHRPTPESSEILRMLRYRQKLVKLRTIDKNSLQALALQSGLSLRTKLFTKAGKQQLRTAVMSPVMEQQRDQWLSLLETFDQRILETMLWLKQQTLDDQRITRLRTHPGIGLLTALGLVHTLWPVSRFRNQRKVTAYAGLEPMERSSAERKKFLGISKAGSRLLRYLVVEAAHTAVKKDDDLKRFYRHLEQRRGRPKAKVAVARKLLVRSYIMLRDEIDYAEFQQRAVAARLARQSTRQPCLSG

SEQ ID NO: 286681 - protein, 424 aa, unidentified
MNLTQNDRLNQVTADTLVVGVDIGSATHFARGFDWRGYEFSKRAFRFNNTKVGFLTFIRWVEEMMKKTEKTKIIVGCEPTGCYWLTFQKFLRDRDILLVTVNPYSVKKCKELDDNSPEKSDLKDPKTIAGLVREGRYSTPYLPEGVYSEIREAQVCRDQIMKQHVRLSNQIQGWLQKYFPEYLECYKDFDTASGMMVLEHAPLPEDIIKLGAGGINGLWRNAKLRWAGIKRAKTLVEAARGSVGLSGGEAARLEIWFLINDYQTKTKQLERLDEFLAKEILKVPHVEKLLAIKGVGLSTVIGFVADVGDIGRFTDPKQVQKLAGLEITKASSGKKKGRPCISKRGRRRLRRTMYESARSLISWNEAFSEVFMYYRYRTRNPLGGMQAKIAVACKAIRIFYTILKTGCEFDAEKLRRDIIRPEAA

SEQ ID NO: 286682 - protein, 354 aa, unidentified
MNKIKQLNFDGKVIYCGLDVHKTNWKINARMEGIEMAAFSQNPDPLLLKNYIDKNYPGAELKVVYEAGFCGFEIQRSLKSLGIECIVVNPADVPSSDKDRKRKDDKRDARKLSMELAKGNLKGIYIPDKQMQDARSLVRQRHRLVQDQTRCANRIKHLLLSNGITAGEKSERWSLRFIKKLQHLDCGSISLKSSLQFAIEQYLQTRRIVKEITLAIRDLSKQEPFKKIQAVLGSIDGIGLINGMVIQTEIGDIHRFKRLDSLCDYAGFVPDIYSTNDRMVIRGISKRGNEFLRETIIESSWVLIRKDPAMLMKYNEYRSRMSANKAIVRIAKHLLSRIRFLWKNEQTYVRGIIG

SEQ ID NO: 286683 - protein, 346 aa, unidentified
MDQIIRIGMDTSKRFFQLHGVDAAERVVLRRKLSRDQMLTFFRKLPPTLVVMEACGASHHWGRVLGAMGHDARPIAPQLAKPYVKRNKHDPADAEALCEAGGRPHMRFVPIKTAEQQADLMLASTRARLIREHVRLANTIRGHAAEYGLVAPTGPGRIPDLLARIAKDETVPLLARELFAQFGEDYARLQAQITAIDARLLAWQKENPIARRLEAIPGIGPVTASLLVMKVPDPKSFRSGRDFAAWLGLTPKNHSTAGRQRLGVITRAGDESLRSLLVVGATSVVNQTMRRTARRPITWLVALLARKPAKLAAVALANRMARIAWKLMTSDEAYDPVRLHRLPAAA

SEQ ID NO: 286684 - protein, 311 aa, unidentified
MNGFVGIDVAKAHVDVYDSSTEQHVRLANNRADIRKCVKQMRSCQPQLIVMESTGGYEQDLAVALTEASLPVAVVNPRQVRDFGRAVGRLAKTDRIDAKLLAQYAGTVKPPRRRLPDRRHRQLKTLVTRRRQLVQMRTAEINHREHVCDPVVARSITAMIKTLEREIQKLEQHLAGLIDQLPALQHTCSALLSVPGIGQTTATMLLTEVPELGQLNRRQIAALIGVAPLNRDSGTFRGKRMTGGGRRAVRTRLYMPAVVACHHNPVLKKFYERLLQKGKAKMTALVAVIRKLMTIINTMIAKGELWNPKLA

SEQ ID NO: 286685 - protein, 345 aa, unidentified
MKLYGGIDLHSNNCVIAIINEQGETLSCKRLNNDMSVILSFLTPYKDKLTGLVVESTFNWYWLVAALMDAEFKLHLANPAAIQQYSGLKYADDHSDARWLAEMLRLNILPEGYIYPRELRAVRDLMRKRMDIVQQSTKNLLSVQSCYMRHLGYKLSSNKIKQMAAIRKGVDTEQVHADFSSMNTALSVISNLSLIRCAQQQINVIEGAILKQISLSPEFINLSSIDGVGNTLALTIMLETGTIKRFDSPGNFSSYCRCVKGARYSNGKKKGATNQKNGNRYLAWAFTEAANFAIRYNPTVKKYYQRKLAKTNKVVAIKTVAHKLARACYHVLKDNVPFDEHKAFA

SEQ ID NO: 286686 - protein, 354 aa, unidentified
MRRSTKYVALDVHQATTVASVREERGRVIARSVVPTEEAALLAFFGGMRGSIHVAFEEGTQAQWLSELLRSRVDRVVVCDRRGQARRGNKGDQVDADQLSEELWRGGLRAVYHGSGRRAVLKELTRAYQNLVEDSSRVMLRLKALYRARGIRAPGQRVYQPADRAEWLAQLPEEGARFRAALLYAELDVLRALRPKAKAAMVAEARRDGSWELLQSIPFFGPVRVALLLATMQTPWRFRTKRNLWAYAGLAVVSRSSADYQLIAGRPVRRRRAPLTRGLNQNHNRVLKDVFKGAATAATARPGPLQDCYRAMLERGVREDLARVTLARKLAAIALRLWKKGERYDPTQLTMQAQ

SEQ ID NO: 286687 - protein, 354 aa, unidentified
MSQKLNSAIAVIGIDIGKNSFHIVGHDQRGAIVLRQKWSRGQVEARLANLPPCLIGMEACVGAHHLSRKLQMLGHDVRLMPAKYVRPYSKGQKNDFRDAEAIAEAVQRPTMKFVATKTADQLDLQALHRVRERLVGQRTGVINQIRAFLLERGIAVRQGLRSLRSELPGILATRTDVLAPRMLRIIEDLAGDWRRLDARIEDLSSEIEALARQDKGCERLMTVPGIGPIISSAMVAAIGTGDVFSKGRDFGAWLGLVPKQISTGDRTILGKISRRGNRYLRVLFVQAAWVVLVKVKCWERYGLKSWIEAAKKRLHHNVLAIALANKLARIAWAVLNKGRAFECVKTNEMASRPA

SEQ ID NO: 286688 - protein, 415 aa, unidentified
MSDRKRWYAGVDWASESHHVRLIDEQGHDVGEKIFKHAGEGLAEMAAWLLATSGGAEPGQIDVAIEVPHGPVVETLIERGFAVWVLNPKQMDRFRDRYSMAGAKDDSRDSLVMASALRTDPHCFRRLAATDPIIVELREWSRIAEDLGGERIGLTNRMRQQLWRYFPAFLDLEADLSAPWLIELWQAVPTPDKARRIREASIAAILKHNRIRRLAAAQVLEILRQRPLAVAAGTTEAARAHIVTLVARIQLINRQLAQAHHQLDTLTAKLGAAEETEPGQIKQRDADILASLPGIGRIVLATLLAEATDALQRRDYSALRSLTGVAPVTRRSGKSCFVVRRHACHRRLANAVYHWARIATQHDRTSRAKYAALRSRGHSHGRALRSVADRLLNVACSMLKSGTTFKPALAIQNDP

SEQ ID NO: 286689 - protein, 342 aa, unidentified
MKDSTYDHYIAIDWSILNMAIARMTKKSNKIIIIDVPSDVVELQTYLKNLRGTKILAIEETSTSQWLYTELEGYVEKILICDPYRNRLLGEGAKTDKIDAAKLVHLLKAGLMKEVYHSAEKFIYIRRVVSGYDDMVKAGVRLKNQRYALLRTCGKNGKEKDINLGAQGEQFVLECLDRQIKAYEEEKKGFEKEFVRLARKYPEIKHQKSLPGIGTINAVKIVSRVVSPYRFADKGHYLSYAGLIKLEKISGGRSYGKKNPRYCRQLKSVYKSGVLAAIGGNNPINDYYEYLIREKNYTEHNARNSACRRLAILSLGVFRSEKKYQPYRRDRVKGNKEIPSDL

SEQ ID NO: 286690 - protein, 337 aa, unidentified
MGEINTIGIDLAKSVFQLHGVYAEGRTVLRRQLRRSQMLEFFQRQPPCLIGMEACASAHYWARELVEFGHDVRLMQPSYVKGYVKRGKTDKADAEAICEAVSRPSMRFVPVKSEDTQALLMTHRARELLVRQQTQIVNAMRAHLGEFGIVVAKGIHNVERLIMACEQAGLPAPARRALSLLADQLVDTQEKIEALTADIQADVRGNEAAQRLQTIPGIGPITASALVSALPDIAEFSSGRDLSAWLGLTPRPHSTGGKERLGRISKMGNRYLRRLLYLGAMAQVSARRRGVAGEDWLWKIIQRKKPKQAAIALANRMARTAYALMKNKTKYRAAQTA

SEQ ID NO: 286691 - protein, 348 aa, unidentified
MRTYNTQHTHYCGVDLHARSLFVNVLDHAGATRFEQDIPASPAAFLDAVKPFRDGLVVGCECMFAWYWLADLCERESIPFVLGHALAMKAIHGGKAKNDRLDAQKIAGLLKGGFFPMAYVYPRAKRETRDLLRRRSFFVRQRAQLIAHIQNTNSQYDLPPFSKKLTYKGNRTAAIAERFEHPSTKLSISADLAMIENYDTQIAALELHLVKSAKVDDPATFQFLRTVPGIGPILGLVMLYEIDSIRRFAEVGNFLSYARLVACTHESAGKVKGVGGRKIGNAHLKWAFSEAASLMLRSFPAAKSWMQRQSKKRGAKKAHAILEAKIGRTVYHLWRKQVAFDGKKFLAS

SEQ ID NO: 286692 - protein, 405 aa, unidentified
MEVVVQQRLWAGIDAGKTAHHCMVVDADGQRVLSRRIDNDESALLELIRAVTSLAEGGHLTWAIDLNAGGAALLITLLLAHDQELLYIPGRTVHHAAGSYRGDGKTDAKDATIIADQARMRRDLHPLRRGDELVAELRILTSRRSDLSADRTRTINRLRERLGEYFPALERAFDYSNNQAALILLTGYQTPAALRRIGTARLETWLQNRHARKVSSVAASAVAAAHTQYTVVPGEQLAADLVARLTQEVIDLDAALKEIDVMIEDRFRRHRYAEIIVSLPGFGPRLGAEFLAALGGDIALYDSADRLAGVAGLAPVPRDSGRVSGNLHRPRRFNRRLLRASYLAAQLSIRHDPASKHYYDRKRAEGKRHTQAVLALARRRNNVLWAMLRDRTHYQQPPGDPATAA

SEQ ID NO: 286693 - protein, 348 aa, unidentified
MKKSTTKSEVKILGIDLAKQSFQLHGVDEAGDTVLKKKLTRNKLMQFIAQLPVCLIGIEACGGSHHWMRRFKAHGHDVKMIAPQFVKPYVKSNKNDAVDAEAICEAVQRPGMRFVPGKSIEQQDQQSLHRIRSQVVARRTAQSNQIRGLLLEYGVTIPKGISYVRKHMPSILEDANNELSDLFREVLLELYAEMKHLDERIQALESKLEALSKQDENCQRLLSIPGIGLLTATALIAAIGDISVFKNGRELAAWIGLVPRQHSTGGKPTLLGISKRGDSYLRTLLIHGGRSVVRTADKHKDRKSGWVTELAERRGKNIASVAVANKNARIAWAVLTHKTTYQVTPVAS

SEQ ID NO: 286694 - protein, 350 aa, unidentified
MDQVSTIGLDTAKRIFQVHGVDEAGAVVLRRQLRRSEMLKFFAKLPRCVVGMEACAGAHYWGREIAALGHEVRLMPPTRVKPYVKWGRKSDKVDAAACCEAVTRPSMRFVPLKTVEQQAALMMHRARQLLVEQRTRLGNAIRGHMSEIGIIAAKGGAGLGALVAFIGNPEDQHLPAVVRTILVPLVEQWRSAGAQIAELDRQILAWHRNNADSQRLETIPQYGPILSSAMAATIGDAARFDNGRACAAWIGLVPTQNSSGGRERSGGISKTGDRYLRQLLVIAATGMVRRARAHPEDHPWFAGLLERMPPKKAAVALANKLARIGWAVLRHQTPCRARRPTAVAPALEAA

SEQ ID NO: 286695 - protein, 479 aa, unidentified
MPTSTKSRADLKSQSAAPVTALASRDRVDVPTVKRRARRRSAQGDAPVVRVVADEFVENRAILPPSGENPGGAPTRSETQITQGAQGRMTMRFVALDLGARKTTYCELSEGQVVQRATVSELESLQPLLGPDQPAAKVAIEACREAWFVHDLLVKWGNEVVLVDTTRSKQLGIGQHGRKTDRIDAETLARALEAGRIPRAHVLSPSRRELRRLLGVRRALVEARAQLVTTVRGLVREQGERIAGCNVENFVARVRAHRLPREILLLIEPLLVLLEGINPQIESIEEQLAVLCAQEPIIAVLTTTPGVGTVVAACFMSVVDEAKRFHSAHHVESYIGLVPSEDSSGGKRRVGAISKEGNCYLRAQLVQSAWTILRSSDKSDPLYLWATQLVARRGKRIAVIALARRLVGVLWAMWRDGTVYDAQHLAQQGVRGIRGAVQSLEHQKAKLAQAAKKGSVKLPSSHSTATPRRSPKTPATLVA

SEQ ID NO: 286696 - protein, 317 aa, unidentified
MTLDQVVFFVGIDVSKATLDVALEPPSEHWQVANDAAGIQQLVERLGQVHPKRIVLEASGGYEAPVLGALGCADLPVVAVNPRQVRAFAKATGRLAKTDQLDAQVLAQFAAAVKPELRPLPDAATRELAGLLARRRQLIEMRTAETNRLTLAVEQVRPEIREHLHWLDKRITQLDDDLHDRLRASPLWREQENLLRSIPGVGPVLTLTLLADVPELGSVSHRQLSALVGVAPFNTDSGKRSGERHIWGGRAQVRAVLYMATCAAARHNAVIRALYQRLLAAGKRKKVALVACMRKLLTVCNAVVSSGTPWRYQPLDN

SEQ ID NO: 286697 - protein, 345 aa, unidentified
MIIGCDYHPSWQQVCWLDTETGETEERKLEHASGEAERFYRQLFSPALVGMESTGNCQWFVELLGRLRHELWIGDAARIRASEVRQQKHDRRDAALILKLLLEGRFPRIWTPSSEEKDLRQLLIHRHKLVRIRAQVKNELQHLAMNQGVTRKRKLWSQAGEQVLLGLTLAPWAGRRREDLFRVKQMLDEQIEWLDQAAATAAEQNERARLLMTQPGVGPITSLAFVLTIGDANRFPRGKQVASYLGLIPREYSSGGKQRLGSISKQGNSLLRMLLVEAAQVAVRCDPQMRNEYLHRCRRKAKGVAKVAAARKLAIRLYWMLKTNTGYPEVVRVESSSRVPLVSAS

SEQ ID NO: 286698 - protein, 398 aa, unidentified
MTESSDYESVQVFIGVDVGKDTHHAVAINRSGKRLFDKALPNDENKLRSLISDLKQHGQILLVVDQPATIGALPVAVARSEGVLVGYLPGLAMRRIADLHAGEAKTDARDAAIIAEAARTLPHALRTLKLADEQIAELSMLCGFDDDLAAQTTQASNRIRGLLTQIHPALERVLGPRLDHPAVLDLLQRYPSPEKLASLGEKKLAAQLCKLAPRLGKRLAADIAQALAEQTVVVPGTNAAAVVLPRLALQLITLRKQRDEVALAVEQRVLAHPLYPVLTSMPGVGVRPAARLLTEVACRAFASVAHLAAYAGLAPVTRRSGSSIRGEHPSRRGNKALKRALFLSAFAALRDPLSRAYYTRKMSQGKRHNQALIALARRRCDVLFAMMRDGTFYTPQAS

SEQ ID NO: 286699 - protein, 445 aa, unidentified
MLRIIYKRVAGLDVHKKTVVATRMRVTEEDRVEWETKTFDTMTPDLLKLHDWLCEWELTHVSMESTGDYWKPVFNILEDSFEVWLVNAQHVKHVSGRKTDVKDSEWLAELMLHGLLKPSFIPPLPQRALRELTRYRTRLVQERARIINRVQKLLEGANIKLSSVATNIMGVSARAMLAEIVAGQTDAELMADLARGRMRNKIPELEKALTGIVQPHHRFVLAQQLEHIDFLDEKVEALSLRIEKQLESMSWPDEPAEPDAGEGPEEEPPVAAESELPLTWNTAVALLDTIPGVNRRIAEVMLAEMGLDMSRFPTANHLASWAGLAPGNHQSGGKRYSGRTTKGNKPLGSIMVQGAWSATRTKGTFLKARYHRLAARRGKKRAIVAVAHSMLVSAWHMLTYRQPYQELGGDYFDERKKESKVSYLVRRLEKLTGGSVSIELQPAAA

SEQ ID NO: 286700 - protein, 337 aa, unidentified
MICAAVERCAGIDVGKQFLAVCVLTGPLEGEARKQMRRFGTIVAELERLRDWLKQEEVTHAVMESTGSYWKPVFNVLEDTVKVYLANPQEVKVRKGHKTDDKDGWWLAHLLRHAMIHPSFIPPRAIRELRDLTGRRKKLIGAGTGEKNRVQKILEDANVKLGNVLSDVFGVSGQLMLDALLKGEAEPEEIAQFAQRRAKQKIPQIIAALEGHRMSDHHRKMIGYSLEHMRFIEDQIEKLDEDIVAKIKKAGLEREWQLVQSAPGLKETSAANVLAEIGGDMSQFPSARQISSWGGVCPGNNRSAGKSKSSHTTGGNPWLRAALTECAWAAAAKKGCF

SEQ ID NO: 286701 - protein, 350 aa, unidentified
MSIIGGLDIHRGQLTFDYVEQETGRLQRGRIAPADREHLAGWLSRFAGRAPVAFALEGCTGWRYVVEEMRKAGVAAHLAEPADTAALRGPKRRAKTDKADAKHLRELLDAGRLPECYIPPEQVLEWRACLELYSDLRVEHSGWVQRIHATCFHQGTTSLGPAGVVRGSRARLDQIVAEQLSPMGRLQVNTALSVMQALDEHLDRLRRRIVATARQVAGARALTDAIYGVGPMTSLALVAWLGGANRFSASRKAVRFVGLDITVRSSDSKRSPGRLSRQGPEVLRWLLFEAAKTSARDWAPTHAYYDAVRQRYDGNRAALSQARRIVRHAVHILTDLGDDAFGVRPAAAVR

SEQ ID NO: 286702 - protein, 353 aa, unidentified
MYGLEAQERKPTVENCGIDLHQKSSQVTVVDDEGVLLERASIPTTRVALERWFGPRPPMRILVEASGCSPWVVRVLRELGHDVGVVDPRRIRLVAESTLKTDRIDADTLAELARLKLRLRTLVWQRGEATQRQRAHLRVRRALVEARAGFIVTVRGLVRSFGGRIASCRSDRFAARCEATELPSGMGEVVAPLVAAVRELDARIAVMDELIKAVGSGHDAVASLQAIPGVGPVVALAYVLSLEDPTRFRRSRDVPGYLGLRPRLRASSDTVHRGRITKQGDGDVRRLLVQAAHAHLRSTQDTALRRWAESLVPRVGKRKAVVARARKLAALMHRLWITGEVYEAFPETAAKAA

SEQ ID NO: 286703 - protein, 413 aa, unidentified
MNYNPCITIDVSQSKSHIQGFTHFNSTTKKPTNITQPKSMRHTKHGYNQILELINFIYSKTGTIPLIVFEYTGVYHKTLEKFLLKHGIKYHIVAPLRAAKSRKNKLRSVKTDKRDCLSLAKMFYNDDLGDFYHENEYYEELKHLNRFYENILLRQQELKVNFRELLAVIYPNFKISKSNPEGAFRNVYTKEALGFLKEFPHPDLVVNSTIDEIACKLTKYISRAHQRYLKSISEHLYNYCSNLISGCSSTSNRVSSLLFYIEQIEKYEDILQDTLDKIHLLVKDSYMFNLLMSIHCVNKNLASRFICEIGDILRFKSYKAIIAFVGTDPQILQSGDNDGLHKHITKKGNKHLRTILYLIVQQMTKAKNIESSIKSFYKKKTQQGLRKLVALIACCNKLIRIIYYMSKTGTAFE

SEQ ID NO: 286704 - protein, 315 aa, unidentified
MPNDKEHFVGIDVSKDWFDVAVLGEKTTVRLTNTKSGIAKLGKRMKVLNPTLIVVEATGGYEENLVLALFEVGLPVALVSPQRVRQYARAKGRLAKTDQIDAQILAEYGKNIQPRLFVGKSEERKQLSALVGRRNQLKAMLQAEKNRLRTQSGTIRSSLQQVIACLQTQLKQMEKEIRTLLQQHTDLQAQEKLLRTAKSVGLVTAATLLADLPELGQLDRQEIAALVGVAPMNADTGRKRGYRKTKGGRPDVRRALYMATLTGIRYNPALKPQYDQLVKRGKLKKVAITACMRKFLTILNAMMRDQQPFRCASLT

SEQ ID NO: 286705 - protein, 523 aa, unidentified
MARAFRSKKRSSLASQSIHKPRGVISPRVQAVGPEHFGIVCVDCAKARSKWMLSDFYARVLVPPTEVEHTQACLASMIRDLRTALEQARIRDQIVVIERTGRYHRPIQRAFDQAGFEVRIMHPLTTKQHRQPANPGNKTDDTDLSAMQRGAVNGFGLLEPPADPLSVRLQLLARHRRDLVEKTVALRSQIHEHLHAIMPGYSKCFEDIYDAQIPLWIARRFGSATAILQAGVPELIVQLRRAELRLHQPTLDKIIAWARSAPAAEDESAIHLKILSELDDDRLSKVRAVRAIEAELAGLLVQTPYLLLMGIPGINVVSAAEFAGEMGPIERYPTARAITGRAGLFPSRYQSDRVDYPDGQLVRCANRTLRRAIMMIADNLIKWNDHFRVLATGWQLHGRDARAARVQVAGRFSRIAYQMVAGRKAYRHPCCQQRDYILSKLIIFHTNNDIGYDQLMINIDAAVAQLPRSVYREEAAPLADELDRVLKKRGKGPRPLSEILPVVLAKLGVKPVRSPKSGEAILT

SEQ ID NO: 286706 - protein, 352 aa, unidentified
MSRKSLPCDVTTIGIDLGKNTFHLIGLDRRGAIALQLKLSRAQLERRLATVPACLIGMEACSGAHHIGRQLEALGHDVRLLPAQYVKPFLKSHKNDYRDAEAVAEAVQRPTMRFVRIKTPEQMDLLALHRVRSRLVGQRTGMTNQIRGFLIERGITVRQGLMPLRKALPEILSSNSGALSPRMIALIADLAADWRRLDERIAGVSADIELLAEQDGSCQRLMTVPGIGPIISSAVVAAVGNGAGFKQGRDFSAWLGLVPRQESTGDRTILGKISKRGNKYLRTLFVQAAHVVLVRRPGAAIRGLRPWIVRASKRLHRNMLAIALANKLARIAWAVLARGHAYQPRIAVDAAS

SEQ ID NO: 286707 - protein, 368 aa, unidentified
MKQVTTYVGIDAHKKDLFVAMLIGDEAKPVTWQLANEPNAVRRLVRKLEREAPGPVRVFYEAGPCGYALQRQMTTSRVTCDVVAPALIPRKPGERVKTNRRDARKLVELGRAGLLTAVQPPTPEDEAVRDLARARDDAREDLQRCRHRLGKLLLRRGLHYHGRNWTRGHRDWIESLTWTQAAERVVVDDYLLAIDHTEARRIELDAALAQIAETEPYREPVGWLRCFRGIDTLTAMLILAELHDFRRFASAPALMAYLGLVPGEDSSGEKHRRGRITRTGNALVRRLLVEVAWHYQHRPGIGVALARRRKGQPGRVIGIADKAQQRLCRRFRTLAAEHKPAPKIAVAIARELAGFVWAALQPVAIPAR

SEQ ID NO: 286708 - protein, 342 aa, unidentified
MKQYVGLDVSQRETAVCVVNETGQVIFEGKAKSNPGALTDLLSKHAPHAERIGFETGAMASWLWHELRRVELPVVCIDARHAHAALSVRMNKSDQNDARGLAELVRVGWYREVKVKSEESQKIRAILVARSRLVSMRRDIENQVRSLIKECGLLFSRAIGQQFRNQVSELLGVDHLLLSVISPLLSIHENVCQQQGKFDNEVRRLAKLDETTRRLMTVPGVGVVTALTFRHTIDDPSRFRSASTVGAYLGLTPRRSQSGEADTNGKISRWGDRLLRTYLFEAATVLLYRTKKWSSLKAWGMKLAKRIGMKKAKVAIARKIAVILHCIWVDGTSFDWGQPKPI

SEQ ID NO: 286709 - protein, 331 aa, unidentified
MFPVGIDVSKNTLDLCILYDGIKGRIKTRNIQNNRHSVENILRWLRLQHCGPEDVHVVMEATGVYHERLATELHDAGFRVSLANPHRSREFARGMGIMTKTDKVGAYMLACYAFLKKPHHWEPPAPEIRYLGALLRRRDVLLGDALREDNRLEKYLSTDTPADIISSCRRMAQLLREEVSNIERQIKAHIKANPALRRDYTLLTSIKSVGPQLGMHMLVVLRSHNFASAEQAAAFPGVVPIEKRSGTSVRSRPRMSKIGPPQLRAKLYMSVLCGKIYNKRMRNIYDEMCLRGKPKMVAIGALMRKLVHWCYGVLKTGTVFNDESLKQVLST

SEQ ID NO: 286710 - protein, 402 aa, unidentified
MIFINCLGIDIGKSESVVAHYKDEVLVKEMVIQNNQNGYRYLKNYIKHLDSLFILFESTGIYSRGMKRFCEIHKIDYLEMNPLEAKFKTSSLRSWKTDKSDAHKLALLAFRMKDSKVQRQSEEIYFELRERARFHLEMEINQNRLKVELVETLHQTFPGLEKLFTNRYSKIALSIAKAFPHPDFVSTLTHDELVEKVLHSTDKGISVNKAHKYVQKLIEIQINSFPNVDKSSFLLQKVQYLCDKLLIGIEEMKEFDQEMIDLAENTTEFENIISIPGIGELTAALLIGELGNIREFKTNKQLNAFVGIDIKRYQSGTSKSRDTINKRGNKKARRLLYLIIMNIIRGRNHYQSHIVDYYYKLREQPHGKTHKTAVIASINRLLKTIHYLIVNNKLYDYQKAPH

SEQ ID NO: 286711 - protein, 370 aa, unidentified
MDQNIKFFVGLDVHKDTISISVCEAGREASQFRGTIRHDVAALLKVLRKVGTPARQLVAYEAGPTGYGLHRRLIAEGFACQVVAPSLIPQRAGDRIKTDRRDSARLAELLRAGELKPIWVPDLEHEALRNLWRAREDALQMRMRARQHLKAFLLRQGRIYASKRSWSKMHERWLANQRFELATDQLAFTEYVLAVQASQAQLQRLDLALVQATEHWRFAAVVSALRTLRGIDMVSAIGLVAEIGDIQRFAHPRHLMSYLGLVPSERSSGNSVRRGSITKTGNAHARRLLTEASWHYRYPARLSRVLQSRQEGQPESICRHAWKAQVRLCGRFAHLRRRGVHINKVCIATARELTGFIWAIARQASTTCAA

SEQ ID NO: 286712 - protein, 348 aa, unidentified
MNLKRIGLDTSKVVFTLHGVDQDEKAVLRRNMRRAEMEAFFAKLPPTHVALEACGGSHHWGRRLAAMGHTVQLIPPQYVKPFVRRGKNDRNDAEAISEAAARPDMPSVPVKSAEQQAAAIVLSARELLVRQRTQLVNAVRGHAAEFGVIAAKNISQLPGLLEAVAAAETVPATAKEMLAFLGEQVAQLDEQIAELERRMKQQHKANPVSQLLAEVPGIGPISALSLALTIDPGRFTSGRHFAAWLGLVPKQHSTGGRQRLGGISRAGNERLRQLLVLGATAVIQYAKPGSKSASAWLLALLERKPRKLAAVALANKMARIVWAMMATGEAYRGSKKVAAPAAGAAAAA

SEQ ID NO: 286713 - protein, 426 aa, unidentified
MKSNTQNAKIKAITEKTLIVGIDVGSETHYARAFDWRGYEFSKTPLAFSNTEEGFETFRIWIEELKKGHGMENVISGMEPTGHYWFNLGCFLRARGMNPVHVNPHHVKKSKELDDNNPSKNDRKDPKVIAGLVKDGRYFRPYMPDGIYADIRKLAELRARAQSAITRLRNRIARWFSIYFPNYKEVYRNVYASSGLMVLKEAPLPEDIVKLGVDGVNRIWRDAKLRGVGRKRATTLVTAAGHSIGSRDAQSAARIELKTLLADYEMYAEREAGLMEMIEEKIKEVPCVDKLLEIRGIGMKTVIGFVAEVGDIRRFDNPKQLQKLAGYAIVKNESGKHKGESHISYRGRKRLRYVLYEAAVSVVSHSPEFKEIHQYYTTRSKNPLKKMQSVIAVACKLIRVFYLILQTGATYDAAKLMGDIRRPAAA

SEQ ID NO: 286714 - protein, 385 aa, unidentified
MTQPASSITPVLDYDATIIGALELSGKSWVLAVQLPGVKRHSKHVLEPRGEDLVALIERLKSRSLAAGHKIERVILTHEAGWDGFWLARFLEQRGIEVHVMQPSSVPIDRRARRAKTDAIDVEMLLRTLLAWLRGEPRVCSMVPIPSEADEEARRAHREREDLICERRSIVNKMGGILATLGVKGFKALRRDRREQLSLLRQPGGDPIPQLARGRLERLLDRLELVLQQIEKVEKVRDAVLAKLAPANEAERMIRALAKLRSIGADFATILVREAFVRDFRSRRAVAGYAGLGGTPFSSGGSEREQGIGKDGNRRLRAAMVELAWLWLRWQPDSGLSAWFRRRTEQAGSRTKKIMIVALARKLLVALWRYVKDGVIPEGAEMKAA

SEQ ID NO: 286715 - protein, 391 aa, unidentified
MIYVGIDVAKDKHDCVILNAQGKSVCDVFSFQNSLEGFNLLFRSIQNVAPNLENVKVGLEATGHYSYNILGFLLDKGLPTFVINPLHINLFRKSTSLRRTKTDRVDARVIAAFLMSDAGLSSYSAISYHNEELKSLTRYRFDKVRHRAMLKQDVSRFVNILFPELEKLVSTIHSSSVYTLLAEFPGAKQIASCHLTHLTSLLEASSNGRFGKMKAMEIRDAARRSIGSSMPAKSLQLQHTIRLILELNSEIDEIEAAIRNIMDDIASPILSIPGMGYRMGAMILAEIGDFSRFDSPDKILAYAGLSPSTYQSGKLDNAYPHMEKRGSRYLRFALFNAAKFVCLHDPSFAAYLAKKRAEGKHYNVAVSHAAKRLVRLIFALVKSGRTYCPAA

SEQ ID NO: 286716 - protein, 355 aa, unidentified
MNSEKYIGLDVHQATISVAVIDSMGKLIMESILETKAATILEFVAGLRGTLSVTFEEGTWAAWLYDLLKPHVHELVVCNPRKNALLKDGNKSDRIDARKLADRLRLHDLKPVYHGETGVRMLRELARSYLNLVKDQTRVMNRLKAMYRSWAIPCAGRDVYYARHRAEWLGKIREAGVRRRAEHLYQQLDMLQHLRQQARRELLAESRQHPITAKLRQIPSLGPIRSALAVALIRTPHRFRTRRQLWAYSGLALETRTSGEYRCVEGQIRRSKKQISIRGLNKDHNHDLKGLFKGAATRASVQPGPFQDFYQRSLAKGIKPTMVRLTLARKIAAIALTLWKKGENFDVEKLKSQAA

SEQ ID NO: 286717 - protein, 399 aa, unidentified
MRSIGMDVHRSFAQVAVLDRGVIEEFRVELDYDAVVAFGQKLQKDDEVILEATGNTSAIVRLLTPFVAKVVIANPLQVKAIAHARVKTDKVDARILAQLHAAGFLPEVWAADDDTLNLRRLVSERAALVRSVRRVKSRVQAVLHANLVPKYSGHLFGKDGRDWLSTAPLPKAERDLLARHLDELDWLKGKLEKLDGSMARIALDDSRTRKLMTIAGINSVVATAVIAAIGDISRFPTPDRLASYFGLTPRVRQSGDRGAIHGRISKQGNATARTMLIEAAWSAASVPGPLRAFFLRIKDRKGLNVAAVATARKIANLIWQLLTKEAPYRWARPAFVAMKMRKLELRAGAAKAHGPAGPARDYWIKEIRHREMELVAQAEAAYAAMVEAWRDRPPKPQKG

SEQ ID NO: 286718 - protein, 407 aa, unidentified
MRTDTNVVAGIDTHADTRHVAVINEHGKPIADREFLAVGSGYRKIIDFITSHGTVMAVGVEGTGSYGAEISRSLRTAGINVLEVNRPNRAERRLRGKSDSLDAYQAAQSVIANRGTSVPKTKDGPVECLRIVRAARSSAVKAHTAAVNQIKGLLVSAPEALRTKYRGLGAAPLIKALGRARPSGHIADPEYMCLMTLKSLALRCRSLEAEIEAADDALSQILTTYAPLLCDLPGVGTEVASQMLVTVGDNPERVGNEAQFAALAGVAPIPASSGKTTRHRLSRGGDRNANRALHQVVLGRMSTCPRTRAYVSKRTAEGKGKREIMRCLKRYVAREIYRQITNPRPAPNNADLRQRRNAIGITLGGAAAGLGQWPSAISRLERGLIRNDDLAASYRKWLIQQTTSAPV

SEQ ID NO: 286719 - protein, 424 aa, unidentified
MKNTAARKRKQVPEGYLVIGVDPHKKRHAAVAITQDFTAQAKFKFDNTREGLETMLGRARAEMMKSCCRGVIFAIETGGHYWRNIAYYLDERGIPFRFINQYTLKRRREGKDINRRKNDYRDSEVAAQLLCTGEFVESVIPQGVYAELRTSHNAYQRLVKERTRITNLLKGLLDALFPEFTHIFKDPGGLTALTVLSACSIPRVIAGMTEDEFVATIEARHKGRRLMRKKLRALHYSARTSIGIHAGAHSVSSEIAFLVDKLELIRQHIRIMEMTLVKLVDEAEEGKYLLSIRGLNYVAVAGLLAELGCFKLYRSAKQMIKMAGSNPTESESAGKKRSKTPMSKQGRPLLRYYAWTAVIPMLRFNEDFRAWAKQRRERPAHANPLNGREIVGAALNRLLRLAFALVKNQTYYQDERPVLIPVAV

SEQ ID NO: 286720 - protein, 295 aa, unidentified
MDSRKYIGLDVHQASISVAVRDGAGKLVMECVIETKAATILEFIQGLHGTLWVAFEEGTSAAWLYDLVKPHVARVVVCDPRKNALLKAGNKNDRVDARKLSELLRAELLTPVYHGESGVRTLRELSRSYLTVTKDLTRVRNRLKALYRSWAIPCAGEKVYAPRHRSSWLEQLSQAGVRRRAEQLYQQLDSLVPIRRQARRELLTESQKHPAHQLLRQIPLLGPIRVALLIALLQTPHRFRTKRQLWAYCGLCSRRLSSVMDPKSWTQKRPFLRWSAALKMEESQCHEHVKATHPA

SEQ ID NO: 286721 - protein, 420 aa, unidentified
MKSFVPVAGVDVSKRYSDLCVLSPDNNVMLRQKIYHDMVSMKLAEKKLHEIELECGARPVVVMESTSHYHLILFQFFTDAGFEVIVVNPIQSGALKSINVRKVKNDRVDAYRIAMLYRLKVLRPSQIPTSSLRGLRLLTRQRSELKGDVARFKNRLTAYLDQIFPGYGEVFSDVGGSASRAVLHMCPTPEKLLNADGSLLAKAICEAGNKGPKFGAEKAAKLREAAGSAQVIGVRSASNASLIKNVLDIIEGLLAAIQRIEGEIKELVTQDTRLDEDVKLLCSIPGIGFSSAVVIVAEMGDISLFRKPKQLAAYFGLDPGERQSGTFKGRKNKLSKRGSPQVRAVLHMAAVSSVSQNRDGTYRNPVLAEYYERKCAEKPCKVARVAVMRKLSNIIYAVLRDRRPFELRTPQEHMALLAAA

SEQ ID NO: 286722 - protein, 407 aa, unidentified
MLIFLGIDWSHTHHDGCFLNERGQVLSRVTVPHTADGLAQLDQARAQLGVSRVECQVGLETAHTLLIDFLWDQEYLHVFVIPPGAIKGARRRYRQTNAHTDQSDAWVIADVLRTDPATLHPWRPDGLLVRQLRAKVSLLHFLTKEIRRLSNRFGAVLVRYYPAALHVFYDPASPIALLFLQAFPTPHEAATLTRQAFGQFARAHHYRQSDAVLSAAYARLQAAYPVASGTTVAAYREEAVWLAQHLLAAIEHKKAEIARLQELFQKHPDHELFASLPGTGDFLAPALLAKFGEDRERFPQPGSLQALAGTCPVTEQSGKSRRVFFRQACDHEFRQIAQQWARASVSQSSWASTDWHQVREHSRTNSHAYRCLANRWLAIAWKCWQSRQPYDESVHLQNRARRLAKRA

SEQ ID NO: 286723 - protein, 404 aa, unidentified
MIFVGIDWSERHHDVCVVDEHGEVLASARVLEGIQGVVKLHEVIADHAEEPEEVIVGIEIDRGLLVGALVAAGYRVFAINPLSVDRYRDRHATSGAKSDPGDAKVLADLVRTDRHNHRPVAGDSELAESIKLIARTHQGFIWERQRHVNRLRSALREFYPQAVEAFGTELASADAIAVLKIAPTPELGRRLSRSKIAAALRRTGRRRNLEPRAEQIQRALRSEQLRASGGLGRTYGLIVSSLTGLIEGLNTQIAGLQDDLERSFERHPSAEILRSLPGLGIVLGARVLGEFGDDPTRYADARARRNYAGTSPITKASGSRRVVLARFARNERLFDACFLWAFTSLTKSPGARRYYDLNRARGKTHNQALRALANRLVGILHGCLRCGEPYCEEVAWRAPMSLAA

SEQ ID NO: 286724 - protein, 418 aa, unidentified
MRNEVRFFVGIDWASQQHRLCLLDVSGRCLAERNIAHGGAALSEACDWLLEKTGAQPGEVAVAIETPRGPVVEIFLEREFQVHSINPKQLDRFRDRFTVAGAKDDSRDAHVLGDALRTDRRAFRLLSVDDPLLIELREWSRMLEDLQQERTRLTNRVRDQLWRYYPQALEVNEDLGADWFLDVWEQAPTPAKASRAKERTIERILTTHRIRRLDAAEVLRILQTKALWVAPGTTEAACVHIRTVAARLRLINLQIKEAQQQLDELCDKFEASAESAPGQICEQRDVAILRSFPGIGRINLATLLAEGWDLLRRRDYHALRILSGTAPVTRQSGRKRLVTRRYACNKRLQNAMYHCSRVAMQHDPASRHRYHQLRSRGHSHARALRGLADRLLYVLCTLLERQTPFDPGYKGLPAGAPA

SEQ ID NO: 286725 - protein, 311 aa, unidentified
MSSEAYVGIDVSKDLFDVKVLPNNEFQQFSNDDAGIKKLIKFLKKIDPALIVFESTGGLEMPAVSSLTENHLPVVIINPRQVRDFAKATGRLAKTDLIDADTIARFARDIRPEVRPLKDEYTQLLSALNTRRSQIVDMLVAEKNRLHTAPKSSIKSIQEHIQWLERSLKDINKDIDKTIKKSPMWRENDKILQSFSGVGPVVSASLLCDLPELGTLNRKKIATLVGVAPLNCDSGRFRGRRRIKGGRANVRRKLYMAAVASIRHNPMMKDFYDRLIDAGKPPKLVLTACMRKILTILNAMMKNRTYWIASH

SEQ ID NO: 286726 - protein, 360 aa, unidentified
MNATTVAVDLAKSVFQLAVADEHWKIIETQRLTRTQFERWFLNREVNLVIMEACGSAHHWARWLNSLGIEVRLLPAQYIRAYVKRNKTDAADAAALLEAARASDMRPVRVKSVEQQALQGMHRIRSLWMGTRTSRINALRGFCREFGIAIPVGARTGVEAISRVLADPNTAVPDLIRGTAKLLIEEIRLLEARIAQLERELAAIAKLSPACTTLLSIPGIGLLTATALVAATSGDVSHFKDARHFSSWFGLTPKEYSSGSSLHLGRISKKGDRYLRMLLTHGARSVLRASKVAQDAGREVCGVRRWALDVQSRSNHNKAACALANKLARICYATLRDKEPFGESARLNKKINRESFVMSA

SEQ ID NO: 286727 - protein, 341 aa, unidentified
MQNVTLVGIDLGKHSFHLHGQDQHGKAVFRKKVSRKQLIEFFATLRACTVVMEACAGAHHMARKLAAFGHQVKLISPQFVRPFVKGNKNDFVDAEAICEAASRPSMRFVSPKTESQQTLSALHRVRESLIRDRTKTVNQIHGFLLEFGISLPTGQAVIKRLPSVLAEHPLPPRLVGILDRLHAHFKYLSEQVDEIDREMGRQLAEDDLGQRLLSIPGVGPITASVLATEMGDGKQYSCGRDFAASIGLVPRQYSTGGRANLLGISKRGDKNIRRLLVQCARSYMQRLERQTGRLADWVRAMLMRRHSNVVACALANKLARTAWALAAHHTTFRVDTGAQQA

SEQ ID NO: 286728 - protein, 340 aa, unidentified
MGDITTIGLDLAKNVFQVHAVDQAGNVVVRKRIRRGQVLAFFSGIPTCLVGLEACATAHHWARELIALGHDARLMPPNYVKAYVKRNKHDVADAEAICEAVRRPSMRFVPLKTTEQQSALMMHRARDLLIRQRTMLVNALRGHLAEFGLIEAQGLHKVARLVTIVGDEVDERVPEMARQVLKVIVNQLKDIQTGIADLEKQVLVWHKNNPVSQRLATIPGIGPIIATAIAATIADPNTFRSGREFAAWLGLVPRQNSTGGKARLGGISKRGDSYLRRLLVNSAHTVLLCSKAAKNDPWLISLLSRKPRLVAAVALANKTARVAWAIMSRHDTYRHVAAAA

SEQ ID NO: 286729 - protein, 389 aa, unidentified
MFYLGIDIGKNTHVASLIDSKKKVLFKAFSFSNSIDGAESLICKLEPFKNQLEIGMEATGHYWLSLYSYLSEKNFTVRVINPIQTDGWRQGIEIRKRKTDIIDSLLIADLLRYGDFVETSLSNEDYLSLRNLSRFRSYLVSSIGDLKRKTIALLDQVFPEYASSFSNIFAKTSKEILANFSSPSDFEDINSEDLQSFLDNVTMKKFSARKLEELSKKASKSFGVNFCMDSFGLQIKMLIGQISFIQNQVLDVEKEIKSLLEKLNSPITTIPGIGAVNAATILGEIGDIKRFSNPSKLVAYAGLDSTVSQSGNFEFTSNHMTKRGSPYLRRALFQSALRAEFCDPVFSDYYQKKITEGKHHLVATNAVARKLVHTIFAVLTKDEPYQVQS

SEQ ID NO: 286730 - protein, 343 aa, unidentified
MDHFAGLDVSVKETSVCIVDDTGKIVREVKVASEPEALLAVLKNRAYHFKRIGLEAGPLSQWLFSALAEAELPVICVETRHMQAVLKAQINKTDRNDARGIAQMMRVGLYRPVHVKTLRSQKLRMLLTHRKLLQSKAIAIENDLRATLRNFGLKVGMVGTVKFEARIKELVENQPDLASLVEPLLIVRRALREQIVILHRRLLAIVRDDAVCRRLMTVPGVGPVVALTYRVTVDVPARFRNSKAVGAVFGLTPSKYQSGESERTGRISKCGDEMMRMMLYEAAQVMLTRTIKWSWLKAWGMKIARHRGTKRAIVAVARRMAVVMHRMWVDGTEFRWTREVAAV

SEQ ID NO: 286731 - protein, 354 aa, unidentified
METQINFEQLQVYVGIDVHKKQWSVSIFTDAAHHRTFSQPASPDALKTYLDHHFPNARISCAYEATKLGYWIYRTLIAFGYSCMVVNAADIPTSNKDSSNKTDPVDSRKIGRALRAGLLTSIHVPDKITEGDRQLFRYRKRLLGDLTRVKNRIKDKFLFTGTMIPNEFDNSNWSKSFLRWIKTASLPDPSTRLTVDFLLDQYNLIYRHFLKVSIEVRKLQRTARYKTKAKLLRSIPGIGPLTTVELLCEIESIDRFSCFKKFNGFIGFKPGSHSSGEHDWKGSMTYRRHRALRSSLVECAWSTLQKDPAMLVRYNELKERLTGKRAIIVIARKLVSRIYYVLKNQKPYELGIVN

SEQ ID NO: 286732 - protein, 341 aa, unidentified
MKSFIRIGVDLAKNFFQVHAIEREGGIAVTRKLTRTKFRDFFRGVEPCRVGMEACGSAHYWARELKAMGHDVVLMPPAYTKPYVKRGKNDAADAAAICEAMSRPEMRFVPVKSVDQQAVLMLHKTRDLLVKQRTMNVNALRGHLAEFGLIAAKGIHRLEELLTLARAQAALPDQALAAVEMLARQIEQLDTSIDGLAKSIGKTSAKSPTGRLLMEVPAVGPLIASAMTASYPDPGVFKSGRDFSASLGITPSQHSSGGKEKLGAITKKGNRYLRKMLVVGCTSVLRVAAKYKGGLAEWIAQMRKTKPERVVAVALANKIARICWAIMSTGEGFREELFTKA

SEQ ID NO: 286733 - protein, 412 aa, unidentified
MLKIVYPVCCGMDVHKSFVVACIASTNDHGVTTYRSGRFSTFTGDLRRLAAWLHAHSCTDVCMESTGKYWIPVYNILESSCEITLAHPKYVKAIRGKKTDKKDAKWIADIFKHGLVCGSFIPSADIRQLRDLMRYRSKLTGFSTGEKNRAQNCLTVSNIKLDDVFSDVFGKTASAITQRLLENDAPFDVTLFLNKNLKASADHIQAAVDGHICTHQAGKLRVIRSHMENLTACKKSLETLILGLAENYLSTLDLILTVPGIQVFAAVGILSEIGADMSVFPTSKHLCSWAGLTPQNNESAGKKKTTRISRAGAYIKPLLVQCALCAIRKKSNPEIRSRYLNLKKRRGHKKAIIAIARMLLTAIYNMIKRNEKYNPALYRKADTPPRNREVSVNEAIYILQRQGYLVTAPQSA

SEQ ID NO: 286734 - protein, 369 aa, unidentified
MKKDTIFVAIDDSKRTLVLGILRPGADTPETRSIPNEPRHVQRLFTRVKREGPVRVCYEAGPAGYDLYRQLTALDVPCQVMAPALTPRKPGARIKTDRRDAGKLVRLFRAGELTPITVPNEAGEAARDLLRCREDVQEDLLRWRHRLGKFLARHGRVYREGRNWTQRHWTWIRSQHFTLPTLERTVVEYRCAVEHLLARVADLTQEIAALAETAPYREPVGWLRCFRGIDTLAAMTLLAELGDVHRFAHPRQLMAYLGLVPSEHSSGDRTQRGSITKAGNTHVRRILVEACWPARHPPRLGATLARRSQGQPPAIRAQAWQAQRRLHQRYRHLVGHGKRPPVAVVACARELAGFLWAALTHTASLALAA

SEQ ID NO: 286735 - protein, 383 aa, unidentified
MVKGSIVKAAYGETSVASRAESCRRREIGRVLVSQAVAERDPRRRYGTSPNSRLSRRQTASSHLQVRDKTMSEPVYVGIDISKDTFHVATCPDLIKTSLPNTPAGHRQLCKSLQNQTVALIVLEATGGYERPLAAELLNASLPVVVVNPKQVRDFAKGMGQYAKTDPIDAQVLAKFAQIVKPAPKSHATPQTVELSELVRRRRQLNDLRTQESNRLLMIHHLKVKKSIKKMIKTLDFQINEIDQLITEQIDADDDFRNKDCILRSAPGVGPQTSAMLIANLPELGKLNRQQITALAGLAPWDRSSGKYDGKAHIWGGRKEVRSVLYMAAFTACRFNPVIHEFAERLKQNGKAYKVVLTACMRKLLIILNTMIRTQTLWTPNIS

SEQ ID NO: 286736 - protein, 404 aa, unidentified
MYNAVGIDVSKGKSTVAVLQPGRTVIRKPFDVSHTSHSLNELTSYLGTLDGDTMIVMECTGRYHEPVLKALSQAGLFVSVVNPHLIKNFGNNSLRKVKSDPADAKKIARYTLDNWTELRQYSGMDNTRTQLKTLNSQFSFFMKQKVAAKANLIALLDNTYPGVHKLFDSPAREDGSEKWVDYAYSFWHVDCVRKTGLKAFTERYRAFCKKHHYIFQPDKPEKLFNAAKELVAVFPKEKTYKLLIQQSIQQLNLASEHVERLRREMNELASTLPEYSTVMGIYGVGKTYGPQLIAEIGDVSRFTHREALTAFAGVDPGVDESGQHKSKSNRSSKVGSARLRKTLFQIMTTLLQNAPENDPVYRFLDKKRSQGKPYYVYMTAGANKFLRIYYGKVKECLRNLEQTS

SEQ ID NO: 286737 - protein, 356 aa, unidentified
MSRLAGTIDGVIGVDPHRDTLAAAATDPVGGLLAQTSLRADAAGYRRLLAFAQAQVPGRRCWAVEGAGSYGAGLTAFLQAQDERVVEVGRPKRPPRRTGAKSDALDAIRTAREALAHDHPLAPRSRGDREALRVLLATRHGACVAKVSATNQLKALIVGAPEELRAELRSLATQRQIARCARLRDRPARSLEQRMTVRALRSTAQRIQCLAVEAAGLRAELERLVAAVAPWLLELPGVGPISAAQVLVSWSHGGRLRSEAAFAALGGANPIPASSGQVTRHRLNRSGDRQLNRALHTIVVARLRDDPATRTYAARRRAEGKSVRDVRRCLKRVVARQLFKLLERSDRSAVEVVKVA

SEQ ID NO: 286738 - protein, 405 aa, unidentified
MPYFGGLDWGAAGHAVCVVDETGAVVFALEIKHDAAGLAELRKTLGRLAPAGAIRIAIERPTGLIVDALVEAGHPVVPIHPNIVKACRPRYRAASGKSDAADAFMLADILRTDGHRFRPLTPSSDEIKALRALVRGRDDLVAERIALANRLRSLLEGFWPGAAVVFADIDSPIALVFLQRYPTPDSAARLGEKRMKAFLASHSYSGRRSPAELLARLRAAPTGLAGEVESEAKGEMVRALAAVLERLVGEIAKLTARIAHTVADMPDGQIVMSFPRAGRICAAQILAELGDVRERFPTADHIVAEAGASPVTHASGKSRGVVFRWACNHRLRAAITCFADNSRHASPWAADVYKRARGRGCDHPHAIRILARAWIRVLWRAWTDATPYDPALHNAARPHNQNLAA

SEQ ID NO: 286739 - protein, 360 aa, unidentified
MAKARTLVGLDVHARKVVAAVLDAETGELAFFSMTADIAGVAGFCAGLPGPVRAAYEAGPTGYGLARELARRRVGCVVAAPSKIPRGSGERVKTDRKDAELLARLLLAGKLHPVRVPGREEEALRDLIRAREAVRVDLVRCRHRLSKLLLRQGIRFEDGDAWTTRHRQWLSTITLSQPAAQATLLDARGAIDALLHRREQLEREIIALLPGSSWAVQTGWLRCMRGVDTLTAVGLCAEIGDFASFRKPAQLMSYVGLVPSETSSGQQRRLGSITKAGSTHARRLLIEAAWHYRKRPRIGTALTERQAGQPPEAIAIAWSAQRRLHRTWTRLEQRNKRRTLIAVAVARELAGFCWAICQIE

SEQ ID NO: 286740 - protein, 354 aa, unidentified
MSQTANTAIAVIGIDIGKNSFHVVGHDARGAIVLRQKWSRGQVEARLANIPPCRIGMEACVGAHHLSRKLASLGHDARLMPAKYVRPYSKGQKNDFNDAEAIAEAVQRPTMKFVATKTAEQLDLQALHRVRERLVSQRTGIINQIRAFMLERGIAVRQGIGFLRTELPTILATRTDALSPRMLRVIEELAGDWRRLDQRIDGLSGEIEALARQDQACSRLMTVPGIGPIISSAMVAAIGTGDVFSKGRDFGAWLGLVPKQISTGDRTILGKISRRGNRYLRVLFVQAAWVVLVRIKNWERYGLKSWIEAAKRRLHHNVLAIALANKLARIAWAVLAKGRAFELTRTDDAGVRPA

SEQ ID NO: 286741 - protein, 337 aa, unidentified
MDYFAGLDISMDETHICVVDREGAVAYESKTESTAQAVAGELAKAPSCRRIVFETGRMAPILFHGLSRLGIPAVCVESRQAYQALKSLATHKTDRNGARGLAHLARTGFFKPVNVKSLPAHALRSLIIARKKLVGQRVTLENQIRGLAVVFRRPNPSRAHRRFYRSSSRGERRDRWSFCHHEGFGRRASGCDAAVAAIDADMRRMTTASGACRRLMTIPGVGQLTALAFVAAIDDPSRIRRSRDVGAYLGLVPRRYQSGEVDYVGGISKCGDRRVRTLLYEAANVMLTRYKGQLKLKHWAFAIAKRSTMRKARIALARRLAIIMHAMLRDGTEFAPA

SEQ ID NO: 286742 - protein, 320 aa, unidentified
MTSFVGVDISKAHLDVAVRPSGDVWQVGNDPEGVATLAERLGALAPDLIVLEPTGGYELVLVTGLLAAGLPVVVINPRQARDFAKAVGKLAKTDTLDAHVLAHYAEAVRPEVRELPDEAARELTGMVARRRQLVDMHTAEENRLHSVPRRLHPQVHEHLEALERYIGELDRDLRELIRSSPIWQAKDELLQSTKGVGPVLSATLIANLPELGALGRKEIAALVGVAPFNRDSGTLHGKRTCWGGRGDVRAILYLATLSATRHNPAIRDFYHHLLTAGKLKKVALTACAHKLLLVLNAIVKNQTPWDPQFETGRLTLEHSC

SEQ ID NO: 286743 - protein, 345 aa, unidentified
MKKVVAGIDLHSNNVVIGVMDMDGKRLASQKLECKLMEVVKFLAPYKKRLEKVAVESTYNWYWLVDGLRAYKYPVVLANPAGMQQYNGVKHADDKNDAFFVAELLRLKVLPTGHIYDPKLRPVRDLLRRRLMLVHHRTALMLSFKSLYTRTTGQVMPLNELKAFEVKKAQGLYQHPANQLIAGMQIKHIEGLTESIEEIEKRVMASAWELPYYSKLTTLPGVGRILGMTITMEVGDIKRFASAGNFASYCRTVEAKRTSNSKKKGENNSKCGNKYLSWAFVEAANFARRSDEQCRKWYDRKAAKTNNILATKALACKMAKAAWYLMSEGGEYDGKRMFGQLVKKK

SEQ ID NO: 286744 - protein, 342 aa, unidentified
MKKIMKQVAAIDVAQDELVVCLGRLDESLNKELFAHKTFGNDLKGFTDLVNWVKKLSVAGLGVRYVMEATGVYHESLAYYLHEKKLEVSIVLPNKISNYARTLEVKTVTDRTASEAIALFGLERQLDTWSRPAAIYLQMRQLTREKGQLLDERTVLKNQLHAELAGALPNKKSVERTQKRIALLTKQEKEIMEELKGLLKADPAMKEMVKLLSSIPGIATLTAATILAETNGFDLIRNKRQLTSYAGLDVKEKQSGTSVRGKSKISKHGNKKLRRALYMPALAAIRCDERFKNIYARLVGKHGIKMKAAVAVQRRLLEMSYTIYKTGQPYDKQYLKKLGGNQ

SEQ ID NO: 286745 - protein, 410 aa, unidentified
MSERPYAFYVGVDWASETHQFTVLTPERHLEAERRIEHTGRALSEMADWLTALADGEPARIAVAIEVPRGPVVETLLERGFHVFAINPKQLDRFRDRHSPAGAKDDRRDGFVLADSLRTDRPAFRQVHVDDPLLIQLRELSRAEEELQTELRRLSNRLWEQLQRFYPQVLRLSPAVDEPWIWALLQLAPTPVAARALRRATLARLLARHRIRRVTAETVLAELHSPALRVAPGTTEAAREHIALLLPRLQLLHEQRGRCARRIEQLLDALEGSDAEHRDVTVLRSLPGVGRVIAATMLAEAARPLAERDYHAVRTQGGVAPITRQSGKSVLVRMRYACNHRLRNALYHWGRVSAQHDPSTRRHYRALRQRGHGHARAIRGVIDRLLVVLMAMLRTGTTYDPARRRVPAAA

SEQ ID NO: 286746 - protein, 412 aa, unidentified
MEVYCGIDWAEDHHDIALVDRDGKLLARRRISDDAAGLAALLDLLAEHGDTPDDLIPVAIETPRGLLTACLRATDRQVYPINPMAVARYRDRHSVAGRKSDRGDSVVLANVLRTDLHAHRPLPADTELAQAIAVLARAQQDAVWDRTQAHNRLRSHLREYFPGFLAAFADARGGILRPEARAILAAAPTPADAARLTLTQLRGLLKKAGRSRGIDAEAARLRDAFRIPQMRQLPLVEQAMGRQALALLGQLDAACAAADDLEQAAIQSFNQHPDAGIITSFPGLGPIAGARVLAEIGDDRSRFQDAKGLKAYAGAAPITRASGKTKSVTHRKVKNNRLNAAGYVWAFSALTASPGARAHYDRRRDDGDRHAAAQRNLFGRLLGCLWHCLTTGQEYDEATAFPATTKKLPRAA

SEQ ID NO: 286747 - protein, 313 aa, unidentified
MASIGEVVIGVDPHPRSHTACALDQEGREQGRMDVGSDLDGAEQVLRWARQYEPRRWAIEGPGNAWVRPLVATLLGAGETVVAISPAMTAEYRKRHWRGKDDRIDAANAARALRANPALPRYTPPDYERRLKDLTRTYQRVSHQLTATRMALRLLETAEAHEALQGVEGCLKEARVELKKALTRAVQPLAGPLLELRGVGPVVAAMVLAEAGSISRFRSRDHFASFAGCAPVRWASGAHDSVRVNPGGSRRLNWAAHIVVLSRLRLEERTREYRDRKLKEGKTQREVIRALKTYVCRELYTVLKSLNTSPAPA

SEQ ID NO: 286748 - protein, 356 aa, unidentified
MLNDKKYIGMDVHKESISIAVRNDAGKIVMECVIETKASVILEFIDGLRGDLQVTFEEGTWAAWLYDLLKPHVTQLVVCDPRKNASMREGNQSDKIDARRLAELLRLNHLNPVYHGEHGLRSLKELVRSYLTITKDLGRVMSRVKAIYRSWAIPCTGKQVYAPRHRAEWLGKIGEPGVRRRAEFYYQQLDALRALRQQVRRDLLAESKKHPAWKRLCQIPSIGPIRAAVLLGILQTPHRFRGKRQLWAFSGFGIETQSSADHRSVDGQLQRVKKPSSIRGLNRNCNHDLKNLFKGAAIVASSKPGPFQEFYTALLTKGIRPEMARLTLARKIATIVLIVWKRGASFDAQHLKPQTA

SEQ ID NO: 286749 - protein, 386 aa, unidentified
MYFIGVDIGKNKHEATVLDDTGRSVGKSIRFNNDEEGFRQLWDALPAQPRQLAMEDTGHYWLNLYLFLVSNEEKVLVINPIQTEAFRRGQIRRTKTDSRDSWVIAELLRTNAAHASYVPEQWVQQVRELARFRFGLVDQVGDLKRQLIAVLDRVFPEFEKLFSDPFIRSARELLKTAPLPEEILKFDLSELSALLAGASRGKFKDAKASEVKKAAGCSVGARFCQDTARLKIRCLLEHIEFIEDQIADIESQLVELVQDRDQYLCTIPGISTTTAAVLLGEIGDINRFERIEQLAAFAGIDPTTVQSGEFSSTKNHMSKRGSPHLRRALWLAATPARRSDPGLQAFYEKKIAEGKHPSTATGAICRKLLNRIFVILKEQRPYEKFN

SEQ ID NO: 286750 - protein, 467 aa, unidentified
MTIPKEVGHDHKKSDARLRAALPAIRPMVAGIDVGSSQHWVCGPAKADGTPNVRVFGTTTAQLNELADWLAEQGVESVAMESTYVYWIPIYELLESRGMDVLLVNARQLHNVPGRKTDFSDCQWVQLLHSCGLLRGSFRPGEAITRLRALQRQVGNLVAERTRCVQWMQKALDQMNVQVHRAVSDLTGVTGMAIVRAIVAGERDPARLAVHRDRRCRKSAEEIAQYLTGNWREEHLFNLASALRLFDALGSEVASYEARLLEEVEALQPPERRKEPVPVHPNPAKEKAIKARGEQQARTTLWRFAGVDLTRIDGISAGVAQTVLTEVGPNLAAFPSEDNFVSWLRLCPRTPISGGKPLKKRRNSLGANRIAGVLRMAATSLQRSKSALGAAFRRIARHKGGAVAVFAIARQLALLIYRMLRFGHDYVDVGEKAYECKFELRRLVALTEAAKNLGYTLVPQVATAMKS

SEQ ID NO: 286751 - protein, 354 aa, unidentified
MIIIGCDYHPSFQQIAFVDTETGELQERRLQHREEAEKFYRDLAAQGRKVGVGMEASGHARWFERLLAELQCELWIGDAAEISAKRVRKQKTDRQDAQLILRLMMKDDFPQIWVPSWENRDLRQLLWHRHRMVQARTRIMNQLQAVALKEGLRSKKRLWREAGREQLEAIRLAPWASQRRRDLLELLDRLNPTIAKLTQAIEEEVGKCPAARRLQTHPGVGPLTALAFVLIIGKADRFQCGKQIASYLGLVPLEKSSGHQRRLGHITKQGNSLLRFLLVEAGQVTVRSLPEWRSKYVHLTMRRGRKIAKVAMARRLAVRMYWMMRKEWDYERLRKFGSHAGKPGSGDGVKSNTE

SEQ ID NO: 286752 - protein, 325 aa, unidentified
MQTQTHYTGIDISKSFFDVAVAEAHGYRYYKFDNNEAGFSALFKILPEGSVVVMEASGPYYLPLACYLSAKGIAVSVINPLVIRRFCQMRMSRAKTDKKDARMIAEYGHAEKPGLWQVPQEHVIALQQMETLLAGLHKEYTATSNQLESFTSSGMLDKRLEKLIKKELKHKQELIDQLTVEMEELAKKHYARMLADLESIPGMGRKTAMMLIVLSGGFSRFDDYRKLSSYIGLCPRIFESGTSVKGKARICKMGMSRIRAMLYLCSWSAKRCNKACRQLYERLIAKGKAKKLALIAVANKLLKQAFAIATSKTTYNENYIKNICF

SEQ ID NO: 286753 - protein, 350 aa, unidentified
MNHKCKIIIGIDTHKATHVAVALDTQGTRLAALSIPTNPKGYLELDRWSQSLGEVHAFGIEGTGSYGAGLSRSLLAQGHNVVEVTRPNRQLRYTQGKTDTLDAEGAARSVLSGQATARPKTQTGLSEMIRHLKVARDTAVKSRSQAMVTLKTLIINAPADLRDVLDKIRGKVALIRHIAAFRPGEINNTMASAKAAMRALARRWLWLHEEIITHDKELERLVTERAPDLMTSHGIATLTVAEMLILVGDDPTRIRSEAAFAKLCGVCPIPASSGKTHRFRLNRGGNRQANAALYRVAIVRMRGHEPTLAYVRKRTKDGKSKSEIIRCLKRYIVREIYSQLCLPKSAQIAA

SEQ ID NO: 286754 - protein, 419 aa, unidentified
MIIRSLGGAVLFIGDDWAEAHHDIEIEDEAGRVLARRRLPEGLAGITMLHELVAEHLDPTAEPDQVLIGIETERGPWVQALLAAGYVVFAINPMQVARYRERHSTSGAKSDPADAHLLAEIVRQDRGHHRPVAGDSELAEHIKVAARAHQTMIWSRVRQANSLRSMLREYYPAALSAFGAELAGREALAVLAAAPTPDQGRRLSQARIESLLRKAGRQRNVTATAAKIRAILASKQLTARPGVVPAYAASASALIVVLSAMAEQTEVLAWQVEQGFGQHPDAEIYLSQPGLGVILGARVLAEFGDDPDRYADAKGRKNYSGMSPITKASGTKRVVLARYARNRRLGDALFLQAYSALRASPGARAFYDRQRDHGATHYQALRALANRLVGILHGCLRNHTLYDEHLAWHKEPDKLSPAA

SEQ ID NO: 286755 - protein, 406 aa, unidentified
MEVVHEHCCGLDVHKASLTACVLSSQKREIRTFATMTDDLLRLAQWLREEGVTHVAMESTGVYWKPVHNILEQGALELLVVNARHVKAVPGRKTDVKDAEWLADLLRHGLLRASFIPDRAQRELRELVRYRRGLVDQRGDVARRIQKVLEGANIKLGDVASDVLGVSGMAMLKALVAGEADPVALAALAKKGLKRKRSELERALLGSVGDHQRYLLRHQLQQIEFFDRQIADLSQEIEVRMRPFEVAIAHIDAVWGLGRRSAEAILAEIGTDMSRFPSEKHISSWARLCPGNDESAGKRRSGWTGKGNRWVKSALVEAAWSAVRNKNSYYAALYHRLGQRRGKKRAIVAVAHSLLVTIYFMLRDGTVFQDLGANYFDRRDREHITRRSVRRLESLGYHVTLTEGAA

SEQ ID NO: 286756 - protein, 339 aa, unidentified
MKYTPVGVDIAKHVIQVHFIDEHTGEVIDKQLRRQYFLMFFCNREPCLIGIEACGGSQHWARELTKLGHKVRLLQARFVKAFVIGNKNDVMDARAIWMAVQQPCKEIAVKTEEQQSFLVLHRTRMQLVKFRTAQINSLHGMLLEFGETIHKGRAAMDREFPEALERLKERLPPYVISVLDNQFNKLNELDLQIDDIEKQLTSVARQNETCRRLLDIPGVGPLIATAAVAIMGEASAFKSGREFAAYVGLVPRQTGSGGKIRLPGISKRGDKYLRTLFIHGARAAALLTKEPGPWITELKKRRPASVAIVAMANKLARTVWAIAAHGRKYNKNHVSIRPY

SEQ ID NO: 286757 - protein, 343 aa, unidentified
MDHYAGIDVSLELSSVCVVDAAGRIVREARVPSEPDALIAWFRGLGPQVSRVGLEAGPLSQWLYAAMRGAGLAVELLETRHVRDAFKAMPVKTDRKDARGIAQLMRLGWFRPVHCKSLPAQEARVLLTTRKLLQAKHHDVEMSLRGVLRGFGLKVGPTTPRSFSGRIRELVEGHPTLTVVAGALLAAREALGDQLRGLEKRLRDRAREDERARLLMTTPGVGVIVALTFAAAVDDPGRFRSSKAVGAHFGLAPRKYQSGETDVTGRISKIGDAGVRTALYEAANVILTRPVKGSALKSWAARLANRAGMRKAKVALARKLAVVLHRMLADGTPFAAGRAAAAA

SEQ ID NO: 286758 - protein, 411 aa, unidentified
MEAAVITAVGIDVSKSKSTVAVRRPGGEIALRPFEVHHTNSDLKKLASTLKKLGGDIRIVMEHTSTYWRPIALTLKEAGFFVSVVNAMLIHDFSDNTIRKLKTDRADALKIANYALTFWDTLPPFNNEEETRLLLKMQSRANERITATATALRNGLIALADQTFPGVNIAFDPNTKNANGHEKWVDFFLRYWHKDCVCQYSMEAFTESYRGWCKRKNYKFRTDTSHKIYLLAQEGVATLPRCESTKMLITQACKSLNAVCEAKQSTQLEMQRLAAMLPEYEVVMQMEGAGPITGPALMAEIGDVRRFKNKKALVAFAGIDAPPFQSGAFESKSRHVSKRGSPHLRRTIFIVSNIILTRSNPENAVYCFMDKKRSEGKHYYVYTVAGSAKFLRVYYARVTEFLRSRPSPDAC

SEQ ID NO: 286759 - protein, 451 aa, unidentified
MSTTLSILDSLAAFVDVGSEHMHVSIAGGPPEVFGAMTGELHRLRDWLKERSVRSVAMEATGVYWLPLYGVLEAAGLEVLMVNGKHTRNLPGRKSDMQDSQWGSTLHAHGLLRGGFVPPALIRQLQDYLRLRQDHLTMAASHVQHMQKALDRMNLKLHDVISNVVGVSGLAVIEAILAGERDPEKLLGLCDVQIKKRKAAQFREALRGTWTEEHVFALGQALESWRHYQRQMQACDQQIKAVLDRLEASLRAPAVPPTDAGVGGERPVHKRAGINAPQIEGLEGLLMRLCGGKNLMVLPACTSYSLLQLIGEIGLDLSQWPSAKHFTAWLGLAPGSCQSGKSYRGVGRKRNRAGRLLCVIARSLARSKDMALGGFYRRMAARRGGLVANIATARKLAVLIWQSMVKGLDYVEEGLKRYETQVLETKHRALNRLAKQLGVSLLPATSEPSHA

SEQ ID NO: 286760 - protein, 466 aa, unidentified
MKPYYMGIDASKGYADFMIINAQKKPVIQGFQLDDTFEGHQALYNIIGRFHAKHPDAMLFAGMESTGGYENNWYNSMIAFQGSLDIQTARLNPLGVKHNSQADLKKNTTDKISAQNIAEYLVAHPEKVVYQQQDQLAGLRKQWGFIQMLIKQRTQFLNQLKGLLYTSNPELLRYCHAETPAWMLKLVVQYPSAARLKKAKAKTVAKIPYVSNKRAQQLVSDAKRSVASATDMAAQKLVVATAQQIIHLNKTIDQQTRRMIATCAMPEVELLKTFPGIKDKSAIGLIIEIQTVRRFAHVKKLASFFGVHPVYKASGDGVGGIKMSKQGRKQPRQILYMVTLAALKSNPLIRQLYTKHQKSGKHNMAAIGICMHKILRIIYGMLKHNKPFDPRIDIANSQRSAQVRKPAPKKNPSRRFQAYDTKAPVSRRQKKKRLERDGSHSVKVTKSGITVPVPLGNIIANILPEL

SEQ ID NO: 286761 - protein, 349 aa, unidentified
MTMVETRLVCGGVDTHSLVHVAAVVDHNGGLLGIEEFEVTRAGYAKLLEWMRGFGEVFRVGVEGTGSYGVDLARHLAREGVEVVEVDRPDRVERARSGKSDPVDAVAAARAALSGRAAGKPKGRNGAVEAMRVLCVAKRSARNQRIAGLCQLRHLGFCAPDELRVQLKGLNTNQLIAKTAGFRPNASNDVVTSMTKLALRELGRRVQHLEAEIARINVELERLVIATAPQLLDVYGCGVHAASLLLVAAGDNPDRLRSEAAWAHLCGASPIPASSGKVTRHRLNHGGDRQANHALYRIAIVRMRHDPRTRVYVERRRAEGRTNGEIVRCLKRYIAREIFHVLPRSILID

SEQ ID NO: 286762 - protein, 356 aa, unidentified
MKIIGCDFHPSFQQIAMVDTETGEQTERRLDRGAAMVFYRGLEGKVMVGMEACGNTLWLERLLAELGHELRMGDAAKIRAMEVRKQKTDRRDAELLLRLLLENRFPQVWVPSPEQRDVRQLLLHRHKLVGMRRQIKNQLQHLALNQGIQQKWRLWTEKGRTLLEELPLTGRTARRRQDDLKLLDELNRSIAELDAVVEQEAKNHAIARLLQTHPGVGPITALAFVLTLGNIERFARSRQVVSYVGLNPSEHSSGGRQRLGSISKQGNPMLRSLLVEAGQSAARGDTELARAYQRLKHKKHSGVAKVMVARKLAVRLYWIWKTQQPYAATRMQGSPSHPVVAGKRPSCLNGRPASQR

SEQ ID NO: 286763 - protein, 352 aa, unidentified
MQHFIGNDFHTRYQVVAWIAEQTGEICQRRLEHEGTEVEKFYAQFPPGTVVGIEATIPAYWFERILEKLGHELWVGDAARIRAYEVRDQKHDPRDAGNILDLLRTGRFPRIWVPSLEERDLRQLLMHRLKQVRARTQVKNQLHYLAISQGLCRKRKLWSAKGRAELESLALLPWAGRRRKELLEGLDRLDEQIRALDRAVEEAGGKREEVALLRTHPGVGMVVGLAFVLTVGPITRFLTSRKLVSYLGLNPRENSSGGHQRLGAISKQGNSMMRWLLIEAAQTAARFDPELHRVYQRLKSRRVSGVAKVAVARRLAIRLYWMLRTRHNYAQLVRMSGSPSSAVVPSKTGSKV

SEQ ID NO: 286764 - protein, 416 aa, unidentified
MKRNKPKKLGKVNGNTLIATIDIGKKMNYGYFRAPDGRDIKPFAFYNLRDGFEKFWAKLVEFQKGHNLEEIVVGFESTGPYAEPMLHFLKKKQITLVQTNPVHTKRLKELTGNSPNKTDEKDPRVIADVIALGHALTLVIPMGPAAELRRLSQARERAIKSRTSMSNQLQHLLFVIFPEFLWKTKSKSVLHLVESCPTPESIVRMGIEALCATLRKVSRGKLGQKRAKEIFEAAKKSVGISEGRESILKEIGHLVSNMRNHDGFIDGLEKEMKHYLEKIPYSHSILSIKGIGEVTAAGLIGEVGDFRKFSTISEITKLAGLDLYEISSGRKKGQRRISKRGRSYLRKVLFFAAINAVKSNGILHAKYQQMLCRGMAKIKALIAICRKLLRITFALVRDNTVYVSNHQHMSDSKLAA

SEQ ID NO: 286765 - protein, 360 aa, unidentified
MPVAVADGRPMHLWDTKPVGERGSSSAVPLNPNSRQGRLRKQSPLRQGWDQMEKIVGIDVSKDRLDVAVAPQGEVFAVGNDHAGIDDLIVRLKAIGADAIALEATGGFETLAVAGLSSAGLTVLVVNPAQVRAYAHAIGRRAKTDPIDAAVIAAFVLATKPEVRPLRDAETQALSELVARRRQIVQMIVAEENRLRMVLAKQAQKSVKRLLAALRRELESLDADLDDHIRKSPVWRVREALLTSVPGVGPTTARTLLAELPELGSLDRRQIAALAGLAPWTRQSGKWKGKSFIGGGRGKVRAVLFMAALVASRHNPGLKAFRDKLVASGKPKIVAIVATMRKLITILNAIIRDNKPWQNA

SEQ ID NO: 286766 - protein, 315 aa, unidentified
MSEVDCFAADVSKRELVIAVYPGEVGVKRIANQEAVISAWLDTLPAGSVIAMEATGTYHRRLADLAHTRGLVVYVVNPRDVYYYARGMGARGKTDPSDAKLLARYVAHERAHLHPYLPPSALCERLTTLLERRAVLVRTRQALTQSLADLPALAGEKRNLFEAVAALLCGIDQQLAALTSSDASTAKLVSRLKTISGVGPLVASLLCALFKRFAFRHADALIAYLGLDPRPDESGQHRGRRRLSKRGHPEWRRLLIAAAMSAARTQAWRDYVNLQRAKALPATAVHVILARKMLRTAFALYKNGQDFIPPSVQPT

SEQ ID NO: 286767 - protein, 388 aa, unidentified
MLLDHPSDGLAAIRTQFGAIFVSLELSRSTWLVTSLSPCKGEKMSKRSMKAGELSELLKLFAELKRKAQARTGESYPLITIQEAGLDGFWLHRALQQEGIESHVVDPASIATPRRRRRAKTDRLDGETLLRTLLAYKRGEVRVCAMVVAPSPAEEDRRRLCRERETLIAERIEHVNRIKGLLFAQGIFDYAPLRRDRRKRLEALRTGDGRALLAHLKAQISRELDRLELLLDQITAVEREQDALLAASKAAGEKTVSNPVAMLLELKSLGPNFTAVLWSEAFYRQFANRRQIASYAGLAATPWRSGGIEREQGVSKAGNPRLRTTMIQLAWLWVRHQPQSALTQWFKVHSQRGRKRAIVALARKLLVALWKYVTAGVVIEGAEIKAAA

SEQ ID NO: 286768 - protein, 353 aa, unidentified
MDNGIRYVGLDVHRDSISVAVRNQAGKLVKEAVIPTQEAALLGWLRELRGPLHVVLEEGTWAAWLYELLSGRVAKVVVCDPRKITRHGNKSDRFDARELADLLRCNRISAVFHGETGLRSLRELARTYVVLTKEQTRTMNRIKALYRSYAIPCAGQSCYGPKQRTTWLAKLPHPALRERAKVYYQQLDSLRSLRQEVRQCLLAQGKKHKAYGNLRGIPFIGPMWTVLLIAFIQIPERFRTKRQFWAYCGFALETHSSGDHRWVDGQRQRSKKAPLVRGLNSNHHHILKWIFKSAAARACAQAGPFQDFHSGLVLHMRPEMARLTVARKMAAIVLILWKKGERFDAQRLKPQAA

SEQ ID NO: 286769 - protein, 331 aa, unidentified
MEEGRRFVGVDVAKARLDVFIQPSGESFSVANDERGISELLRRLEPADFVIIEATGGLEVPVASALATVGIAVAVVNPRQVRDFARATGQLAKTDALDAQVLARFGEAVKPQVRALRDAQAQALEALVMRRSQLVAMLTAEKNRRANSPKVIHKSIDEHIRWLEKRLSGIDDELAGLVRETPIWRARDELLRSVPGVGKVLSTTLLAHLPELGALNRKQIAALAGLAPFNRDSGSLRGSRCIWGGRAQVRRVLYMAVVAAVRSNPVIKNFYAQLRARGKYPKSALTACMRKLLVILNAMLRSKMSWQTPALAASTATFSPRLGAVPEHGCC

SEQ ID NO: 286770 - protein, 411 aa, unidentified
MTKIIVAQDAPVLVAIDIAKARHEVLIAIPDQKRRRRLTVLNEFADFNRLATALKGYGRPVRVAFEATGTYHRALAYYLATAGFEIKLVSSVALARTREALNNSWDKNDPKDAQVILHMMEIGNEQYYHDPLVCGTNDIQELSKTHDIVSKSKTELWHRVLTHYLPLYFPEAGRFYRSSRSDWFFAFLERYPSPHLIAAMGKAAFTTDAWDVIGRKVAKERLLADIYETAKSSVGLPVAPDSDAIRMFRLVLGEGRSLIAQRNQIEDRAVALLKDLPDYQLLTSIPGIGPINALTILAEAGDLRRFGHHRQFLKFCGMDLATIQSGTFRGQTKLSKYGNARLRRTLWMAGQVAILQRTNSFRDKFERYIAKDRHNSHLRRKAYTAIAATLSGHCCAIPCRAVNGPHSSRDH

SEQ ID NO: 286771 - protein, 414 aa, unidentified
MQVIHQRCAGLDVSKRDAKMCVRSPGRRPGSYVKPVTTFGSVTKDILRLRDRLIEAEVTLVVMEATGDYWKPFFYLLEDGPFELILANPVHVKNLPGRKTDVSDAQWLAELGAHGLVRGSFVPPQPIRELRDLTRLRTTLTRDRAREVNRLERVLQDAGIKLSSVATDILGVSGRAILDTLVTGQTDPQVLADLAKMSLRKKSAQLTAALTGRFTAHHAFLVRLHLQVIDQLTTNIAEITAHITEAVKPFQPTLDLLRTMPGISDRVAVTVLAEIGDDMTKFPTAGHLASWAGVCPGHHESAGRAKQVSTRPGNNHLKAALGNAAMGAARTADSYLQARYRRLASRTSALKALVAVEHAIIVSIWHMLSHHQPYRDLGAAYHQRRDPQQTMRRIVKQANDIGLTVRFDPIEVIR

SEQ ID NO: 286772 - protein, 429 aa, unidentified
MNNEALIRIMQFRQFKEKIRGSEEYLIVGIDISKNQHHAFFGTANGKTIKRRLIFKNDFKGFMDFLSMAQVLRGQNGLSQIVFGMEPTGNYHKPLGTFLIKRNQNVVLVSGIATQRNRELLDGRWDKNDTKCAANVADLISQGKCLFYDYPEPKISALRSLLSLRERLKKNYHILRMRIRNNLVAEYFPEFDKYFGQSPKQTLSIVKYCLDPVKINQMEFKEFLFKVTTTNRGLAQEKRLRKIHALASQSIGCESNRYTEFEAKILVDQMEQTTIFIKEIEDKIAEAAGEFEEYHFLLTIPGFGPYISALVLAKIGNPFRFENRKQVLKMSGFDLSAKRSGKGSDKAYPVISKKGSNALRYALFQGAVIASSRNNYFIQYFTNTLKGRKKERGIKIKMRVKLAAKLLIIAWTIMKTKKVFDPALLQSVK

SEQ ID NO: 286773 - protein, 352 aa, unidentified
MAMLADDYEYVIGGDPDRDTVDLVVVETSTGAARAHLEIPTDGAGYRHAQRWALTHAPRRRVWALEGTGSFAAGLAEDLAQSGEHVVEVGAARRTRGTKNDRLDATRAARTAMSRDHQSTPRVRGLREAIRALSVTRHGVLVSRTKAINELKSLIVVAPEHLRARLRSQPLAKQLSVIEGMTTTAEAAVEYRVTLLTLQSIAARIGFLTTQLAAIDPELMGLITAHPAGPALLAEPGVGPVVAAQVLISWSHHGRVRNEAAFASLAGVAPLEASSGQTTRHRLNRGGDRALNRALHTVAITRMRCHPETRAYEARRTLQGKTHRDIRRCLKRSIARRLYRIMEASTRATPAA

SEQ ID NO: 286774 - protein, 346 aa, unidentified
MEITTIGLDLAKNVFQVHAVNGANEVVVKKALRRVQMRRFFEQLAPCLVGIEACGTSHYWAREITRLGHEVRLMPPAYVKPYVKRGKTDASDAEAICEAVTRPTMRYVAIKSPEQQAALALHRTRNLFVKQRTQLVNMIRSLLAEFGIEFRRGIEQALTLAKRIAAGDVPDIPPLAAKVIAGLAGQVLDLQARLGEIERELLAWLRSNDIAKRLATIPGIGTVCATALAASVTAPHQFRSGRQFAAWLGLTPLQHSSGGKERLGRISKMGDKYLRRLLVVGMTSLIRRAKYKPEAVDPWLADLLSRKPARLVTVALANKAARVVWAIMVRGGVYRMPAGASVTTSL

SEQ ID NO: 286775 - protein, 329 aa, unidentified
MNYYWFIGIDLGKTSFDVSILSKDELEIAHGQFKNTEEGMVAMIAWLASHEVDTTQTLFCAENMGKYTSVLALYAVEHKLNLSLACPLDIKHSAGLTRGKNDRIDALRIAQYAQRKYRALKLYTLPETTLVKLRNWLNLRNIHIKNKVALENQLATFESDVVVDDDIVNYSNDAIAESKRKIAELEKKIESVIEENTSVRQNYSLLKSVIGIGMINAVLLLCTTDNFTRFETPRQYASYCGVAPFEHSSGTSVRGKTRTSRIANMEVKTHLTNAAVSAMSADPQLRQYCQRKLSEGKHKASIINAVRFKLIARCFAVVRRQTPFVKLVA

SEQ ID NO: 286776 - protein, 366 aa, unidentified
MGKSSTVFVGMDVHKESIELATADEREARHYARIGGEAAAVDRAVRKLRSVHRELVFVYEAGPCGFWIYRRLRAQGLDCRVVSPSMTPRRAGDRVKTDRRDCLMLARLGRAGELEPIYVPDAKDEAMRDLVRTREDAVCMQRQTRQRLQALLLRNEIRYVGKTAWSAAHRRWIASLKLPHGAQQIAFEEYVAAVQEAGARLQRLGAAIDAELAHWRWRPLVCALQALRGISAIHAVRIVAELGDLTRFVSPRKLMGYLGMIPSEDSSGARRRQGSITKAGNSSARRALIEAAWAYAHPARVSWVIARRQTGLTKSPIDLAWKAQLRLCARFRRLAARGLNRNKIVVAIARELSGFVWAIGQNIKPA

SEQ ID NO: 286777 - protein, 311 aa, unidentified
MNATDVFIGMDVSKDTLDVAVRPTGEEMSFANTEDGIGVMRDFIQSFSPRLIVLEATGGWEAVAVSALAAKGLPVVVVNPRHVRNFAKATGLLAKTDKIDARTIARFAEAVKPEVRPLKDEEAQRLDAFLARRRQLLQMSTAEKNRLVLAPRWTKKDIRAHIEWLEKELDKVNRELQKLIQKSPLWRERDEILQSVKGVGPALSVTLISDLPELGALSRKKIAALVGIAPLNRDSGKYRGRRMIWGGRSQIRVVLYMAARAAIRFNPVIRDFAERLKKAGKPYKVVVTACMRKLLTILNTMVKNGTRWQAA

SEQ ID NO: 286778 - protein, 417 aa, unidentified
MSTKSQKSNKINTQKMVVSLDIGKGSHFGYFRAPGGEEDSPFEVTNSRSGFHQFWKRLCRFKQAHRLSQVIVGFESTGPYAEPLMHFLRQKPVQLVQINPMHSKRVKELTGNSPNKTDRKDPRGIADVMMLGHSLSVVIPQGAAAELRRLTQARERAIKERTAMLNQLQHLVVIIFPEFLKVIKAASCKTGLYLLKRCPSPKAVLALGLEELSRDMKRVSRGRLEHQRAAELFRAARDSIGVTEGRRSMAEEIGHLVDQIERVNAFTDRLERRMRLYLDEIPYSPFFLSMRGIGLITVAGLIGEVGDFRQFDTLSEITKLAGLDLFEVSSGQHKGRRRISKRGRALMRKLLFFAAINTVKTNGIMHAPYARMVGGGMPKIKALVAISRKLLAVMFALARDGSNYIEGYRNHRYQQAA

SEQ ID NO: 286779 - protein, 311 aa, unidentified
MGQLLFVGIDVATDRLDVHVRSTGEIFRVVHDDAGLAQLTERVTALRPTLVALEATGGYEVTVAAALASAQLPVAVVNPRPIRDFARATGQLAKTDALDARGIAAFAEAIRPAAPARPDEQARTVGELVTRRRPRVDMDGAELTRRRLVRDRPVQEQLAAHLGWLEQALVDLERELPQTIRATPLWREAEDLLRSVPGIGPVTAFTLLADLPELGRLPRRPIAALGGVAPVNRDSGTLRGRRTVSGGRADVRRVLYMATVSAIRRHPRIGAFYQRLRASGHPANVAITAALRKLITLLKAILRDRRPWQLT

SEQ ID NO: 286780 - protein, 399 aa, unidentified
MTESSDYESVQVFIGVDVGKDTHHAVAINRSGKRLFDKALPNDENKLRSLISDLKQHGQILLVVDQPATIGALPVAVARSEGVLVGYLPGLAMRRIADLHAGEAKTDARDAAIIAEAARTLPHALRTLKLADEQIAELSMLCGFDDDLAAQTTQASNRIRGLLTQIHPALERVLGPRLDHPAVLDLLQRYPSPEKLASLGEKKLAAQLCKLAPRLGKRLAADIAQALAEQTVVVPGTNAAAVVLPRLALQLITLRKQRDEVALAVEQRVLAHPLYPGLTSMPGGVGARTAARLLTEVACRAFASVAHLAAYAGLAPVTRRSGSSIRGEHPSRRGNKALKRALFLSAFAALRDPLSRAYYTRKMSQGKRHNQALIALARRRCDVLFAMMRDGTFYTPQAS

SEQ ID NO: 286781 - protein, 421 aa, unidentified
MSKQNVEIAAFIGLDWADQKHVLTLQEAGSDQRHRFTLDHTPEALQSWIQLLRNRFGGKPVAIAIEQTRGGLIYALMHVEFIHIYPVNPQTAAKMRQAFYPSGAKDDPTDADLLLEILMTHRQHLRVWVPDDVLTRSIQLLTEGRRRLVEERTALTNQLTAALKEYFPQAVDWFGDLNTARACAFLQRWPSLQDLKQATPSSIRKFYKTQGYRGQDKLEQLITNIKDAQPLTEDDAVLLASAMMVHALVMAIPSLTDSIERYDQKIAALFDQHDDSTLFGSFPGAGPTLAPRLLAAFGSDRDRFEDAADMQQLSGIAPVTEKSGKGIWIHWRLACSKFLRQTFHEFAAQSIFQSDWARAYYDQQRQRGKSHHAALRALAYKWIRIMFRCWKTRTSYDEAQYCNSLKIRRSPLAAELAAAEK

SEQ ID NO: 286782 - protein, 455 aa, unidentified
MKTKKQQAKNADKMISVPVVNPHAAGIDIGSKSHYVCVAQDNVKEFPVFTSDLHEIARHLQAHLVKTIALESTGFYWVPLFVLLQEYGFEVFLVNARHLKNVKGHKTDVVDSKWLQFLHSIGLLSNSFQPDLLTHELRTYSRHRQSLIENASKYINKMNKTLVLMNIQLSAVLRDITGISGLRVIQAILQGERDPKKLEQLVSARCKADRKDIEKALVGDFRPEYLFELKDCYDLYMYYWDKIHNVDKQIEELLKKRSEQHTHQVNRTEFNPQKKKGVSKNDPDFNVASYAYEMTDGVDLTEIPGVSVSTLLVFLTEIGINLSMFPTAKHFVSWLGLAPNRKITGGKVISSSTRKQTSPFAKMLRQAANSAGNSKTKIGDFFRHLAFKKGRMLAIIATARKIGVIIYNMLRNKQPYCYEYSTEDTQRARTIKIKQIQKTLQNYNISKNDLQFATA

SEQ ID NO: 286783 - protein, 449 aa, unidentified
MKRKARNKKRLQDHLKQVNLYAAGIDIGSTSHFVAVPLSLDDKPIREYSCFTVDLEHMADWLKEVGISTIAMESTGVYWIPAFELLEARGFEVFLVNPRHLKNVPGRKTDVLDCQWLQQLHSFGLLRGAFRPSSEICAFRTYMRQRAMLVSSAATHIQHMQKALRQMNLLLDNVVSDVTGKTGMTIIRSILSGQRNPEVLAKHRDANCKNSEEIIAKSLKGHYKKEHLFSLRQAVELYDFYQRQISACDQTIATTLDAIEGPENLDDLPPQKRSYRRKDKMLPFNAREDLYKITGTDITKIDGVKETIALKIISEIGTDMSAWPTVKNFASWLCLSPGNKISGGKILSSKTKTSANRAALAFRMAAFSLTKSKSALGAFYRRKRSQLGAPKAITATAHKIARLVYSMLKYGTEYVDQGQDYYEEKYRERIVKNLRKKAKSLGFKMVPQS

SEQ ID NO: 286784 - protein, 341 aa, unidentified
MKPEMSVLGIDIAKRVFHVVGMDETGKIVLRKRLSRHDLMPFMAHLPPVRIGMEACGGAHYWARRLRAHGHEVTLMAPQFVKPYVKSNKNDSRDAEAIAEAVTRPTMRFVPVKDVDQQDIQALHRVRERLMGERTALVNEVHGLMHEYGMVIPKGVAKFRQAVREQLESKPDTLTPLSQEMFGKLVEEFAALEEQLAYYQEKLDTLAKRHPECQRLLTIPGIGPLGATALVAAVSDASAFKNGRQFAAWLGLVPRQHSTGGKERLLGISKRGDTYLRKLLVHGARATIRWVGLKTDRRSQWIRQLVERRGKNRTAVAVANKNARIVWALLTSHQVYQPAEG

SEQ ID NO: 286785 - protein, 352 aa, unidentified
MSKVFGCDAHKRYSVFDSMNERGQAGLAVRVENERGLFRRYLNGLPAGSQIAIESVGNWYWMIEEMERAGHVPRLAHAAKAKLMMGQINKTDKLDARGLALLLHNGTLPSVWIPPGELRDQRELPRMRMGLVRVRTMLKNRIHATLAKYALDIPEVSDIFGRTGRMLMKKRLEELPPFTRQSVETQLELLDQVEDHILGCEKQIQEVVQASPEMKLLMTLPGVGRILAVVMALEIGQVSRFPGPDHLASYAGTVPRVKSSGGKTFLGKVRPDVNRYLKWALIEAANVVVLNQGRWPNRHVVQLYGRIRQRRGHAKAIGAVGRHLAEAAYWILRRNEPYKEPHGQKPISSSQE

SEQ ID NO: 286786 - protein, 449 aa, unidentified
MKKHDLKQRRLPVIHDHAAGIDIGSRFHVVAVPAELAKESVQTFQAFTSDLERLANWLVNLDITTVAMESTGVYWIPVYEILEAHGLQVVLANAREARAVPGRKTDVNDAQWIQRLHACGLLRASFHPDREISALRSYLRLRERHLDYAAAHIQHMQKALTHMNLQLHHVVTDITGVTGMRIIRAIVAGERSPSVLAAMSDTRCKAGIEVIQASLVGNYQPEHVFALTQALSMYDAYQAQLEVCDQQIAQTLITLSQEKTSPTEPLPKPRHRTRQPNALNFDVRTLLYQLVGVDLTQIHGIGPYLALRLVAECGTDLSRWRTCHHFTSWLTLAPGCRISGGKVLSAHTRKTKNRVTAHLRLAAVTVGRTNTALGAFYRRLAARIGKAKAVTATARKIAILFYNAMRFGMNYQDPGADHYEQKYRERVVKGLYRRAAELGFTLQPAEGVS

SEQ ID NO: 286787 - protein, 363 aa, unidentified
MRFYGEQRRFYCGIDLHASKMYVCVLDEQGNVVLHRNLRTEPEALKRALAPYRASLVVGAECMFSWYWVADWCREERIEFVLGHALYMKAIHGGKAKNDRIDSEKIARLLRGGTFPLAHVYPKEMRGTRDLLRRRNLFVRRRAELLAHVQNTFTQYNVPTASGKGRDRLREGDVGSSFEDGSVQVMLDADVEVIEQLDETIARLETHVLKHAKVHDPARLHLLQTIPGVGKVLSLVMLYEIQDVNRFENIGQFASYARLVSCAKESAGKKQGSGGRKIGNAHLKWAFSEAAALMIRSSPEAKAFMEKMTRQRGKARAVALVAAKIGRAVYWMMKRKQPFDARKLWKSILPKGVREMEGAAMKG

SEQ ID NO: 286788 - protein, 316 aa, unidentified
MTNTKMSKTIINVGIDVGKFKLDVFIHEKAIYFQVNNNPEGIKQVLRRLSYYRVERLVMEATGRYEFNMAEAAYKKKIPVCIAKPLNVRRYAGATDRLAKTDKIDAALIAEYAAVIKPRTTPEKSEKLLIIKDLLSRRRQLMEMRIKELNRIKIMGKAFEISCKRMIKMFDKEIERMEIQLDKHVVNHDEWSEKKEILLSAPGAGNTLTYTILADLPEIGSLNGKEIAALVGVAPMNRDSGKMRGKRRIKGGRAGVRTTLYMATLSATLCNPVIKTFYDRLLAQGKMKKVAITACMRKFITILNAMVRDNVQWNAN

SEQ ID NO: 286789 - protein, 362 aa, unidentified
MNYVGVDIHKKYSVLCALDEGGRKLREAPVEGNASSGFAQFFAGLEGPSKGVVEACWNWGLIHDELEEIEQVEEVVLAHPYKTRLIADAQIKTDRLDAHALGTLLRGNLVARAHVPRRETRKRKNLLRQRLYWARLRTMLRNRIHALLDRQRGLELPQCSDIFGVRGLGFLRRLELPEPDATLLREQLALHDLIAQQMKAQEKRIAAESGSEVMHQHLLSVPGIGPTLAAVIACEVDAIERFPSAEKLCAYAGVVPTTHASGGKTRHGRLLPFCNKWLRWALIEASWVAIGCSPYFGALYQQHRARGKKANTAVLIVARRMCRIIWQLLHEKRDFEKRPLSPTFNFPGCSAHRLPAAKVAGP

SEQ ID NO: 286790 - protein, 408 aa, unidentified
MNAVGIDVSKGKSMVAALRPMGEVALLPQEFLHTEVGLEQMAYAIIALGEDTRVIMEATGCYHEPVAAALHEYGIYVCVLNPLFIKQSGGGSIRKVKTDKADAMKIAKYGLDNWVDLREYTPMDTVRQQLKLCSRQYNLYMKTVVSLQNNLISLTDKTFPGVNELFSSPERADGHQKWVDFVMTFYHCDCICRVSENAFAERYQKWCKRKGYHFSAEKAQDVYLGSCGHFTTLPKNDNTKLLITTAAQQLLAGKMTLAALRTEMTRLAKQLPEYDIVRAMYGVGETTAVQLMAEIGDVRRFPRRSSIVGFAGVDPAVDQSGKHSAKSVPTTKRGSPHLRKTLYQIVCTYLKKSPVDEPVYQFLDKKRSEGKPYFVYMTAAQNKFLRIYYARVKECLEAFDAQQDTSQR

SEQ ID NO: 286791 - protein, 368 aa, unidentified
MTERTTTPPTAVTSTTIGIDIGDRTSHICVLDDAGNVIETGVVATTPEAFAKRFERDDSTRIAIEVGGQSTWIDELLGGLGHDVVVANARRLRMIYENESKSDEVDAEQLARVARMDVTLLHPIQHRQRSTRTDLAKARSRDMLIATRTSLINHVRGMLKSFGTKLGSRGAAYFHGWVREQIPDELRCALDPIVDTLEGVAAQITALDKELERLANDVYPETMLLRQVNRVGLHTALRFVLTVEDPNRIECSRNAGAYFGLRPRRHQSGARDPEMRITKAGDREVRRLLVQCAQPMLGPFGTDSDLRRWGLDLAARGGKSAKKKAVIAVARKLAVLLHVLWKTGQVYEPLKNTNAKGAAKAAKTPVPA

SEQ ID NO: 286792 - protein, 426 aa, unidentified
MSNKIERIDSETLLVGIDIAKHTHWAQMTDSRGITLSKPLRVENTAEGMNRLKREALSLMQKSGLTKIMIGFEPSGHYWRALAWFFHTADGFQLVGVNPYHVKQLKELDDNSQTKTDQKDALVIARLLRDGRYFDLYMPDEEYANLRVLRRHRDQILERRKWIQNQLISIMDEYFPEYEEAGFSVTCTTSRYALYYTPFPSEIDALGEDGLLQLWRHHYPNYHHLRGKFAHRLFLAAQDSIGVTYGIEATRQRIRDLLSLHMQIDQQIAECEAGMEAIMDTIGIQDYLLSIPGVGKNVSAIFVAETGDLSRFESWKQIQKLAGLNLVEQSSGQHKGHAHISKRGRAGLRCVIYQIGDKGMLVNPEMRQYYNYLRHRQVNQLKHQQAILAVGIKMMRIMFFLAKNHKYYDPDQALGEVRRQQIQSIA

SEQ ID NO: 286793 - protein, 404 aa, unidentified
MFYVGIDVAKEKHYVCILDDLGEIATKPFWIYTDIVGLRELVKRLADVSLNNDDFLIGVESTGAYSENLYEYITDSDYKVVLLNSYQTAKYRDFSTLKKIKNDTIDALVIAQLLHSGKYKESYISDDAYHSVKVLGRVKGSLDKKIKTIKREISTVMATVNPEITKVFPNIFTKTALEVIKVYPTATQLAQATPKKLTRLFRHIKGNNFSEDKAKILIELAKSSVYAGRACDARASLLSSYINILELYCQEKKSIEAQIKKIITEEIDAIDNRVENLQSIPGVSDKTIAAILGECGDLRRFTSAKAFIGYLGLYPTQYQSGNSLSVGRLAKRGIPIAKHALYMAAVGSVLHNTQLNKLFHDKVSAGKSKKEALIILSKKIATIMYSIVMYNKPYEPQRVFISKK

SEQ ID NO: 286794 - protein, 340 aa, unidentified
MNKTTTLAIDLAKRVFQLHGTDFRGKATLRQKVRRCQLPALLAQTPPCSVVMEACSSSHYWAREARSYGHKVRLIAPQHVKAFTRGQKNDRNDAEAIAVAAGQPGIPDVAVKSEEQQAILALHRIRARLVKEKLQVSNQLHGLMGEFGVTLPRKSVIGMRRAMMALIEEARVPLLLHAPLKDQLEHLSQIEKRLEDLTVGLTQMANSSSACRRLMKHDGVGPIIATAFAAEVASPAMFKNGRQVGAWLGLVPRQHSSGGKERLFGITKRGDQYLRGLLVHGARSSLRVAERRSDHLSKWVLQVSARRGRHRAVVALANKMARRLWAALRYDDYVPFTAAA

SEQ ID NO: 286795 - protein, 479 aa, unidentified
MKQPKSVRRRPVQQAPHRHKPMNRRERRELARKIQAEDVSLEIVHPDAAGVDIGNEAHYVAVPPKRDSDPVRRFGCTTAELREMAAWLHDCGIRTVAMQSTGVYWIPVYDILEQAGLEVYLVNARDTKNLPGKKTDVQESQWLMKLHTYGLLRNSFRPPQEIRMMRTYWRQRNDLIQGAARNIQRIQKVLTQMNIQLSNVISDLSGVTGQAIIGAILAGERDPKRLAELRDGRIRATPEQIAQSLEGNWQDDLLFILKQEQAAYEFCQRQMAECDQRLKQYLGQRQDRSAGASLPEETRKNRRKKKKGNAPQFDLRTELFRMTGTDLTRIDSIDVRTATTIVSEAGTDMTKWATEDHFVSWLRLCPDNRISGDRVIGKGRLSTNNRLTVAFKMAASTLRESDTYLGAQFRRLRTRLGAPVAIKAMAAKLARLVYRMLRYGMQYVDRGAQLYEAQHRQRQINSLKRKAVELGFELVECAA

SEQ ID NO: 286796 - protein, 460 aa, unidentified
MPRAKPRVASFPTLQPHAAGIDVHAAQHWVAVPPGSAPPPRRPPRRDLLPPHVRAFGACTADLHALADWLGECGVTAVAMEATGVYWIPLFELLERRGFAVILVDPRQTRQVTGRPKSDRLDCQWIQRLHSCGLLAASFRPADDIVVLRGFLRQRQRLVQDAGRQVQHVQKALEEMNVKLTEVVSDIVGVTGLAILQAIRRGERDPAALARLRHPRCRASEADIARALGGTWRAEHLFALDQALAVYETYQRLLGACDERIAACLRGFTDRSGGRPLPAKRAHSRKATALHVDARSLCHRLAGVDLTAIEGIDEATALVVLSEVGPEMAKFPTAKHFASWLGLCPSHRGSAGKIASRHVRRGCNRAAKALRLAAQGCHHAKNAMGGFYRRIQARCGGPKAVVATARKIAERVWRLLTYGADYVRLGEAEYAARYRRKQEKNLAKRAAELGYTLVPTAAPA

SEQ ID NO: 286797 - protein, 316 aa, unidentified
MKDKLGCFVGIDVSKSHLDVAIRPSGKIWTVANDAKGIKSLVDALTDLNPLLIVMESTAGLEMPVAVDLAAAGLNVVIVNPRQVRDFARATGKLAKTDRIDAQILARFGEMVRPEVRPLKDEQIQELSALISRRRQIVDMLTAEKNRLTSAPKRIQKDIKAHIQWLEKRLDNVDDEIQKRIKASPIWREKEAILQSVPGVGPVLTASLLCDLPELGRLNRRQVAALVGVAPLNRDSGLFRGKRKVWGGRANIRAVLYMATLSSVRANSVLKLFYNRLCGEGKPPKVALTACMRKLITILNSMIKNNTPWQPCLKTT

SEQ ID NO: 286798 - protein, 347 aa, unidentified
MDVHQATISVAVRDSTGKLVMESVIETKTATILEFLGGLRGSLWVTFEEGTSAAWLYDLLKPHVTKVLVCNPRKNALLRAGNKNDRVDARKLAELLRTGLLSPVYHGESGVRTLRELACSYLTITKDLTRVMRRLKALYRSWAIPCAGQTVYASRHRTAWLEKLTEAGVRRRAERLFQQLDDLQPLRRQARRELLVESRKHPAHTWLRQIPCVGPIRTALLIALIQTPHRFRTKRQLWAYGGLALDTRISGEYRFAGGQLQRSKKLLTLRGLNANHNHELKNVFKSTATMASNCAGPFRDFYTALVAKGMKPSMARLTLARKIAAITLVLWKKGECFDAGQLTRPAA

SEQ ID NO: 286799 - protein, 396 aa, unidentified
MTKFNAESTSIHTVGAAVESKQSSFHTAYVGLDVHKETIAISVADSGRQEPVYEGEITNTPKRVERKIQQLSERYGGGLLQFVYEAGPCGYGLYRQLLASGHDAQVVAPSRIPKAPGERIKTDRRDAIKLARLARSGDLTPVWVPDTEQEAMRDLTRARDDMKAQERKARQQLNAFVLRHGHHWPKGRSRWTQTHFNWLESLRFEHDWQQVVLQEYIDAVRAATRRVADMMAQMERALPQWSLAPVVEALVALRGIDKLAAMVLMAELGDISRFDSPRQLMGFLGLVPSEHSSGSRRRQGAITLTGNSHARRMLVESAWSYRFPARQTGHLKRKAANAPEEARAVAWKAQKRLCGRYRDLTRAGKNTKLVCVAVARELAGFIWDIVCRVMPAPQTA

SEQ ID NO: 286800 - protein, 414 aa, unidentified
MKLFVGIDVSSQELEACFMNSDGDKLESFKVKNDLQGASHLRDRIVIAVDKHSSSEIHIGLEATSVYSWHPAMYMHEDPALKERKTKVFTINPKLVSKFREAYPDLDKTDRLDAWVIADRLRFGRLTTTIVMQEQYVALQRLTRMRFHMVHNLTREKQYFLQNLFYKCNAFTTEVDSSVFGHALMEMLSEKFSLDDIATMDVTDLADYLRDKGRNRFPDPENVARCIQKAARASYRLSKVVEDSIDLVLGTSIQAIRSIQAQLKDLDKAIERILESMPESKCLRSVPGIDRVYAAGILAEIGNIDRFNDQAAVAKYAGLTWRRHQSGPFEAEDTKRIKSGNRFLRYYLVEAANSVKNRDDEFGEYYRKKYKEVPKHQHKRALVLTARKLVRLVDVLLRNGQLYTPRRKVNSAKD

SEQ ID NO: 286801 - protein, 344 aa, unidentified
MTYYTGIDVSLRSVSICVVDDKGEVCLEAKVAAEIDAIVDRLHRFSSDVRSVGFEAGTLTQYLTYGLQAAGFEVICLEARQVSVTLAAMRNKTDRNDARGLAQILRTGWYSRVHVKSLHSHQVRALLASRKAILKKCVDLENELRGLLKVFGIRLPSRVGHGSFDAELRETVSTDEMLACALVPLLDARTVLYKTYLKLDNAVKGLVRVDPICRRLMSIPGVGPVTALTFKAAVDDPSRFKSSRTVAAHFGLTPRRFQSGEVDNPGHISRAGDADVRSALYIAAHSLLTRNAQWSTLKAWGVRLAKTRGHRRAVIAVARKLAVILHRMWIDGSEFRWGAVATPA

SEQ ID NO: 286802 - protein, 380 aa, unidentified
MTNEMLRRDDTKPVRLLVALELSLSKWGLSAAVEGQPRKRVKTVAGGDYPALLEAVVEFKVRFKLPLDAQVVFCYEAGRDGFYPYRRLTELGHDVWVIDSASIEVSRHRRNAKSDGIDADKLVELMQRKAGGERRALRIVRVPEASVEDQRQLPRERETLLTDRRRLLNQIESVLFLHGYREMPQSGGALRAWLEQPRELGVQLRERLQRDVERLALVESQLAGVEKRMKEQLHEERSGGIGRVALALMQLCGIGLIGAWVLASEIYGWRQFRNRREVGSALGLTPTPYSSGNDQREQGISKAGNKRARSLLVELSWLWLRYQPDSALSRWFQERFSGGGKRLRRIGIVAVARRLAVALWRHTAHGVVPDGARLKTAVCA

SEQ ID NO: 286803 - protein, 340 aa, unidentified
MGWALEEVVENQVFVGIDVSKERLDAALRPRDESFKVANNPRGIATLIKRLKKWRVSRIVLEASGGYEIAAAYDLAAAGLPVAVVNPRQVRDFARATGRLAKTDAIDAQVLAHFAEIIQPQIRLLPDVQTRELMALVARRRQVVDMLTAETNRHGRAVDAVNRAIAAHVRWLRKQLADLDAALERAIRNSPLWSKKARLLRSVPAVGSVTVITLLSHLPELGTLNRRQIAALVGVAPFNHDSGKLRGRRAIWGGRAQVRAVLYMCTLGRNPQLQAFYARLIAAGKKPKVALTACIRKLLIMLNAVLRQRIPWNPELATLPSPFSAARGGAVIGAGSIATT

SEQ ID NO: 286804 - protein, 369 aa, unidentified
MEDRITYIGLDVHKADIVVAVAEGGLRGEVRDYGRIVNTPAALERLARKLGHDGVKLRFCYEAGPCGYGIQRQLSALGHECVVVAPSLIPKRAGDRIKTDRRDAASLARLDRAGELTPVWVPDAGHEAMRDLVRARLDAVQALRRARQQLSGFLLRQGCHYGRPAWTKLHRRWLAGLKFEHPAHHIVLEDYIAAVEAAEVRRDRLTAQIEAMLPDWSLAPLVAALQTMRGIALVNAASLIAELGDLSRFANPRQLMAYLGLVPSEHSSGVSIKRGGLTKAGNGAARRLLIEAAWCYRFPARVSRELRLRQEAQPIPIREIAWKGQRRLCARYRKLARSGKPANVVTAAIARELAGFVWAIARQVAIPAG

SEQ ID NO: 286805 - protein, 342 aa, unidentified
MLIIGCDYHPSFQQIAFCDATTGEYGERRLEHGGEAEAFYRRLHGQAVRVGMEATGGARWFERLLAECGIELWVGHPGKIRAAAPRKQKTDRRDAELLLDLLLQQRFPRLAVPSPEQRNLRQLVGHRHRLVQMQTRVKSQLQALAINEGLRLRRGLWTRKGQAQLQTLALPHWAEQKRCDLLALLAELQRRGAVLDQAVEAAAQASAVVRCLRQQRGVGAVVGLAYELTILDPTRFQTSRQVASYLGLIPSEHSSGGKQRLGHISKQGNALLRGLLVEAAHVAVRWEPEWRRQYVRLAMKKNRSIAAVAMARKLAVRLWWLWKSGLATGQIGGSGSHAEQPV

SEQ ID NO: 286806 - protein, 405 aa, unidentified
MHPIPTTYAGVDWATRSHAVCVVDGTGSVLERYEVEHTEAGLSDLVARLWNSRIDGVAIERPDGPIVDALLGAGLRVVVIASRHVKGLRSRYGSAGNKDDRSDAYILADVLRTDGHRLRYLVPDSPATLTLRASVRARKDLVRTRVRLVQQLEAHLALVFPGAVGLFAKLDSDIAETFLTRFPSAEEAAWLSPRRFESWLDRQGYGGRRSGAELHARLTAAPAGVSGPDVGALMTITLGYVGAIGAVREQIKRLEAAIAEQLAAHPDGAIFTSLPRSGTVRAATLLAEIGDRRERFPTPEALACLAGTAPSTRQSGRHRAVTFRWACDKKLRDAIIDFAGDSRFANAWAADIYGRAVARGKRHPHAVRILARAWIHVIWRCWQDGVPYDPERHLALQRVTFAKAA

SEQ ID NO: 286807 - protein, 345 aa, unidentified
MTQYKRIAIDTSKAVFTLHGIDQQDRPVLRMNLRRAQMIPFFTKLPRTEIAMEACGSAHHWARELTTLGHEVRLVPPQYVKPYVKRGKNDRNDAEAICEASGRPGMHFVPVKSVTQQAESMVLKVRESLVGQRTQLINALRGHAAEFGVIIGKGLGKICPLLPAIEHEASLPSEAKQMADLLGRQITDLDTKIKEIDVRLTAMHKANEVSQRLATIPGVGPITALTLALAVDPKAFESGRHFAAWAGLTPKEHSTGGKQRMGSISRAGNERLRVLLVTGATSVIQAAMKPGSQQMTDWLQALLQRKPRKLVALALANKMARIAWAIMSRGEVYRRPVTAIGAAAR

SEQ ID NO: 286808 - protein, 351 aa, unidentified
MSHKTAATVAHAIGIDTGKNTLHLIGLDDQGAIVLREKIARGRIAARLANVPRCLIGIEAGMATHYVARELGALGHDVKQVPPAYSKPFRQGHKNDFRDAHAIAEAVQRPSTRCVPVKTDDQLDLQALHRVRSRLVRQRTAVINQIRGFLLEHGIAVRQGLRFLRQQLPDILAKRSDVLSPRMIRIMEDLSGDWRRLDERIEHITKEIEVLAGTDVNCGQLMTVPGIGPIVASATVAAIGNGAAFARGRDFAAWLGLVPKQMSTGDRTILGRITKRGNRYLRMLFVQGARAILLRPKSWVKHSFGPWLTTAARRLHRNILTIALANKLARIALSVLIQGRSYETRIVPAAA

SEQ ID NO: 286809 - protein, 341 aa, unidentified
MELIAIDLGRRESQICVRDETGQIVDETRHATATLRTYLSQRPAGARVLVESSAEAFTVADWATELGHEARVVPSILVPALGVGERGLKNDVRDARKLSEMDCRMAVPSVHIPSAQRRTHQTQLTAREALVRMRTKLINTVRSFVRMRAIAPIRATPPTLPRAVRAALLHTPEGVPDYLEALLGSLEHLNAQIQQADHALREVAHGEPVCRLLMTMPGVGPVTALSFVSAVDDVTRFEDARRLTSYLGLVPGERTTGFKTRRTAMTKAGPSRVRWTLTQAAWTLVRVQPDSPLGQWYQQVSERRGKKIAISALTRRMASILYAMWREQRPYDATRAAGRHG

SEQ ID NO: 286810 - protein, 382 aa, unidentified
MKEATRFLGLDVHADTIAAAYADDGRDGEVKSLGVIANEPGAVRRLVQKLGAKRLRVCYEAGPTGYTLYWQLAELGVPCDVIAPTLIPVKAGERVKTDRRDALKLARCLRAGELTAVWVPDQAHEALRDLVRAREAAKADQQRARQRLGKFLLRAGRRPPKNHAAWGTAYVEWIRAQKFEYVAQQATLVDYLSEVDHATERIKRLEAAIDDALQHAAPTVKAVIEGLQALRGVAKLTATTMAVEIGCFSRFESPKQLMAYCGVVPSEHSTGSSRRKGALTKTGNAHVRRVLFEAAWCCRHRPSLGVALKKRQRVVSAATRELAWKAQHRLHRRYVALAGRGKPNQKIVGALGRELLGFIWAVAVQVERERQHEDATTQAIAA

SEQ ID NO: 286811 - protein, 482 aa, unidentified
MKATPKEPAPKATGQSTQPNWHQMNRKQRRDIERKIQRADLSLQLVHPNAAGVDIGNESHYVAVPPDRDSQPVRHFRCTTAELRTMADGLKPCGIRTVAMQSTGVYWIPVYDLLEQAGLEVYLVNARETKNLPGRKSDVQESQWLMKLHTYGLLRNSFRPSQQIRRMRTYWRQRKDLIESAGRHIQRMQKTLTQMNIQVANVLSDVSGVTGQAIIQAILAGERDPQKLAAFRDPRVKASEKEIARSLEGNWQEGLLFVLQQEQAGYEFCQKQMAECDRQLEQYLQQMADRSQGAPLPEEKRKDRLQKKKGNKPQFDLRQQLFRMAGTDLTQIDGIDVMTAATILSEAGWDMIKWQDEDHFVSWLRLSPDNRISGDRIIGKGRLPTTNRVTVALKLAASNLRTSQSYLGAPFRRFRARLDTPVAIKAMAAKLARLVYRMLRYGTKYVDRGAQCYEVQQRTRQIKHLKQKAAKLGFHLVQAPAA

SEQ ID NO: 286812 - protein, 402 aa, unidentified
MNAVGIDVSKGKSMVAIMRPFGEIVSAPFEIKHTASDINSLVKLINSVEGESRIVMEHTGRYYEVLAHQLSEANLFVSAINPKLIKDFDNDSLRKIKSDKADAVKIARYALDKWQNLKQYSVMDELRNQLKTMNRQFGFYMKHKTAMKNNLIGILDQTYPGVNTYFDSPACNHGSQKWVDFASTYWHVDCVRKMSLNAFIDHYQNWCKRKKYNFSQSKAEEIYGKAKELVPVLPNDDITKLIIKQAVNQLNSAAATVESLRTLMNETASQLPEYPVVMAMKGVGASLDPQLMAEIGDVSRFTHKGAITAFAGVDPGVNESGTYEQKSVPTSKRGSSDLRKTLFQVMDVLIKTHPQDDPVYQFLDKKRAQGKPYYVYMTAGANKFLRIYYGRVKEYLSSLPES

SEQ ID NO: 286813 - protein, 343 aa, unidentified
MNKLNVIGVDLAKNVIQVSVLSPSNRELRNSALTRRKFTEFLGRQRSSLVAFEACATSHYWARVAQRYGHEVKIIPAKAVFPFRQGHKTDENDALAVAEAARRPNVKLAPLKTVEQQGMQAVQRSRELLVHERVSLSNHLRGLLMEFGIVIPQGFASLYRQLPEILEDGENELPDLYRPTLNLLYRRLCALRNDLEQLNGEIETLVRQNPMCQRLTELEGVGPISSVLLYATLGTGEAFVNGRQFSAYLGLTPKQFSSGGKVNLVGISKRVANKRLRAVLIQGARAYVYHMKEPKTTKDRWLWAIVERSGKCKAAVALANKNVRTAWAMLTQNTEYQRYPLAA

SEQ ID NO: 286814 - protein, 369 aa, unidentified
MGNSTSTSWVAMDTAAETIHVAIFRGEEAKASEEFEVSADARGIGRLKKKLEKEAGAVKCVYEAGPCGYGLYRTLKASGYDCQVIAPSLTPRKPGERVKTNRLDARRLGAYYRAGQLTPVRIPDEKQEALRDLLRARDDVRRNLQQSRQRLSGCLLRQGYHFKEANRWTLKHWSWIKAIKIADETVKMVIDEYVTAVEMQMEQMKRFDQKVHEIAQRPEYAAKVAAYSVLRGIQIVGAMTIIAEGGDLRQYGQAPQFMASIGIVPGEHSTGERQKRGAITKTGNVYLRRILIEAGWSYQRRAHAGPTIQKRRRGQPEALLSIARRADHRLHGKFSKLQFRYNKKPQVANVAVARELAGFVWAIGQLLES

SEQ ID NO: 286815 - protein, 327 aa, unidentified
MSLPPLGLDLAKLKFNACLVRADGKLRHKVFANTAEGFAQLSEWLAGQGAGRAHACMEATGTYGDALATYLHEAGHTVSRVNPAAVKAYAQSHLSRTKNDRVDAALIAGFCAERRPTAWEPPAPELRELQALVRRLGPLVEMRTMEENRLRSGIAVAAVRDSVEELIAHLSEQIRKTEALIRSHIDSHPGLRHQRELLDSIPGVGEATAAVLLAEVPDIKEYRSARQVAAFAGLVPRERQSGSSVRGRVRLSKIGNARLRKALYFPAVTALRCSPFFQAWAEGLRQRGKSKMAVIGAAMRKLVHLAYGVLKTGRPFDPGWTQKQKTA

SEQ ID NO: 286816 - protein, 410 aa, unidentified
MEVMHQHCAGLDVHKKTVVACVRLASEGKVVTEVKTFATTTQGLLTLSDWLSENGCTHVAMEATGVYWKPVWHVLSDGEVELVLANAAHVKNVPGRKTDVSDAAWLAELLAHGLIRASFVPDGQTQELRALLRTRKQLVRERTRHVQRIHKTLEDANIKLDAELSNVLGKSGRAILNALVAGETDPVRLAALAYPNVKSPQAQLREALRGRLTSHHRFLLQLHLGQIDSLDAAIGTIDREVEDSLAPFRAAVDLVRTIPGVSTLGAEVIVSEIGLDMSRFPTVGHLLSWAGLCPRNDESAGKRRSSRLRKGAQWLKTTLVQCSWAAKNKKGSYLQAQYLRLKSRRGPQKAICAVAASILTAVYHMLKDGTVYQDLGPDHFNRRSKITQTQRLVRRLEHMGFAVDIKPIAA

SEQ ID NO: 286817 - protein, 348 aa, unidentified
MTLFAGLDVSVRETSVCVIDAAGKVLAERKVATEPDDLVELLRSISSEYGRIGLEAGPLSQWLVNGLAEAGLPVVCVETRHMKALLTAQQINKSDRNDARGIAQMMRVGLFKPVHVKTLASQERRMLLTSRKLLQKKLLDVEADLRGTLRNFGLKVGVVSTGGFEARIRELVADFRSLAAIVGPMLAVRKVLREQFAVLHRMLLGLVRQDPVCRRLMTAPGVGPVVALTYRAAVDQPQRFLHSKAVGASAGLTPKRVQSGESDYDVGISKTGDVMLRTMLYEAAQSLLTHSGARWSWLKAWGLRVAQRRGMRRATVAVARRLAVILHRMWVDETDFRWSNKSPAAMAA

SEQ ID NO: 286818 - protein, 421 aa, unidentified
MNLLSGKPYTAYIGIDWANSKHDICLQLAGSEDRAFGRISHTPEAIEEWAQALYQRLGGPIAVALELSEGPIVSALEKYDFLVLFPIDPKRLAKYREAFVPSGAKDDPTDAEFAMDYLMRHPEKLKALKPESAPMRKLRYLVEARDRIRGDQSRCVNRLIQALKQYYPQAVDWFNDHNTLVFCDFLKQWPTLATVQRARKARLERFFKEHNVRFARLIEERIQAIKAATPLTHDEAVIEAHRLQVELLVEQLRLTIKAMKCFDEQIAAIAAQFPDYEHLYTPLPGAGKVIAPRLLAAFGEDRDRYHCAAQLQKRSGIAPITKRSGDSTWVHWRFQCPKFLRQTFIDFAAQTINKSAWAGAYYRQQRDKGASHHVAVRALAYKWIRVLYRCWQQRTPYDESKYLETLRRRGSPLLKQLAEAA

SEQ ID NO: 286819 - protein, 356 aa, unidentified
MNAVGIDVSKGKSMVAILRPFGEVVASPFEVGHTGQELSALAKRLLALDGETKVVMECTGSFYLPVAYALREAGLFMSAVHAKLIFSFDNDSIRRKKTDKADAIKIANYALSKWLKLPPYVPEEDTRKLLKICSRQYNKYGKLKTMLKNNFIALTDHTFPGVNELFTSQVRADGHQKWLDFAMKFWHCECVCSLTAKGFTERYQRWCKREGYRFSKQKAEDVYVSAIGHFGVLPKCDSTELLMKQAAAQLNSVSVAQATVAGEMLRLAQMLPEWPVVSAFYGVGSILGPQLMAEIGDVRRFEKKGSLVQFAGLCEEPYQSGKFKRYRVAHQQERFAASAENAVPGDGCHPTKQTCR

SEQ ID NO: 286820 - protein, 354 aa, unidentified
MIIIGVDYHPSFQQIAFCNQDTGECGERQLNHSDGEAERFYRDLEQRGTSVRVGMEATGYSRWFERLLVELGFELWIGNAAEIKTKRVRKQKTDRNDAQLLLKLLREDRFPRIWVASPENRDLRQLLWHRHRLVQMRTRILNQLQALAMNEGRRWKKKLFSEQGRAELEKLVLGPWASRRRQELLELLDRLDPIIEELTSAVEQEARKRPEVLRLMTHPGVGALTALAYVLIVGTPSRFSRGRQIGSYVGMIPSEDSSAGKQRLGHISKQGNSLLRFLLVEAAQAAARINSEWRRRYVRLAMRRHKSIAKVALGRRLGIRLYWMWRNGCEYSPSLEFGSYAGQLGTGHGVTTTP

SEQ ID NO: 286821 - protein, 360 aa, unidentified
MTTQNTPNSSEQYEAIKLGIDAHAKWYYVSRQVDGATPQPVQKMTFEELLLFVARQQKLAGKVYTCYEAGPFGYHLHRRLEAMGVTNFVVQPQDWDDRGKGVKNDRLDALALCQRLDRYVRGNQKAFSVVRVPSEEEERERAMSRQRQQLVRERQRLAAMGRSLLAMHNIHVTGRWWKGKAWARIKAQAPGWVVERLEVNIAVIVAVEAHEVKLTGAIQEAGRQKKIPRGVGPLTFEVLRREVGDWSRFNNRRQVSSYTGLCPREHSSGGKRRTGSVSKSGNPRIRAMLVEMVWRMIRWQPDYQPLKKWEAVFKSPTATSGAKKKAVVAIARQLAVDLWRVFTGQAAAEKFGLIYQAEAT

SEQ ID NO: 286822 - protein, 378 aa, unidentified
MTKGITWVGLDAHKKAINVAVLVGHETRPQEWVVENKPAAIRRLVKKLVREADGREVRCCYEAGPCGYALQRQIEAEGPVICEVIAPALIPRKPGERIKTDRRDARKLAELLRAGLLTAVQAPTPEQEAVRDLCRAREDAKQDQLRCRHRLGKLLLRRGIVYGGGKKAWTQTHRKWLRTVKFEHPSDQAAFDDYLLAIEQVEERIHTLEQRMQATAETAPFATPVGWLRCFRGIDTVTALSLVAELHGIERFASPRELMAYLGLVPSEHSSSERPRRGAITKAGNSHARRLLIEASWHYRHPPRLGVALKQRRQGQPAAVVAIADKAQQRLYRRQRHLTGRGKRPAQAVVAAARELSGFIWAALLHQHQQPLTRAAAQ

SEQ ID NO: 286823 - protein, 427 aa, unidentified
MTRFATDEFAAFIGLDWADTKHDICLQVAGSDKREFQVLEHRPEVIDTWATDLLQRFQDRPIAIALELNKGPIVEALRKYDGLVLFHINPMMLARYREAFTPSRAKDDPTDAELQLDLLLRHRDKLKPLAPQSPEMRALSQLVEHRRRLVADRVRITNRLTSALKTYFPQVLQWFPNKETQLFCDFLSQWPTLKSAQLARRSTLARFFRQHHVHGEQRINERLEAMKSATALTSDEGIIRPQALLVQALVSQLRVTLEAIGSFDQAIAERAQQHPDFALFEALPGAGAALAPRLLVAFGEQRERYGSAAEVQTYAGIAPVMERSGKRSWVHWRCQCPKFLRQTFVEWAAESMQFSFWARAYYQQQRDKGASHQAAVRSLAFKWIRIVFRCWQTGTPYNESTYLAALQRQGSSLIPNLAKSSKKGENT

SEQ ID NO: 286824 - protein, 390 aa, unidentified
MQPTRVQDITLDEEVLAVSLELASKSWKVGLDDGKRRAPAVHGVDHAQPEGRLEQAIAVIEKTKKKWGLASGVRVVVVYEAGQDGFWIQRALTGRGYEVLVVDAASIPVERRSRRAKTDRLDAIRLVVTLRAWLRGERERMRVVRVPSVEAEGQRHLVRDRGTLQKEIGQHRDRLRKLLSTVGCWASIEGDLAGRLERGEVTGYGGSALPLWLRERLVRECARLKLVTEQLAQLEKTLPEQLSEEVQQRMGQLMRLKAVGQVGAERLLLELYWRQFNNRREVGACVGMVPQPYDSGESRVDQGISKAGNRRVRALLIEMAWLWLRWQPQSELAQWFAQRTRGTVGNKRHRRIAIVAVARRLAILLWRYLHDGVLPKDVQFKPVKVTLKAA

SEQ ID NO: 286825 - protein, 338 aa, unidentified
MPVYAAIDLHSNNSVLAVLDETDRVLRQRRLPNELPAILRELEPFHEELAGVVVESTYNWYWLVDGLMAHGYRVHLAHTSAVPQYAGLKHGDDESDARHLAHLLRLGILPQGYIYPRAQRSVRDLLRRRFGLVRTATRLLLSVQSSWARHTGQSLTANAFRRLDDAAIQAALPDPIVRLSVLAQIKVWQGIQEQVHQMEKWVNESAECRRELIALRSIPGVGVTLSTTIALETGEVRRFAQVGDYASYCRMVKSERLSNGKKKGSGNRKNGNKYLAWAYIEAATFAMRFSPEIKRWYTRKCGKRHKVSALKAVAHKLARASFYLLRDGGRFDVHRAFG

SEQ ID NO: 286826 - protein, 331 aa, unidentified
MKSLPNRTSDAPLSVGVDVAKATLEVGFSDREAMLAPANDEAGHAALLARLAELRDQGATVGLIVLEATGGLEVQVATTLQLAGYAVAVVNPRQARDFARAMGVLAKTDRIDARVLALMGQTLLQRADLAKLVKPLPDERQRMLQAMVTRRRQLLGMRIAEQQRASGPDKRMRRSLNIILKALDRELARVDKQMQTFIGEHHAELAALLDGVKGVGKATISTLLAEVPELGKLSGREVSALVGVAPINRDSGTMRGQRSIFGGRPAVRKVLFMAALVASRYNPVIKAFYQRLLAAGKPKKLALTACARKLLTILNAMARSGKTFDAAIHSG

SEQ ID NO: 286827 - protein, 409 aa, unidentified
MSKGCIRSSFLLFFLINNFFFMIKYSLGIDISMKMFHVCLSVIDNQQQIKVKASRKFTNNVAGFKELCDWIKKHYKQQDIPLHIIMEATGVYYEQCAMYLYKKGFTVIVVLPNKAKKYLQATGLKSKNDKIDAKGLAQMGAEKKLNPWQPMDDFYYTLRSLTRHHESLQNIKTNINNQLHADNAGMYANKQVGKQLKNLIETIDKQIAEIEKSIEDHIASDSAVQQKVDGIIKIKGVGLMTVATLLAETNGFLLFENIPQIVSYSGYDVVEDQSGKHIGKTKISKKGNSHIRRILHMPAFNVVRYKVSPFLQLFNRTLQKHNIKMKSYVAVQKKILIIIYSLWKRDHAFNEEYYKGTTTRDEELVQPSRLSFTEAVQVAQKNSPKTNQGYTRCTTVEVSSFAPSRLLQK

SEQ ID NO: 286828 - protein, 383 aa, unidentified
MTKSNNLYVGMDVHKASIDIALAEGEGGQEVRHYGSIGGDLPALGQAVRKLQATGKTLHFVYEAGPCGYVIYRHLAGLGLDCVVVAPSMIPKRSGDRVKTDRRDAEMLARLHRAGELSAVYVPHPEDEAIRDLTRAREAAKEAQTRARHQLKAFLLRSGIPYAGKTSWTPAHVRWLASLKLEQPVQQIVFQEYVDAVTTAGERLGRIEGTLRDAVAGWRMAPLVQALQALRGFQLVVAATLAAEVGQIDRFGNPRQLMAYLGAVPSEYTSGPTTRRGPITKCGNTHARRVLIEAAWAYRMPARITPIIAKRQDGLSENVRAIAWKAQVRLCKRYRTLRARGKEQNKVITAIARELVGFVWAIAREVPVVSPQPGLSTGGALRA

SEQ ID NO: 286829 - protein, 390 aa, unidentified
MEVRLENTASATTNNDPAHCFVAIELSKSSWVLGFQTPLAKQTSRYQVKACDAKALLELIERVRSRMARELGRPVEVMSCYEAGYDGFWLHRVLEAHGIHNHVLDPASLQVNRRARRPKTDRIDADRMVRALIRHLRGEPEACSVIRVPSPEQEDARRLHRERDRLIAERVAHVNRVKGLCATQGIYDYEPLRRDRLKRLEKLRTGDGRALAPRLKAEIVREIRRLEIVLEMISTVEAERDAILTEKKSTHLNADKIKMLAKLKAIGAEFSTTLVGEVFYREFANRRQLGSYVGLASSPFCSGSLDRDQGISKAGNPKARVMMIELAWTWLRYQPESALSRWFRERVGNLKGRPRRIAIVAMARKLLVALWRYLQTGVVPTGAELKAQSN

SEQ ID NO: 286830 - protein, 368 aa, unidentified
MSKLAKVERFFNTIKLTSDDEVFVGVDVHKKSYHVALHLNDMPAIDFGMISEPQQLNKKLQSMAQSIKNIAYETGPTGYELARHLRENNLPADVVATSRIPRSPTGDDKTDKLDSIKLAQYAAKGLLRPVTIPTRKQEADRQLYRMRHRQTMNFAKVKVQIKSFLLMHGIKEPDGLANWRIASVGELREMRLLDTLRLSLDELLSDYDYFKNRIKVLNKVLADNLDKGVLGHRMDILKTHPGVGTVVACQYATELFHYKDFSSTRQLYKYLGLSPRVSQSGERSSSGSINKAANGRLRNNLIQAAWIWVRTDIEAKKCFYRICENCGGIRQKAIVAMARKMSGHLWAMLMNDQPYDANKAKCRHNNER

SEQ ID NO: 286831 - protein, 436 aa, unidentified
MAVLAAIDGSKGGRVLEETNDTEEIIGRVAALDIGKAELVCCVRVPGAQGSGKRLQEVRTYPTMTRSLLVLADRLGELGVTRVVMEATSDYWKSPFYLLEAHGFEVWLVNAKDVKHLPGRPKTDKLDAVWLCKVAERQMLRPSFVPPPPIRRLRDLTRYRADLVAVRTAEKNRVEKLLEDAQIKLSVVASDIFGVSGRDMMAALIAGERDPKVLAQLARRRLRAKLSLLEEAFVGHFSDHHAFLLATMLGRIDQATADIAALEAHIEAQIAPFAQAADRLDEITGVGRAAAQVIIAEIGTDMGRFPTPGQLVSWARFAPGVKESAGKKKGKATTGHGNPYLARVLGEAAAAAGKTNTFLGERYRRIARRRGTRKAIVAVGRSILIIIWHLLSDPQARFHDLGPDFYDTRIDADRKKRNHVRQLEALGYTVTLQPAA

SEQ ID NO: 286832 - protein, 374 aa, unidentified
MESAYPNPLQWVWTTTTITEGKPEMLYTGLDVHSKWMTIKGFDPETGDLVEIKKQSNDEQSLRETFSSLAGPLHGVMESGTNSWAVYRILEPYFERLIVVDPATVWGKDVRRGAKTDGRDAFGLALKMQRGELEPLYVPDVQTQDMRALARAKINASRHVTKIVNEIGSQMRSWGIVIECSLLSPKGQMYINESKSKLPDFSLRVLEMWLEMLKKAQETEAEIEKMVEAEAAKDEVCKLLTSIPGVGPLTALVVRAEIGDIRRFSSAEQLISYCGLCPSVRQSADKIYYGKLNRFCNRFLKYVLILRAQGMSRSKVDSPMRQTYWRVIIKGKNCAKIAVARQLVRVIYSMLINKTSWDASRITARKSALTPAAA

SEQ ID NO: 286833 - protein, 344 aa, unidentified
MTKIITVIGLDLAKSVFQVHGIDAEGAVVVRRKLSRSRVLAYFSKLEPCLVGMEACATAHHWGREIRALGHEVKLMPPQFVKPYLKSQKNDMRDAEAICEAVTRPTMRFVPIKTPDQQALLALHGVRDHWVRLSTRLINTLRGYLAEFGIVASKGRMGVEAILDTLADDQDDRIPDLARECLRPLASELRHVKRQILETDRKIMKAHKANAICQRLETIPGIGPIIATRVVAEVSAPAMFKSGRAFSAWVGLVPRQHSSGGRERLGSITKKGNSELRRLLVAGAMSMIIRAKQLGFTRHPWLSRLLERKPMMVVAIAMANKMGRMIWALMVKGEKFNPAKLMPA

SEQ ID NO: 286834 - protein, 338 aa, unidentified
MKLYGAIDLHSNNNVTVLIDEQDNVVYEKRLPNDLPLIAQQLAGYQDALQGIVVESTFNWYWLVDGLMDKGHQIHLANTAAIQQYEGLKYTDDHSDARWLAHILRLGVLPQGYIYPKEERAVRDLLRKRGQMVRQRTANLLSIQNLITRNTGSSIRSNRIKTLDSETVDALLPNPDLALAVKANLAMIQCADGQIDILERTVTDRVKLRAEFSFLKTVPGIGQILALTIMLETGEIKRFSTVGDYASYCRCVGSQKLSNGKKKGSGNTKNGNKYLAWAFVEAANFAIRYSPRIKSFYQRKKAKSHGVVAIKAVAHKLCRACYYIMKDQVPFDVAKAFA

SEQ ID NO: 286835 - protein, 409 aa, unidentified
MRKGGKPYPIRRMDKMNAVGIDVSKGKSMVAALRPMGEVALLPQEFLHTEVGLEQMAYAIIALGEDTRVVMEATGRYHEPVAAALHEYGIYVCVLNPLFIKQSGGGSIRKVKTDKADAMKIAKYGLDNWVDLREYTPMDTIRQQLKLCSRQYNLYMKTVVSLQNNLISLADKTFPGANELFSSPERADGHQKWVDFVMTFWHCDCICRVSEKAFTERYQKWCKRKGYHFSAEKALDLYASSCGHFTTLPKNDNTRLLITTAAQQLLAGKMTLAALRAEMTRLAQQLPEYDTVRTMYGVGETTAAQLMAEIGDVRRFPRRSSIVGFAGVDPAVDQSGKHDAKSTPTTKRGSPHLRKTLYQIVCTYLRKAPEDEPVYQFLDKKRAEGKPYFVYMTAAQNKFLRIYYARVKE

SEQ ID NO: 286836 - protein, 367 aa, unidentified
MKKISTVGARQTRNFREQQLTIGLDLGDRSSWYCVLDEGGEVLLEQRLGTTPKAMKEVFGKVPRSRIALETGMHSPWVSRLLSELGHEVIVAHARNVRLIGESRRKDDRFDARTLARLARIDPQLLAPVQHRSARAQAHLMVIRARAGLVRARTSLINTARGLTKSYGERLRGCSPRNLNAEKARQLSPELQAALEPLLAAIESLSERIYEYNQEIEKIATNSYPRVARLKQVKGVGTLIALTYMLTLEDPQRFRKSRDVGCYVGLQPGRRNSGQSEPQLHISKEGDAYLRTLLVQGAHHILGPFGADSDLRRWGLKLAERGGKNGKKRAVIATARKLAVLLHRLWVSGEAYEPLRHSRPVRLPAAA

SEQ ID NO: 286837 - protein, 354 aa, unidentified
MKGAIGNSRVIVQGKEVFVGVDVHKVSWHVTVRAGGEEVFNGGIPGQYHPLRKLLDRFKARQMKLAYEAGPCGFWLHDKLAEDGIEVTVVPPSLIPVESGNKVKTDKRDSRKLARLLESGLLKKVYVLTEEDRIDRELLRTRRQVLEHRNDLARQIKSKLLFHGIPSPFSTKTWTQAYLRWLKELIFEREGLRISFDVLIELYEYLTTELVKLKKRIMELSQSDKYRDKVKLLKGVPGIGTLIAMEILVELSDIERFGRADQLASYMGLTPSEFSTGEYVRQGRITRCGNKRVRTCLVEASWILIQKDPWMRSKYDRLKRIKGGKRAIIAIARNLIIRIRRILLNNEPYVVGVC

SEQ ID NO: 286838 - protein, 319 aa, unidentified
MNKVSHDKVIGIDVSRDWLDIHCLPDGQRLRLPNTETGHNRLVDLARPVGALVCFEATGGQEWRLWSVLDGAGVMTRQLPPAQIKAFAASRGTRAKTDRIDAELIAWFMMFRPDAGRNLPHEKLRLLRGLVSKRGQIVETRKRLLAQIKAHGKLGSADMFETMDAELKDLLDRQIAELEARIEQTIISDDELATTADILRSVPGVGPVASTMLIAEMPELGQITGEQAAALTGLAPIAHDSGAMRGKRAIGGGRRLLRHVIFQAALVASHHNPVLKAFADRLRAAGKPHKVVITAVARKLVTIVNALCKSRQKWVTQPA

SEQ ID NO: 286839 - protein, 363 aa, unidentified
MEQKNRRFIGLDFGVRTYEMCMYDENGKIVRSNGLTTPEGRQKLYSKLKPTDRVGIEMCSLTMKVAREMKSAVGCDVLLLHAGKLAVIYKSLKKTDKEDALKLARLVKTHEDEELPIVPLPSEVDLKRRRKIREAKQLRSDRTKEVNRLHALFVECGITDIKKKNLATKTSREKSLQLLEETQRRQAERICQVIDLVETQIAEVKKEIAVEVENDSNIKNLQTVPGIGELTAVAYSGFVGDGSRFDNGSQVSNYLGLVPKLDISCDQVHYGNITKAGNPEVRSLLIMAAWSHVRFAKEDTVLKSKWQYLTQVRGMSKKKAIVCIARKMAEMMLAILKTGKPYSPKKFSVAQFSELAEKALKSA

SEQ ID NO: 286840 - protein, 318 aa, unidentified
MTETICVGIDVAKASLEIALGAQGTVMTYPNTPEGHDELTVTLTNYAIDLVVLEATGGYEVPVACVLQTLGLAVAIVNPRQARDFAKAMGNLAKTDKIDAQVLAQLALVLSQRTDRDKIVRILPSAQQRVLQAMIARRRQLVVLSISERQRLGNCHPDIRESITLMISFIQEQLKVIESALSKHIKTYHRSKLDLLSTVKGVGPATIATLIADVPELGKLTRREISALIGVAPFNRDSGFFRGKRTIFGGRAMVRRMLYMATLTTIRFNPVLCAFYKRLTEAGKPNKVAIVACMRKLLVILNAMIKTNKPWDESFHTV

SEQ ID NO: 286841 - protein, 341 aa, unidentified
MKHYAGIDVSLESASLCVVDWQGRIVREGKVASEPAALIGWFSSLGLEVERIGLEAGPLSQWLFAAMREAGLAVELLETRHVRNAFRTMPVKTDRKDARGIAELIRMGWFRPVHCKSMGAQETRAMLTARKLVQSKLHDVEMSLRGILRGFGLKVGKTTRTGFAGRINELVAGHSSLQVLAEALLRVRAVLLKEFNGFEKRVRSMARHDARAQLLMSAPGVGAIVSLTYASAIDDPGRFRSSKRVGAHFGLTPKKYQSGETDITGRISKIGDSGVRTALYEAAHIILTKPIKGSALKRWAARLAKRAGMQKAKVALARKLAVIMHRMLVDGTTFDFAAAAA

SEQ ID NO: 286842 - protein, 333 aa, unidentified
MNATRSIIAPSNALFFLGLDVAKAKADVCLLRSDGQALQESFASTRLGYESLLAWLEKHAQGAVRAALESTGPYARVWCELLHAAGHAVFLLNPARPKAFAQACGLRNKTDRVDARLLARFVAEQKAPRWSPPKPEQEELKELTRRREDLAALRQAEKNRLASSLVKSVRASLERSIKSLDREIKQVEAELDGLMARHAGLRRNEQLLRTIKSVGKVTARKILAELPPVEEFQSARQAAAYAGLSPRLHESGKSVRKKARLSKIGNPVLRKALYMPALVAIKHNPILKAFAQRLREKGKAKKVIVGAAMRKLLHIIFGVLKHQKPFDPNYGSH

SEQ ID NO: 286843 - protein, 414 aa, unidentified
MGVTRWVGRAIGLDVHRDFCEVAICEDGMVRSAGRVPSTPDGIKALAERLLASDRVALEVTGSCWEVARMLEPHVNRVIVVSPDDTGISSARAKTDKLDARALAHLLWRGELEAVWMPDERCRILRRRLARREQLVRSRTRAKNEIHAVLQRRLQRKPPASDLFGMKGRQWLESLELPLEERESVDAAIRQLEFLDAEIAAVEKLIAQQALSWPEIRRLMTVPGVNLVCAATFIAAIGNSNRFLSSRKLVAYLGLDPRVKQSGETPARSGRISKRGSPSARWALVEAAWTAVLQPGPLHAFYQRTKGRRGHGKAIVATARKLAVLFWCMLTRGEDYAHQQPSLTRKKLRRLEITAGAPKNTRRAAGIWSTNDLIRQAERELARQAEASYKRMVQDQLAGAPARKAGASVTAERA

SEQ ID NO: 286844 - protein, 418 aa, unidentified
MNHPKMRFTYVGVDSHKDTHTAVFLDCFFEKLGEILFNNRPSEFGAFLADAEKLRQEGTELLFGLEDTTSFGRTLAVFLTDSGQKVKHVNSLLVARERKNQNITQKTDSIDAECAARVLLSKFGELPAADPNDKYWTLRALVVRRDQVVTSSTRAKMTLHSLLTQHYPNYREFFKYTFLKTPLAFFKKYPSPKTLENVSIEELAEFFYTESNGVFGMEKARERAEFILGSLEDTAAEYQEIRDDTVRSTIRQLEFNQEELERMELSMAVYLNSFDCTLTSMAGIDVVSACQMMSCIGDVKRFPTPAKLARYAGIAPVTHASGKKEMQFANQRGKRELNSLFYMLAVRVTSPVGPHSKIINQFFYDYFHRKMSEGKTKRQALKCVQRRLVNIIWTMLTNGEEYVNPPVMDMPEDGTKTG

SEQ ID NO: 286845 - protein, 419 aa, unidentified
MERIVERCAGLDVHKASITACVRVSATGKDEEPYQEIRKFEATTRGLLRLRDWLASFEVELVGMEATGVYWKPVYYLLEDDFECWLLNAGHMKNVPGRKTDVKDAEWICQLVEHGLVRPSFVPPKEIRHLRDLTRYRKRQIEERTREVQRLEKVLQDAGIKLSSVATRVLGASGREMLDALVEGTTDPEVLADLAKGRLRKKIPALKEALEGHFSNHHAFMVGRILAHVDYLEESIADLSSQIEQVIAPFSEQVELLDTIPGVDRRTAETLIAEIGVDMSRFPTAGHLASWAGMCPGNDESGGKRRSGKTTKGSEWLRTALTEAAHAAARTKGSYLSAQYAAIKGRRGSKKAAAVAVGHSILVICYHILEREVPYEELGEEHFRKQKRCSTSEAYTRRLVRKLERLGHKVALEPLVGGT

SEQ ID NO: 286846 - protein, 402 aa, unidentified
MQVGWDWASQAHDVTVMDDDGRIVDRFELTHDEAGLEGAIGRLAGHGEPKDLPVAIETNSGVVVDRLLDAGHPVVPIHPNSFNAARARWGASGAKSDPGDSYRLADYLRTDGHRLRRLSKLDPATAELRALVRMRDDHVAAKVAAMGQLAALLDRNWPGAKAIFARLDSDIALDFLTDYPTPDSAAHLGEARMAMFMKRHGYCGHRSAGQLLTRLRSAPEVAGGLSPEILAELAAAQVQLLRSLLATIRHLDRSIHSAVAAHPKSDVLRALPRVGTINLAQVIAEVGPIMERAATVEQACAEAGAAPVTRSSGKGRAVTFRWAANTQARYALGIFADNSRHASPWAAGLYANARARGKRHPAAIRILMRAWLRVIWACWQSDTAYDARLHGAEQRMKEPLVA

SEQ ID NO: 286847 - protein, 344 aa, unidentified
MDHFAGLDVSVKETSICIVDDAGRIVKEVKVASEPEALLKVLGNPIHRFKRIGLEAGPLSQWLFSALAEAELPVVCVETRHMQAVLKAQINKTDRNDARGIAQMIRAGLYRPVHVKTLRSQKLRMLLTHRKLLQSKAIAIENDLRGTLRNFGLKVGMVGKVRFEARVQELVENQPDLAVLVEPLLIVRRALLEQIVILHRRLLAIVRDDEVCRRLMTTPGVGPVVALTYRATVDVPTRFRKSKSVGAVFGLTCSRYQSGEVDWSGKISRCGDEMMRTMLYEAAQSMMHSKKWSWLKAWTMQIARRRGMKKAIVALARRLAVIMHRIWVDGTEFRWTREQAAAAA

SEQ ID NO: 286848 - protein, 342 aa, unidentified
METVYVGLDLGSSSFQQVAIKPDGSIKVNRDFTTSEGHLVKAFSDLKGEIHVHLEAGELAPWAASVIAPLVERVVCSHPQSNAWIAKDADKCDRIDAYKLAELLRLNRFKEVHYAPDQRRRNFKQLVQHYDELTAQQARLKTKLKARLRMQGVIVTGERLFSAQGRKEVLAKVESRDLRTALTQLYSVLDQSVAAQEQARRLMLRAAQAFPEIRIFRTAPGIGPIGACRFSAYIHTPQRFSTTRKLWKYCRLSVSHRSSNGKPLRRPRLDRSGCGRLKDVSRKAFDVAIRSRRDNGFKRAYLRALETTHDATHARLTVQRKIVSTLRAMWLTMTPYGDELSR

SEQ ID NO: 286849 - protein, 497 aa, unidentified
MGRSFGVGRQSIWCLEPVPLTDQPERLTRLRLDLEEVFAELTHFFPLTRKETTMPTTRKRYVGLDVHKDVVEYCILDTEGKKLDGGNFICEQSILVNFAKNVLSPKDHVVLETTTSTWTVVDILEPFVEKIVVGNPLKTKIIAEAKVKTDKVDAMILAQLLRCDFLSTVWIPDKQTRELRRICSFRKSLVQEATAAKNRIRGILNHLLIKHAVTWTKPGLEELKNLNIPPVERTIMDTEIAILEHLEFQIEKIESEIQKLAYADDNIRLLMTLPGVGYNTATAVLAVFGDISRFKDADHAASYLGLVPQVKQSADTCHYGPITKTGSALARAMLCEAAQHLCNNDGPLGVFVRRILAKKGRNKAIIAGARKLATIAYHMLKNKEPYRYAKVIGTREKLRVLRAKAGGAKLARQRYRYSNEVRQNRPEGDFIVHYVPPLADVYKNEGLPPALAFDELSSGEQRVLKEMGVAEKILANEKVGIIARPKKATSSPKQGRK

SEQ ID NO: 286850 - protein, 312 aa, unidentified
MTKIVCGVDVSKRRLDAHVAPSGTFASFDNDAAGIAALAGFCHRQGVQLVAMEATGGYERQPFLLLWAAGIACGLTNPRSVRRYAEAMGILEKTDRLDASVIARFAIAKELKPTSPPTQAQQRLNALVARLRQVTEDLTVNKQRRSSATSPEMTASLDEVIGLLKRQARTLAGEIASMIDDDPLWSQIDAALRTTKGVADRTVARMFAELPEIGIYSNKAVVKLVGLAPLANDSGARTGQRHIRGGRAGIRSILFLVADIARRYDPSLADFHRRLTAAGKKKMVVRIALARKLLVRLNAKARDARACYALAT

SEQ ID NO: 286851 - protein, 427 aa, unidentified
MNNTQNEKIAQVTNDTMVIGIDIGSQKHWARAFDNRGMELSKKAFGFNNTAAGFASFEVWYEGQRRAAGLKRIMVGLEPTGHYWFNLNQFLSENGIKVVLVAPQHVKHSKELDDNTQRKDDLKDPRVIAKLVTEGRYFLPYRPSGVYADLRDGFNRRCGIVESMTQAKNRLHRWFCINFPEYLEAYGSVAAKTGLMVLKKAPLPKDIVALGVDGIVKIWRDAKVRGAGKKRATTLVAMAEQSIGEKTANEAARLELWQLLEDYEHYAHQYEVIEEMLERRVHEVPNADKLLQIPGIGYFTVIGFFAEVGSIERFDDPKQIQKLAGLSVVENSSGKRKGLPGISKRGRDRLRWVLFQAAMSAVKNNQEFREIHQYFTTRKDNPLKKMQSLMAVAAKIIRVFYGIVRTGSDYDPDRLMRDIRRPEKAAA

SEQ ID NO: 286852 - protein, 351 aa, unidentified
MAIMAAHTVEVIGGIDTHKDLHTAAVISIDGTRLGVRTFATTRQGYNQLLEWMCSFGRVRKVGVEGSGSYGAGITRRLGRAGIAVLEVRPPEGSARRGRGKDDAIDALEAARAVIAGHRVSVARTRSGAIEALRVLRTTRATAVKSRRAALQQIHNTIIEAPEELRDQTRRMTRMQLVRTLAAWRPDRARGADPEIATRIALRSLARRVIELTDEIAELDELITPLVRELAPALIEAVGIGTEIAGQLLVTAGDNPERLTSEAGFAMLCGVAPIPASSGKTTRHRLNRGGDRDANRALHMAAVSRMRLDSRTKSYVARRLAEGRSKREIIRCLKRYIAREVYGLLSHPGPA

SEQ ID NO: 286853 - protein, 348 aa, unidentified
MAHFVGLDVSVKETSVCVVDDAGKVILEQKVPTEPSDIIALLTSLGVTYGRIGIEAGPLSQWLFNALTAAELPVICVETRHMKALLMAQQVNKTDRNDARGIAQMMRVGLFKPVHVKTLVAQEQRMLLTSRKLLQRKLLDVESDLRGTLRNFGLKVGVVSGGRYEARIRELVVGFPRLAAIAEPLLNVRRVMRQQLAVLHKMLLDTVRGDPVCRRLMTAPGVGAVVALTYRATVDQPQRFAHSRAVGAHVGLTPKRYQSGETDYDGGVSKCGDALLRTMLYEAAQVLLTHGSKWSWLKAWGMRVAQRRGIRRAIVAVARRLAVVLHRMWVDGSEFRWSKDSAAAPTVA

SEQ ID NO: 286854 - protein, 377 aa, unidentified
MATTRTVLRDQLTAKPGDLYMSLELGDKHWHISIGGERRSVSHYIVEAGHTEEVADCIAKAAARLHTARVHSCYEAGRDGWWLHRWLTELGVDNIVVDPASIEVNRRARRAKTDRLDADKLLAMLVRHHRGERVWSVLREPSPSDEDARRAHRELQRLTHERIAHTNRISSLLVLHNLRPRIVIGGRDWPVWWNEHREQVPPTLRAELEREAVRLKVVKEQVRAIEAARARELAEGKQPLVAQLVRLRAVGAKGAWVLVKEVFGWRHFANRRELAGSLGLVPTPYASGDSEIEQGISKAGNRRVRALLVELAWSWSRLQPGSALTQWFNRRFAGAGKRMRRVGIVALARRLAIALWRYLQTGEIPIGARLKPAGSGI

SEQ ID NO: 286855 - protein, 335 aa, unidentified
MKEITTIGVDLAKSVFTVHGMDAAGHTVLRKTVRREKLMELVAELPPCLIGMEACGGAHEWARRFQAHGHRVGIMMARFVAPYRKSSKNDGNDAEAICEAVARPNMRFVPVKSAEQQAILSLHRVRQGFIEQRTATINRIRGLLAEFGVVLPQRAEQVRRAAVVVAEELPVLAREAIIDLRAHLSYLDERISRYERQLVELARQREAAVRIQRLPGVGPLTASAITASISDGHEFANGRQFAAWLGLVPRQYSTGGKPRLGRITKRGDAYLRTLLMLGARAVLQSAAQKSDRLSRWAMALRARRGYHRAIIAVAAKNARIIWALLANNREFVPPA

SEQ ID NO: 286856 - protein, 353 aa, unidentified
MSKILAIDLGKNNSAVCIFDRSSLKCKYKTLRTRKQVMHDLFVEFADQIEIVLFETGSQMGWVADILWALDIPFKVANTNHAAWKWKNNPNKSDRKDAQRLAMMYHTGFFPTVHVPKREVRQKRSLINYRDDIVKRITKIKNSIRAILGREDIHLASGKKGWTIKALGPIRKMAIPLKEIMELEDLWKGHLNSELNLFDNVVEELKDMEFKLDALGRADEKVKLLRTIPGVGPRLSEAVVAIIDDPHRFKNGRHVSSYVGMVPRRWQSGQVDITGRISKCGNKLLRTLLVEVSWLGLREPWMRDVFDKVKHGDKKRAKVAIVALGRKLLVICWAMLKNGTTFDSDYAKRFVKC

SEQ ID NO: 286857 - protein, 372 aa, unidentified
MSAAFKPTTKNGSEVEMAVYVGIDIHKRFCQAAMMDEAGRIQRELRFDNTLEGASCLVHLARSIDPDVKAVVEPSANYWIKIYDRLEEEGVEVKLSNPLRTKAIAEAKVKMDKLDAKMLAYLLRGDLVATSYVPTRKNRERRTLIRHRASLLKMRVEVKNRIHAILDKHDQPYDYSDLFGKEGLEWLRNLTLPSIDQQILRSNLQILQTLNSEIQNADVQIAKDAVDEEQAKLLMSMPGVDYYAAMILLSEIGDVKRFASPEKLASWVGLAPQVHQSGETSWTGHITRKGSKRARWILTQCAQSARQHDPRMREFYERIEQRHGSSKAVVAVARKMLTIMHVMLTRNEPYQGENRQLTEQKHKRLERIANST

SEQ ID NO: 286858 - protein, 412 aa, unidentified
MDVVVERCAGLDVHKDTVVACVRTPGKGGSREQTTRTFRTMTVDLMALRDWLVALGVTLVGMESTGVYWKPVFYVLEDDMQCWLLNARHLRNVPGRKTDVQDAEWICQLVEHGLVRPSFVPPKPIRELRDLTRYRKAQIDERGREAQRLDKVLQDAGIKLSSVATDILGKSGRDMLMALISGTHDPQVLAELARGRLRAKIPLLRRALEGRFVSHHRLIVEKILAKLDFLDETIEDLSAEIDRLIAPFAAEVELLDTITGVDRRAAECIIAEIGVDMARFGDSARLASWAGRCPGHHESAGKHKSGRSRPGSKWLAATLAQCAEAAGRSKGTYLGAQFQRLRGRRGHAKARKAVEHSILVAAYHVLDQHVPYRDLGADWFQRRRPEAHARRLAQQIEALGFRVTIEPTDQAA

SEQ ID NO: 286859 - protein, 359 aa, unidentified
MDQLIRIGVDTSKHIFQLHGVNAVEQPVLRKKLRRREVAGYFAKLAPTVVAIEASTGAHDWARLLSAMGHQVRLIAPQYVKPYVKRGKNDAADAEALCEAMSRPTMRFVLVKTAEQQAALMLAGSRERLIARRTQLGNVIRGYAAEFGLVTAKGTDKIEPLLARLAAAQTVPSLARELFAIHGKEYRQLQAELEMVEAKLMAWHRDDACSRRLAQIPGVGPIGATMLVMKTPDPTSFPSGRHFAAWLGLTPRDHSTAGKTRLGVITRAGDETLRSLLVVGATAVIQQARRGRGHPSPWLVSLLQRKPPKLAAVALANKIARTAWKLMVTGESYNARPAPTTLTRVAVTRSADQSTAMMP

SEQ ID NO: 286860 - protein, 348 aa, unidentified
MLADQLDYVVGVDPHRDSHALAVVHVVSGAVVFEANIAACSEGYADALRLVEEHGAGRRAFAIEGTGSYGAGLTRFLAGRGERVLEVGRLRRERRSGGKTDALDAVRAARSVLAQERPATPRAGGERQALQALVAAREGAVNAKRAGLCQLRDLLITTPEPLRSELRPLTRARLLQRLAATRPDGRRDPELRGSMLALRSIARRILQLTAEERELAREIETITRKLAPQLLDQPGVGPHAAAQLILSWSHRGRIGSEAAFARLAGAAPIPASSGQTIRYRLDRSGDRKLNRALHMILVTRKRSHPATIAYIERRLQEGKTRREANRCLKRYLARNLYRLLEHGAPPTT

SEQ ID NO: 286861 - protein, 420 aa, unidentified
MDAPFLKRHRAAKVKVLVNHLTKGVPEMKITTIGIDLAKNVFQVHGMDMRGKGVLKKQLRRDQVTPFFANLEACVIGMEACGSSHHWARKLQGLGHTVKLMAPQFVKPYVKTNKNDVADAEAICEAVGRPNMRFVPIKNTEQQAILSVHRARQGFVKARTAQANQIRGLLAEYGIAIPLGIVHIAKQVPKIIEDGDNDLPGSFRLLILRLLDHLKELDRQVRELEREIQRWHRESEASCKLAEIPGVGPITASALAASVGDARSFRNGRQMAAWLGLVPRQHSSGGKSTLLGISKRGDTYLRTLLIHGARSVIRYAQTRTESAGDWLQRLLARRNANVVTVALANKNARIAWALLTRNETYVATKQYFRLFNKLPSRVRQMRDPPDRDRPNPSSVTVSQARRLEWAPIRGFPSRPAVTGP

SEQ ID NO: 286862 - protein, 453 aa, unidentified
MPKTRLSAPQNLTRLNPSAAAIDIGSTMHMAAVNPDSDDMPIRAFGTFTHDLHDLAAWFRSCGVTSVAMESTGVYWIPSFEILEEHGFEVILVNARYAKNVPGRKTDVNDAAWLRQLHSYGLLRGSFRPNAQVATLRAYLRQRERLVEYAAAHIQHMQKALMEMNLQLHHVVSDITGVTGMKIIRAIVSGERDPDALASLRDVRCHSSIETIKASLVGNDRDEHVFALSQSLELYDFYQLKMLECDRKLETAIAMMTVEVEVPLAPLPKIRTKTKQTNAPSFDVRAALYGLTGTDLTQIHGLGSSLALKLIGECGTDLRAWPTAKHFTSWLCLAPGNKISGGRLLSSRTRRSSNRAAALLRLAATTIGRSDTALGAFYRRLARRIGKQKAVTATARKIAVLFFNALRFGMAYRDPGAAAYDERHRGRVLANLQRRARSLGYQLDPIPDAESVS

SEQ ID NO: 286863 - protein, 371 aa, unidentified
MKKLAYVGVDYHIKTVVISVYLADEKEFHDTIRLNNETKMINKYMKKLSKKFDIRICYEASSSGYAFQRKMQALGYHCDVIAPSLIPRKPGDKRKNDIRDAKKLSKNYANDMLTIVHPPTEQEEAVRSLIRCRLALKNSEKRAKQQINSLLLAQGLRWNKSNWTNQHRQWLTKIEMSHNSSQMALQEYLALLDYLTSRLQHLDHQIEQIANSKLYAESVKKLKALKGIGALTAMVLITEITDFRRFPNPRALMAFLGLVPGENSSDDTGKDKNIPITKTGNHRCRTALIESVQHYVKKPYLSTAMKLQLSQVDAHSAVIAKKCMHRLHKRYWALVMRGKIRQKALTATAREFVGFIWALMQPSPAASIQAQ

SEQ ID NO: 286864 - protein, 472 aa, unidentified
MARAARRPGARQYPKRRSSRGRSAPFEQMNLNAAGIDVGATEHWVAVPEDRDEEPVRRFGAFTADLYVLAEWLRQCQIETVVMESTGVYWIALFEVLEERGFDVKLVDAHYARQVPGRKTDVKDCQWLQELHTYGLLRGAFRPEDQICVLRSYLRQRSMLVAMASRAVQHMQKALEQMNLKLTEVVSDINGKTGMEIIHAILAGERDPQRLASHRDRRCKHDQATIAKALEGHWRAEHLFALQQALEQYAFLQQQLQACEQQIEECLQTFVTHVEVEPPQPTPARTRRARQRQAPSFDVHKYLDAMTGVDLTQIDGIDALTALKVISEIGLDMTRWPTGKHFASWLGLCPGNKVSGGKRYRMRSKPTANRAASALRLAAQGLVKSHSALGAYYRRMRARLGAPKAITATAHKLARLVYSMLRYGTAYVDAGQQAYEQKYRERVLTNLQRKAKAFGYQLVHVEDLDGGVVSTL

SEQ ID NO: 286865 - protein, 399 aa, unidentified
MKKNLPLELRVGVDVGCHSHNVAIGLSTGEILEEFSIAHEPEGFRQFFSRIEKNERNYGCPVAVAMEGYNGYARPLDTLVRTRNYRLFNINNLKLARFKEIFPGAAKTDDIDARKALELFQLRDHLPIAKDVLQEVKATPQENDILKRISRRRRRLVNERVRVLNNLQADLQSVCPGLLEITGEAGNLWFLRFLTSTDDLRKLTRLRETTIRKIPGIGAKYTSIILKWQQAAEFSHETEWVSDMIQQDAERVLALHDQIETLETQMAEMAANSNIAQLLTTLPGFGPITTAELAGEIGTIERFESESSLALYLGMSNLDNSSGKHKGSKAPKQVNERAKAAMMIAVDRHRKPVAQSQKFYEKKRAEGKKHNQAVRALGRHLCRVIFKMLKENRGYFFTQ

SEQ ID NO: 286866 - protein, 391 aa, unidentified
MYIVGIDCSKYKHDCFIATEAGEVIKDTFTFDNSGTGFTQFFSILETLNCPKSQIKVGFESTSHYMVPLMKHLSVKGYEFILLNPVIVSRFRRSTTLRRIKTDKIDAKTIAQVLASSDYESYHMQVYHFPELKSLTRLRDRLVKQRSYYLVMLTNVLDEVFPEFKEFFDGSLKSKTAFYLLDTYKIPSRIANMNSNSFDNLVKVSHGHFSYAKFVKIKELAKNTIGSSSEADELEISSLLNIYKSINDEVCRVESKIEEIMNIIDSPTVSIPGVGIMSAASIIAEFGDLSRFANADKMLAYAGLDVGRSQSGTSDFKGKMVKHGSSYLRQTLMNVVETMIIHAPTFYDFYHKKRDEGKAHRVALSHLARKLVRLIYKLETSHTRFDLTNSK

SEQ ID NO: 286867 - protein, 330 aa, unidentified
MARKVDNGVIGVVDNFRSQEALLLYVEKQCERAEQVVFYEAGPLGFTLYRMLKARGVLCYVCAPDSSEQQRKRRKNNKIDARSLTSKLFNYLNGNQEALQLARVPTEAQEQLRLASRQHDQLVEERKRLGAKGNGLLLSQGFGSWSNWWRPKAWAQLSCIVPQWLLERLKIWVDVLKMLDEKICQAKVALARACSGPRPKGVGALSQMQLQSEVLDWSLYTNRRKIACLAGMVPSEWSTGDEQRRGSITKVGVPAIRRIIVEMVWRMILFQPQYKAVQKWQEVLRGTNPALKKKAVVAIGRQLMVDLWRLQTGRVTAQELNLVMIGDEGV

SEQ ID NO: 286868 - protein, 340 aa, unidentified
MSLVLQPLLPFPDSCQGMSPHQQGRGTKMTEHCYGGIDVSKDRLDVMVLPDRKSFSVDNNAAGYSELVKRLRGLSIAAIGIEPSGGYERAVIRALLAADLSVRRINPNKLRQFGRARGVLAKNDRLDARLIAEYVAIMPTRVVQRDPATEQLAEVVTMRRQLCDEHVAVENQTAHLEDAMLRRLNKRRLARLAADILLLDRRMAQIVASNANLTRRYELLTSMQGVGPTLAFTLVALLPELGQMSRKQIAALVGLAPYDFDSGRLKGHRCIYGGRLPVRNVLYMAALSACRYNPALKVFHHRLAATNKKPKVIIVAVMRKMITTLNAMLRDNVAWQPKSA

SEQ ID NO: 286869 - protein, 413 aa, unidentified
MDKIYDICCGIDVHKKLIVACLNHKRKKELREFGATTRELMELAEWLQKNNCEIVAMESTGSYWKPLYNIMESYGLHAIVVNPAHMKAVPGRKTDVKDAEWIAELLQHGLLQPSYIPSKDQRELRELVQYRKSLVGERTRELNRLQKMLEGANIKLSGTVTNINGKSARKILEYILSGNEIDEKKYDEMYEEKLIAHNLKASKEQILDDLKGFMSPLQRRMLKELLQHLDELNVHIENLNDEIDNFMKPEEKQASQVIQDVTGIGNTSAQTIIAVIGTDMERFPSDRHISSWAGLCPGDNVSAKKRKSGKIRKGNALLKSTLVLCAHAAVRHKSSYFHAQFKRISTHRGKKRAYVAVAHSILIAIYHILKDGVKYQDLGAEYYNQFNAERKIHAYLKKLKALGWEPPKEAVPA

SEQ ID NO: 286870 - protein, 391 aa, unidentified
MQYFVIAKNKEIMNLKYSVGLDIASKKIDICMSVIDGHQKVVVVSSKSFLNTLSGFNDMESWIVKNHKEKEVPLVLCMEATGVYHENCALYFSERKYKTSIILPNKAKHYLISLGLKSKNDSIDAKGLSKMGAEQCLELWQPMGKFFYELRQYTRQYQNLQEQKTVFKNQLHALEHAMFKSKRMIKQQQDTIKLFDKQLKELDKLMKNLIDSDEIMKQKVSGICKIKGIGMLTAATILAETNGFELFKNYKQLVSYAGFDVVERESGTSTGKTKISKKGNGHIRRALFMPAFVAVKHNEKPAVDLYNRTIEKHGIKMKSYVAVQKKLLVLVYHIWKKNEEYDPNYLQKMNQHQENISKLLIDETNKKNSPNQVEAIPDKQIIFEDEILSIV

SEQ ID NO: 286871 - protein, 550 aa, unidentified
MLRKLTKGINLSIAEEGMIHLWTTCSELETDVPLVFYTRKGAWSEQVAATSLVKPQAIPFGRLHKIDTAYPEHVVQNKTTGVSLMENKKKLKLKKKTNLPFHLQHINVNAAGIDIGSESHFVAVPEGRDKESVRAFTSFTCDLFNIATWLKTCKIDTVVMESTGIYWIPLYDYLESEGFEVKLVDARHVKNVSGRKTDVLDCQWLQQLHTYGLLSGAFRPPEDICALRSLHRHRFNLVRFASSHVLHIQKALSLMSLRLHNVISDITGVTGMSIIRKIVDGERDPKKLAELRDRRCKNSYEIIVKSLEGNYRSEHVFSLKQALELYEFYQTKITECDNEIEQTLKLFKSAIDIKENPLEGKRKTAGKNQPKFDVRTLLYEKAGADLTRVDGINESTALTILSEIGFSVESWKASKHFCSWLGLSPGNKVSGGKVITSKTKRCANKVAASLRLAATNLCRSQTALGAYYRRMSAKLGKPGAVTATAHKLARLVYSMLKHGTKYVDQGMDYYEDQYKKRVIKNMKKRAKQLGFKLVEVINVDNDNIATLLSS

SEQ ID NO: 286872 - protein, 371 aa, unidentified
MKKFSKFVGMDVHKATIAVSVADANGGEVRYVGEIANTPEAIEKLVRQLRKGDAHLSFCYEAGPCGYGIQRQLSDLGWDCQVVAPSLIPRKAGERVKTDRRDSLMLARLHRAGELTAVWVPDDAQEGLRDLTRAREDMKHLQRQAKQRLCAFLLRYGKCYSGKSNWTQAHYRWLEEQQFGQSVQQIVFQEYVDTVKALSKRVDGLDTQLESAASESVFWPVIEGLMALRGVNLLTATTVVAEIGDLKRFASAPQLMAYLGLVPSEHSSGATKSRGAITKTGNAHVRRVLVEASWTYRYPARKTAHLQRRAERTSEAVQDIAWKAQKRLCARYRLMEGKGKLKVQACTAVARELTGFIWAIGQELPQPVPNR

SEQ ID NO: 286873 - protein, 416 aa, unidentified
MIPAVIERCAGIDVGKKHVAVCVMTGPAQAPATAETRKFGTIRAELEKLREWLKSERCTHVAMESTGCYWKPVLNVLEDDPEFALQVVIANPQQVKAITGHKTDPHDARWLAHLLRHGMIRPSFIPSRALRDLRDFTRRRKQMIGLAAQERNRVQKILEDANVKIGDVLSDVFGLSGQLMLEALVAGNSSAADIAQLAQRNARKKIAELTAALEGHQMRESHRMLIRHAMRHMAFLAGEIEDLDSDIAQLIKAAGLAEAHQLLQSLPGIQETAAATILAESGPDMKQFPTAAHFSSWSGLAPGNNESAGVRKRAPTLKGNPHIKTAVIEAAWSASRTKESEFHFQYHRLHARLGHKRALVACAHLLLLRLYQVLATCKAYQPPQWILPPREIRSLVRHHTRRLNCLHRWLAQEQQA

SEQ ID NO: 286874 - protein, 363 aa, unidentified
MKKVSKQQLSMETTKDKPGMTMGLDLGDRYSHYCLLNGECEVVEEGRIQSTESAFRRHFEGEPRLRIALECGTHSPWISRLLKGLGHQVIVANARKIPAITGSESKNDRNDAELLARFAAHDPKLLSPVQHRSLQRQQDLNLIQVRSTLVRARTMMANALRGLVKSAGGRLPACSTESLPIRAKMAIPPALTAVALPLLQQIALLSRQIDAMDGQIEKLAKKYPEIAVLRSVPGVGPVVAAAYVLTLDRPDAASNRSAGAFLGLRPGQSQSGESDPQKRISKTGDSYLRSLLVQSAQYILGRFGPDSALRRWGLKLASSGGKRGKKRAIVAVARKLAVLLHSMWCSGEHFQPFPQTATAATLA

SEQ ID NO: 286875 - protein, 426 aa, unidentified
MSKDEDGGRQEEFAAFVGLDWADEKHDVWLRDAATQQTRHQVIEQSPEGLSGWAGELRRQYPDKLIAVCLEQSRGALIYGLMEYPFLVLYPINPLTLAKYREAFTPSCAKDDPTDAEFLCELVTQHRDRLQPWRPDDEQTRLLGLLNEGRRGAVDLRTKMVLQLLATLKKYFPQALALIGEDWDSPMACDFLLQWPDLPSVQRSKPQSVRSFYYGHNCRNKEAVEQRLELIKQAKPLTTDTAVVTSCAMTVKMLATQIRHLNKAIADYEQQIAKVFAAHPDANIFSSFPGAGNAMAPRLLCAFGSDRDRFATPTDVQNFTGISPVIERSGKGTWVHWRWNAPEFVRQSVHEFAKCSLPQCAWAHAYYQMQRERGKGHHAAIRALAFKWLRILFRCWKDRVPYDEAVYLQSLAKGGSAILKYMATPA

SEQ ID NO: 286876 - protein, 364 aa, unidentified
MNKCRLNTELSSHEETRSQFNGCTGVIKLGIDVHQQFYVVVLQEGGSNPKPPQRFQKQAFLHWAAKLKNQGNQVHAVYEACGFGFGLQRKLSALGIECEVVCPQKLDEQNRRVKTDGLDAKALCLKLDRFVQGNGDALALVRVPTEAEEQLRAIHRQREQLVKARKRLEAQGCSLMVNHGIEPIQQWWKRRAFAKLQVPIWMQELLAKSQPILLALEEKIRALTVQLQAAAVSNQPRGFGALTSVVIDREIGNWQRFSNRRQVGSYTGLCPGEYSSGNTRLQSCVTKHGNPRLRAALVEAAWRLVLFQPNYKPIIKWNEVLRRGALATGAARKKAIVAVARQLAVDLWRIRTGRIRPEQLGLSI

SEQ ID NO: 286877 - protein, 358 aa, unidentified
MSTYYIGADVHSNSTELAIEKRGKIVARYSVPTSIPAIVNVLDSIQGKKYMAVEEGPMSGWLYRNLNSKLDQFISSDPRRNKLIASVGDKDDKIDSAKLAPLLRGGFLRAVYHSDDDGRAELKHWVSLYHDRVRDAVRGINKIRARCRMHGVKISRATLRDPASRVKWLLKTKHNILANQLKMLWIGYDATGQQVKFAKRQLNTLSRKYTIIKQWSQLPGIGLIRATTIFAFLDTPWRFKKKNKLWKYCGVGLQRTTSGTDKKGRPKPARLQLPWAVNRTLKNAVLGAALSAINQKDNVFKDYYERMLKDGIITSNARHAVARKMLTVMWAMWKTNSPFDEKVVCNKLNMPTVSVLSR

SEQ ID NO: 286878 - protein, 410 aa, unidentified
MEAMIERCAGLDVHQETVVACVLFGPLDKKPKTSIETFSTTTTGLLALSDWLATLQVSDVVMESTGVYWKPIWNILEGSFHLVLANARHVKNVPGRKTDVKDAEWLAKLLRCGLIESNFVPPEDIRDLRDLTRYRKKLIHHRTSEQNRIHKILQDANIKLTSVLSDIFGVSGRRILEAILNGEKIETDGLRKMVDWRTKASITDIASAINGRIRRHHRDMLRYHWEHMGYLEQTIEELEKQIDQLLSPYRKEVELLDGIPGVNKAAAATFIAEMGVNMSVFKSAKHLASWAGVSPGNYESAGKKKTSKTTQGNKALKTMAVECVLATSRQNNRIASHRKRITKRQGKMKGRIASAHLLLTIAYNILKTGEPYHELGSNYLEEKQMNKELKMIEYLKKKGYTIAPSEQQTA

SEQ ID NO: 286879 - protein, 350 aa, unidentified
MDKELYIGVDVSKQTLDLAYYDGESIDWKKAHIKVSNNNAGFKKIGSWVAKVSKGFDIVLFCMEYTGLYTQNFRLWLEEKHYIYRMVEPRKMHRFEPDLDDGLRSLDRIKTDELDSFRIAIYCEQNHRKILRNPSKLPPPVYFKLKRLLAERKQTVKQSVLYKQQLHDICVYDTDLSVERKNGQLKTLNDALKGIDNEIDMYIKEDADISKNFSLLTSIPGIGRVVALETIVLTENFMAIDNPRKYACYIGVAPFKKESGTSVRKGSSVSKKGFKQAKADLSIACLVCMQHIPNIRDYWERKRKEKCSGIVFNAIKFKVILRMFAVIKRGTPYVETDNYRNGKNKQPGVN

SEQ ID NO: 286880 - protein, 341 aa, unidentified
MALVVIGVDPHKGSHTAVAIDGNERELDELRLRSSTKQCDVLLDWAGRYPQRRWAIESAAGLGYLLAQQLVAAGEEVVDVPPTLSARVRVLDSTKASKNDPHDARSAAIVALRHRHLRAVDADDHRAILRMLANRHHALTRLRTQAVCRLHAQLANLKPGGLTRTYTPKLARELLETVHPASGVEAERKHQAHALLDDVVRIDAEIRAIKKRMAVAVSATGTSLLDIFGAGPVVASIVIGHVVDVRRFPTRGHFASYAGVAPIEASSGPKKRHRLNPRGNRQLNHALHIIAIAQIRHDSEGRAYYDRKRVEDKTKKEAMRALKRRIADVVYRALVADSARG

SEQ ID NO: 286881 - protein, 312 aa, unidentified
MEHSTSFVGIDVSKEHLDVHVRPSGETFTVPRTGAGLEELTRRLGVDLPLLVVLEATGGFEITVAAALAAAKLPLAVVNPRQIRDFARSIGRLAKTDRLDAEVIALFAERVRPEPRPVADEDALALGELVARRRQLVEMIGMEKNRQQQVRDLSLKERIQAHLAWLQQALADLDGEIGDLVRRCPAWRETEERLTSVPGVGKITARTLIAELPELGCLGRRQIAALVGVAPLNCDSGKWRGYRAIAGGRFEVRRALYMATLTAIRFNPVIRDHYQQLRQRGRPAKVALIACLRRLLTILNAMLRERTTWQPA

SEQ ID NO: 286882 - protein, 393 aa, unidentified
MQRDTKEVLAELVGKLKEKLDPKKVGATSAGEKHQRGELRPNLDRLTVGVDLGDQESHYCILGLEGETLAEGQLRTTEEDFAAFFQGLNAARVVEEVGTHSAWVQEVISGCGHEVLVANPRLMDGSKRRKRKNDRIDANKLARLGRVDPESLYPIQHRSREVRQDLVMLRARDALVAARTEIINTTRGLVKSMGTRLPKCSSRSFAQKGEEAVAVEMREALLPLVRLAATLSADIKEYDKKIEELGREKYGHTALLRQVKGVGPITALAFVLTLESRQRFVKSRDVGPYLGLVPKQEDSGESQPQLGISKAGDTMVRKLLVGSAQYILGPFGPDTDLRRYGLRLCERGGKNAKKRAAVAVARKLAVLLHRLWVSGEVYEPLHNAISAPIAAAA

SEQ ID NO: 286883 - protein, 345 aa, unidentified
MDKLRFAGIEVSADVLLVRTSAANGSAVKREFANEPRGHQALCRSLSRPDATVRVCLESTGLYGLDLALALDATPGVEVMVVNPRAMRHFAEACMQRSKTDLIDVEVIYQFAARMEFQRWRRPSAQALELRSLARRIAALTFKLTGEKNRRHAAALSTTTSKDVIRSIDQEIRFLERDIAHLRQIALELIYQNHLLARRFQLLTSIKGVGKISAIAILAELAILPPDMDARQWVAFAGLDPRHHKSGKSVQRQKGISRAGSKYLRMALYFPALVAAMREPHVRAFYDQLLARKKFKLQAIVAIMRKLLHAIYGMFKHEQPFDGTKFFQPRAQSTNAALVHGGTTP

SEQ ID NO: 286884 - protein, 322 aa, unidentified
MSRTVKSSVKVNVALDVSKSKLDVHVGDISLRTFPNNTRGLSTLKGILSRYNVSLVLLESTGGYESLAVSYLQACGYDVCVINPRHARAFAKAMGKLAKTDKIDAEMLCRFADIIDARPDRARFVKPLTDERREYLNALVRRRRQLVELKITEKQHKSSPAISSFCVSDINEVINYLNSRISDIDRAIDDHVKSCFSDVSDILISFKGVGPSAVSAIVGELPELGKVNRRQISALVGVAPYNRDSGNMRGRRSVSGGRSGVRNILFMAALSAIRFNPVIKSFYTRLVNAGKPKKVAIVACMRRIVCILNAMLRDGTRFCASC

SEQ ID NO: 286885 - protein, 338 aa, unidentified
MKLYAGIDLHSNNSVIAVIDEQDRVVFQKRLPNELERILLALASFKRWLVGVVVESTYNWYWLVDGLMQAGYVVHLANPAAIVQYQGLKYSGDEHDARWLAHLYRLGILREGYIYPREARAVRDLMRRRMQLVQTRSAQLACMHTQFTRSTASSPSSDALKRMLPEELETLLEEPNVASGVRANLEVVGTLNREIARLEREVIEQVRLAGQFAPLLSIPGIGRILALAIMLETGAIERFVKVGNFSSYARCVESKRLSNDKKKGEGNSKCGNKYLAWAFVEAAHFAVRYNPRIKRFYERKAAKTNKIVATKAVAHKLARAAYHVMRERVPFDETRAFA

SEQ ID NO: 286886 - protein, 349 aa, unidentified
MPATTPTAIAVIGIDIGKNSFHIIGLDSRGAIVLRQKWSRSQVEARLANMPPCLVGMEACVGAHHLSRKLSALGHDARLMPAKYVRPYSKGQKNDFRDAEAIAEAVQRPTMKFVATKTTDQLDLQAMHRVRERLVSQRTGIVNQIRAFLLERGIAVRQGQRFLRAELPHLLATPPDVLSPRMIRIIEGLATDWRRLDQRIEGFSEEIEALARANSGCERLMSVPGIGPIISSAMVAAVGGGDAFSKGRDFAAWLGLVPRQMSTGDRTILGKISKRGNRYLRVLFVQAAWVVLIKPKSWERHGLKTWIEAAKKRLHHNVLAIALANKLARIAWSVLARGRGFEASKLQAA

SEQ ID NO: 286887 - protein, 475 aa, unidentified
MASGRMNRKQRKELARQLQSADSGLEVVHPRAAGIDVGNSVHYVAVRPDRDAEPVRRFECFTADLNRMADWLEACGVATVAMQSTGVYWIPLFEVLEQRGFETYLVNARHTKSLPGRKSDVQESQWLLKLHTYGLLNNSFQPTAEIRGARTYWRQRGEHVHGAATCIQRMQKVLTQMNVQLANVISDLSGLTGQAIVRAILAGERDPKKLAELTNYRIRASREEIAKSLEGNWRPELLFVLKQEVSMYDTYQQRIVECDRELAEHLNKFADRVPPRPTKEAPQSEEQAPLKRSRSAKRAQGNSPCFDLRSELSRISGVDLTRIDSIDVLVAQTVISEVGLDMSRWKTEAHFASWLGLCPDNRISGDKVLRRGTRHVVNRAATALRVAAMTLLRSRSYLGAQYRRLRTKLGAPKAITAMAHRLARLVYRMLKYGQDYIDKGMQYYEDRHRFQQIQLLMKRAAKLGLQVMEIPAVGA

SEQ ID NO: 286888 - protein, 354 aa, unidentified
MKLYVGLDVGLEETSVCIVDGEGLTVREVKVSTEPEAIRSAVEGYADRLDRVGVEASSLGIWLHRELQPAGLPVIVVEARHMRVSLSTMRNKTDRNDARGIAQMMRLGWYRAVHVKNIEMQKMRSLLANRKLLKRKLIDLENHIRGTLRAYGLMVGAVGRGEYEARVRELIEHSDPVFSMMIESMLDVRRAIFEGYERLHKVLLQVVQHDAICRRLMTVPGVGPVAALSFKVGVDDPLRFARSRTVGAHFGLTPGRHQSGTSIDFEGRITKQGDVAVREALCEAAASLLLRVRKWSALRAWGLRIAKRSSMLCAIVAVARKLASILHRMWINQTDFHVGFGAKVTQRLRLRPAQ

SEQ ID NO: 286889 - protein, 424 aa, unidentified
MHNPKGTRMKPWQELTHYAGFDWAKDHHSVVIVNSEGSIVADFEFEHSIEGWKGFVEKASAWPNLAMAIETSQGPAVDQLLQREYTVYPVHPVAAQSYRERKAPSGTKTDHLDAWGLADALRLDGQRWKALQPLDPITQQLRLLCRDEVALIEQRTALVNQLQQALAEYYPAALEAFEDWTDAFTWEFILAFPTPQALVTAGKPRWEKFLHTHKLWRPETAEKRLKLFSQADQFKACDPIVRAKSQLALTLCKVLVTLAQQLALYRKQIETLFQDHPDHDLFGSLPGAKKYLAPRLLAAVGSDPNRYGNYQALQCIAGTAPVSYQSGKINKVRVRWSCDKFLRHTMHLWADCFRKASAWGQAYYQKKRADGMSHACALRCLGQRLLKIVFRMISDKKPYNAEFHACHQQKHGSWVLKLVDESVA

SEQ ID NO: 286890 - protein, 362 aa, unidentified
MPTSINKANNFRDQDFYIGLDVHSKSWTVTVRTMGFELAHFTQQPDASQLARYLKTRYSGNRFLSAYEAGFCGTSAHYALRQSGIENIIVHAADLPQTDKQKKNKTDMHDSRAIARYLEKGLLKSIYIMPVGQQETRALYRCREAKVRDVTRCTNRVRSLLYYFGVQLPDQFKDKEYISKVFLKYLSSIELTTIHGTLTLQHYTCDLIYHRAQLLDVTRKLRKAILAEYGPSYYSILTVPGIGPITAMALLAETGSLERFRDPDDFVSYLGLIPAERSSGETLYTTRIQPRCNTHLRPILIEAAWGAIRKCPVMLAYFKRHAGISGKKSIVKVARKLVLIAKAVALHQTTYQPNYFEQKKVL

SEQ ID NO: 286891 - protein, 413 aa, unidentified
MSPGLLLRGIPCDRLVVAIDPGKVSNRVWLTTGERGLIGEPVSLPVLRDGVEELARLVAASEVMGPPVIGIEATGALHRAWAAEVERRWPGSLRLFAPSETQAARAQLGSRRFKTDDRDCAALVWLLRQGAGRPSSPLQVEALLGAVRHRRQLVVARRVAQQRLHDQLNALCPGLSAPVGHGRVLELEDPSGRAVLACAVAFAGRAPSTRSLRARAPGRLSDTNARFWVQRWKRLLAPPVDAELRAQRLGRDVERWLGLREDIAALESQLAELLADTDGQILTSLPGVAIVRAAAFAAHTLPIERWPTPEHLYSAAGLAPASYQSASVTRRGRISRQGLGEHRDALMGIAWGLSQHSPAFRDRDRELRARGMRPIQARVALARHACRLAFRLINSQQPYDDRRYDRARRDRGR

SEQ ID NO: 286892 - protein, 346 aa, unidentified
MTKIIRIGMDTSKQFFQLHGVDEAEQVVLCRRLKRREVLEFFGKLAPTVIGTEACGSSHYWARELTQLGHEVKLMAPQLVKPYVSRGKNDAADAEALCEAMSRPKMRFVPVKSAESQAALMLAGLRDRLVRNRTQLANAIRGYAAEFGLVAAKGKAKLEPLLSRLQADEAVPPLARELFAEHAKEYAQLKTQLEAIDAKLMAWHRANALSRNLARIPGVGPVIASLLVMKTPDPHAFRSGRQFAAWLGLTPKDHSTAGKVRLGVITRAGDETLRSLLVVGATAVVWQVRRGTGRRPSSWLVELLKRKPPKLAAVALANKIARVAWKLMTTGEIYDANRALPATTAA

SEQ ID NO: 286893 - protein, 396 aa, unidentified
MRFAGIDIGSERHAVAIVDERGEILKRPVSVGEKAAGYRRLRALLGEPADCVVAMEATGHYWKNLFAWLAAEGFSIALINPIRTRRFAEEELQRTKTDHVDALGIARFAAQKRPKLTRLPDQAAQELRQIVHLRQRTIQHLGDRVRDLHRAIALTFPEFTRYVRGLDTELATSILSRYPTARAFLAVTTGRLAGLCFDGRRRVGQALARQLTTAAKESVGHCQTEPYEPQVRYACQDIIAMRERARDLEADIQRRLAASDLGQLLTTIQGVSTLTAATIIAETGDPARFPDAASFASYIGVIPRLHQSGKRKFSGRSAVPLGNARLRRALWMPVLVAVRLNPWLRTYYRRLRAAGKRPKVAMIAAMHKLVAAIYSVAKHHRPFVAKISPPVASATG

SEQ ID NO: 286894 - protein, 350 aa, unidentified
MSIIGCDLHSRYQVIALVETDTGEMVTRRLEHENGEARAFYTTLPKPSLIGIEATGYTQWFERMIAELGHELWVGDPAEIRARAVRRQKTDTRDAEHLLDLLLTKRFPRVWVPTPEERDVRQLLKHRNKLVRMQTSVRNQLHFLAMSQGVCRKKKLWSARGRAELEGLSLGPWASQRRKELLELLDGLGPRIAELDQAVKTEAERRPEAVELMKHKGVGPVTALAFVLTIGPVERFAHSRALVSYLGLNPGEDSSGGHQRLGHISKQGNPMLRWLLVEAGHGAARFDPELRRKYQRLVFRRGRNVAKVALARHLAVRLYWTLRQASSATPPVRTPGSPQSRKVEGTPSRV

SEQ ID NO: 286895 - protein, 413 aa, unidentified
MVRSIGLDVHRDFCEVAIIDAVGARSRGRVPSTREALQLFAQSLARTDRVALEVTGNAWEIARILEAHVAGVVVVSPTDTGIRQARAKTDRLDALALARLLAAGSLDGVRMPDEPVRAMRRRLARRAQLVNARSRVKNEIHAVLVRRLKGRPPASDLFGRKGLAWLAEQQLPVEERESVDAGLRQIAFLDGEVAEVERVIALQAIGWPQIGRLMSVPGVNLIVAATFLAAVGDIRRFESASKVVGYLGLDPKVRQSGEGPAKHGRISKQGSAHARHALVEAAWSAVRQPGPLHAFYQRVRARRGHQIAIVASARKLACLFWCMLTRGEDYAYAQPSLTAKKLRRLELTAGAPKAQGTSAIWSTNLAMRDAERALAEQAELAYKRTVADWAATRPAKAGASATKGHASKEPSKG

SEQ ID NO: 286896 - protein, 372 aa, unidentified
MNYNTVYVGMDVHKESFTLCSCKYEDEKASHYQRTPASYKNVLRYLAFLRTIYGEYTRFVCGYEAGCLGYSLYHQLENFNVECVILAPTTMLEQRSKRRIKTDKRDAEIIARSLAQHNYSPVHIPTETDNQTKEFIRMRDDHKAELKKIKQQILSFCLRQGYQYDGSGNWTAKHVKWLRSLKPAGLYKEILDEYLLTYTILTDKLNRLDQRIEELASKEEYTESVSKLTCFLGIKIHTALSVIVEVGDFQRFVSARKFAGYLGLVPGQHSSGDDRNGLGITKAGNTHVRRLLVESAQSYTRGKIGYKSRVLRSRQAGNSPQVINYADRANERLRRRYYKMVLKDGKKYNIAKTAVARELACFIWGMMTDNIY

SEQ ID NO: 286897 - protein, 346 aa, unidentified
MDLFIGLDVSLASTAICVLNAHGKVMKETTVASEPEALAGFLGDLCGNVIAVGLEAGPLSQWLHKHLTDADFEIVLMETRQVKGALKAMPIKTDRRDALGIARLLQMGWFRPVHCKSVSAQEMRAVLTARKSIQQACLNLELSVRGVLRNFGLKMGKVAKGRFEARVRELSVGNSMLEAAADPILRARAALRSELAGLEKLTRDHAGSDPVCRLMMTMPGVGAIVALTVKSAIDDPERFHSSKDVGPWVGLTPRREQSGEHDIVGQITRAGDVALRTALYRAATVMLNRGRSNWLSAWAMRVAKRRGKKRATVALARRIGVVLHRMWCDGSDFRFTRAAAMSTSAA

SEQ ID NO: 286898 - protein, 368 aa, unidentified
MSRLAKVDRFFNNVTLTSDDEVFVGVDVHKKSYHVALFLNDMPAIDFRMGAEAKQLNKKLQPMGRSIKNIVYETGPTGYGLARHLIKNKLPVTVVAASRIPRPAGGEDKTDRLDSRKLAEYSARGLLRPITIPTPRQEADRQLYRMRHRQALQFAKVKTQIKSFLLMHGIKEPDGLTNWTLAGVGDLRDIRLMDTLRLSLDELLSDYDYFDSRVKAMNKILAGSLNKGVLGRRMDLLKTHPGVGPVIACQFATELFHYKDFSSTRQLYKYLGLSPRVSQSGERSSGGSINKAANGRLRNNLVQGAWIWVRTDIEAKKCFWRICENCGGIKQKAIVAMARKLAGHLWAMLMSDQPYDKNKAKCRHNKER

SEQ ID NO: 286899 - protein, 344 aa, unidentified
MYYVGVDHHKRTSYMTIMDQGGRVVKHGNLVNRPEVVEAFLGKIDGEMSAVIEAGPNWPVMYDWLAEMVESVTLAHPSKVRVIAEAKIKSDRLDSKVLAHLLRADLIPAAYVPDVVTREQRRQIRQRMFMVHMASAVKNRIHAVVDRHPGRRQELGEVSDLFGKRGREWLRKVDIPEADKKLLGQDLTLLSAIEAQIKISDRWVSQMARKDWRAALVKSIPGIGDFFAVLIALEIDDVKRFSRPSRLAAYAGLVPSTYASGSYVHHGKITKQGNKWLRWACIEAVYPAIRKDEGLRELYERLKVAKGANVAKVAVARRILTICYRVLSEEREYHPWTSQAFRLP

SEQ ID NO: 286900 - protein, 317 aa, unidentified
MKASGRFIGIDVAKAHLDIAVRPGGECLRLPNTTAGRQTLCKRLEALGPVCIAFEASGGYERALLKQLQEAGLPGVRMNPRQVRDFARATGRLAKTDRIDAAVLALFAERMQPDVRPAADDATEEIDALRKRRQQLAQMLTAEKQRVPQAHPSVRANVRANIRHLQGQLRALDEQLAERIQADPALESKRQLLQSVPGVGPRLSSTLLGALPELGRLNRREIAALVGVAPFNCDSGPRRGERHIWGGRASVRNVLYMSALAALRCNPMIQTFYHRLRAAGKPAKLALVACMRKLLVILNAILKQQRAWDPNALASSC

SEQ ID NO: 286901 - protein, 486 aa, unidentified
MAKQKKSAFERLSSGAMNRRQRRDLARRLAGNDPGLTIVHSNAGGIDVGNESHFVAVPPDRDTNAVQEFGCWTADLKRMAEWLSACRIDTVAVQATGVYSIPLYDILTEYGIQVVLVNAQHTKNVPGRKSDVQECQWLMKLHTYGLLRDSFRLEERMESVRTVWRLRDRHVKDASRSVQHMQKALTKMNVQLANVLTDITGVSGQAIIAAILQGERDPWKLADLKHEMVKASREEIARSLEGNWRDDLLFELRQAVDGYHFAHQQMRECDRKLQSFLASLPARTLNRPVEPGGSPATAQKAKKARKPRKTRRNEPSVDLGPELKRICGVDLTSIDGIDLITAQTIISEIGTDMSGFKTENHFASWLGLTPGKDVSGGKIIGSGKRKVQNRVAMSLRMAATTLLNSKTYLGSRYRHLRQQLPSYAAAIKAMARYLAVLVYRLLTRGEAWVDRGAAKFEQRRTERELASLNSKARAKGFQLVPITQAI

SEQ ID NO: 286902 - protein, 350 aa, unidentified
MEHGGIDVHKNESQICLQTEQGEILEPRILSRRDRFAAVFGNRPRARLLIEASTESEWVARCLEELGHEVIVADPNYAPMYATRSRRIKTDRRDAQALMDACRLGAYRPAHRTSDAQRQVRALLVVRDNLVRSRVRQIQVIRALTRREGLRVRSGEAATFGERLSEVERPEWLSRILAPVIAAMNEVNQQLAVVDQAILQVVEGDPVVQRLDTAPGVGAVTAVAFVATLDQVERFEGAHQVECYLGLVPGEQSSGERQHRGPVTKAGNPRMRWLLVEAAWCILRSRHSDTEHLRQWAERIAPRRGRRIATVALARRLAGILYAMWRDGTEYDPRRRVHPRGAQVPASAVA

SEQ ID NO: 286903 - protein, 420 aa, unidentified
MKVVYQTCCGVDVHKSFLVATIIKTTSEVQPSYQKKRFSTFNNSILEFKQWLLDNSCRDVCMESTGKYWVPVFNLLEDELNVTIANPKWVKAVKGNKDDTKDSKWIGDLFRLGLVPGSYIPCKPIRILREFTRYRYKLTSCRSSEKNRFQNALTVCNVALDSVVSDIFGKSATSVIDYLLEQSDNSINHEEISSRLLRSLKKKSESVIESIEGYQMTESQKYRMRLVHAHMDYITSTISDIDSMIDSLVEPYENAVQLLCTIPGVDRNSAITIISEIGTDMTQFSNSKRLCCWAGLTPGNNESAGKKKSVRITRAGVYLKPTLVQVAHAAVKSNKSPYYKAKYERIMKRRGKKRAIIAVARMILTAIYHMLSTGEAWNPTDLYKIDMPEPLKNRQKEKAVTQAMKLLIAEGLIKESQLAS

SEQ ID NO: 286904 - protein, 421 aa, unidentified
MKSWNEITHYAGFDWARDHHDVVIVDRQGQIVAEFRLQHSLEGWQQFGHQIKNYPAVAVAIETSQGAAIDQLWQWDCSVYPVNPRSAKSYRERKVASGNKTDQLDAWSLAEALRMDGQHWKSLQPLDPLTQQLQLLCRDEIGLIQQRTALVNQLQQALCEYYPAALEAFDDWTQPYCWDFLLQFSTPEKLAAAGPRRWEKFLHAHKLWRPETAAKRLEIFKRAGQFCGRPPVISAKSLLAVSLAHLLKALETQLNHYRQQIETLFEQHPDSGLFGSLPGVAQTLAPRLLGEIGGDPKRFDNTQNLQCVAGTAPVSYQSGQIHKVRVRYQCNKVLRHTVHLWAGCCLRVCPWADIYYRQKRAEGKSHACALRCLGQRLLKILWRMIETRTPYNPDLHAKNQQAHGSWVLKLINQKTACQTGE

SEQ ID NO: 286905 - protein, 320 aa, unidentified
MAIIGVGVSKLSLVAVRTSSTGIVKESFEIPNTAVEIDTWLDKLQSKHKYLLVVSEATAEYHNILAKACLSKAIKFRLLNPILTKQFNRATIRKRKTDLTDAEIIAKLVIQGEGSVVTPASLSPAKVVHRTAIRLVKVEQTLESMCRRFNESLPEEKAVNQQLLDCMQLLKTSCEVLRGRARESTDPKLTKLLTSIPGVGERIVVTLINEIEDIHRFPSPKSLVAYAGLDPRVRQSGTSLKRNTHITKRGSIYLRRDLYIAATIAARWDSEIHEYCEKKLGEGKRYREAMMACSRKLLNRVYAVWKRGTPYERRLITVGA

SEQ ID NO: 286906 - protein, 355 aa, unidentified
MDKIKYIGLDVHRDTISAAVLNESGRLLQQSVLMTRTAAILDFIGGVRGSLHVTFEEGTHSAWLYDLLSRRVDKLVVCNPRKNALLKSGNKGDAIDARKLADLLRAGLLSPVYHGETSALEVQQLARSYLMLTEDTTRAMGRLKAVFRGQAISCTGRKLYGPKHRGEYLAALGACALRRRAERLYQQLDALQQLRRDARHDLIVECRKHVEAKWLQTVPFLGPLRAAVLIGRVQTPHRFRTKRQFWTYCGLALETRDSAEYRVTDGQLERKKRPAQVRGLNWNYNHELKNVFKGAANAASTGQGVFREFYLGLLKKGMRPEMARLTLARKIAAIALKIWKKGESFDAEHLKSQAA

SEQ ID NO: 286907 - protein, 356 aa, unidentified
MSRDIKYIGMDVHKEATVIAVLNGSGKLVMESIVETKASSILQFIHGLRGELHVTWEEGSWAAWLYDLLQPQVAQVLVCDPRRNALLKEGNKSDKIDARKLADLLRTGMLRPVYHGEHGLRTLRELGRSYQTISQDLNRVMNRIKALYRGWSISCAGSQVYAPRHREEWLQKIEHVGVRRRAELLFQQLDGLQTLRRTLRLELLAESRKHKASKLLRQIPCIGPIRAARLLALMQTPHRFRSKRQLWTYSGLGIETRDSAQYRYLHGQLQRTKKPQQIRGLNQNHNHEMKEIFKGAATRASCGVGPLRDFYVALLAKGMKPELARLTLARKIAAIALTLWKKEERFDAEQLKPQAA

SEQ ID NO: 286908 - protein, 397 aa, unidentified
MNTPICGLDVASTSAAVCIQAADGTVLHQLSLPATRAGEDQLLALLPAGTAVFTESTGRYHLPWARRLTAAAHPVYVLNALLAKRLIGVTNALRQNKTDKIDARQLADIGRRDGDALQTYRFHEDPSRLRLRTLCEVRTKQRQMLTATLKSAANLLQTMLPEAPWLALAGHRGVTQLFLRIDSLARLQRMRLASLQTYAFGKAEELHAVLRQPLSAEAIFNALLPALQSQLRVIEALREQQQTLLAEIRAAVIAGHRAEEVRLVETIPGFGVRIAPAIVACVPEDLHSWGPKQKVARKLQAYFGCDPKLRESGKWKGQVRMSKRGIELARTALFQAATCGMLYDPEMKAVFDRKKAEGKFYLVAVSHVMRLQLRRLVAVLYDRRPFVRLPLTSTTAN

SEQ ID NO: 286909 - protein, 331 aa, unidentified
MAKLGKFIGTDISKSSFSVAYRKGESVETQKWDYSQEQMEAFVETLDKGCTVVMEATGVYHTRLAYYLYDKGISVSVVNPLASKNFARTLMRRTKTDKADSKLLMEYGETMELEPWVPRETWCVEVQQIYALLVSKGKELTAARNRMEALSHSVVASGMCINMVKADIKRLEGDIAFLEKEIEHLVKANAGDDMKRIEAIPGIGRRTACVLIALTGSMKRFDNYRQVASYLGLCPRVYESGTSIRGKTKICKMGLESVRRMLYLCALSAKKYNKTCRELYERLLEKGKAKKLALVAVANKLIKQAFAILKSGMNYDENHISEKKVQKMLAY

SEQ ID NO: 286910 - protein, 323 aa, unidentified
MDGSVIDAPHVFIGIDVSQSSWDVHVLPEGRSFSIRTGDGAMERLREKLGSAERALVVLEATGGLERQLVAELIDAGWTVAVVNPRQVRDFAKALGRLAKTDRIDAETLALFAQRVQPRPTQKTPEKQQELDALVTRRRQLVHLRSMEKTRRTQAVHKTASRSIDKMLKVLDQQIAALDKAIARLIEADDDWRAKRDLIESVPGVGPTTSATLVAELPELGRLNRQEIASRAGLAPFNHDSGKFRGQRRIRGGRAAVRTSLYMAALSAMRCNQKLHAFAVRLRKAGKPFKVAITACMRKLLTILNTLVRSGKSWTPHPLVEQR

SEQ ID NO: 286911 - protein, 347 aa, unidentified
MRHSTTIAVDLAKSVFEVAVSDRPGRVVERHRLSRTAFVKFLADRRPATVLLEACGTAHHWGRVAKDLGHRPVLLPPHGVRPYILRNKTDRSDTKGLLEAHRNEDLAPVPVKSVAQQAITALHRSRSAWLGTRTARINLVRGVLREFGITVPVGARNVVPKVTSHLQDPSSIVPSVVRPILEFVCAEIRELEQRIRAVERQLNDLARDIPAVRRLMTIPGIGLLTATALVAFVGDVVRFRSGRRFASYLGLTPRERSSGFVRRLGAISKRGDAYLRMLLTHGARAVLRAAAVSAANGKRLDRLRNWAVGIQRLRGHNKATIALANKLARIAWAVWRRDETFKEAPIH

SEQ ID NO: 286912 - protein, 337 aa, unidentified
MKLYCGIDLHSNNHYLTLIDEHDRRIIEKRLPNDLSVTLKTLEPYQGKITGIAVESTFNWYWIVDGLMDAGYSLKLVNTAKARQYEGLKHSDDRYDAFWLAHQMRLGILPTGYIYPKEQRPMRDLLRVRRRLVRQRTTNLLSAQSALWRHTAIKLPSAVILGEKKAPWPHLSNATDELGVKAHRAAIEVLNTQIERIERAVLKALKPRADYQMLLTVNGIGPVIAWTILLESGDLKRFNNVGQFASYARCVDCKRTSNDKKKGEGNVKNGNPYLAWAFFEAAHFATQFLPAAKRFYAKKATQRNPILAMKALSHKLARACYYIMRDQVPFDPARLFG

SEQ ID NO: 286913 - protein, 462 aa, unidentified
MARRKRKNTSSSDALPPQLTTVNLHAAGIDVGAEEHWAAVPPCDDPQPVRRFGANTADLEALADWLWGCDVTTVALESTGVYWIPLFELLETRGFQVLLVDPSKLPRSGRPKTDVHDCQWLQRLHTYGLLSACFRPEEQVVVLRSYLRQRATLLADAARDIQHMQKALTQMNIKLQHVVSDITGVTGLAIIRAILAGERDPLQLARWRDPRCKQDEAAIAAALHGTWRVEHLFVLQQALERYEFQHRQLAACDARIAAHVETFADQSHGAPLPPKRGQRRRHRNRPAFDPREPLYRMTGVDLTRIEGIDETTALIVISEIGLDISKWPSEKHFTSWLGVSPQRRISGGKVLSSRTRPTTNRAAAALRLAAASLHHSQSALGAYFRRMKSRLGTSKAITATAHKLARLLYSMLKHGTAYVAQGLEAYEQQYRERVVKNLSRKARKLGYALVKPGEATVETSLA

SEQ ID NO: 286914 - protein, 351 aa, unidentified
MVTVGVDIAKATLEAAAWHEGQAVRLGTFPQTVAGWEALREAVGRLAAVPAGLRDGQRPRGADRERIALVLEPTGGYELAFALWARQLPGWQVHRPNPARVRAWARSQGLRAKTDRQDALLLARFGASAQPALPVWQPLASEVSELEQLLRRRDEVADWLRREQRRAEQFGVRPGASTTVRASVERLLKTLEDELADLERAIAEQVQRHATIQANQERLRSVPGVGTRVALPLLVACERYHALAGDHGTPKGVVAYVGLDPQPHESGTSVLRHARISRQGDRLLRARLYMGALGALRGDNPLHAFYQRLVDRGKPKKLALLAAARKLLVWAWAVFTSAQPFDAAKTVKPAP

SEQ ID NO: 286915 - protein, 355 aa, unidentified
MNSEKYIGLDVHQATISVAVLDSTGKLVMESILETKAATILEFFAGLRGTLSVTFEEGTWAAWLYDVLKPHVAKLVVCNPRKNALLKDGNKSDRIDAHKLAELLYLNKLSSVYHGETGVRMLRELARSYLTMVKDLTRVMCRLKAVYRSWAIPCAGRDVYYTRHRDEWLGKIKEAGVRRRAERLYQQLDMLQYLRQQARRELLAESRKHAITVKLRQIPSLGPIRSALAVALIQTPHRFRTKRQLWAYSGLALETRTSAEYCYVKGGLRRSKKQISIRGLNKDHNHDLKGLFKGAATRASVLPGPFQDFYQRSLAKGIKPTLARLTLARKIAAITLTLWKKGENFDADKLKSQAA

SEQ ID NO: 286916 - protein, 354 aa, unidentified
MQSKSINFSGMNVYVGLDVHKKSWSVSILTEDFEHKTFTQPPCPDSLHNYLKKHFPGAIYHSAYESGFSGYGNHRKLLKLGINNIVINPADVPTTGKEKAGKTDKVDSRKIAKGLRSGALDPIHVFGEDHQDLRSFARMRHIMQRDVRRSKQRIKMFLLFNTISIPSDLDNENWSNAFEKWLQTVSFPTSEGRRAFEFLLSNYQFQKQQIRQISKELRAHFRKYHKEDYYLLRTIPGIGSLSAIAIITEIGDINRFANINKLSSFVGLMPLTSNSGEVERVGGMTYRCNNYLRTILVEASWQAVRKDPAMLIYYKEHAAKGNGKRAIVKVAAKLLNRISYVLKNKESYEIGVVK

SEQ ID NO: 286917 - protein, 339 aa, unidentified
MQIHSVGIDLGKTTFHLVAFGSVGKVLVRKKFTQKQLLAFTANMQISLIGLEACSGAHFLGWALRKQGHDVRLIAAQFVKPFVKSNKNDFVDAEAIAEAVERKNMRFVPIKTDDQLDLQAIHRVRDRLISRRTAVINQLRAFLLERGMVFAQKPAKLKAAMADILENAEADLTPLMRNLIDTLWGEWKLVEQQIEELNDELERISASDAGCTRIRKIPGIGPVVATAIVAAIGNGAAFRKGREFAAWLGIVPRQYSTGGKAKLLGISKRGNVYLRKILIHGARAAVLRIKRDRAPIGAWLDALDHRAPKNVVVVAMANKLAHIAWAVLSSGNDYRPVPA

SEQ ID NO: 286918 - protein, 375 aa, unidentified
MNKICYIGLDVHKKNIVMGESTEAGKGNITGEFFNTDSGVNKLLKKLKQVSGEFDVKICYEAGPCGFTLKRVLEKHGFICDIAAPSLIPQKAGDKIKTDKRDAIKLARLYRAGELTFISVPDEAKEAVRDLVRCRDDIMTDLKRVKQRLNHFFLRHGYSYPGTNWTQGHYKWISQIDIKNSILNSTLAHYFNEIEFLNMQLEDIDKEIATIAATEPYREKVKALCAFRGIATLTAMIIISEIVDFSRFSNPKELMAYLGIVPSEYSSGGSVKKGSITKCGNKRVRRALVEAAHHYRHQPKITAKMKKDVENTKEELRIAPVKALHRLHKKYYHLIFKGKPAQVAVTAVARELSGFIWYNMVLIEKGSVKFNVVNN

SEQ ID NO: 286919 - protein, 356 aa, unidentified
MTISTKYIGLDVHKESISIAVRNAAGKIVMESLIETKASMILQFIDGLRGDLHVTFEEGTSAAWLYDLLKPHVTRVLVCDPRKNKSMREGNQSDKIDARRLAELLRLNHLTPVYHGEHGLRTLKELVRSYLTVTKDLARVMTRVKAIYRSWAIPCTGKQVYARCHRAEWLGKITEPGVHRRAEFYYQQLDALRVLRQEVRRDLLTESKKHKAWKRLCQIPAIGPIRAAVLLGILQTPHRFRTKRQLWNYGGLAIEMHSSADYRSVDGELQRSRKNVLVRGLNRNCNHDLKNLFKGAAAVASSKPGPFEKFYAALVAKGMKPEMARLTLARKIATIALIVWKKGVSFDANHLKPQTA

SEQ ID NO: 286920 - protein, 371 aa, unidentified
MQQTTYVGLDIHRKSVVTTVLDREGNLLDQATLGPSREELREYLEGLPGDDKRVAMEACAMWECYFETVETTGATATLSNPLKTRLIAEATIKTDRVDSEALATLLRLNALPTVYAPPPEIRQVRHLVRDRLFYRRKVGALMNHCYGQLIYRGIPYRENCLQTIRGRKEIRGLEIPGVTRALESIDFLLARSKELDAEIHAFFETSETAQLLATIPGIGELGAVTLTAFLCPIERFPTVDRLCSYAGLAASTHQSGETCYQGKLKRDANHLVQSLLIELSWTHRRCEKRGDVARVAKRVTRRRGKGKGSVAGAHKLLKVIFGVLKRGTPYSLHAPERPAAVRAVRDLRVAASQCVRRIALEPPAANSLPAQ

SEQ ID NO: 286921 - protein, 392 aa, unidentified
MRISVGIDIAKEIHWVTAIDAGGVVQVDRKLLNTPAGIATLVDELTALRGTVRIGLDVIGGIAGLAEAMLANAGFALVHVPGIAVNRARQGTVGGENKSDPRDARTIAEQVRTRSDLRPIEPATELDLEIRLLVGRRSDIVQAQTQRLSRMRDLLVGIFPGLEACLDLKTKGPLHLLTKFVTPAELRDAGKKRLVRHLQAAGGVPKVEDLADRVLTVATEQRIAVPAERTTARLIRELAVEALASRTRLIELDRELEALLARHPDAALIRSLPGMGAVLTAELIAEAGNLARFRSADALASAAGMAPVLRQSGRSRFLRRPSGGNKALKRVFYQSAFCSLAHDDSRAFYERKRREGKRHHQAVIALARRRVNVLWAVVHSRTPFQTAFKTAA

SEQ ID NO: 286922 - protein, 319 aa, unidentified
MTKIVLGIDVSKKTLDAALIFNNRTLSKQFKNSLDDFHQLAAWLKSLQITRVHACLEATGTYSEAVALFLHDAGHRVSVVNPLRIKGYAQSNMQRNKTDRLDAKLIASFCLTQEPDEWQPPSAEVKHLQALIRRIEVLEEMRQAEENRLVNIAAEIKPSIARMIHLLSEEILQFERQIKEHINRHPCLKQQSLLLQTIPGIGERTANLLLSEIEFDRYDSARAIAAQAGVTPRKKQSGTSLKQTGLSKLGNARIRRALYFPAIVARQHNEIVKEFAKRLKKNGKTPMQIVCAAMRKLLHIAFGVLKHKRPFDASLAFSA

SEQ ID NO: 286923 - protein, 344 aa, unidentified
MLYVGLDLSRKRLDWQALDPEGAVAAVGAVPPDRDGLVRLADRLDERPVLAVIESMTGARFVHDQLEFAGWDVRIADAVKARGIAPLACKTDRIDCWVLAELARRELVPEVWLPDPAVRAERERARFRLHLVKHRSSLKNRVHAILFQHGVPNGHSDLFGVGGRRLLERLALPEPWASTVQASLALIDTLDEQISGCERELRALGADHPYIPLLITCPGIGWVLAYTIASEIGEITRFATPRKLVGYTGLCPRVDQSGERDRRGPLRKNGPSYLRWALVEAAHTACRHPAYAPVRERMRERHGQKRGSKIAAIEIGRRLSEAIWHMLTNSQPFAPAGAAASLAT

SEQ ID NO: 286924 - protein, 398 aa, unidentified
MNEPTHNKHTMKKSLLFVGLDVHAQNITIGLAPGDGSAARLYGSIPNDLHALEKVFAKLKKAHPGVELRVCYEAGPTGFVLTRRLSQLKISCSVVAPSLIPKKPGERIKTDRRDALKLARLHRAGELTAVHVPEASDEAMRDLCRARTDAVQDLRRGRAQLKAFLLRNGYRYTGKSAWTEAHQRYLRELVLPHPAQRVVLEDALTAIGTAGERITRLEEQMAALLPSWPMQPVVAALMGMRGFAQVGAMVLTSELGGAWRFAHPRQLMAYLGLVPTENTSDDKRRQGGITKTGNSHARWLLIEAAHHYRLSPKVSKELSVRQQGLSQDIKACAWKAQTRLHKRMMALQARGKQRNKVTVAVARELTGFVWQIFQLMAPRMAQKQGATVPALGSRFGGN

SEQ ID NO: 286925 - protein, 382 aa, unidentified
MAHNSKSDFSGNRSDGMDSPSHTASRCARLEVRSTNHRKEESGMKVTHIGLDIAKNVFEVHGIDQRGRVSVQRRLRRAELLRFFERLEPCTVGIEACGSAHYWARELAGIGHEVRLMAPRFVKAYRKSDKNDRNDAEAICEALTRPNMRFVAIKTPDQQAVLTLHRARELLSTQRKALINQIRGLLGEYGIVLAQGGTVVRRRLPAILEDADKALPALAGEVFAELYERLVDIDARLVHYDRRIARLSREMSGARTVMDVVGVGPQTATAVLATVGDVRQFANGRQFSAWLGLVPRQYSSGNQTRYGRITKRGDAYLRTLLVQGALAALRTAHRRDDRLSRWACAVRERRGHNKAAVALAAKHARIIWVLLAHDDTYQPQAA

SEQ ID NO: 286926 - protein, 419 aa, unidentified
MARLKIVYPICCGMDVHRDFVIACIASTNSKGVTDYKSKRFSTYSGGLRDLRDWLLTNDCRDVCMESTGKYWFPVHNILEATCNVVVSHPKFVKAIKGKKTDKKDAQWIADLFKHDLVRGSFIPPQDIRQLRDLCRYWVKLTSYMTGEKNRAQNCLTVSNFKLDSVFSNVFGKSASAIIEHMLAHPGESFDVAPFVHWRCKTPIDVIQEAVDGSFNPFQAEKLKIIREHMNDIDKLKDMLQKQIFKLAEPYQVQINLLLTVPGIADPMTAIRIIAEIGVDMTVFESSKHCCSWAGLTPQNNESAGKKKTTRIGKAGQYIKPLLVQCALASSRSDKYPEIKGKYQQLKKRRGSKKARVAIARRLLTAMFQMLLKNEVYTPYVAPANESVPTERVLTPEQALAMLRRNGYIIVDKDSTDVA

SEQ ID NO: 286927 - protein, 348 aa, unidentified
MQQYVGLDVSLEETSICVMDRDGRILQRGVTASEPELIAAYVRRHAPEVTRIVLETGQLSIWLTRALVAQGLPAVCIDARLAHKALSGRRNKSDRHDAEGLAHLARTGWFTKVEIKSKDSDERRTLLGARDRMIRIRKDLEGQIRGVLKIFGIKLGKITPGKDRGGFRRRVQEVIVDEPAIQPALKALLAVHVTTCKEESRLDALVRRKAKNDKVVRLLTTAPGVGAIVASAFVAIIDDPSRFRRSRQAGVYVGLTPRSFQSGEVSYSGKISKWGDAMLRAYLYEAAVTILTRTKSFSPLKSWGLRLAQQKGFTKAAVAVARKLATILLAMWRDNTKFQWTKEASMAV

SEQ ID NO: 286928 - protein, 317 aa, unidentified
MTFAGIYVSKTHLDLALVSNSPKPTRLRFPNSPEGRQALLAALAHHNPAWVALEPTGAYHLPLLKLLAENRLQVALVNPYHLAAFRKAKGERQKTDRQDALLLARYAQVYHEDLRAYTLPPETLRELKALVGYREDLAGRERTILNQMEAAEWAGSKEVLALLQKELACVKGLLGEVEARIQALLATLPEAEVLMALPGVGPQVAAAVLALLPPELWGRAKRAASYAGLIPEREESGKSVERSRLSKKGPPLLRRKLYMGALVAVRHDPEMRAFYHRLLSRGKRKKQALVAVAHKLLRRMMGRLREYYATQLDQGVA

SEQ ID NO: 286929 - protein, 407 aa, unidentified
MKTYILRELKAVQPQTSARASGSQPTGRPATMANSKPALFIGLDVHNDSIAVSLAASGSTEVRRYGVIGGQHDDVLRLLKKLSAAHPEAELRCCYEAGPRGYPLCRFIRSQGAHCSIVAPSKVPRQPGDRVKTDRRDADQLARLLRAGELTGIYVPDPQDEAVRDLIRARYQVKKQQHRARQQLKMFLLRHNIRYAGTKAWTAQHLRFLATVKLPFGEQQFVFQEMVNVISEAGQRLERYEKQIVSVVESWRWEPVVRALMSLRGVALLSAATLAAELGDLERFATAPQLMSYLGLCPSEHTTGKDRQQGGITKLGNSIARKATIEAAWNNRSPVRISRTVLERRQGLPKAVTQAAWNAQIRLHQRYKHLTAVGRKKSQVAAAALGRELAGFMWAIGRMVKPRPVKN

SEQ ID NO: 286930 - protein, 410 aa, unidentified
MTKIIVAQDAPVLVAIDIAKARHEVLIAIPDKKRRRRLTVLNELADFNRLATALKEYGRPVRVAFEATGNYHRALAYHLATSGFEVKLVSSVALARTREALNNSWDKNDPKDAQVILHMMEIGNEQYYHDPLVCGTNDIQELSKTHDIVSKSKTELWHRVLTHYLPLYFPEADRFYRSSRSDWFFAFLERYPSPHLITAMGKAAFTADAWDVIGRKVAKERLLADIYETAKSSVGLPVAPDSDAIRMFRLVLGEGRSLIAQRNQIEDRAVALLKDLPDYQLLTSIPGIGPINALTILAEAGDLRRFGHHRQFLKFCGMDLATIQSGTFRGQTKLSKYGNARLRRTLWMAGQVAILQRTNSFRDKFERYIAKDRQNTHLRRKAYSAIAAKMARTVHGIIKHGEPYRPFFEG

SEQ ID NO: 286931 - protein, 360 aa, unidentified
MNATTVAVDLAKSVFQLAVADEHWKIIETQRLTRTQFERWFLNREVNLVIMEGCGSAHHWARWLNGLGIEVRLLPAQYIRAYVKRNKTDAVDAAALLEAARASDMRPVRVKSVEQQALQGMHRIRSLWMGTRTSRINALRSFCREFGIAIPVGARTGVEAISRVLADPNTAVPDLIRGTAKLLIEEIRLLEARIAQLERELAAIAKLSPACTTLLSIPGIGLLTATALVAATSGDVSHFKDARHFSSWFGLTPKEYSSGSSRHLGRISKKGDRYLRMLLTHGARSVLRASKVAQDAGREVCGVRRWALDVQSRSNHNKAACALANKLARICYATLRDKEPFGESARLNKKINRESFVMPA

SEQ ID NO: 286932 - protein, 430 aa, unidentified
MKSNTQNAKIEAITEKTLVLGIDVGSETHYARAFDYRGIEYSKKPFKFSNTEAGFVTFKEWILDLKERHEKDKVVPGMEPTGHYWFNLGKFLHDNEMKPVLVNPHHVKKSKELDDNNPTKNDRKDPKVIAGLVREGRYMIPYLPDGVYADLRTASNIRFQLQAELTRIQNRISRWFNIYFPEYKTVYGKPDAKSGMLILKAAPLPEDILTLGIDGVNQIWRDAKLRAVGKARAKTLIEAAEHSVGSKEGAVSARMEIRMLLEDYESRNTRLQEVMVLIEELVRKIPMAEKLLEIKGVGIRTVSGFLAEVGDISRFNNPKELQKLAGLALVENSSGKHKGETTISRRGRKRLRYLLFEVAMSLVAKNPEFRELHNYYTTRRLNPLKKMQSLMAIAAKLIRVFYAMLTKGVDYDPKKMVSDIKRPAVYLQAA

SEQ ID NO: 286933 - protein, 403 aa, unidentified
MSNYFAGLDWASKTHALCVIDERGGVVERFDIDHDAGGLTELRRRLRRFGSPPVAIERPSGLLVDTLVDADFTVVPIHPNAVKASRPRYRSHGGKSDASDAYVLADLLRTDGHRFKALTPQSDEIRALRALVRGRDDLVATRVHLANQLRTLLESFWPGAAAVFADIDSPIALAFIERYPTPESASRLGPKRMAAFCAHHASCGRRSPDDLLARLQEAPSAVSAETEMEAKGELARCVARTLTRLVEQLRLLSSRIEHLVASLDDGRILMSFPRAGRICAAQILAELGSVRERFATDAQLAAEAGVAPVTYESGKSKAVTFRWACNHRLRAAITCLADNSRHVNAWAAHVYANARARGCDHPHAIRILARAWLRVIWRAWTDRKTYDPMQHRAAQLLLKAAGG

SEQ ID NO: 286934 - protein, 266 aa, unidentified
MEKKWFIGIDISKKTLDVVIYVPTKKHADETNYERFLNKEEGYKSLLCWLKKKNMAKKRLVISMENTGIYSFDLCLFLEAASIDYCSFNPLHLKRSLGLVRGKNDRVDAERIAYFAYLHRDELSYSKLSGSSIIRLRDFAAERKRFVKQQAEYKGFLTDRKDCEMTSTIERAAHMVKILDEEIASVEEEMLQIINSDPSILRNYELLNSIKGIGTINAMNTIIHTNNFQAFETARQYACYLGIAPFEHSSGTVSYTHLTLPTKLEV

SEQ ID NO: 286935 - protein, 357 aa, unidentified
MRFYSGKHRYYCGIDLHTKTMYICIIDEDGKILFHKNAPVNAEILQQIIKAFLPDIAICVECIFTWYWISDFCEERDIPFVLGHALYMKAIHGSKTKNDKIDSHKIALLLRGGILPMAYVYPAGLRSTRDLLRRRMHFKNKRSELLAHIQNTKSQYNMPDFEKSIKYKSNRLHIASQFIDESVQQSIKFDLALIDHYDELLRRVELYILQHAKAHRPQDLFLLQTINGVGKILALVMLYEIHDIHRFERVHHFSSYSRLVKPTKESAGKIKSGGGKKMGNVYLKWAFSEAVLLLIRESDDVKELHNKLKNRYGKARALAILSHKLGRAVYYMLKNKKAFNVKQFVNDKKAVPAELNV

SEQ ID NO: 286936 - protein, 323 aa, unidentified
MNKYNEIFGVDISKDVFDVYGSKSGHNQFKNAASGFMFFLKNLPKKSLVVMEATGYYHYSLAQFLFKQGVLVSVVNPLSVKRFIQMKLAKVKTDKSDAKAICEYGQINQVPLYNALSDVQSECLQLFRLLDSYLKKRTMTKNKLHGEDVLGIPSKHVYRSLKRNRKHLDTEIESIETKLLSLVKQDQQAQLTLLKSIPGLGVKTALFLIVITDGFTKFETAAQLCSYVGITPTIRQSGSSVRGRSRISKVGNKKLRNLLFLCSFSACKHNKSCREIYERIVNKGKSKKLALIAVANKLLKQAFAIAKSGNPYDETFVSVLMAK

SEQ ID NO: 286937 - protein, 309 aa, unidentified
MATGFYGTDVSKDTLDVGYGGKLVTIDNNVKAIRLFVKTMPAGSFVAMESTNTYHLLMANMCYAAGMVVYVINPRITRHYREALNLRGHTDRLDARTLSSFVEHHHRDLRRYVPKSADQRMLQSLIRRRAKLVGVRVQVSASLREVRELRSGMQTLIRRIDRVIAQIEALIDKQLEGNEDRKRLAGIKGVGPVVSAALVADLSAGQFASADAFVAFYGLDPMPNDSGKSKGRRRISKKGHKLGRTLLYNAAMSAASSKAWKPVYEKILAKGLTKVQALVCLARKIARTAWSIYTHQTEFQPQRLTARLT

SEQ ID NO: 286938 - protein, 338 aa, unidentified
MDKIMTIGLDLAKNVFHVVCCNVHGKIVRKRMLKRSQVKEFFTTIETCLIGMEACASAHYWARQLEAMGHQVKMIPPQYVKPFVRGNKNDYNDALGIAEAVRQPEMRFVSVKTIAQQNVQALHRLRERRLQERTALCNQARGLLGEYGIALPLGIIALRHRLPELLEDAENDLSNFFRRLLARVYQQLQELDAHIDFFTKELHAQCQQSEACKRLQTVPGYGPIVASVFHSVVNNGETYSRGRDVSASLGLVPRQHSTGGKNNLLGISKRGDRYLRSLLIHGARSVVIQATKKDDRLSRWINKIKSTRGFNKAVVALANKMARVGWVILHNKTTYQAA

SEQ ID NO: 286939 - protein, 315 aa, unidentified
MSDVPCLVGIDVATAQLDIALRPSGERWAVPNEASGVMTLVDRVQARHPTLMVLEATGGLERAVTSALATAGRPVVVVHPRQVRDVARATGQLATTDALDARALAHVADVSRPPPRPRPDAQTQELRALLGRRQPLIGMRTAAQNRLAGTNARLTKDIAAHMTWLNAAIATLDDDLETILRASPLWRENDDLLQSAKGIGPVCARTLLLELPALGTLTRQQIAALVGVAPLHCDSGTLRGRRMIWGGRAHVRTVLYMGTLVATRFNPQIKVFYERLLAAGKVKKVALTACMHKLLTILNAMLKHRTPWQPQEVQS

SEQ ID NO: 286940 - protein, 322 aa, unidentified
MSGSILGVDIAKKKFDVALLINGKPKHKVFPNNEEGFELLMAWLQKQNVDHVHVCLEASSTYGDELATSMHDAGHTVSIVNPARIKGFARSELLRTKNDKVDASLIARFCLAMHPEPWIPPPLVIRNLQALVRRVDALITMRTQEFHRLGTAQDTIEHSIREHVVYLDRQIEAIKQQIVDLIKNDPDLKAKRDLLKSIPGIGEATIAAILGELHMFERCDHVQKVVAFIGLAPRQFISGTSIKGKPRLSKIGHARLRKALYMPALVSIQCNPIIQTFYHRLKENGKNGKVIVCAIMRKLVHLIFGILKSGRPFDPNFKPNCA

SEQ ID NO: 286941 - protein, 340 aa, unidentified
MNNLTTIGIDLAKTNFSLVGMDKHGNILFRKQLTRNKLLAFIAQCPPCLIGMEACSGAHYWGREFKKYGHKIGILAAKFVEPFRKGGKNDNNDAEAICEAVRRPNIWFVPVKTADQQAVLCIHRARQGLIKERTASINQLRGLLSEFGIVIAKGRHPAQLAIPGILEDAENGLPLMARQIIRDIWLRIKQVNDSIHAYDKELANLVKHNPIAKRLMTIPGVGEQVATGIVASVPDPRLFKNSRNFAAWLGLVPRQYTTGGNIRLGRITKRGDKYLRMCLVHGARAVVAKLRDKTDKVSCWVRDLIERRGYLRAVVALAARNARLIWTLMIKQEDYKKMPV

SEQ ID NO: 286942 - protein, 346 aa, unidentified
MTIVEDTRAITGGVDTHADTHVAAALDPLGGLPGVREFPASAAGYADLLDWLDGFGTVALAGVEGTGSYGAGLARHLAAAGIKVVEVDRADRQDRHRPGKSDPLDAVSAARAAQSGRAAGAPKGRDGVVEAIRALMVARRSARAERTQAINQARSLILTGPDELRARFARHTPARLVAGLAAMRPRPGDAPGYATRVALRELGRRARFLDAQIKHLDELISPLVTARAPGLLGLHGVGADTAALLLIAAGDHPGRLRSEAARAHLCGAAPIPASSGKVTRWRLNRGGNREANHALWRIVICRMSSHPATRAYVARRSKQGLSKKEIIRCLKRYVAREVYPYLRPAR

SEQ ID NO: 286943 - protein, 328 aa, unidentified
MKAFIGIDVGKEKLDISWLRDVVKSKKKTKIFKNNPQGYQELVAWLIKNTNLKAQDIVITTEPTGVYSEPLMYFLYEQGFILLHVNPGKAKQYASSLGLVHKTDKSDATMLARYGHDQQHSLLSWQPEPVEARELKVMTRRLEALEQDLRREENRYEAVGFSGASTRVTQSIEDMIAVLKTEIGKLKNDIDEHIDRHPQLKKNRQLLQSIKGVGEVISRMMVSLMACKQFKNAKQLACYLGLIPKLNESGKRAGKTTLSKEGPGYIRAKLYMAAVVAVQHNPDIKAQNKRLVGQGKTKMQAIGAAMRKLTHICFGVVKNQTEYQPQAI

SEQ ID NO: 286944 - protein, 341 aa, unidentified
MRKTLFCGVDLHCNNAMYVITDQQDKQVFKKRLPNRLPVVLESLEPFRQQLKVVAVESTYNWYWLVDGLLDHAYPVVLANPSAIDQYDGIKEADDLTDAAFLARLARLDILPTGYIYPRQDRPVRDLLRRRTLLVRQRTALILSLQNMAMRQTGQSLGWRAVRNLNDQQRSELLGDHDCLAFVTTQQVDLIELLGQKIKRFEQKVLEHARLKPAYVCLLTIPGVGVILALTIMLETGDIGRFKTVGDYTSYCRCVRATHTSNGKSKGKNNSKNGNAYLAWAFVEAVHQALRTCPQAKRFYDRKLAKRNGALATKALAAKWSKAAYYMMKRQQDFNLTRVFG

SEQ ID NO: 286945 - protein, 348 aa, unidentified
MPNYNQSHQFYAGIDLHARSMFVHILSAKGKSVFERDLPAEPDAFLDAVKPFRKNLVVGCECMFAWYWLADLCEDKRIPFVLGHALAMKHIHGGKSKSDKIDAGKLANMLRGGMFPLAYVYPRGKRQTRDLLRRRSFFVRQRAQLITHIVNTNSQFNLPPFSKKLSYAANRSAEIADRFADPSTRLMIHTDLNLIDAYDSQIAELERHLLKSAKVDDPVTFGFLRTIPGIGPILGLILLYEIDRIERFPEAGNFLSYSRLVRCAHASAGKVKGFGGKKIGNAHLKWAFSEAACLMLRTCIPVKAWMQRQESKRGKRKALSVLEAKIGRTVFHLWRKQQAFDVKKFLHV

SEQ ID NO: 286946 - protein, 344 aa, unidentified
MLYVGLDLSRKRLDWQALDPEGAVAAVGAVPPDRDGLVRLADRLDERPVLAVIESMTGARFVHDQLELAGWDVRIADAVKARGIAPLACKTDRIDCWVLAELARRELVPEVWLPDPAVRAERERARFRLHLVKHRSSLKNRVHAILFQHGVPNGHSDLFGVSGRRLLERLALPEPWASTVQASLALIDTLDEQISGCERELRALGADHPYIPLLMTCPGIGWVLAYTIASEIGEITRFATPRKLVGYTGLCPRVDQSGERDQRGPLRKNGPNYLRWALVEAAHTACRHPAYAPVRERMRERHGQKRGSKIAAIEIGRRLSEAIWHMLTNSQPFAPAGAAASLAT

SEQ ID NO: 286947 - protein, 413 aa, unidentified
MADETIHWFAGVDWGSAKHQVCLLDGTGNVVGEREFAHGGAGLTALCEWVVSMAGDPGTVAVAIEVPHGPVVDAVLDRGFAVYAINPKQLDRLRDRISVAGAKDDRRDARVAAAGLRTDRPLFRRVLAGDPSVVELREWSRLAEELQQERVRLGHRVRQQLWRYYPQLLALSDDVTAEWVLALWTLAPIPAQAARLREATLARLLQQHRIRKLDAPAVRGILRQPAITVAPGVTEAAVLHLRSLVARLRLANQEFHQAARKLEALCTALSQTQPGAQDSGPRDAAILSSLPGVGPVTLAALLTEAAGPISRRDYTALRTLSGVAPVTKRSGKSCIVIMRYAAQLRLRNAVFHWARVAVLNDPKCRSRYAALRARGHSYGRALRSVADRLLGVACVLLQRQVLFDPNHGAPAQP

SEQ ID NO: 286948 - protein, 483 aa, unidentified
MNWTRLSNLAVVLGSANEYSDKDESVSGDRLRLAIRNSHPTRAARTIITPFSNMNESVSEQPVNPKVAAFVGIDWADLKHDVVLRSVGDPTKSEHQIIKSEINALADWIAQMYERFEAKGKVLVCLEQSRGALIYQLMAYELFELYPINPSQLANYRRTFFSSGAKDDRPDADLLSELVMCHRDRLKAWKPDDQLTRELASLNEGRRNAVDRRTDLANEIKNQLKLYFPVALQLLDNDLTTALAADLLVQWPTLAELQKVSPAKLRKFFYGHHSRQEKKILERLALIKEAKPLTTDLAILRPNALRVKLLAQQLKSLLPFIAEYERRIAEIFGSHPDRFLFDNLPGAGPALAPRLLTAFGTDRDRFEVAGDLLSLSGIGPVRIASGKKTGKHASVHCRRACPKFLRQSFHEFGECSIRYSPWAQACYQAQRGRGKGHHAAVRAVTFKWIRILFACWKQRTPYDPQRYFQALQTRGSDYAQTTA

SEQ ID NO: 286949 - protein, 433 aa, unidentified
MAVERVEPQSTWLEKSGVFAVQFPRAAREGRAARTAPYVRGSVLIHQVNCRTRKHTMKNELYLGLDVHKDSIVAAAAEGGRQGEVRELGAISNDLHALEKLIARLRKAHGPDVIIRVCYEAGPCGFGIARRLKQLGIEGSVVAPSMTPTRPGDRVKTDRRDARKLARLLRAGELTAIYIPEPTDEAIRDLCRARTDAVDDRRRSRHRLKAFLLRHDYRYQGKSAWTAAHQRYLRELVLPHPAMKVILEDYLVAIEAAHERIARCEQAMHDLLPAWRLQPAVSALMACKGFQIVAAMILVSELGEIKRFAHPRQVMAYLGLVPTENTSSDKRRQGGITKCGNPHARWLIIECAQHYLTPPKVSKELAKRQEGQSAEVRAISWRAQNRLHRRFTRLAARRLQRNKALVAIARELCGFVWELLRTQPCYQAPQSAA

SEQ ID NO: 286950 - protein, 417 aa, unidentified
MEIIHKRCAGLDVHKETVVGCVRVRERGDVRHEVRHFVTTTAGLLELGEWLRAAGCTHVAMEATGVYWKPVWHILEGEFELILANPLHIRTVPGRKTDVNDATWIADLLAHGLIRSSMVPPGPIQELRDLTRTRRQLIREVVQHKQRIQKVLEDANVKLASVVSDMFGQSGRQMLKALIAGQTDAQKLAALGSERLSASRATLAGALHGKVTAHHRFLLKQHLQMIEQLEQPVSEFAAQIEAALQPFRAAVERLITIPGVSATAASVIIAEIGVDMSRFATVAHLRSWAGLCPQLKESAGKVMSRRLRYGAPWLKTVLVQCAWAAIRNKSNYLHAQFLRLRARRGPKKAILAVAASILTAAYYVLRCQVPYRDLGALYSPASTKIAPLNVWHAQSKSSAMKSRFEKPPSQMQFLVDS

SEQ ID NO: 286951 - protein, 385 aa, unidentified
MANQNDLSRSLVALEQNNTIIAVIEMSLNYWLIAGIVPGVDRHPLKKLNVDEKALLQLLRQWRDEAAKAGHVITRMAVAFEAGRDGFWLARWLRARGVDAHVIHPTSVAVPREHRRAKTDRLDTELLKRAFLGWLRGEPEHCRMAAIPSLQEEDAKRPTRERENLVGERTRIINRTKACLVRFGIRNFKPTLRKAPERLNQLCTPEGDPLPPNTLAELRRDMARLRFIIGQINEIEAARLQRLEQARVEGPTAMVRLVARVIGVGIETADMLVHEILSRDLRDRRAVARYAGLTGAPDESGSKRREKGLAKAGNARVRRGMIQLAWRFLLHQKDSALTQWYRARTASAGRKRKTMIVALARKLLIALWRLATTGEVPTRVVLRAA

SEQ ID NO: 286952 - protein, 438 aa, unidentified
MSNKVIFNLDELFISVGIDVGADFSWMSIALPNQQFVGKPYKILHNSIDSLTTAVSKIKEAEELYSLESRIFLESTGIYHYPLFCYLRDKGFNCSVINPIITKNSTNINIRKVHNDRFDSKKAALVGLKPDLKVSLMPSDLALNCRNLCREYYDLMDNRSAYVNKLQGELRMAFPQYLGIFSKVTINTSLTLLETYTSPSAFLKADKQEIIDIIKSTARFGLTYAQNKYNAIIQAATDANQFGYIIDSNIKRIRLYISFIRKYDEEINSILESLHELVDANEDSDFVKQIHLIETFKGAGFLSAVSIMGEIGDFSAFSKPKQLFAYFGLDPAVKQSGKFEGTKVQMSKRGSAIARRVIHTLTLQSISISRNREAKNPVLREYYLQKCDSKPKLVAMGAVSHKVCNMIFAILRDNKPFEIITPQEHIKQYNAAKCDIAA

SEQ ID NO: 286953 - protein, 418 aa, unidentified
MNEELIARLSRRYQALDIHKHYSVVAGVNFEGQVVVEPVRIEHADLEGWLKKHIQPTDYVVIESTTNAWHIYDLLVPLAEKVLVANPIKVKQIAQARVKTDIRDTLILARLLAANMVPVIWVPPAYVRNLRYLLSQRRHLVGMHTATVNRMHSVAHRHHLSHPRGKRFNEQNTKWQKDNVLSESEQFQLELDMNTKKHLAEQREKITEKLRRMSHQKPWAESMMYLMQLPGFGVITGMTVLAAIGEITRFETPGHLASYSGLTPGLDQSGVKLRGKKITKEGRKDLRWAMVEVAQRAVKSDPLWKQRFNELQRRMHRNQAIVAIAHRLLELVWYVLSRKQPYRNFSHERIAYKYLTWSWQLSNKDRDGLTRQQFTRYYLMRLGIGHDLERIALNPRYPRRLASEAEVLALRPELARTE

SEQ ID NO: 286954 - protein, 521 aa, unidentified
MTDSTVSIIGVGIDTARYGHHVSFLDQDKRSATKPFHFTENADGYRRLKNAFLKLQSKHPGLQLHIRIDAAGQYAENLIQWLHLLRMPTVISVGQPAMNKAYRNAHFNKRKADPVESLACARFAVVERPAATLHNPPEFSQLRDVVALMESSSKQRTRLVNQLHGLLARAFPEFATLAKDIAANWALKLLLKYPTAERIAAARLDSLLKIPHLDLDKAIRLQQAAKESTGSAAGPVVDQLIKQKVRAILDEQKEARQLEELVKTAFDALPNGPHQRLITIKGIGLQTAAALVAKIVSIERFNSASALIGYFAVFPEEVDVSGTDKNGKPKKGTEVRMCRKGNDLVRRLLYTAAQCAAKHNPAVRALFTRQIAAGKEYNVAIGHCMAKLLRQVFGIWKTNRDFDPDYETEQINDKAEADEQEPTVQEKVVGHKNRAVKPQQQVVTTTTSILPATRQPSKRRSPNRTTQSPAPAEAAIDPFSKSPRSSRDATVLPVQESDRLPAAGDKQSWPNDDPTQTPGVL

SEQ ID NO: 286955 - protein, 401 aa, unidentified
MNTTTMFYVGIDVSKDKSDICIKDVNGNDLIQRFKITNSKADLGHLYETIKRIKSKTPGKSDVVFGMEATGIYSLPLYSALKRDGYKVKLYNPIQTNGFRKINIRKTKTDPIDAAIIADMLRHSEPPQVSDIKDLNLYQLRELVRIRHRLIEKQTICKVQIVRNIDTIWPDYNSVMKRVLGKTSLAILKKYSVPSKVRAISFEQFYELIKKMSRSKISRKQAEEIYAHAGNVLTIPELDSVITFEIKTLISQLELYDEQIQSVEIRIDQMMKLIDSKIMSIPGIGDTLGPMILGEIGSVERFSNVKKLIAFAGLDPVVSQSGRFENRSGPISKRGSPLLRQALFLAANVARQNDENLKRFYDKKISEGKHHFSALNAVAAKLLRITYWVLKNNKEYQTQLN

SEQ ID NO: 286956 - protein, 376 aa, unidentified
MPETQDICCVALELSQSKWLCSFAPPEGGKATLHTINAGDHSRLVEWLDRQRARAELALGRPLQLAVCYEVGYDGFWLARILLKVGIRTVVFDPASFLKPRRGRWAKTDRLDAEEMTRILRSWLGGDSSVAREVRIPTVEEEDAKRLCRERKTLVNDRTRLVGRIKGLCALHGIVVPGKRISRRWATHLDDHRTGDGRPMPPYLRREIGRLLRRYEIVEELIAEVELDCQMAIAEPASPFPEKEKVQRLATLGGVGHTSALLLVAEVYHRGFEDRRHLASFIGLAPTPYASGDVSRDRGISKAGTKLARQTLVELAWSWLRYQPGSALSTWWRERFAGAGMRGRKVGIVALARRLAIAFWRFLEDGLVPDGATIKG

SEQ ID NO: 286957 - protein, 373 aa, unidentified
MYYVGIDIAKYKHDCFIFTSEGETVLESFTFENTREEFNKLKLVLDALNYSQKIKIGLEATGIYRKNLKLFLSSIEYDFDELNPLQVKRFTNAMSNRKNKTDKIDASQIARFVSTGASRTYVYSSYYTEALKQLTRARNSLIDERSKHQIVLTDILDVEFPEFKGFFNNKFIDTALYLLNKYQTVKRISKLSYNDCVLLHNKSRNTCGHHFDYNDSLISANLQIIKCLNNEIDKIEKEINSIMSTINSPIVSITGISAISAASIIGEFGDFSRFNNTKQLCAFCGVEPSIYQSGTSYHEGKMVKHDSSNLRRTLFNVVPYIIMHNETFKTFYNKKRSEGKAYRVAQSHVVKKLLRVIFILEMTGNTFDPSKLY

SEQ ID NO: 286958 - protein, 371 aa, unidentified
MKEFSKYVGLDVHKETIAVSVAEANGGELRYLGEIANTPEALDKQVKQLRKGGADLSFCYEAGPCGYGIHRQLTDLGWDCQVVAPSLIPKKAGDRVKTDRRDSLMLARLHRAGELTAVWVPDGAQEALRDLTRAREDMKHLQRQAKQRLLAFLLRHGKRYGGKSNWTQAHYRWMEEVKFEHPVQQIVFHEYVDTVKAMTKRVAALDKQIERAAAESVFWPVVEGLMALRGVNLLTATTIVAEIGDLRRFASAPQLMAYLGVVPSEHSSGGTKSRGGITKTGNGHVRRVLVEAAWTYRHPARKTAVLQRRAEQTSEAVQEIAWKAQTRLCGRYRLFEARGKLKVQACTAIARELAGFIWAIGQVLPQPAASA

SEQ ID NO: 286959 - protein, 423 aa, unidentified
MISAVLERCAGIDVGKKWIAVCVLMGPANGDAQAENRKFETTNQCLERLSEWLVECGCTHVVMESTGEYWRPIYNVLEEATDLEIILANSQQVKGLRGHKTDPQDAHWLAHLLRHGMIRPSYIPPLPIRQLRDLTRRRKQLVRSGAQERNRIQKILEGANIKLGNVLTDVFGLSGQLMIDKLLEGNATVEEIADLAQKSARKKIPQIRAALEGHRMNTVHRRLINLSLDHMAFLEEQVATLMEEIIRHIKANGLETPYQQLQTIPGVKEEAAASLLAEFGPDMKVFGSAKKLSSWAGVAPGNNESAGKKKRAPAMRGNPWARSTLTESAWSASRKKDSEFKSDYERWKPRLGHKRAIVAVAHSLAETVFEVLSTGQPYTKPGANPMPDTKAASLIRHHTRRIKNLRKRLKPKPERPPVELTAR

SEQ ID NO: 286960 - protein, 310 aa, unidentified
MDSITVGIDVSKDHLDIAVRPGGETFVVERNAAGLERLAARLTALSPYIVALEASGGFEVIAAAALTAAGLPVAVVNPAQIRAFAKALGQRAKTDPIDAAVIAHFAEAIKLEPRPLPDEATRLLADLVARRRQIIEMIGAERQREKRVTIPRLRKSIARLIKTLEKELSGLDADIDDAVRGSPAWREKEDLLSTVPGIGPTIARTLIAELPELGQLTRRQVAALAGLAPFTRQSGQWRGRSFIGGGRTAVRSALFMGAMVGKKHNPVLKAFFDRLVAAGKPKMVALIAVARKLLTILNAMLRDNLPWKHA

SEQ ID NO: 286961 - protein, 408 aa, unidentified
MKRYYIGVDWGDRLHQVYVGDQDGKKVREVKVQESPEGLAEIGRWLDENRAEGIELWAAIEKPVGRIVDFLLDHGVEVYPVNPKAVDRVRDRYRMSGSKSDAFDAYVLAEFLRTDQAHLRVLRPNSEKAQELKMLSRDQRRVVRHKTRLLNQLTTTLKEYYARPLEAFENLETEIALDFLKQYPTPAHLSALKRKEFNRFATQQHHLSKQRCEQLWEKLNQPQLAVPEHVVRAKAQWVEVLIEQLRASIKAVKIYNHKVESFFASSPAAQFAKTLPGGKSGTLVAAIWAELGDAPGRWQSSRHLQAEAGAVPVTKASGKSRVVHFRFACNKHLRHTMYWFSFVSVNHCEWAKLYYRGQRDKGHSHHQALRALGAKWLKIIFVMWRDHKPYDENYHLANIARQKMRQAA

SEQ ID NO: 286962 - protein, 340 aa, unidentified
MRLLGCDLHASQQSIAMLDRDTGAVIEKTLKHEGEAVREFYASIPPPVLVGIEATGSMGWFLRLMEELAIECRVGHPVAIRKAEARRQKHDRRDAALLLRLLAEDRFPTIWMPSTELRDLRALLLHRHQWVRMRTRVQNALHAIAMAHGVRRGHTLWNREGQALLASLPLAPHTAHRRSELQALYQHLDAHVDRLGERVKKVAEERPRATLLMTHPGVGSVTALATEVFVGDPARFLDGKALASYVGMIPSEYSSGKRQRLGALTKQGNPFLRFLWCEAAAHAVRRDPDLQRFYRRKVAQKGFAKANVAAARKLGIRLWIMLRDQIDYAEFCRRGLARQS

SEQ ID NO: 286963 - protein, 370 aa, unidentified
MSQSRTLCIGMDVHKDAIAVAYVAQEHGAEVASLGTIGTRQCDIDQLIRKMQSKAQHLIFVYEAGPCGYWLYRYLQKKDYDCWVVAPSLIPKKAGDRVKTDHRDAVQLARLARSGDLTPVYVPKVDDEAIRDLTRAREDTISDLKDAQFRLKAFLLRQDIRYAGRANWGPAHLRWLAEVVCPTPAQQIVFQAYVQTVTEHTERLGRLDQELREQVTTWRLHPVVDALQALRGVQFTVAVTMVAEIGDLTRFEHPSERMKFLGLVPSEYSSGQRRQQGGITKTGNTHARRVLVEGAWAYRYPAKVSRQLQLRLEHQPKSIQDISWKAQVRLCKRYRRLVAKGKHANVVTVAIARELVGFVWAIAQEVPITL

SEQ ID NO: 286964 - protein, 428 aa, unidentified
MADVANATPTYNLVAIDIARYWNAVLIETPAGRQHRFRMANTAADIDRLLKFLHGLQGACRVALEPTGDYHRSIAYRLLVEGFEVVGINSVAQARYREAMFNSWDKNDPKDATVILEMLRRGAFQRYVDPMLAGSHDLQELAKTYYQVSRARTKVQHSLINHGLPLYFPEMHRYWATTRNEWFVRFLLQFPTPAHVRLLTRDQFVEAAWDVVGRKVDKRAKLEEMWEMAGVTAALPHAPDSLAVETFRVTLRRYQDLNTLRAELEGRAEQALASEPDFVHLKTLPGIGSVLAMTILAEGGNLRRFGHHRQFLKYCGFDLAKTQSGTQRGREQLSKRGNARLRLAFWLAAVAAVHMRENSFRAKYERYIRAAPDDADLRRKALTAVAAKMARVAYSMIKRNQPYRQFFEQSLPSGSIPLSVAVGALATP

SEQ ID NO: 286965 - protein, 346 aa, unidentified
MREIIRIGVDTSKHIFVLHGVDAAEQVVLRKQLGRKQMLEFFAKLPPTTVGMEACGAAHYWARELLKLGHAVKLIAPQHVKPYVKRNKNDRRDAEGLCEAMSRPTMRFVPVKTAEQQAALMLTGLREQMVARRTQLSNMIRGYAAEFGITAAKGLDKIEPLLAQITQDASVPAPARDLFALQGREYAQVQTELKALEARLRAWHRANANSQRLAGIPGIGPVGAPELVMKTPDPSAFASARHFAAWIGLTPKDHSTAGKTRLGKITRAGDERLRSVLVAGATAVIKQAMCGRGHPSPWLVALLKRKPPKLAAVALANKNARIAWKLMMTKEHYDGTRMHAASAAAA

SEQ ID NO: 286966 - protein, 368 aa, unidentified
MSNHSHYKVGCDAHKYFSLFAVLDRHAKVVQRTRVNHEPGTIQAFLSQLPPGTPVALETVGNWYWIVDEIEAARCVPHLAHAAKAKAMMGYVHKTDKLDADGLGILLHNGTLPSVWIPPGELRDERELPRTRMAFSKIRTKLKNRVHPTLAKYALSLDTDSDIFTAKWRPQLLALLQQLPPETCRCAHQELELLDLVQAHIDRLEARILQRARRTPSIQLIQSIPGPAEILSIVIDRELGSIDRFSCPKHFAGYAGTVPKVKSSAGKTHYGRMIKQCNNYLKWAFIEAANVVVRQRHHPNWRIKYVVHLYERTRQRKGHAVAVGAVARYLAESTYWVLKKGEPYKEPLPRHLAGSKSVVPPRQARTRA

SEQ ID NO: 286967 - protein, 412 aa, unidentified
MKKIMEVSVLISVGVDVSKGKSTVCILKPYGEVLMSPNDYEHTQRDLKRLVDQMDSFEDEIHVTMEATGNYHFPIATYLKKRDYDVRIVNPLEMKRYRCQGIRNPKTDSIDAIMIAQYGIDFWFRSFQEYVASDERMELKTLGMQYFKTMKTRQDRYLVLESVIDRTLPGIGGVLNGYDKSTGKDKKSDFVYDFYHAEKITVYSENRFCDRYESWSKKKGYRYSEKEARQLYSIAKDSIPTLPSSENTKLMIQDAVKILREVDSALYSILNQMNVIAKKLPEYTTVMEMKGVGISIGPRLIAEIGDPRRFHSAKALIAYAGIDAPPYQSGKFTGTERHMSKRGSRIMRKLGFELMDTINKHQKLYAGDPVCEYFLAKRNEGKKYRVAMFAAYNKFLRIYHSRVSSVLNESEK

SEQ ID NO: 286968 - protein, 341 aa, unidentified
MEQVVPHGWAGVDVGKGHHWVCLIDEAGATLWSTKVVNDESAILEAIAAVLGRAEQVVWAVDITGTAAGLLLALLGAHGQQVRYVPGRTVNRMSGAYRGEAKTDARDAYVIAETVRHRGDLQEVEVPTALVTGLRLLVAHRTDLVTDRVRMVNRLRDVLSGYFPALERAFDYAHSRGALILLTGYQTPAAIRARGHSRLLAWLAKRKVRSADQIAADALAAAKAQHTSVPGQDVAASIVADLAAQILATDARISDLEARIATTFRAHPQAEIIESLPGMGPILGAELIAAAGDLNGYANAGRLASAAGLVPVPRDSGRRTGNMHRPMRYSRKLRRVFYLSA

SEQ ID NO: 286969 - protein, 318 aa, unidentified
MLVERCAGLDVHKDSVTACVRVPDGHGGRHAETRSFTTTTAGLVLLGEWLASFGVTRVGMESTGCYWKPVWQLLEDQVECWLLNAAHLHNVPGRKTDVADAAWIAQLVEHGLVRPSFVPPRPIRELRDLTRYRKTQIQERSREVQRLDKVLQDAGIKLSSVATDVLGVSGRAMLEALVAGTHDPQVLAALAKGRLRAKLPALRAALAGRFRTEHHGLLVAQILAHIDYLDDTIALLSARIEQVIAPFAEQVALLDTIPGVDQRAAEVILAEIGPDMGQFPTAAHLASWAGVCPGNNESAGKHRSGRRPVRAPSGWVAA

SEQ ID NO: 286970 - protein, 402 aa, unidentified
MNCVGIDVSKGKSMIAVMRPFGEVVVSPFEVRHTANELSELAGLLKSLDGETRVVMESTGNYHAPVAWLLHGAGLYVSVVNAMLVHDYGNNSLRRGKTDKKDAVKLANYGLDHWLTLPRYVPEEDTRLMLKTCYRQYQQYSKVQTMLKNNLISLLDTAFPDANRLFTSPPRADGSEKWVDFVATFWHCECVCGLSKKAFTAKYQKWCRKHGYNFSQDKALDIYASACGRFGVMPKTNTAKLLVEQAISQLQTTSAALAALKQEMQSLAASLPEYPVVMEMFGVGPTLGPQLIAEIGDVRRFHSKKALVAFAGIDAPPYQSGQIDVRSRSISKRGSASLRRTLFLVMGVLLQCAPMDEPVYQFMNKKRSEGKPYRVYMMASANKFLRIYYASVKAYLDSLEHN

SEQ ID NO: 286971 - protein, 341 aa, unidentified
MSEVSTIGLDIAKRVFQAHGADASGKVVFRKRLRREQVLTFFAGQPACVVAMEACSSAHYWARAIGELGHRIRLIPPAYVKPFVKRQKNDATDAEAICEAAQRPTMRFVSVKSEAAQANAVVFRVRDLLVRQRTQAINALRGHLGEYGVVVAKGPSHVAKLIAHVEDPAADLPEAARTVLRVLTASLQFLSERIDLLDREVARRAREDKEVRRLTTIPGVGPVIATALAALAPPAEAFKRGCDFAARVGLTPSQRSSGGKQKLGATSKMGERTLRRLLIIGASFVVRKAIKYGTPSGSWLARMLARKPRMLVIVALANKMARTVWALRATGEIYRAPVVAS

SEQ ID NO: 286972 - protein, 423 aa, unidentified
MPYRIAGIDVHKKMLAVVVADVECEGEYEFQRRRFGSNPEQLQLLSEWLIEQRVEEVVMESTAQYWQPVWGALERYWRPICQKREGAGAMSGKLHLAQAQSNRGRRGRKKDFPDAERLVKRLVAQELVLSFVPDPEQRLWRTVTRRKLQMTRLHVRMQNQLESLLEEAHIKLSGFVTDLLGMSARRILQALADGETDPAALAALADKRLRATSAQLCDALGACTELNPVYRRLIKMALEELQFLEQQMGQLDQEMANLLRPHEDAVKRLAEVPGLGVDSAQQIIAEVGPTVATFPSDKQLCSWVAVCPGDNESGGVNYSHRSPKGNRQLRRILNQAANAAARTKGSIFEIVYRRQVTRMGHNQAIGVIAHRLCQLIWILLHRKVRYEERGPAVTERSKRVRTLRMIRTLRTLGYRVEPLASPA

SEQ ID NO: 286973 - protein, 360 aa, unidentified
MKIQRTSVGLDVHARSVVACALDGDTGEVFQRRLTPDHGEIVAWLGDLPGPVAVTYEAGPTGFGLARALAAAGIGCEVAAPSKLIRPAGDRVKTDARDAAHLARLLHLGQITAVTVPSASQEAARDLVRAREDCRGDLMTARHRVSKLLLRQGIVYSGGQAWTSRHELWLRAQRFDNRALQLSYDAAFDAMLACLDRRCRLDDAITTLAADSEFTPVVHRLGCIRGVATLTAFGLAVEIGDWHRLTGRSIGAYVGLVPCEYSSGESRTQGGVTKTGNGHVRRLLVEAAWHHRTRYRPGAELRRRWDLASPAARARGQAANRRLHTRWVGFDARQKRSVIANVAVARELAGWCWSLAVMTD

SEQ ID NO: 286974 - protein, 365 aa, unidentified
MSSEYYTTIGMDVSDRTTKVCVMAKQGINPKIVMETTIPTSKDGLAKFLATQDKASPVVFETGMHCRWMNEVAEGIGFKVYIANPCRLRMITESKAKNDVNDARMLARIALSDPGLLHPVRLRGKEHQKMLNLHEMRNLLVKQRTGIIVQLRAVAKSMGFRIERSSTAHFHAIDTRAWPKEFRDIAWPMLKNLEQLAVTIKTYEKQIRELAQTPTFKAQVERLMEIRYVGLYVATGFVAVTGGDMDKFEKSRDVGPWLGLVPKQDQSGDIDRQCHITKTGSPFMRRLLVESAQMIVRDSATDTDLKVKGMRFCRRGAKIAKRKAIAAVARSLAVLMVAMLKHPNTPYAPLSERCKMELLSMKASA

SEQ ID NO: 286975 - protein, 350 aa, unidentified
MLTDLIDHVLGVDPDRDRITVVVVAARTQGAIASNDFPTTPRGYRAALHWADEHTERGRRVWAIEGAGGYGAGLAATLAAQNERVIEFDHPTARPSKDGAKTDALDAIRAARETLGRTSWAAPRSRGAREGLRTLITARDSAKIARVSAINVLKALIVTCPVKLREELRRLSLGQLVTRCQRLRLDTATDPELAATKLSLRSTATRIHHLTVECRELEKAMEPLVDALCPRLLTEPGVGVLVAAQLLVSWSHPGRCRSEAAFARLAGVAPLPATSGQTQTRHRLSRGGDRQLNRVIHTAVLTRVKTDAQTREYLARRIAQGKTKREAMRCLKRYYSRHLFRLLESASVPS

SEQ ID NO: 286976 - protein, 393 aa, unidentified
MIYVGIDIASEKHDYFMIHHETGTVFSRSAVTIPNTEAGYKKLHSDISAFCGATGDSNVRIGLESTGIYHTNIIRFLLQQNYDVMMINPILTNMARKAAKVHSAKNDNLDAQTICKYMIDHSDKFSPYTLSLYHNEALKSLSRKRFFIVEDLRKAKLMVNSLVQVIFPEFKTLFSNIYGDSAIAILKTYGTPKALSRAHVSKVASLLHGRCKCTAEQLIAAAKSSVGISEPHYAFQLMDAIEEMEHIARRIKNYDVQIKAYVDELCPNLLSIPGVGYTTAGLIAGEIRDIHRFHSAESLISYSGIDVTVYESGKYKAKNCMPSKKGSKYLRYALFQVSRIIWQHDPVFQTYYEKKQAEGKHYYVILGHIQKKVVRVVYSILKNGTSYNPISLT

SEQ ID NO: 286977 - protein, 345 aa, unidentified
MKNSNVIGIDLAKHVIQVCKIDKHGELISNKAISPSKLKELLAKTVPSIVAMEGCGACHYWSRLAQKQGHDVRVISPKKVKGFLQGHKTDANDALAIAIASIQIGMKFSQIKTEEQQSLQTLETSRKFLGKELVALNNHIRAYLYEYGITSRRGRKSLRETMAIVLDDLDTRLPTCLKNTLGLLWERYKLTVEQLTEAEKYKAHLVNQLEPCQRLMDLEGIGKVCASMLYANIGDGREFKNGRQASVYIGLTPKQHSSGGKTYFTGIDKQGGNKELRAALYQGALSVIYKLPSEPRTVKEAWLIELVKRAGVKRTCIALANKTVRTAWALLSTGKSYEPALLGRS

SEQ ID NO: 286978 - protein, 350 aa, unidentified
MIVGIDVHKHNHAAALIDDRGGEIATLVISNTPKGYRRLIDWLVDHDAARAVIGVESPGSYGRCLVTALAGAGFEVLQVPAWRTHRERHRRGPGKTDPGDAISVAHVVRTKRADLGPAEEPELVRTLGMLELQRRRFVHDRTQAIQRLRADWTQHDPVAEAGVIRCDRQRELAKLRRLQLGPSLAARTAARCIRELARDITDLNARIAELDREIAQLLREHDNPLADLHGAGDNLAATIIAQAGDVRRFRNASAFARFCGAAPIPCGSGQTANRHRLHRGGNRQLNAALYRIAVVQQRHYPDARRYLARKIAEGKTPREARRALKRHLANVLYRRLYAWADAAPSMNLLT

SEQ ID NO: 286979 - protein, 350 aa, unidentified
MEKIYIGVDFHARQQTICYLTTDSGELRLHQLKHEDKAAVRAFYAQFTGHVIVGLEASGYSPWFERLLEELGCEVWLGHATEIRRRARWRHKNDRRDAELILDLMLHDEFPRLYLPPLQSREVLRMLRYRQKLIKIRTIGKNSLQALALQSGLAKGPHLFTKAGLQELRRAPMSPAMQWQQEQWLQLLEPLNQRVLETMLWLKQQSQADQRISRLRTHPGVGLLTALCLVHSLEPVSRFANTRKVTAYAGLDPLERSSAERQRFLGISKGGSRVLRFLLVEAAHTAIRKDADLKRFYQRLAQRHGGPKAKVAVSRKLLIRAYIMLRDEIDYAEFQRRAVAARPVLLAHGL

SEQ ID NO: 286980 - protein, 406 aa, unidentified
MKQIVSVGIDVSKGKSTVCAMIHPNTIIKESFEVLHTVEEMSMLADYIGSLDGEIRIVMESTGHYHLPVAQFLYQKGFFVCVENAYIIRQFSRIMLHGAKTDPLDAKKLAKYGLAYWSELKPYKFHPSCYTELSLLSKQYQTYIKLLIVAKQNVIHLMDEMLPGFKEALDTASSVQFSKVKYVDFAKEFYHVDMIKSMGKEIFRENYKQWCKEKGYRFQSEKADELFHLAEDGIPTLPTEFPSTRLCMEVATEQVSQLGYALEQILSQMQNLAKTLPEYQTIRQMGGMGEKLCVRFIADIGDVRRFHNGKALVAYAGIDAPPYQSGQYTGTKRRISKRGNSALRKTGYEVMKSLKSHPPKTDTRVYDFIIKKENEGKSKKQAKIAGLNKFLQIYYARVIEIYKNIV

SEQ ID NO: 286981 - protein, 570 aa, unidentified
MVVVGTDAHKYSHTFVATDEVGRQLGEKTVKATTAGHATAIMWAREQFGLELIWGIEDCRNMSARLERDLLAAGQQVVRVPTKLMAQSRKSARSRGKSDPIDALAVARAVMRETDLPLATHDETSRELKLLTDRRDVLVAQRTSAINRLRWLVHELDPERAPAARSLDAAKHQQALRTWLDTQPGLVAELARAELTDIIRLTGEINTLAQRISARVHQVAPALLEIPGCAELTAAKIVGEAAGVTRFKSEAAFACHAAVAPIPVWSGNTAGQMRLSRSGNRQLNAALHRIALTQIRMTDSRGQAYYQRLQDAGKTKRAALRCLKRRLARTVFQALRTVHQPSSEHTQPAAACHRSYCSSHLGEPPRLTDMTQKTRIQPLPPKRAGLLIRALYRIAKRRFGEVPEPFTVTAHHRRLLIANVVHEALLQRASRKLPPSVRELAVFWTARSIGCSWCVDFGAMLQRLDGLDVDRLTDIDNYATSSKFSDDERAAIAYAEAMTADPHSVTDEQVADLRARFGEAGVIELTYQIGVENMRARMNSALGITEQGFNSGDACRVPWAAPDVPSAESR

SEQ ID NO: 286982 - protein, 361 aa, unidentified
MRIIGCDLHARQQSVAMLDTETGEVVNRTLMHEGNEVREFYAQLPQPVLVGIEAIGPMQWFLQLLAELGIECRVGDAAKIRAAEPRKQKHDRRDAELILKLLVEKRFPTIWMPSQEQLDLRALLLHRHHWVRLRTQIQNALQAIALANGLRRGPSLWSYDGQAKIAFLPLPPHASYRRSMLQALYRKMEEEIEQLTAQVAEQAEQRSGARLLLTHPGVGPVTALATDVFLGDPQRFADGKALASYVGLIPREYSSGAHQRLGALTKQGSPFLRFLWNEAGAHAVRRDPELQRFYRRKLVQKGLGKARVAAARKLGIRLWIMLRDQIDYQEFCRRGQKQPSGDACAGMLEVGNGANGHRPVG

SEQ ID NO: 286983 - protein, 343 aa, unidentified
MSIAVLGIDLGKNSCSLAGLDERGAVTKRRRMRPESIVRFTAALSPCIIAMEACCGAHHIGRLLTAQGHTVRLMSPEYVRPYVKAQKNDERDAEAIAEAATRPTMRFVELKSEEQLDIQTLHRARDRLVGERTALINQLRAILLERGIAVPQGRYKLEKYLDAEGESTHSALSGRISALIDDMREQWRELDRRICALDAEFAERARHDEAARRLATIPGIGPLNATALVAAIGDAHAFDRGRDLAAWLGLVPRQVTTGGKPRLVGITKRGNKYLRKLLIHGARSAMPSLAKSATPLGGWLRAPMERVHRNAAVVALANKLARIVWVILRQRKVFDAMATVAVA

SEQ ID NO: 286984 - protein, 347 aa, unidentified
MQITTVGIDLAKIVLQVHGVNERGKAVLRKQLRRKEVLPFFAQLPPCLIGLEACGGAHYWARELQALGHTVRLMAPQFVKPYVKTNKNDVADAAAICEAVARPHMRFVPVKDPHRQALLALHRARQGFIKQRTAQSNQIRGLLAEFGLILPQGIGHLFAHLPALLDNADNGLPGLLRELLARLRDHLRLLDQQIAALDGQIARWHRDHPASQRLAGIPGIGPLTASALVATVGNAREVNSGRQMAAWLGLVPRQHSTGGKPTLRGISKRGDVYLRTLLIHGARAVLCSVQRKPEQAPPWLTRLLARRHPNIAAVALANKNARIAWALLAHDRRFDTHYRPQPMLAQA

SEQ ID NO: 286985 - protein, 344 aa, unidentified
MHIASIGIDLGKTTFHLVALGERNKILLRRKFSRSQLLTYTANLPASLIGLEACAGSHFIGTVLREQGHQVRLIPAQFVKPYRKTNKNDFIDAEAIAEAVAKQNMRFVQIKTQEQLDWQAMHRVRDRLVQRRTALINEMRGFLLERGLVFAARPIQLRKNLPTVIEDAEQNLSPRLRWLLDRLWQEWKQTEIDIKTITDELERISNEDARCRRLRQIPGFGPLVSTATVAAIGNGSAFRRGRDFAAWLGVVPRQYSTGGKQKLFGMSKRGNVYLRRMLIHGARAVLFRVKYDSGGFGQWVHRLAQRAPRNKVVVAIANKLARIAWAVLSSGKDYRHQPLQLTAA

SEQ ID NO: 286986 - protein, 410 aa, unidentified
MDVFCGIDWAEDHHDIAVVDRDGRLLARRRISDDAAGLAALAGLLAEHGDSAADPVPVAIETPRGLLTACLRATGRPVYPINPMAVARYRDRHSVAGRKSDHGDAVVLANVLRTDAHAHRPLPADTELAQAIAVLARAHQDAVWARTGAHNKLRSHLREYYPGFLAAFAAARGGLTRPEARTILAAAPEPAAAARLSTAQLRALLRKAGRQRGIDAEAARLREAFRAEQMRQLPLVEQAMGRQALALLRQLDAACQAADDLEQAVIESFNQHPDAEIITSFPGLGPLTGARVLAETGDDRSRFTDAKGLKAYAGAAPITRASGKTTTVLHRRVKNQRLAATGYIWAFAALTASPGARAHYDRRKAGGDRHAAAQRNLFGRLLSCLHHCLAAGQHYDEAIAFPTAKLSQAA

SEQ ID NO: 286987 - protein, 387 aa, unidentified
MNRILKIGMDVHSTNFTLCAMEPTIGSEDRIFGEVQVAPDYKEVIYFIETLKQKLGLNDDYSIECGYEAGCLGYTLYHQLTNAGIKCVILAPTTMLTQQGQRIKTDKRDARLIAHCLCYGGYHPVYIPTGEDDAVKEYLRMRDDHKLALKKMKQQINAFVLRHGYQYTGTKWTIKHVAWLRKLDLNPMYRETLDEYMASYEEQEAKIERYDKRIEEISAEMRYKEKAEKLGCFLGIRTHTALSLIVETGDFKRFAKGNIYAAFLGLAPGEHSSSSNVNRLGISKAGNAHLRCLLIEAAKGICKGAIGHKSKALRSRQNGQSAEVIAYADKANTRLRSKYYKMIRHGKKKNVAVAAVARELACFIWGMMTGNINIASGGTSAPAVSQG

SEQ ID NO: 286988 - protein, 377 aa, unidentified
MEKDSRFVGLDVHAETIAVAVAEAGGEVRSLGTIPNTPEAVRRLVKKLGAPETLRVCYEAGPTGYVLYRQLTDLGVRCAVIAPTLVPVKAGDRVKTDRRDAEKLARSYRSGDLTPVWVPDAEHEALRDLVRAREAAKKDQLRARHRLGKFLLRQGRRAPTGIKAWGVKHRAWLQTLRCAHPAQDVTLLDYLTEIDHTAERLARLEHAIDAAVAIAPAPVQAVIAALQALRGIAKLSAVSMVTELGALRRFATARQLMGYSGAVPSEHSSGPHIRRGAITKTGNAHVRRIVIEAAWAYRHRPAIGGTLRTRQAGLSEDVKALAWKAQHRLHGRYARLIAKGKVPTQVVTAIGRELLGFIWAIGVHVERQLAGASSAAA

SEQ ID NO: 286989 - protein, 390 aa, unidentified
MQVMHPVCCGIDVHQKSIVCCILDGPLTSNEPKKYQTTFGTTTKELKAALDWLLEHQVTHVFFESTGQYWIPLFNIFSDSDLELVLANPQHIKNVPGRKTDVKDAEWIAQLGRCGLINQSYIPSQEVLQLRYLTRYRLSVKQRLTQIKNHIHVILQRGNIKITSYLSDIFSKTGQALLTLFIDGEVINEDNVESCIHGRIKASTRQLIEAMEGKLSTVDRFLIKECMEEYKLQKKISDELNKEINEYILEHFPEEYQLLLTIPGISDNCCATILAEIGPNIDAFKTDKNLASWAGMCPGSNESAGVKKSSHTTQGNKYLKQALVMSVLSVQRAKEVTFSLFYQRISSRGSKMKAIIACGHKMLRIIYKILQSHKPYDSQKALGLRQQTNA

SEQ ID NO: 286990 - protein, 428 aa, unidentified
MTYRVAAIDVHKKMLAVVVADVAGEGEYQFKRRKFGTTPEQLELLTRWLIQEEVEEVVMESTAEYWRPVWGALEQHWKPERQKREGATKMSGALHLCQAKSNRGRRGRKSDYADGERMVKRLVAQELVLSFVPDPEQRLWRTVTRRKYQLTRDKVRFQNQLESLLEQAYIKLSSLVSDLLGLSARRMLQALAEGETDPAALAALADHRLRATPAQLRDALGACAHLHPVYRRLLKMALEELKLLEDQIAKLDGEAAELLQGHQDALQRLAEVPGLGVSSAVQIIAEIGPEVAAFESAKELSSWVGVCPGSNETAGEAHSTTSPKGNQNMRRLLNQAAQAAVKVKGSIFEITFRKFLSSGMKYKEAIWAIAHRLCRLIWLLLRRKTHYEERGPAVSAKSKRTRTARMIKELRKLGYRVEGGAIPAGIPA

SEQ ID NO: 286991 - protein, 482 aa, unidentified
MRAKPPEKILKATNPSTRGHWNEMNRKQRREMMRQIQSEDISLEVIHPDAAGIDIGNESHYVAVPPSRDNQPVRCFACTTAELKAMADWLKQCGIRTVAMQSTGVYWIAVYEILEQAGLEVYLVNARETKNLPGRKSDVQESQWLMKLHTYGLLRNSFRPSQEIRTMRTYWRQRNDLVQSAGRHVQRMQKALTQMNIQLANVLSDVSGVTGQAIIKAILGGQRDPHKLAEFRHPRVRASEEEIARSLEGHWQEDLLFVLQQEQDGYEFCQKQMAECDRQLNHYLGQREDRSQGAPLPEEKRKGRRKKKSGNKPQFDLRTGLFRMSGTDLTRIDSIDVMTATTILSEVGWDMSKWETEDHFVSWLRLCPENRISGNRVIGKGRLPTNNRVTLALKMAASSLRLSDTYLGAQFRRFRTRLGAPVAIKAMAAKLARLVYRMLRYGMKYVDKGAATYQAQHQQLQIKQLKWKAATLGYQLIGVPAA

SEQ ID NO: 286992 - protein, 333 aa, unidentified
MIYFLGIDISKKKFDAALTIDGKTYHGVLVENSAKSIQSFFKDLKKKFSLSFSQVIVCLEHTGIYSQPLLNFLVKNEIRVCLEPALQIKRSQGMTRGKNDKIDAERIALYAYKNRENLTFWKPQKSSIQKLKVLLVTRERLIKAKIQLGVPINESEAFLDASIQKEMHRNCRHTLKALEKDIDKINQAIDELVKIDQQVAEQFHFATSVPGIGKITALNVIIATDLFTQITEAKKFACYSGIAPFEHSSGSSIRGKTRVSHMANMTLKKLLHLAAISAIQHCDELKAFYKRKVEEGKNKMSVINAVRNKLISRIFACVKNKRTYQKDYKYGLV

SEQ ID NO: 286993 - protein, 370 aa, unidentified
MKSNTQNAKIEAITEKTLVLGIDVGSEMHYARAFDYRGIEYSKKPFKFSNTEAGFVTFKEWILDLKERHEKDKVIPGMEPTGHYWFNLGKFLQDNEMKPVLVNPHHVKKSKELDDNNPTKNDRKDPKVIAGLVREGRYMIPYLPDGVYADLRTASNIRFQLQAELTRIQNRISRWFNIYFPEYKTVYGKPDAKSGMLILKAASLPEDILTLGTDGVNQIWRDAKLRVVGKARAKTLIEAAEHSVGSKEGVVSVRMEIRMLLEDYESRNTRLQEVMVLIEELVRKIPMAEKLLEIKGVGIRTVSGFLAEVGDISRFNNPKELQKLAGLALVENSSGKHKGETTISRRGRKRLRYLLFEVAMSLVSKNQEFR

SEQ ID NO: 286994 - protein, 325 aa, unidentified
MIGEHKLPTTPQGIDEVFGRIPRSRIALETGTHSPWVSRQLGRLGHEVIVAHARNVRLIGDSSRKDDRFDSWTLARLARIDPGLLGPVQHRSAQAQIHLTVMRARVGLVRARTALVNTARGLTKSYGERLPKCGTQKMNREMAQGLSQELRDALDPLFAEIESLNERIAEYDRKIEQIAKEVYPQVALLKQVKGVGTLIALAYVLTLDDPHRFRRSRDAGCFVGLRPGRRDSGMSQPQLHITKEGDVYLRTLLVQGAHYILGPFGEDSDLRRWGLKLAERGGKNAKKRAVVAVARKLAVLLHKLWVSGEVYEPLRNNHKVVAAVA

SEQ ID NO: 286995 - protein, 447 aa, unidentified
MSSRATPGPDRVVIGMDPHKRSATIEVMAADEAIQGAGRFGTDKEGYAAMLRYGRRWPDRVWAIEGCAGIGKHIANRLLADGEQVVDVPPKLSARARVFATGQGRKTDATDAHSVALVGTRKAGLRPVVNDEQLAILRILVDRRRSLGEDHTRMVSQLHQLLLELIPGGAKKDLSARQAKALLAKVRPRDAAGKTRRRVAAELISDLERIYARKKAANKELTELVAATGTALMDLPGIGPSGAARLLVEVGDITRFPNKAHFASWNGTAPIDASSGDQVRHRLSRAGNRQINRVLHIMARVQLRNPSEGRDYYERKKADGKAPMEAMRCVKRRLSDIVYQQMLNDAITHTVTTSAAPKTSPGGQQGNDSDSSVTDSHPGAGSSEKPLPGPAPQTLPATPPAANPHPASAPNRPRRRAGAVKVQRPTGRTTLTATSAGAHSTTPKPRP

SEQ ID NO: 286996 - protein, 338 aa, unidentified
MVSVGIDLHRRRSDLVGVDDLGSVVWKRRISSSPTDFLRVFGELEPGSFEVAFEATYGWGWLADLLDDVGIPAHMSHPLATRAIASARVKNDTIDATTLAQLLRTHLLPEAWIAPPEAREARRLVRSRAALVRIRSRLRCQVHAVLADHGITPEMSDLFGVAGRRLLPQLELPPLSRHRIDGCLRLIDALTIEVESVDGEMKAVFGKHPALPRLMRIPGIGFVAAATVIAEVWDVSRFHRADQLCSWAGLTPTERSSAEHTRRGHISKQGSRWLRWILVEAATNHTGRAPDLRQFEARIARRRGLKIARLALARRLLCLCFYALRDPAGCAAYPLAAA

SEQ ID NO: 286997 - protein, 360 aa, unidentified
MNATTVAVDLAKSVFQLAVADEHWRIVETQRLTRTQFERWFTNRSVGLVIMEACGSAHHWARWLTALGIEVRLLPAQYVRAYVRRNKTDASDAAALLEAARASDMRPVRVKSLEQQALQGLHRIRSLWMGTRTSRINALRGFLREFGIAVPVGARTGLEAISRVLADPGSSVPELVRGSARLLVEEIRLLEARIAQLERELAALARLSPACTTLLSIPGIGLLTATALVAATSGDVTHFKDARHFASWFGLTPREHSSGSSRFLGKISKRGDRYLRMLLTHGARSVLRAAKVAEAAEREVCGVRRWALDVQRRSNHNKAACALANKLARICYATLRDKTPFGETERLNRKITRETFVMPA

SEQ ID NO: 286998 - protein, 310 aa, unidentified
MDATYVGIDVSKDRLDVHVRPSGQSFAVARNGEGLSELVERVGALAPTLVAVEATGGYETIVAAAVAGAGIALAVVNPAQVRHFAQAIGKRAKTDPIDAAVIAHFAEATKPPPRPLPDEQAQLLADLVARRRQIVEMIGAERQREKRAVNRRVRKSIARIIVALEKELLDVDTDIGDLVRSSPVWREKEDLLTSVPGIGKTTARTLLAELPELGTLDRRGIASLAGLAPYTRQSGQWRGKSMIGGGRAPARSALFICTLVASRYNPPLKAFYQRLIAAGKPKMVALIAVARKLLTILNAILRDNRSWQTT

SEQ ID NO: 286999 - protein, 344 aa, unidentified
MESMYYIGLDVHKRKISYCVKDGGGKLHAEGMISATRLDLDHWMKTLPQPWSAAMEATMFSGWIYDHLKPHATALKVAHPLMLRAIAASKRKNDRIDASKICDCLRCDFLPECYMASTAIRERRRTLRYRNLLVRQMVQMKIKISALLMESGVSYNKERLHKVGYFRELLATNPDIDEGLRSLLRQCRETVVRLSKIESAMIRSLRHDWLLTERVERLMSIPGVGPITALTWALEIGDVQRFSSIKKAVSYCGLCGAEKSSGNMVQRTPLSKQRNKHLQTTLIEAAKMAPRYSPSLALLHDRERQRGNANRATLAVARKLVAYLVAVDRGKTHFRIADREVCAA

SEQ ID NO: 287000 - protein, 412 aa, unidentified
MEVVHPRCAGIDISKRDAKVCVRIAGAGQRRAAETVRTWGSMSREILALRDHLVAEGVTCVVMEAAGDYWKPFYYLLEGMPGAELMLVNARHVKTLPGRKTDVADATWLAQLGAHGLVRSSFVPPEPVRQLRDLTRARTAITRERSREAQRLEKLLEDAGIKLSAVASDILGVSGRAMLEALIAGDRDPARMADLARRRMRSKIPALTEALAGRFTAHHAFLARVHLDLIDQRTAAIGQITARIEEAMEPFRAFRRLLCSIPGISTLTADVIVAETGADMTRFPTAGHLASWAGTTPGSNESAGKVKSSRTRPGNPYLQGALGAAAMACAQNPRTYPGAKYRRISARRGPQKANVAVQHAMLIAIWHMGTTGSLYDDPGADYFTRLNPERARSRAISQLQAMGYHVTLEKAS

SEQ ID NO: 287001 - protein, 345 aa, unidentified
MKHYAGLDVSVKETSVCIVDEVGDICREVKVASHPEDLAQLLKDPAWRFARVGLEAGPLSQWLFSGMVEAGLPAICIETRHTKAFLKAQVNKSDRNDARGIAQMMRVNLFRPVHVKTLASQKHRALLTARKLLQEKAHSIENDIRGLLRNFGLKVGAVGAVKFDERIRELVEDVPELADIMGPLLTSRKQLRGAFMTLHRKLLSIVRDHAVCRRLMTIPGVGPVVSLAFSSTIDVPARFKKSKAVGPALGLTPVLNQSGESHRVGRISLCGDDMMRHLLYEAAQVMLTRVLKWSWLKAWAMNIARRRGRQKAIVALARRLAVIMHRMWIDGTEFRWTREAAPAAV

SEQ ID NO: 287002 - protein, 345 aa, unidentified
MPIVGGLDIHRKQITFDYLDTGTGQVRRGQVSPADREHLRAWLARFAGREDVAFAVEGCTGWRYVAGELAAAGIAVHLAEPADTAFARGRKRHAKTDKTDCRHLRQLLAEGRLPQCWIPPGHILECRALLELYNDLRREHTAWAQRIHAVLFHQGAPALGEGTLRSEQGLAALRAAAAAQLSGAGQLQVATALEVTAALEARMHAVRHQLLDAARHLTGAKVLAARLYGVGPVTALALTCWLGGAGRFSSSRKAVRFAGLDVTVWSSDRKGPPGRLSRQGPPVLRWAVYEAGKTHARSSAPDHAYYAQVKENNGGKRAALSEARKIIRQACHILAELGDDALTAA

SEQ ID NO: 287003 - protein, 314 aa, unidentified
MHRSESFIGIDVSKDYLDVAVRPTDAHWRTPNTAAGVASLVKKLRRRRPTLVVLEASGGYERLASDAMHGAGLPVALLNPRQVRDFARSTGQLAKTDAIDARVLAWYAEAIRPAPRAPIDDETRALRALVQRREQLVEMLTAERNRLDGAPAASRDRIEAHIAWLRDEINDLNSQIKHKIRSHPQWHDRDLLLRSVPGIGDVCTSSLLAHLPELGSLGRKQIAALVGVAPFNRDSGTWRGRRSIWGGRTAVRRVLYMAALVASRHNPNLRAVYGRLCDAGKPKKVALIALMRRLLVLLNALVRTNAHWSLSRAA

SEQ ID NO: 287004 - protein, 351 aa, unidentified
MKILAMDLGKNKTVVCIYDQTSGKHKYQTVRTTPQQIHDLLIEHRPERVVLEICSAAGWVFDIAKCLKIETQVANTNGQAWRWKNVRRKNDREDALKLAQLSAMNQLRTVHIPNRQVRQKRALIQYRQSLVARCVQIKNNIRAILDREGLTMSAGKSGWTKGSIDELKAMALPLDKCDGENLWRGSLWVEIEMLAKVTELVKVIESKLDRMAQDDKGVRLLRTINGVGPRLAEAVVAFVDEPGRFANYKQVGCYVGLTPRQYQSGNSNRVGRISGQGNKVLRALLVEVSWLGLRHNEWMRRTYQRILRGSASRKKIAITAVARKLLIRCWAMLRDGTTWRQEIKSVSDIAA

SEQ ID NO: 287005 - protein, 435 aa, unidentified
MGSKLQKIHAQGAGIDVGSRQFFVGIENQEVKSFDTFTSGCHQVVEYLQQHCITSVAMEATGVYWITLHDMLVSVGIKVDVVNGRHVKHVPGRKTDVKDCMWISELHSYGLLKKSFIPDVQVKEMRHYMRLRENHIEQKVKAVQRMDKALVMMNIRLSSVVSDMQGQSSLRIIQAILYGERNAEVLLNLCDSRILKQKKEKMQECLKGFYKPEQLFALKQSWEQYEFSEKQIAACDICIEALLQKLTVNKPEPVLKEKPKKIYHNKPDVKNLHKMVQQLYDGKDLTVLPGITSYSLLKFFSVTGNDLKNWETENHFTAWLGLAPNQYQSGKMKKYRRIKMNTEAGQILKECVQQLLRSKHVALGVFGKRIASRRGPSIAIKAMARKLACWIYRIVNKGLEFVENGIKQYEERQKKDTLRWLEKKAKELNLTLTPC

SEQ ID NO: 287006 - protein, 380 aa, unidentified
MEKACGLDVHKDSIFACILDEQGKKILEKRYGTLTPDLMTLRDTLIEQGCGKVAMESTSIYWIPIWQVLQSDFSLKLANPYFIKQLPGRKSDVKDAHWIAECLQKDLIKGSFVPEGILQQMRQLSRQFRRLTKSRVRLEQQMDNELQRCNIRFSNYVSNQGNNVSLRKVIEAIIAGERNASKLIKLVHGRTKNKHGHQVIAASLEGVVNSTDIEILKECMEQINLFEKQQAACLNHLEELADRYFAREISLLCTIPGIQKYSAMSILSEIGNDMSAFGKASYLVGWAGLRPRNDESAGKIQSRKTLHGNKYLRQMLVEVSWSAARSKKTFLGKKYYHLSKRMKSQKALLSITRKMLVIIFNVLQTGKPFDVTRNLQAVKA

SEQ ID NO: 287007 - protein, 344 aa, unidentified
MTNIQTNKTDTESKLSHFAGIDVGAEELVLVILKNGKPFDPQKFSNTPEDRARLVKKLVKLPGIVVCLEATGIYHFDLAIALHDAGVLLMVVNPKASHNFAKVLMKNSKTDAVDAHTLAEYAARMDFVAWTRPSDETLNLRSFARRINALTGQKAAAKNHLHALTSTQETPKAVLRDAKLAITQLEKRIDRLTADALILIGKHSELTRILALLIGIKGIGETSAIALMGELLLLPPGLSHREWVKFAGLDPRAFDSGKSVHKKTRISKAGNAHIRSALYMPALSAKQHDPHVKAYFQHLVANGKKPLQAVCAIMRKLLHAIHGMLKHNKPYDNTRFYAIPVSAR

SEQ ID NO: 287008 - protein, 451 aa, unidentified
MSRSRAYKRTDVKQIDLAVLRERTLEFGNAGVTVGLDIGKSEIVACLRWPHGEFERPWSVRNPDQIPVCLDVLKLVKSVGDSLTVGMESTGTYGEAIRRGLTEEGIEVHRISGKATYDYQEIFDGVPSQHDGKDAAVIAELTAYGKGTAWPWQADSELLASVKHQVFRAEAYRGQQTQWSGRLEGLLARHWPELTNLLQLESPTLLRMIGHYRSPARVAAEAEAAGRLAGWGGAKLAESKIRQVLQSARSTRGVPPSDAESAWLAEVASNTLLAYRQVQSAKSELEALLAAEPTWSRYTTIGASTLAAIWTHAGDPRDYDSGGAFLKALGLNLKERSSGHRQGELAIAKRGSSRARRWIFYWALRTVQREEVSGWYADFTQVGRKSSNHGKREARRMKGVVALMRKLARGLRYAMIREEDFDYGKLFEAQPVKRKRRRQRRGCRGSSAGVL

SEQ ID NO: 287009 - protein, 342 aa, unidentified
MEYYVGLDVSLKQTSICVVDQAGLVVREGVVDSDPEAISVFVRSKAPGAVRIGLETGPTSTWLWTELKRLGLPVICIDARHAKAVLKMQINKNDRNDAIGIARIMQTGWFKEVHVKDIDSHSVRALLASRALLVKIKRDLENHIRGLLKNLGLVIGRATFNVFAVRAEELIEDRPDLVAAVRPLLEARNAVEQQVSELDRKVMKLARRDAQVQRFMTVPGVGPITALAFKATIDDPARFARSRSVGAYVGLTSRRHASGEIDWSGRISKCGDAMLRSYLFEAAGVLLTRVPKWSTVKAWGTRLAKRNGLRKAKVAVARKLAVILHRMWIDGTEFNWSKEVAA

SEQ ID NO: 287010 - protein, 338 aa, unidentified
MNNHTVIGVDLAKTVFQVAVQHGQKITSNKKLNRSKLVEFMTQQLPSVVVMEACYTAHYWARVCEALGHTVRLIPAQHVKPFTRGNKTDANDAIAIIEAAQRPNMIDVPVKTQHQQDIQSLHRIRERLVCNRTGLMNQVRGLLAEYGLISAKGNKGFVALIELALNTDELSPLIKDEVQRSLDELQLLRDRTEAIEATLREYLKSDPHCQIISTIPGIGVINATALVCKFGNGSQFSKARSLAVNLGLTPKLSASGLRSQMQGISKRGDPYLRKQLIHGARALLGVCDKRPDDALCRWASRIKQRRGGKIATVAIANRLARLVWVLLHKQEAYRPMPV

SEQ ID NO: 287011 - protein, 450 aa, unidentified
MSNGNGVSRGDRNRNARLDRLRALVPVTNAIVGIGLADKKQMVVVCDHDSKVLARRTYRCRTWDLGTALDWAHERAAAKGFAGMTVSCEPTGHRWRVLAQLAADRSMPFVCVQPAVSSWSRRAEDLTHDKTDEKDAVLIARLTAQLRCYEPEPVDETWGRLRHLGARREQLITESSGQVQQMRDLLECVWPAALECAQQPFRSRTWIAALTVIVDRDGGQFDRTRRLGLARFEQAVLREISKRGGQKPCRRIARSVFAALADPAGVIAHRAGALERVQLLLEDWRTAHHRLADTEQRMTGVLDELGLTGLVTSITGISAVGAAAILAQTGDPHRFATARALVKHAGLAPREKLSGTFTGRTKLTGQGRPGLRLAAWRAVWGAQRANPVYGARYRHLTTREHNRLKPTQAQTVIAAAILRHLHAVISTGQAWDPSIATHGTRSAIRTTAAA

SEQ ID NO: 287012 - protein, 326 aa, unidentified
MQGKDVSEQETRGQSYVGIDVCKSWLDVHILPAEQAFRVPNTSPGHRTLKRRLERYDVGLIAIEATGKWHRPIHRSLNASGVRVRIVNPLRARLFAEAMGLLAKTDQLDARMLAVFAVSLGNDARPPAPEIIDELKELVQARVSAVNEQTSLANQLKSAETTFLRRQLKRRLTRIARDIDEIEAQVSRRVKADDALARRYAILLSIPGFGPVVAMTLLAYLPELGSCDGQQIASLTGLAPWPDDSGERGGARHIRGGRQTVRNVLYLAALTAARFNRDMKAVFLRLTANGKESKLALIAVARKLVVLANLLISSDRLWMPEPPKHA

SEQ ID NO: 287013 - protein, 363 aa, unidentified
MTETITADVHGQDVYVGIDTHKRNWSVCVLGEGWEERPFSQDPRPGQLVDHLRRKFPGGRYHLAYEAGFAGHWIAREFALHGVDCIVVNAADIPTNDKDRRRKTDARDCRKIARAHRAHTLEPIYLPTQQSEEDRKFMRTRLEMVRKQTRTKNQIKSLIAISGTELPPAAELPTWSRSFIVWLEGLFADRPSLKMSLDVYLEELRSQRTWLVKQLQQIRELSRTDRFAPNVKLLMSVPGIGLIGAMTLLCELIDIGRFRDLDHLASYIGLVPDTRSSGDSEHTVGMTSRANKHLLVIIIEASWVAIRKDPSLTEKFEKDAQRMKRSQAIVRTARRLLSRIHHVLREKEPYRIAVSTTSSIDQS

SEQ ID NO: 287014 - protein, 350 aa, unidentified
MDTIKYAGIDLHQSTCVIAVHDRNGKTIMQSIVETHAKTLHEFFSGLGGTIHVAFEVGTQSAWLYEILRPIVSSATVCDVRGRKRRGNKNDRIDANKLATWLRTGDLRSVYQGTRSNRKLRELAHGYLATVSDSIRIMNRIKALYRSWSIPCAGRDVYYKRNREMWLSKFPIEESRIRACAYYAQLDLLKEQRKELKKILLKAARENPAQKILCKIPGFGPIRSALAIAMIASPQRFRTRRQLWAYSGLAVVIHSSADHEIVEGRITRKTHKYSTRGLTLDYNRILKFVFKGAASEAIRKDPIKTIYQRMIAKGIRSEMALLSIARKLATIVLVLWKRGEQFKTAKLISE

SEQ ID NO: 287015 - protein, 387 aa, unidentified
MPQQNDLSRSLIHFDQATTLVAVIELSQSSWLIAGTIPGIERQPLKKIVPDEAELLRVLNRWRDEAIRKGHTITRIAVAFEAGRDGFWLARWLTGKGIEAHIIHSSRVAVSREHKRAKTDRLDTAMLMRVFLGWLRGERGHCGMVAIPTIEEEDAKRPCRERETLVGERTRIINRLKSDLTRLGMRGFKPQLRKAPQLLESLRTPEDSPIPPNTLDEMRRDLARLALIREQIKAIEQARLARLEQAPQTGPNAMIRMLASIRGVGIETAEMLVQEVLSRNLRDRRAVGRYAVLTGAPDESGSKRREKGLAKSGNARVRRGMIQLAWRFLLFQKDSALAQWFQSRTEGAKGAYKTKMIVALARKLLIALWRMVTTGDVPHGVVLRQAA

SEQ ID NO: 287016 - protein, 371 aa, unidentified
MESIVYVGMDVHKDSYSICCYKAKEDKFYYEKKVKAETKRVIKYLESVKEIFGEETIFFCGYEAGPTGYGLYRDLEKEGYACVVMAPTSLKKSANQKVKNDRVDARYLAKTLFTKDYSAVNVTTEEEEAIKEFCQMRLSIQTELKESKQKLLSFLLRQGKKYEESGYWTIKHKNWLSKLEFENQLLKEIFNEYMISVNANEQRLKTIENRLKEIAKEKVVKEKVDKLVCFSGIETLTAVTIVSTVGDFNRFSSAYHFSKYLGLTCKEDSSGGRERRLGITKSGSKNLRRLLVESAKSIKKTNLKGKKSRRLLERQQGKDPLVVAYADKCRYRIRHKIAHLELKGKSANVATTAAARELACFIWGMMTNNIA

SEQ ID NO: 287017 - protein, 349 aa, unidentified
MLADQVDYVVGVDTHLDEHVLAVVASPGGAVVAQRAVAANARGYAQALRFAQRYAGGTRVWAIEGAGHYGAGLARYLNERDEAVLEAGRSPRNERRLRGKDDQLDAVRAARVALTSEPLALPRSGQRREALRLLLVARRSAVDVRREALVQLRSVIVTAPDALRDELRGLPVQRLLDRCNRLRRSTAAAPDELATRLVLRSLARRIVAASVEADELEREILLHVRVLAPQLLDEPGVGPIVAAQLIIAWSHPGRVRSEAAFARLAGVAPIPASSGQTVRHRLSRGGDRQLNRALHTIVLHRRQHDPATKAYIARRIAEGKSRRDATRLLKRYLARHLYRLLQNPAPLMT

SEQ ID NO: 287018 - protein, 382 aa, unidentified
MTGTEPHAWGTGLMDDIIFVGLDVHKATVCIATAEGSRGGEVRQLGVFENRAEILSKVVSRLSKGGRRLSFCYEAGPCGYGLHRLLTGYGHECVVIAPSLIPMKAGDRVKTDRRDALMLAKLHRAGELTAIWIPDAAHEAMRDLVRARATAVRVLVKARQHLQGFLLRHERIYHGARAWTLAYRRWLSTVRFEHPAQQIVLQDYIHAVQEAETRRDRLTQQIEELLPNWSMAPVVAALQSMRGVALVVAVTVVAEVGDFRRFANPRQLMAYLGLVPSEHSSGSSVRRGGITKAGNALARRVLIEGAWTYRMSARVSRKLYDRLEGLPAAVRDIAWKAQLRLCARYRRMAAIGKPKVVVTTAIAREMVGFIWAIARLAQPALV

SEQ ID NO: 287019 - protein, 344 aa, unidentified
MSEIVTIGLDIAKSVFQVHGVDAAGQVVVTRQLKRGQMLKFFAALPPVLIGIEACGTAHHWGRQLQNLGRDVKLIPPIYVKPYVKRQKNDAADAEAICEAVTRPTMRFVEIKSVDQQAGGVLHKTRALLIKQRTMMFNAVRSHLAEFGLVTGTGVAQVVRMVDRLAKGDELDLPELARETLGVLARHIQELQDKLTGIDKQLTRWHYRNDVSNILETIPGVGVITASALASMVTNAQSFRSARHFAAWLGLVPRQNSSGGKTRLGKITKGGNRYLRQLLVVGATSVLRHVRAGSVKGFEWAKALLDRRPPKVVAVALANKMARIAWVVMTRGVEYERKELAIAA

SEQ ID NO: 287020 - protein, 392 aa, unidentified
MKTNAIKEGTVEGAEQGSKTHQLIKLGVDVHWHEYVVVRQIDGSSPQSAQRFSPEGFVAWAARQTQLAEQVCCCYEAGPFGFVLHKQLERLGVRNVVVRPRNWDEYGAKVKTDRRDALALCSSLDRYLAGNTQALAVVRVPTDEQEHSRSQTRQREQLVSERKRLGAQGLCAARYYGYDLPDQWWRPRRFAALQSQTPDFLLELLARWQRLLLAIDEELDSLGGLIESAQQQMLPTGLGALTAQILDREIGEWNRFKNRRQIASYTGLVPSEHSSGQTQVRGSITKHGNPRVRHILIEAGWRLRQFQPEYRAVKQRQAAFDSAKQKGNSPARKRLGVALSRQFIVDWWRIKTGRTTPAQLGLQMSWPTCPHLPSKPKPSSETSAQPNTQPID

SEQ ID NO: 287021 - protein, 391 aa, unidentified
MTMYFVGIDISKYKHDCCIISAANQKVVSKFTFKNDKSGFEQLNLILNSLSTPEDIKIGFESTAHYALNLELFLENANHSFMEINPVLIKDFKKSQTLRRTKTDSIDCELIARWLMTVEYKPYSKGFYHAYSLKSLTRLRDRLGRQRSFYLVKITNVLDHTFPEFKPFFHERLSKTALYLLENYGSAEKIARMNSASYEKLRSISRGKFSPQQFIRLKELAANTVGVNNSIFDVELNSLLTLYKSLVDEIKTLESEINRLVDEVHPHYMSIPGIGPISAAIIYAEYGDISNFSSPNQMLAFAGIEPSVHESGTEAYNGKMVKHGSSQLRYVLINCCLPLIRFDVTFATYYARKRSENKPHRVAITHVAKKLVRVIYALESQDIDFDPKKLR

SEQ ID NO: 287022 - protein, 348 aa, unidentified
MIIIGCDFHPSWQQICWLDQETGETAEQKLVHGSGEVEKFYRHLPAPVLIGMEATGNCQWFVELVTTAGHEVWIGDAAKIRASDVRQQKHDRRDAALLLQLLVEKRFPRIWTPSSEQRDLRQLLIHRYKLVRLRAQAKNGLQHLALNQGLQKKRRLWSAAGQKLLRELPLAPWASRRREDLFGVLELLDRQIESLDLAVKEAAEKDPNARLLMTQPGVGPVTSLAFVLTMGEVSRFPRGKQVASYLGLIPREYSSGGHQRLGSISKQGNRFMRMLLVEAAQVAVRCDPQFRSEYLHRCHTKPKGVAKVAAARKLAIRLYWMLRTQKRYPEIVSIESSSRVPLVVRPRG

SEQ ID NO: 287023 - protein, 359 aa, unidentified
MQTQVTKKTFVDQEFFIGIDNHKKSWTVSILGEHYEHKTMSQNPDPEILARYLKKHFPGGQYHAIYEAGFSGFESCRKLQQLGIDCIVGHAADIPSSQKEKLQKNDKADSRKLAKILRGKGIEAIHVPDRKLEADRALVRQRFRVVKDLGRIKNRVKSLLFQFSVQIPDRFTTAQTRHWSKVYINWLKQLPVEHESLKQTLDNYIRLGEMQRKELLLINRQVRSLSQTNAYQNNFNLLISIPGIGLMTAMTFLVQIGDIRRFKSLDDLCNYIGLVPMMHNSGEKVVTGKMLKRGRKELKIMLIEASWVAIRRDPALMAKFNNLAKRMNKNKAIIRIAKSLLNRIRFVLTHQQIYELGTI

SEQ ID NO: 287024 - protein, 383 aa, unidentified
MAKHIRYVGLDVHADSIAVVVAEDGRSGEVRSLGVIPNCFEAIRRLVKKLGPASTLRCCYEAGPCGYVLYWQLAKLGVRCEVVAPTLIPTKAGDRVKTDRRDAVKLARSYRSGDLTAVWVPDAAHEALRDLVRAREAAKKDQLRARHRLGKFLLRRGLRPAHKMKAWGVYYMKWVETLQFEHAAQEATFVDYLHEVRHAAERIERLEKSLDQAVEKMPHAMKAVVDALQALRGVAKLTAVTVVAEIGQISRFDRPRQLMGYSGLVPSEHSSGGPGHVRRGGITRTGNTHLRRVLVEAAWCYRHRPCNSEKLRARQKGLTVEVKAIAWKAQHRLHSRYWKLAARRKPQQATTAIARELLGFVWAIGMEVERDQATKPQEMRKTA

SEQ ID NO: 287025 - protein, 500 aa, unidentified
MSKSSKKPDSDPPSDGSTAVAILEEGIEIQHTKAYGVGIDCHSRFIQVSVIVKRNLHTYEYRFEFGTDLPSLEKAREKTIETITAKSDPPVPVSANSLHYCIESTSTYHLPVINIWKGVPSVVNPMLAGATKRKTDVLDAQLLAIHDLTGIWRESNIPSSDVQQLRMLIAERDQFHKSAIRISNRINNDLLKLGYTIGRDGSVMLVGKVRELLEDELSDNPCPNADYRPQGGIPEDVRILFRENLEKLDQNLAKMSKYEKLIASKAKSMSWETGNGVLSGKEMICLLSSVPGVGEWTSIIWLSLVITPRRFPNEKALAAYCGLDPSLKISAKKVTSTRKRGGNKQLHTILNRSASRLMSHHSEPFGQWGFNIYNQTGRWKKGTNAVARRLAVALYYVQKNGEPFSYDKYSLSKEPEVIDMTMVQLVQINPAFKRYVAPLASMHVGTTKQMVHAFSQCQLKDVRGLGKKFFGLVREFIHDQADYVNKYKELYGGTSDEVKQ

SEQ ID NO: 287026 - protein, 453 aa, unidentified
MARRQKTRGHSSTQWSTINHDAAGLDVGATFHVVAVAPDRDEQPVRTFGTFSGDLHRLADWLQKVGITTVAMESTGVYWIPVFEILEARGIAVVLVNARHVKHVPGRKSDVNDAQWLQQLHQYGLLRGSFRPREDVARLRAYLRHRERLVEYAAAHIQHMQKALMQMNVQVHHVLTDITGVTGMRIIRAIVSGIQAPETLAQFRDARCTASADTICAALTGNYRPEHVFALRQALELYDVHQAKIAECDTEIETVLRVLNAERPLPAAPLPTVRHAKSRNEPTFDARPALYTLLGADLTQIHGLGPYTILRLVAECGDDMSKWPTVKHFTSWLSLAPGNKVSGGRLLSSKTRRSTNRAAVLLRIAAVNVGRTQTALGAFYRRLAARIGKAKAVTATARKLAVLFYNALRFGMAYADPGASYYEARYRQRVLDNLRRRAQHMGFTLVASPASNG

SEQ ID NO: 287027 - protein, 413 aa, unidentified
MMNPVVGLDVSKGESQVQAFLDKGLPFRKNFSVKHTVEGFENLLGFLKEIERVADGKQPSVILESTGHYHSPVIQFLEEQQYIYIVVNPLISHRARSASLRKVKTDAVDAYLLCELYYKEEIEPYKKRGIQLLNLRNLTRQQETISSISAQTKVQLLTVLDQIFPEYRGVFGNLYSKVSLQTLSLFPTSEHVLNTTESVLTEKIVSLCTRRSEKWAKEKAQKLIEAAVRNPFQNNLYESHIFNLKMFITIVLQYQEHLSQLETEIDALAKEIEEYQIIQSIPGIGEKIVATIISEIGEIDRFNHPKKLVAFAGIDPSVYSSGRFTATNNRITKRGSRRLRQALYMAVYCGIRDARKQKTSDTVIPRNKKLREFYDKKRDEGKPYRVAIIACVNKLLHLIYALLKNKTTFQELA

SEQ ID NO: 287028 - protein, 343 aa, unidentified
MQAVTTIGLDIAKSVFQVHGIDAEGKVLIRRQLKRRYVLAFFQKLSPCLVGIEACATSHHWSRELKALGHNVRLMPPAYVKPYVKRQKNDATDAEAICEAVTRANMRFVETKTPEQQSCLMLHRTRQLFIRQQTSVINAIRAHLAEFGIVAPVGRKGVEHLLAIGTDGSDQRVPEVARACLTALGAQLRISKAQILEFDRRILAWHRSNETSRRLDAIPGIGPALATALVASVADPNAFRSGRNFSAWIGLVPKQHSSGGKDKLGSISKQGDRYLRSLFTAGALAVIRYAKIHGTQHRPWLTALLARKPTKAAAIALANQIARMAWALMAKGERYKEPVALAA

SEQ ID NO: 287029 - protein, 410 aa, unidentified
METVVERPAALDVHKEQVTACVRTPGAGGRREQHLAVFRTTVQGLLALRDWLQAHGVTQVAMEASGVYWKPPWAILEDEFECLLVNARHVKQVPGRKTDVSDAAWLCQLLEAGLLRASFVPPKPIRTLRNLTRYRKAQIGERQREANRLHKILEDTGIKLDCVATDILGASGRAMLDALCQGTTDPAVLAELAKGKLRKKLPALREALEGRFDAEHGIVVGAILAHIDFLDEQISLLSDAIEEQIRPFAAAVELLCTIPGVQRRTAEVVIAEIGADMSVFPTAGHLASWAGLCPGNDESAGKRRSGRSRKGSRWLGIALTEAAQANTRSRDSYLSAQYRRLKPRRGHKKAIGAVRHSIIVACWHMLTTGEIYRDAGGDYFTRLDPDKQTRRLIAQLERLGHHVTLQQAAA

SEQ ID NO: 287030 - protein, 323 aa, unidentified
MEHKLATTPEAMEQVFGSMPRCRIAMETGTHSPWVSRVLTALGYEVIVGHAQKVRLITKSRRKDDRLDARTLARLARIDPELLSPVKHRSAQAQLHLTEIRARAGLVSARTALVNAARGLVKSYGERLRKCGTQQFSRETTSALNAGLRQALEPLVQEIESLNERIQEYDRRIAKMAKEKYPETALLKQVKGVGDLIATAYVLTVEDPQRFRRSRDAGCFVGLQPGRRNSGESEPQMRISKEGDEYLRTLLVQGAHYILGPFGKDCDLRSWGQKLSARGGKNAKKRAVVAVARKLAVLLHRLWVSGEVYEPLRNSQKAMSAAA

SEQ ID NO: 287031 - protein, 317 aa, unidentified
MNTNNNQNEINVGVDTGKTQLDIYIRPLDIYFTVENNQSGIKHAIQILKKHPVTRVTIEATGRLELPFIIACAEANIPFVVANPVNIKRFAGAIGQKAKTDKLDAQLIAHFGEAIKPPLSSLKPEQMRLMSDLLSRRRQLMDMQTMEKNRSQIMPNTLSSLIKPILTALKNQIEKVDLKLQKLIKECDEYEAKNNIIQSVPGVGNVVAFNLLSDMPELGYVNNKEAASLVGVAPFNRESGAYQGKRMIRGGRPKIRTAMYMAMMSAIQCNPKFKDIYQRMIAAGKPKKVAIIACIRKLVVIINSMVRDGVMWDPKMV

SEQ ID NO: 287032 - protein, 387 aa, unidentified
MAQVNDLSRSLTAFDPISTLVLVVEMSKAKWLVSGAVPGVERQPLKKLEADATALLRLIERWRNEAVRAGRPISRIALAYEAGRDGFWLARWLIARGIEAHVIHSASVAVSRERKRAKTDRLDAAMLMRVFLGWLRGERGHCGMVAIPTMEEEDARRPSRERESLVDERSRITNRMKSALARLGIRGFKPHLRKAPERLAGLRTAEGTGLPANVIEEFRRDMARLALVREQISSIEKTRAKRLERAPDTGPHAMVRLLARVIGIGIETADMLVREILSRKLRDRRAVARYAGLTGSPDESGLKRREKGLAKAGNARVRRGLIQLAWRFLMFQKDSALAQWYRTRTEGPSGARKTTMIVALARKLLIALWRLVTTGEVPDGVELRPAT

SEQ ID NO: 287033 - protein, 361 aa, unidentified
MKREQINKLNFKGQNIYVGIDVHLKSWSVAVLSENSVLKKFRQDPDAAALHKFLSVNYPAANYHSVYEAGFCGFWIHRQLEAFGINNLVVNPADVPTMSKEKLQKTDAVDCGKLARELRSGTLKGIYVPDESSLEMRSLIRLRNTIVKDSTREKNRIKSLLRFHGIEIPENFMRHSIGNWSKRFLKWLGEVELSTEYGRKVLDLHIEQFVRLRGMLLQETRAIRTISRSEPFEEKIRLLTSVPGIGITTGISLLAEIDDIGRFSSADQLACYIGLIPMCHSSGEKEGVGDITIRKHAMLRCYIVEAAWIAIRKDPAMTMAYEQYRKRMNAQKAIVKIARKLVNRIFYVLKRRQEYVPCIVK

SEQ ID NO: 287034 - protein, 375 aa, unidentified
MKEKLRFLGLDVHAETIAVAIAEPDGEVRSLGTIPNRAESIRKMIKKLGPADKLRACYEAGPTGYVVYWQLAELGIQCEVVAPTLVPVKAGDRVKTDRRDAEKLARCYRSGDLTAVWVPDEGSEALRDLVRAREAAKQDQMRARHRLSKFLLRSGQRPPSGVRPWTRPYLIWVAQLRFTQIAQEATRQDYLHEVEHMRERVARLEQAIMEAVKLASPSLQQVINDLQALRGIADISAVTIAAELGQVSRFDSARQLMGYCGAVPSEDSSGKRIRRGGITKTGNAHLRRIVVEAAWSYRRPPGIWYGLRRRQESISEEVKEIAWKAQHRLHKRYMKLGAAGKDQRKIITAVARELLGFIWAIGTRAETIASQQAAA

SEQ ID NO: 287035 - protein, 423 aa, unidentified
MKNSTARKLRQVPKEYLVMGVDPHKKKHAAVAMTQDFTTHSKFKFNNSRQGFEVALERARAEMMRTGSRGVIFAIETGGHYWRNLVYFLDERGIPFHFINQFTLKRRREGKDLNRMKNDYRDSEVAAQLLCTGEFTDTKLQHGVYAELHAAYNAYRRLVKERTRITNLIKGLLDGIFPEFTQVFKDPCGLTALSVLSICPVPNIIAQMTEEEFVNAIRAKHQGRLLKKRLRALHYTARTSIGIQAGAWSVSSEISFLVEKLCLIRRQIRSIDETLARLVDETEEGKYLLSIIGLNYISVAGLLAELGSFRSYRSAKQLIKMAGSNPTESESGGKRSAHTPMSKKGRPVLRYCAWTAVIPMLRFNSDFRAWAKKLRERPVHANPLSGREVVGAALNKLLRLAFALVKKQTFYQVPQPEVAQVAI

SEQ ID NO: 287036 - protein, 343 aa, unidentified
MQTVTTIGLDIAKSVFQVHGQDDAGQVVIRRQLKRRSVLAFFQKLPPCLVGIEACASAHHWSRELQALGHKVRLIPPAYVKPYVKRQKNDAADAEAICEAVTRANMRFVPTKTPEQQSGLVLHRTRHLFIRQQTAAINAIRAHLAEFGIVAPVGRHGVEELLNVLADPNDKRVPEIARACLSAFGAQLRRIKEQVLEFDRLIRAWHRSDEMSMRLDEAPGVGPVLATAVVATVADPKSFRSGRNFSAWIGIVPKQHSSGGKNRLGSISKQGDRYLRGLFVAGALAIIRYAKIHGTKHRPWLTALLARRPTKVAAIALANKLARMVWAMMVKGERYKEPVALAA

SEQ ID NO: 287037 - protein, 375 aa, unidentified
MNKYSTKYVGMDVHKETIAVAVAKEGRGDPLYYGEISNTAESIRRLVKKVVSNGERVSFCYEAGPCGYEVYRQLIDLGQRCDVVAPSLIPRKSGDRVKTDRRDANTLTRLHRAGELTPVWVPAKEQEAMRDLTRAREDMKSMEGHAKQRLGAFLLRHGKRYPGRSKWTQAYFRWLEGIKFEIPAQQIVFQEYVDTVKQMKGRVASLEEEMRQAVGGWSLAPVVTGLMALRGVDIITAMTVVAELGDISRFDSPRQLMAHIGLVPSEHSSGSRRQRGGITKTGNGHARRVLIEASWCYRLPARKTAHFRRRAEKASETVQAIAWKAQKRLCKRYWYLINKGKLPVEACTAVARELSGFIWAIVCDVMGKTNACVTR

SEQ ID NO: 287038 - protein, 350 aa, unidentified
MMIIGADYHPSFQQIAFVDTETGELQERRLDHPAAAEKFYSDLAAQGKKVRVGMEASGHARWFERLLAELNFEVWIGDAAEIHRKRERKQKTDRQDAQHILRLLLKGDFPQIWVPSWENRDLRQLLWHRHRMVQARTRIMNQLQAVALNEGLRCKKRLWREQGREQLESFRLAPWASRRRHDLLELLDRLNPTITELSQAVEQEAEKCPEAQRLMTHPGVGPLTALAFVLIIGQPERFQCGKQIASYLGLVPLEDSSGNRRRLGHITKQGNSLLRFLLVEAAQVTVRSLPEWRSKYVHLTMRRGRKIAKVAMARKLAVRLYWMMRKEWDYEQVKKFGSHAGQPGHRYGVQ

SEQ ID NO: 287039 - protein, 345 aa, unidentified
MTTMNYVGLDVHKKTISYCVKDVSGRIRQEGKVGATRRELDCWMKTLPQPWTVAMEATIFSGWIYDHLLPHATQIKVAHPLMLRAIAAAKKKNDQIDASKLADCLRCDFLPECHMMPRAIRDRRRMLRYRHLLVRQMVQMKNRVSGLLMETGVEYNKQRLHKVSYFRELLSANGEVPPSLRPLLKLSRETIERCQKTEYALVSSLQRDPVLADRIKRLRTVPGVGPITALTWALEIGDVSRFGSIKKAISYCGLCGDERSSADKAMRMPLSKQRNKHIQRALVEAAKLAPRQNHEMAVIYDQERQKGNSNRATLAVARKMVAYLLAVDRQQRDFVPAEERRTTAA

SEQ ID NO: 287040 - protein, 429 aa, unidentified
MRDTFAFESALVVGVDPHRESLDAVGVRFPEVIVLDEVFDNTQAGHQSLWSKAQDLAEELGLTLVFGLEDGSNYGRSLSRYLVEAGSRVKEVNPLKTNRQRDFYGEDKTNHLDALATAAVVFRAYERLPDMVAVHEAVQATYDLSRYREKLVKQQTASINRLHSYLANQYPAYKDYFNKVNGVTALNFWATYPTTAHLRGTSVEELAALFYEKSNHCLSGADCTDKAQQVLASLDDAPDHALDLLTEVQGEIISDLARRLLALKRSIKRMESRLAETLPQTGQKLESIEGMGTVLAAVFVGETRGTARFHHNQNKFARYNGSGPATKGTGPNLRQVQNRWCNRRLKAALARLALGASRLEPLSAAYYQACLDRGLEPHQARIRLMRRLSDVVFAMMRDKTAYDPEIHRLKQERNKTKKGESVAPASDDG

SEQ ID NO: 287041 - protein, 357 aa, unidentified
MTPITPDDAAIGEVAGGVDTHADTHTAAVLDPVGRILGTEQFPAGQAGYTALLDWMRSFGRLERVGVEGTGVYGAGLARLLHGAGVQVIEVDRPDRKTRRFQGKSDPIDAVAAAKTALAGERTGVPKRRDGRVEALRNLRVARRSAVDQRADAQRQIRALIVTAPDGLRTRLRGLPARELIAACAALRPDPIDAASPETAAEIALRSLARRHRHLSAEITELDELLEPLVAAINPGLVAANGVGTDVAGQLLVTAGQNHDRLRSEAAFAMLCGAAPIPASSGRTHRHRLNRGGDRHANAALYRVVICRLRWDPRTRAYAERRTKEGKTKKEIIRCLKRYVARELFQIITAHDLELAA

SEQ ID NO: 287042 - protein, 355 aa, unidentified
MNDAKYIGMDVHQATISAAVRDSSGNLVMEATLETKAETILEFVRGLRGSLRVSFEEGTCAAWLHDLLKPHVTAVLVCDSRKNALLRVGNKNDREDARKLAELLFLNKLHSVYHGETGIRALKELARSYLTITRDLTRVMNRLKAIYRGWGIACAGQQVYAPRYRAEWLAKFTEAGVRRRAEIYYQQFDVLAALRQEARRELLAESRKHPAQRLLRQIPAIGPIRAALLIALIQTPHRFRTKRQLWAYCGLALRTYDSGEYRFVGGQLKRSKKAVTIRGLNKNHNHDLKNIFKGAATRAAATVGPFQNFYEARIASGMKPPMARLTLARKIAAITLLVWKKGVRFDANQLKQQAA

SEQ ID NO: 287043 - protein, 469 aa, unidentified
MRIIGLDLAITSAHKAVVADETGKFLTPVFSVATWPQDLAAMLRRARQGTVADLALTVVMEPTGLAWLPVAVYLLWQQVTVYLVNSQQVADLRRYYKKHAKSDRIDARVLAKLPVVSPEKLHALVLPSADLFALQRACKQVDWLITHLTALHNQIVALDRVVWLGGWEALVFGDPFSPAARWCREHFYHPMTVLSVGTQTIRQEWRASHVDPTDTGAWAKRLVALAKQVVAVYGNPSPHVDFSALQAEVNLKQKWLAQFEADRDHWRLQVVRPLYRRLHPSRNLETLKGVGQDSAAVFLSFIGDPKRFPNGRVFRGWSGLVPRSAQSAESEAKGLHISQAGPDLPKKYAFLDGDVGRRWDPQLAKIYYDQMVRYGKHHTQAVVAVATHLLDRILVVLQEDRPYELRDVDGASVTVEQAQRIIAEKYTVPDDVRQRNNRRARRARAEAQAERQHARREKRKGKSASFVRG

SEQ ID NO: 287044 - protein, 450 aa, unidentified
MEQSTRFVGMDVHKETIVVAVTATGEVGKATAYGTFPNTGAGLEKLVKRLRQAGSGPIKFCYEAGPCGYGVHRTLTRTGEDCMVVAPSMIPRKSGERQKNDERDAASLAVLHRGGLLTAVWVPDAAHEAMRDLIRARLAAVRAVRAARQQLSAFLLRHERVYPGNRTPWTKAHRGWLADQTFAQPAQRIVLEESIEAVRLGEQRRDRVDGYLRAQIPTWSLFPLVRNLCALRGLDMIASAGLAAAIGDPSRFASAPHFMAYLGLVPSEHTSGPKRRIGAITKAGDIHARTMLIEAAHSYRYPARIARHKLAAVDAVPEAVRAIAWKAQTRLCQRFRQMTAKGKPNQVVVTAIARELAGFVWSIACITSDPAGSDNAVTEAYDEVTALKDEVMMASEEAAQQVQQITPDRPPRRAASPAAGRHDAPRGPTRVNRRRICGREPDGMISHHTG

SEQ ID NO: 287045 - protein, 360 aa, unidentified
MSFNGTSVGLDVHALSVVAHAVDEESGRVERARLCPDHGEILDWLHQLRSPLRVAYEAGPTGFGLARALADAKIDCVVAAPSKLIRPAGDRVKTDARDAAHLTRLLRLGEITAVTVPEADVEAVRDLVRAREDARADLMRVRHRLSKLLLRQGRVYAGGQAWNGVHETWLRRQRFDDAHTTAAFDHHFDAVLTATAARDRLDEQIVTVAASPRWADQVDRLGCLRGISALTGLALTVEIGDWTRFTGSSIGAYVGLVPCEYSSGASRVQGSITKAGNAHVRRLLIEAAWHHRAAYRNPGPTMRARWAKVDPALKARGHAGNRRLHQQWCRFNERKKPHVVANVAIARELAGWCWSLATLK

SEQ ID NO: 287046 - protein, 352 aa, unidentified
MIVLGADTHKRSHTIAAVGATSGELLGEQTVPVGRRGFGALLVWARSLDGERVWALEDCRHVSGSLERFLIERGERVLRIPTHLTAKARRSARQRGKSDAIDALNVARAALQEGLDTFPAAHLHGPELDLRLLVDHRERLVRHRVELNCTLLWHLHDLWPELRLPGGALFSKKWATRIGRRLARAEQTMRVRIARDELRRLRELTQAINQLEREITGLVAQIAPQLLSEPGFGPLTAAKLVGEIAGAQRFATSAKLARAAGVAPIPASSGNTQRQRLDQGGNRQINAALHRVIVTRARCHQQTRDYLERRRREGKSTREAIRCLKTYLARRVWRLLQPPHPAEQNPLSPSIP

SEQ ID NO: 287047 - protein, 399 aa, unidentified
MNYFGIDISKRPSVIAHYQDDIFQKEFTIQNNKNGYNQLLNYLNEMDQFQFVFEATGIYSRGMVKFCRVNQIDFIEMNPLEARFKTSSLRAWKTDESDAHKLALLAPYLKASTSLDSNPDIFFELRERARFHVEIENDQNRLKIMIIELLHQTFPGLEKLFENRYSKIALNIIEEYAHPDLVSQKDIESLTSSIMEYTNKNLSYQKAQNYAERLNKIAQESYPNVKHSSFLVKKVRLLIQQLKSSIQQLSQLDKEMIELAQQLECFEVMHSIPGIGKLTVAMIIGELGDLTKFKTNKQLNAYVGIDIKRYQSGKTQYRDTINRRGNKKARRLLFLVVMNIIRGQRNYNNHIVDYYYKLRKQPNEKSHKTAVVACINRLLKTLHYLVNESKLYDYQMSPH

SEQ ID NO: 287048 - protein, 417 aa, unidentified
MPTGDYDFFVGVDWGSERHQVCVLDPARQVHGERAVEHSGPGLAALADWLVAVAPGAPARIAVALEMPRGAIVDTLLARGLHVFSINPKQLDRFRDRHSVAGAKDDRRDAFVAADALRTDRWAFRRLEPDHPLILQLRECTRLDQEMQQELTRLANRLRDQLLRFYPALLRLAPAADDPWLWALLALAPTPAAGAHVPRARLTRLLQSHRIRRLSAEDVRAALRAPALPVTPGTVEAAARHVAVLLPRLHLIHAQRAQGTRHLDTLLAAYLAEAPAAGPPRAHHDVAILQSLPGVGRLVVATLLAEAAPLLAARAYPALRAQAGIAPVTRQSGKHRSVLMRYGCNHRLQQAVYHWARVSAQCDAHSRAHYTALRQRGHSHPRAVRGVADRLLALLIAMLKSDTLYDAARPRKRELAA

SEQ ID NO: 287049 - protein, 341 aa, unidentified
MDKELYFGVDVSKKTLDLAYYDGETIDWKNAHIQVSNDDAGFKKIGSWVAKVGKDFDTLLFCMEYTGLYNQNFRLWLESKEYIYGMVEPRKMHHFEPDLDDDQRSLDRIKTDELDAFRIAIYCEQNHKKILRNPSKLPSPVYFKLKRLLAERKQNTKQSVLYKQQLHDICAYDTDLSVERKKLLLKNMKENQKAIDKEIDSYMNEDASISKNFNLLTSIPGIGRIIALETIVLTENFTAINNPRKYACYIGIAPFKKESGTSVRKKTGVSKKGFSEAKADLSIAVLSAIRNNPSIRDYWIRKRKEKCGGIVLNAIKFKLVLRMFAVIKRGTPYVETDAYKN

SEQ ID NO: 287050 - protein, 336 aa, unidentified
MRYIGVDLHTTQITVCYLKADEEVEIRKYQLVEMDKFVSTLELTDEIAVEATCNTRWFSEQVKEAVGRVVLVNPRAFEVVKSSVKKTDKNDAINLARFLRADLLPEVRAKKEEAEKVQSLVNTRSKLVRLKTSLINKIHALFVANGRKLKKTSLSSEKGMGKVLLATWSEIERTELEIIIEQIGSLKASIKKLDKAIEEEAAKLKGYENLVSISGIGSLSAGILLSVIGNVEDFEKADKLASYFGIVPRVSNSNETVKTGRITKLGNKTGRTTLVQCSLSAIRKNEYLKKYYEQVKARRGHGKAKIALARKYLGIIYNTLTHNWVFADFNNFVLAE

SEQ ID NO: 287051 - protein, 332 aa, unidentified
MKTYATVSLSAVPVLGLDLAKDSFVAALRMDEQRQLMASFPNHKGGFRKLHTWLHQHFAGKVRAGMEATGIYGQALAAWLYQKGHTVHVLNPARVAAYARSAGQRNKTDPADARIIAAFVATHSLPVWQPPAPAQLALQQLCRTRHQLAAQRQQISNQLHGAAPAVRPYFEHLLAAFDAELKRLEDALAAHLAAHPAQAEQVRRLATVPGIGIRTASVVLAELPPITPSSDPRTLCAWCGLTPTRHQSGPREGRTRLSRAGNTYLREALFMPALVAKRHNPLLRAFAERLARNGKDHGAILGAVAHKLLRILIGLLRHHHDFDPNWHSLHHA

SEQ ID NO: 287052 - protein, 323 aa, unidentified
MNKYNEIFGVDISKDVFDVYGSKSGHNQFKNAASGFMFFLKNLPKKSLVVMEATGYYHYSLAQFLFKQGVLVSVVNPLSVKRFIQMKLAKVKTDKSDAKAICEYGQINQVPLYSALSDVQSECLQLFRLLDSYLKKRTMTKNKLHGEDVLGIPSKHVYRSLKRNRKHLDTEIASIETKLLSLVKQDQQAQLTLLKSIPGLGVKTALFLIVITDGFTKFETAAQLCSYVGITPTIRQSGSSVRGRSSISKVGNKKLRNLLFLCSFSACKHNKSCREIYERIVNKGKSKKLALIAVSNKLLKQAFAIAKSGNPYDETFVSVLMAK

SEQ ID NO: 287053 - protein, 332 aa, unidentified
MSAVFCGLDVHKESTYATILDSTGQVVTQRRMRNEDIPEFLEPLKVDRVAMEASTYIIPMYRKLTEQGYDVTVSHPKKTRYIAEARIKSDRVDSKALAELLRLDSLPESYIPPEELADLRERIRRRAFLVRQRTKLKVKIRDILAYEGVKPPTGHGLFTRKGVEWLRNLGLEPVDCYLRLMGPLSREVLLLSKELRGMARDDPEVQLLMTIPGVGYYIALLIKAEIGDVGRFSSCDHLASYAGLVPSTRSSGGVERHGRITREGSRWLRWAMVEAAMVHVRQDSPVTRFYHRVAERRGRKPALVAAARKLVTVCYSVLVNRRPYYNPLHAQA

SEQ ID NO: 287054 - protein, 466 aa, unidentified
MFLPPTINCDIRESEIRKAGERTSSWVKNPDFSVFPASRSPDKLIGSKRTLVTVEVWLGGMSCLISEGGARMYSLLVGIDVSKDFFATAGINSEGKESFTKSHSMDSQGFGELLETIISQCEDLSKVIVAMESTGCYHINLFSFLTSQGIRTMVVNPLLISNFAKLSLRKTKTDKKDALTIARFLLDHHEEISQLSLSQDHQDLRDLSRERESLCHLISATKVEIKRVLRTIFPELESIGNLYTGVMLRFLQQYPSARLVRGTKHKAITKALRGPYVGNKLTFTSEDIVKAAQSSVAVVSPAKEIIVQGKIATLVHLQERLEELTKLLTDLCKATRVEDLTILQSIKGVGPNTAVPFLAEVGEVKNFASSKKLIAFAGLDPSIHQSGKSLGVSKLSKRGNRHLRRAIYLMTTSVVSQNVFFKAYFLRRKKEGLPPQKALFAVAHKLIRVIFAMLSQRTCFNPKEAI

SEQ ID NO: 287055 - protein, 395 aa, unidentified
MFIVGIDIAKRSHEAIIIAEDGQVVRKAFSFRNNCTGYNLLLEQVRRLTLVKSQIVFAMESTAHYWPALYARLLKDGYAVMVLNPIQSHSLRELYIRKAKTDARDSLIIADLVRFGRCKASNVPQDKILALRELCRSRAYRVDMAADLKRKLIALLDRIFPEYESLFDSVFSKASIAVLSKYSTPQKVKNANLRKLTDILMESSNGHFGEWKAHQLKEAACSSFGIDDSGGVYSTLLGMFLEQILSLTAQADSLEKQISVFFQEFNNPLTSIPGVGTVLAATILSEIGDITRFSSADKLLAYAGLDPSVKQSGEFKSNQNRMSKRGSPYLRRAIWLASTVAVHRDPMFQTYYEKKISEGLHYMNVIGHVSRKMTAVIFAVLRDGQPYQPILQSAG

SEQ ID NO: 287056 - protein, 325 aa, unidentified
MATLSLGIDVSKDHLDVAVLGAERPHYGRFPNTPDGYDRLLDWLRGLGGATVHACLEATGHYGEPLAQYLYDHDLPVSVVNPARIRAYAQSTLRRFKTDRGDAELIALYGQKECPSRWTPPPENVRELQALMRHREDLLSMRQQERNRLQSGVSSVRVRGDLEKHLAFLDEQIRQLDKDIAAHIDGDSDLRRQRELLLSIPGIGPTTAAVLLGEVRDLTGFDSARQLAAYAGLVPQPWESGTSVRRKPRLSKTGNARLRKALYLPAVVARTRNPLMRQLSERMAQTGHCPMAIIGAIMRKLLHLAYGVLKTGKPFDPNHACTVSA

SEQ ID NO: 287057 - protein, 425 aa, unidentified
MSYKIAGIDIHKRMVAVVVADVAGEGEYQFERHKFGSGGEQLRLLAEWLVANQIEEVVMESTAQYWKPVWGALERDWQPVSRARGAGAKSGSLLLAQAKSNRAPRGRKNDFADAERLLKRLVANELVLSFVPDTEQRLWRTVSRQKLQLTRARVRLQNQLEALLEQGHLKLSSLVSDLLGVSARRMLQALADGEIDAGRLAALAHCRLRATSEQLCDALGAATKLSPVYRRLLQMLLDELKLQERHMEQLDQELSVLLTAHHSAIQRLAEVPGLGVDSPQQILAKVGANAAAFPSAKNLASWVGVCPGEEQSAEVSKSARSPKGNRNLRRLLNQAAHAAVKTKGSVFEWVFGRLRTRLAYQEAIWAIAHRLCRLIWKILHQGVHYEEHGPAVSIKSKRNRTTRMIRELRKLGYRVEPLGAFATNM

SEQ ID NO: 287058 - protein, 373 aa, unidentified
MENGITYVGVDAHKKDLVVAMLVGDQTTPVTWQVVNEPHAVRRFVRKLEREAPGPVRMCYEAGPGGYALQRQVTTPRVRCQVIAPALIPRKPGEHIKTNRRDARQLAGLLRAGLLTEVRPPTLEEEAVRDLCRARDDAREDRQRCRHRLGKLLLRRGLHYPGRNWTRAHRQWIARLAWTQPAERAVVEDYSVALDQVEARLAELDARLTEMAQTEPYRERVGWLRCFRGIDTLTAILLLAELHDFRRFQTPRALMAYVGLVPGEHSTGEKHRRGPITRAGNALVRRLLVETAWQYRHRPGIGIALARRRTGQPPRIIAIADKAQARLCRRFRRLADQHKPAPKIVVAIARELVGFLWAALQPVAVPATPPPAA

SEQ ID NO: 287059 - protein, 356 aa, unidentified
MSQKLNAAIAVIGIDIGKNSFHIVGHDHRGAIVLRQKWSRGQVEARLANLPPCLIGMEACVGAHHLSRKLQMLGHDARLMPAKYVRPYSKGQKNDFRDAEAIAEAVQRPTMKFVATKTADQLDLQALHRVRDRLVGQRTGVINQIRAFLLERGIAVRQGLRSLRSELPGILATRTDVLSPRMLRIIEGLAGDWRRLDERIEGLSSEIETLARQDKACERLMTVPGIGPIISSAMVAAIGTGDVFSKGRDFGAWLGLVPKQISTGDRTILGKISRRGNRYLRSLFVQAAWVVLVKIGPKHWDRYGLKSWIEAARKRLHHNVLAIALANKLARIAWAVLNKGRAFECVKTEETASRPA

SEQ ID NO: 287060 - protein, 423 aa, unidentified
MKKRIYRAVDVKALNLDEFRKVVKNQKIVLGVDVAKEDFVAALMNEKREVLFTIKWKHPIETGVLLDVMLHKLPWSSLDVAMEPSGTYGDALRALFLGNGIKVYRVSPKRCHDAAEVYDGVPSLHDPKAAAIIGRLHLDGASEEWPLPEKAQRELRAAIKTIELYDDAYYRNINRLESLLARHWPEVTQHLKLTSATLLELLITFGGPDRVAAEPEKAAKLMRRVGQSNLLIEKIDKVVESAQQSMGVPCIEEERRHLIELCSETRSLQQKARTAQDRVERLAQDIESVDAMIGVIGKKTAAVLHSELGDVSRYDNAGSYVKSMGLNLKEHSSGKHKGKLKITKRGSGTVRMYLFMAVLRLIQKNFIVQAWYQNKVDRDGGTKMKAIVAVMRKLARALWYVGQGKRFDAAKLFDVKRLGLASV

SEQ ID NO: 287061 - protein, 366 aa, unidentified
MQKISTMQACESKNFQPGQLTVGLDLGDRWSFYCVLDESGKVILEQKLATTPEATKQTFAKIPPSRIAMETGTHSPWVSRLLAELGHEVIVAHAQKVDLITRSTRKDDRHDAKALARLVRIDPELLGPVRHRSAKAQIHLTVIRARAELVRVRTALVNAARGSVKSYGERLPKRGTQQVSCKLGAGLSPELREVLEPLFQEIESLNERIKEYDRRIERIAQQEYPESELLQQVKGVGELIALTYVLTIEEPHRFRKSRDVGCFLGLQPGRRNSGESEPQMHISKAGDEYLRTLLVQGAHYILGPFGEDSDLRRWGHKLAERGGKNAKKRAVVAVARKLAVLLHRLWVSGEVYEPLRNSQKAVSTAA

SEQ ID NO: 287062 - protein, 369 aa, unidentified
MADRITYVGLDVHKESIVVAVASGGLRGEVREYGRIANTATALDRLLRKLGDAGMVLRFCYEAGPCGYGIQRHVSARGHECVVVAPSLIPKRAGDRVKTDRRDAASLAKLHRAGELTAVWVPDPQHEAMRDLVRARLDAVHSLRRARQQLSGFLLRQGCHYGRPAWTKLHRRWLSGLIFEQAIHHIVLEDYIAAVEAAEARRDRLTAQIGTMLPDWTLAPVVAALQTMRGMAMVNAATLIAELGDLSRFADPRQLMAYLGLTPSEYSSGSSVRRGGITKAGNGAARRLLIEAAWSYRFPARLSRELLLRQESQPKPIRDIAWKGQVRLCARYRRLARTGKPANVVTTAIARELTGFVWAIARQVTVTPG

SEQ ID NO: 287063 - protein, 331 aa, unidentified
MYDHYIALDWAQSNMAIARMTKELSAVKGVNVASSLKELQIYLSRLKGKKILTFEETSTSQWLYVELKDYVDEILVCDPYRNHLLSDGPKTDELDAVKLVQLLKGDFLKPVFHSADEFIYLRKLISGYDDVIKAGVRLKNQRAALFRAQGKDKSQKNLMQKPESFVLEGVERGIEAYESEKTRYEREMERQCRKHLVIRNLDRIFGIGVIGAVKIAARVVDARRFEDKGKWLSYCGLVRQEKISGGRSYGWRGSRYCRTLKGVFKTAALSVITSMSGNCFNNYYKFLLEKKHYSEHNARHAVARKIATIAWAVMKSGKPFDPEKMNKGFQN

SEQ ID NO: 287064 - protein, 365 aa, unidentified
MLSVSHLAPIHLGLDVHKDTISVGILDPDQQVPDVERITHDEASVRRLLARFPDRARLRACYEAGPTGFELARLLHRMDVRCEVIAPSLIPKAPGDKVKTDRRDCRRLARLHRAGELVAVRIPTPAEEAVRDLCRTRSDMVEDLTRARNRLGKFLLRHGRPWRGGSTRTKVYQTWLRAQRFDQPAMTQTFEHYLAVVEVRNQALDAVEADLVGWCARPPFDWQVARLAAYRGITRLGALTLAAEVGDWRRFAHASQFMGFCGLVPSEYSSGNRVHRGRLTKAGNAHLRAQLVESAWSYQHRPGVGVQIARRQQGLPPEVVARAWAAQQRLSGRFRTLAARKHTKSIVAAAIARELAGFLWAEMTA

SEQ ID NO: 287065 - protein, 407 aa, unidentified
MLHAIDLHKSVVQIASMCTDGKHVQQQARLQACERALRGYLAQWPGVHHRIVAEATGSWYWLDDFCRAYGAELTLAHPWKLRAITGAKVKTDPADALTLLTMFRLDLIPPAHKISPELRELRDLMRLRLRLVGKRTSCMNSIARLLEKYNRTAVDELPELAQLQVRFHREQIAGIEGQIRHLERTLHRRVIPNADVQRLLRIPGIGRINALTIYLEIDSIARFPHVRNFFSYCRLVPGAHNSAASTRSKRSRAGNRYLKLAFSHAGVRAVAAYPEIRDAYRKRLRKKNQPLAQAWVRKELARIVYHVLSQQSDFSGIFCGQPLRKLKKPQWPLRASPSQQLARQDRDSAIDWEARCGTRISIWPASQPEATARLSARAAAALMVCGRHCHGGYSRVPADAVTPLLER

SEQ ID NO: 287066 - protein, 367 aa, unidentified
MKEQENKRNKITIGLDLGDRRHRFCVLGEKGEVLEEGSVGNNRAALSELGGRYPEALVVMEAGCHSPWVSRHLEQAGCEVVVSNPRKTRAIYQHERKSDRRDALMLARIARMEPALLYPVRHGSEEAQQDLLRIKLRDSLVRARVALINSLRFTLKSLGYSIANPSTERFHKVIQSALPQSVAQVIAPSVQALEELTLRIKLLQREISDQARSKYPDTAWLEQIPGVGPITALYFVLKIEDPARFKRARDVGAFLGLCPRRDQSGENDPQLRISKRGDAYLRRLLVSSAQYILGPFAPPTALRQYGLALASGATARAKKRAVAAVARKLAVLLLTLWKNKSSYEAFPQRSSKEKMRTNDLERLRCIA

SEQ ID NO: 287067 - protein, 467 aa, unidentified
MAARKQNQRRMSAQVAGDEDYQLRYEVVAGIDVAKESAVVCVRMPPAEGKKHRTSHLQAVPATVPAITELAAELKAAGVQMVSMEATSDYWRVWFAVLEEAGLAVQLVSSSQARNLPGRPKTDKEDARWIARLTEMGMLRSSFVPPPEIRALRVYTRHIWDLTADRTRYWQRLEKLLEDAPCKLSAVVSGLAGHQTARAVIEAMIAGERNPRVLAALGQGRMRNEKLPALAGALSGMRFGPQHAHAAASLLRAIDLLDAEIRELQERVTEHLAAIPASWGADADGVTGPDAGRAGGAAALPAAERLDEIPGLGREAAAALIAEIGLDMSRFPTPQALVSWAGLTPTARQSGPRKGRGKKGRGNTYAKRIAVLAAYAAANTGTFPGERFRRLAARPGGGGRKKAGCAAGRSILIIVWHLLNDRAARYQDLGPGWHARHTDRSRKARNARRQLEALGYDVIITLREDAA

SEQ ID NO: 287068 - protein, 310 aa, unidentified
MKEELVYVGVDIAKRYLDAAMGNEKRRFSNDARGHRELIKWVKQLSAPPVQVICESSGGYERALVQALARARVKISLVQANRVRQFARAAGILAKTDRIDAEVLCEFGKVMRPQTVTAAKLEQEQLRELESQRRHLTHLLVMEQNRAAHLSAASVQRLNRRLINQIKKQIDQLDLFIKRHIDQSHELSAKAAKLTSISGVGARTAALLLAQLPELGELNRREVAALVGVAPFNRDSGRMRGKRTIYGGRRPVRHGLYMAALVAAHHNPILRNFYLRLRAAGKPAKLALTATMRKLLIVLNSALKTDLNYA

SEQ ID NO: 287069 - protein, 359 aa, unidentified
MASRSLSHWDNIVEESNNGFDIWVGVDVHKNSYSVAILSANGVIHSYRTSSDNQALLQQFRDRGIKITVLVYEAGLTGFGLARACQQAGVEVMVVSANKIPRAPLRGAKTDSIDCMNLALLAAKGMLRPIAIPSVEQELKRAQVRRRMQLAKSIRVVKLRIKSLFICHGIAEPTGLKYWGKQGREQLTTMPMPELLRDLLDSHLGELNFLEQEKAGLENKIKQLMLPAEDVLQTVPGIGPIISAAFRAEVFSPERFANAGQVSSFLGLSPCLHQSGESKGHARLMAAGQANLRSLLIEACWILKKREKWASDFYQRIVKRSGCFQRAITGLARKLCILLWRLLLTNCAYQSNYQGAVAV

SEQ ID NO: 287070 - protein, 408 aa, unidentified
MEIFCGIDWAERHHDIAVVDQTGRLLGRRRISDDLAGFSDLTALLVEHAGEQGEQVTGVPVAIETDRGLLVAALRAVGHPVYAINPKAVDRYRDRHAVSGAKSDPADALVLAHLLRTDRHAHRPLPADTEQAQVVRVLARAHQDAIWARRQDANRLRSLLREFFPAALTAFPDLTTRTALTVLAAAPTPAAAAALTRANLTGLLHAAGRGTRPADAARLADIFAAADQLRQSTEVETAMGAAARAIVRTLAAANQSVHELELALADHFEQHPDAEILDSLPGLGLVLGARVLGEYGDDPTRWPDAASRRNYAGTAPITRASGRSRIVLARHIRNKRLADACYLWAFTALTKSPGARAYYDTRRAAGDTHNAALRRLASKLLGQLHHCLTHRQPYDEHHAWPPATPAAA

SEQ ID NO: 287071 - protein, 318 aa, unidentified
MESAAIFVGIDVAQARLDIAVRPTGEQWTSPHDEAGITALVTRLQELGPSLVVLEATGGRELALAGALAAAQVPTAIVNPRQVRDFAKAVGQLAKTDALDAQLLARFAEAIRPEPRALPDAQAQELAALLTRRRQVIAMLTAERQRLSTTLPTVRPRVQQHVQWLREELRALDAELAERIRTSPLWREHEALLRTVPGVGPVLALTLLAHLPELGTLDRKPIAALVGLAPLPADSGTRRGRRVVWGGRAQVRATLYMSTLVAVKHNPVLRRFYEHLLAAGKPKKLALVACMHKLLLILNALLRQRTPWQPPPSSAATP

SEQ ID NO: 287072 - protein, 386 aa, unidentified
MDLPVILLAQTQKYQTYHIQGGVIRASIIYVGMNVHTTNFTFCCYTADSDRGFAVAQTEPDYRQVIKYMERVQKQRGEECKFVCGYEAGCLGYSLYHQLTRCGVDCVILAPSTMHQEKGKRIKTDRRDAENIARCLAFSLYSPVYVPTTEEDAVKEYIRMRDDIKADLKRVKQQIIAFTTRHGFAFDGKSYWTQKHLKWLETLVFEHPLYKETLQEYLILYYMLDEKVAVYDTRIEEMSHLEHYEENVQKLCCFRGVAAHTALSLLVEVGDFQRFRSAKHFAAYLGLVPGEHSSSDKQIRTSITKAGNTHLRRLLVEAAQSYNRGAIGKKVQRSRPDRAAILPRSSLTRIKPMNACNANITASHLSPGTILPKPQLRANWPVLSGV

SEQ ID NO: 287073 - protein, 315 aa, unidentified
MKSVAGIDVSKATLDVRFQDKSLSFANDPAGHKKLAHWIKGAELVVMEATGAYHFAVACALHQANLPVAVVNPARPCYYAKSLGKRNKTDKVDAKTLVEFGRTHELDLFVPPTQEEQSLCQYVRLRTDLVDQRAQVKNRLKEPVISELESTTLKAQIKFFNSQISSVEKEIEKLVKSSSVLTRNVELLTGIPGIGKVSAWILLAELKDVKRFESAKKVAAFAGVCPALRQSGTSLSGPGTLSRQGNRTVRKCLYMAALAAMRQEGVFREFFLRLVTKGKNKKSALVAVMHKLIRTAFGVLKKDCPFNPKWALKTK

SEQ ID NO: 287074 - protein, 355 aa, unidentified
MNSEKYIGLDVHQATISVAVLDSTGKLVMESILETKAATILEFFAGLRGTLSVTFEEGTWAAWLYDLLKPHVAKLVVCNPRKNALLKDGNKSDRIDAHKLAELLYLNKLSSVYHGETGVRMLRELARSYLTIAKDLTRVMCRLKAVYRSWAIPCAGRDVYYTRHRAEWLGKIKEAGVRRRAERLYQQLDMLQYLRQQARRELLAESRKHAITVKLRQIPSLGPIRSALAVALIPTPHRFRTKRQLWAYSGLALETRTSAEYCYVKGGLRRSKKQISIRGLNKDHNHDLKGLFKGAATRASVLPGPFQDFYQRSLAKGIKPTMARLTLARKIAAITLTLWKKGENFDADKLKSQAA

SEQ ID NO: 287075 - protein, 388 aa, unidentified
MQIVAERPQASNAIRTNLGAIFISLELSRSTWLITSLSPGCGEKMSKHSVRGGDVHGLLERFAQLQNKALTRTGTRFPFIVIQEAGLDGFWIHRMLQKESIESHVVDPASIATSRRRRRAKTDRIDGEALIRVLLAYKRGEPRVCAMVKPPTPEEEDRRRLCRERKVLTAERVCHVNRIKGLLFCQGVSNYEPLRRDRWARLDEIRTGDGRALPDHLRAQIARELDRIELLIEQIKVIETARDALLAAKETAAPTAAAMLLDIKGVGSEFAAVLWSEGLFRHFDNRRQVAAYAGLAPTPWQSGSVAREQGVSKSGNPRLRTTLIQLAWLWLRHQPKSALTLWFEERVSRNGGRMRKTMIVALARKLLVALWKYVTAGVVIEGAVMKAA

SEQ ID NO: 287076 - protein, 376 aa, unidentified
MEHNSEAFIGIDTSKLKNAVAIAEGGRDGEVRYLGEIDTTDGATRKLVAKLAAKYRKVTFCYEAGPTGYGLYRLIKSLGHECSVVAPSLVPKKPGDHVKTNRRDAVGLARNLRAGELNEVWVPDTRHEAMRDLSRAREAAVDDLKSKRQQILSLLLRLGLHYSGKKTWGKSHRNWLASLKLGQREQRIVLEELFGAERQAQERVDRLVDAIIEAVPEWSLAKIVTALMAVRGIDLVAAVTIMAELGDLSRFASPRELMGFLGLVPSESSTGDSVKRGGITKAGNRRARRILVEASWSYRYPPRIGRDKLAKVAAAPEPVRAIAWKAQTRLSSRFRELSKKGKRPTIVATAVARELCGFIWAIHHAVTGPGGQQLVF

SEQ ID NO: 287077 - protein, 335 aa, unidentified
MKHYAGLDLSMESTQVCIVDESGRKLVSEKVESSPEAISKFLERYGPVERAVIETGRMSPAICLGLRELGVPVVCIDARQAHQSLKAMKANKTDPHDAAGLAQLARTGFYKEVHVKSPAAHGVRSVITARGHLVEARVRLDNMIRGLCATFGYRSGPGQGKAFIERIMQAAHIPGLGEAIASLLTVRGELVEQIKEMDRRLRIIANQSQACEILMTIPGVGVQTSAAFAAAVDEAGRFRQSRNAGAYFGLVPRRHQSGEIDWTGRITKQGDGTVRKLLYEAANSILTRSRESFALKTWALKIAKRRGLKKARVALARRLAVIMHAMLRDGTLFQA

SEQ ID NO: 287078 - protein, 404 aa, unidentified
MNAIGIDVSKGKSTVAVLRPYGEVVVSPFDVAHTGSDLRALADLIKKLPGETKVVMEATGNYFESIARYLHEQNIFVSVVNPVLISDFGGNTLRKPKTDKKDSVKIASYALTYWLDLKEYTPQEDLRKSLKLLNRQYQQSIKLKTMMNNNLISLLDLTFPGINKLFTSPSRESDGHEKWVDFVLEFSHCDMISKLTIKAFAKKYKKWSDQNSYHFTESSCEKIYAFAKDCVSSVSSDKAIVFSVVQAAKMLISATENCHAIQSEMNRVASKLPEYDTVMNMYGVGKAVGPQLMAEIGDPRRFHSRKAITAYFGYDSENNDSGQKTTRSNPMTKKGSGALRRTLFIIMQVLLQTKPQDNPVYDFLIKKKSEGKHYYSYINAAANKFLRIYYARVKEVLNVSEQMT

SEQ ID NO: 287079 - protein, 355 aa, unidentified
MSSIKYIGMDVHTATISVAVLDVAGKLIMESVIETKASTILQLIQGLRGDLHVTFEEGTWAAWLYDLLKLYVTKIVVCDPRRNALLKEGNKSDRIDARKLAELLRANLLRSVYHGEKSLRTVKELVRGYLTFGKDLTRVMNRVKAIFRSWGIPCGGKSVYNPRHRDEWLSKIAEVGVRRRAELYYQQLDALVFLRQQARRKLLAESRKYRAWKLLRSIPALGPIRVALLMGIVQTPHRFRSKRPLWKYSGFGVLTHTSADHRYVEGQLERSKKPVSVRGLDPNHNHHLKDLFKGAAIQASTREGPFREFYKTLVAKGMRPEMARLTLARKIAAITLTVWRKGVAFDAKYLKPQTA

SEQ ID NO: 287080 - protein, 408 aa, unidentified
MAVSGLPFILDRGCGLDVHKDTVVATIKGSDFDTETKTFLTFTDDLYNLVEWLQAHSITQVAMESTGVYWRPVYAVLEDYFHILLVNARHIKNVPGQKTDKKDSEWITKLLLSGLLKGSFIPPQHIRELRELFRHRRKLIAMRTAEKNRLQNILESANIKLRSVVSDVFGVSAMEMVRAMAKGQLDPLLLASMAKGSLVKKHAELLKALTGKITDHHRFMLNLILQSIDHINLQIAQSEAQMEQYARIMHKELELLESIPGVSSRVALGIVSEIGTDMAQFATHQNLSSWAGVCPGNNESAGKKYSSKITRGNKYLKTTLVEAAWVASRSKANPLLAVKHHQIAARRGQKKATIAIAHKILIAAYHVLRDDEAYQLHPQDKKILENRRLKRIDRLQKQLSTLKNTSYK

SEQ ID NO: 287081 - protein, 318 aa, unidentified
MTHTTQTTALYVGIDVSQNTLTIALYPTDEVWTIDNTSQHHTALVQHLAQLPVQRVLLESSGGYEKAVVSALQQAGLPVVVVPAQRARYFAKSMRGDLKTDRADARMLAYFACCYPVQPVAPCSPVQAELKELWARREQLVQQVEREKKRLHTVQSEAVRASLERMLAVLKDEIAQIEARVEALMASDAALAQKAALLQTAVGVGRVVAYGLVAELPELGQVSHRAIAALAGLAPVRCESGAWVGRARVRGGRPRVRRLLYQAAVVAATHDGRWRAVYEALVGRGKAKKVALCAVARQLLVVLNAMVRDGRAYERVQE

SEQ ID NO: 287082 - protein, 339 aa, unidentified
MTVKTIGLDLAKDVFQVHGISENGRVIFNKAIKRAKLLAFFEALPPCRVGMEACGSSHHWGRTLRQLGHDVRLMPANYVKPYVKRGKTDAADAEAICEAVRRPTMRFVEIKTEDQQALLSIHRTRDLAVRQRTQMANVIRSLLREFGHILPIGVEAVTAFAKRHLDGDHPDMPDIANGMLGMQCYQFIGLNERIAGYSKMIEQHALLNADARRLMRMPGVGPITASAIIATIGDAQQFKTGRDFAAWLGLTPLNKSSGGKERLGKITKKGDRYIRKLLVVGMTSRAVMAKRSPEKVDLWTAKIIADKPFRLATTAMANKSARIIWAMLTKKQEYRQPAF

SEQ ID NO: 287083 - protein, 353 aa, unidentified
MNNRKYIGMDVHQASISIAVSDAAGKVLMECIIETKAATVLEFIQGLRGSLWVTFEEGTSAAWLYDLLKPHVTKVVVCDPRKNALLKAGNKNDRVDARKLGELLRAELLTPVYHGESGVRTLRELSRGYLAVSKDLTRVMNRLKAIYRSWAIPCAGQQVYSPRHRAAWLEKLREAGVRRRAEQTYQQLDFLMEIRKETRKELLAESRKHPARKLLEQIPRLGPIRVALLIALLQTPHRFRTKRQLWNYCGLGLRTRSSGEYRYTGGQLQHARKPPALRGLNVNHNHDLKHLFKSAATQAGNDPLGAFYQNLLAGGMEPPMARLTLARKIAAIALKIWKKGERFDPAKLKQQAA

SEQ ID NO: 287084 - protein, 315 aa, unidentified
MDVFLERCAGLDVHQASVVCCVLIGAPGRKPQKLLRSFGTTTRDLETLRAWLAEHGVTHVGMESTGVYWKPVYAVLEGHVDLTVGNAHHIKNVPGRKTDVKDAEWIAQLVRHGLVAKSFVPPPAICDLREMVRHRRTLIETRTAVRNRMLKLLEGANIKLSGVASDVFGVSGMAMLEALAAGTNNASEMAGLARGRMRRKHAALEAALEGRMREHQCFLLGMQLRTLRTIDQDLEALDARIGAQLEPFQAQHRLLMQIPGVDWVTAAFIIAEIGIDMDVFATARRLAAWAGVAPGNYESAGIVSRRRASVMLYER

SEQ ID NO: 287085 - protein, 308 aa, unidentified
MIVQNYVGCDISKQRLDFFDEASGRCQRIANQGDAIEAYVAGLCADRDFVVMEATGIHDRLLRHALAKAGVAFSRHNPAHTHHYAKSTTQRAKTDRLDARMLSDYGRRYQPAPEPAPCEKGEHLQSLARHRDHLVEIRARLKRYLSEAFDADVVDDLQDVIADFDTRIDALESRIVKTIRQAEDTALDYALMVSVPGVSTITALSLLAHMPELGQRSPKSIAALAGLAPFDNESGKLKHRSKITGGRPRVRRALYMAALGAIRANDRFKAFYVALAARSGSKKLAIVAVARKLLVTLNAIIRDKTAFA

SEQ ID NO: 287086 - protein, 413 aa, unidentified
MQDLLEICCGLDIHKESIVACLLTGATDVKPTSEIRTFSTMAPGLLELKSWLHEYGCRHVAMESTGIYWVPVYETLEDESFPMHLLVVNARHMKNVPGKKTDMRDSEWIATLLRAGLLRSSFIPEKRIRELRHLTRYRKSIVHDVTAQKNRIEKFLQGAGFRLSVFLSDTFGASGRNVMRHLIAWGSVDLQGLDRCLKTQTRRKIDDILVSVNGTMSAHQQQFLAMSLDHLELLEAHLHQIEQAIEQETQKFEAAMNILTSIPGIHTTAAASLLAEIGTDMCCFPTSEHLSSWAGMSPGNNESAGKRKSASTNHGNPYVKSMLCEIAWVVAGKRKTYLSKWYWKLKQRKGAKKAIIALGRKLLVMIYAMLKHGTFYDEDCFEQRRKQLENKRVSRMLSELHRLGYQLSFSAAQ

SEQ ID NO: 287087 - protein, 331 aa, unidentified
MDIKEVIGIDVGKLKNEARIHTNQKVLEFDNTPAGMKKMEKWVMNCTSCQKQQIMFAFEHTGLYSYPLSMFLTENQYPYIVIPGLELKRSMGIARGKDDKIDAKRIALYAYEKREKLRPFEMPTDEIVQIKRLLSLRAKLVKQCAGYKGALGEYRRFLNKKDNKMLFDVHEKMIEELTKQIKNVEKQLGDIIKNNGQLKQMYGLITSIKGVGPQTALSMIAFTNGFTLFKNWRKFASYCGIAPFPNTSGISIRGKTKVSNLANKKIKTLLDLCAKTSIQHNQEMKLYYEKRLNEGKSKMGTINIVRNKLLSRIFAVVRRSTPYVNTFGYAA

SEQ ID NO: 287088 - protein, 331 aa, unidentified
MDEVKRFVGIDVAKAALDVFIGSVGAAFSVTNDEVGIRELLGQLKPADFVILEATGGLETPVASALATGGIAVAIVNPRQVRDFARATGRLAKTDRLDAEVLARFGEAVRPEARPLANEQAQALEALVTRRRQLVEMLTAEKNRRASAPKVLHRSIDEHIRWLEKRLSGFDDELAELIRETPLWCERDELLRSVPGVGKVLSSTLLAHLPELGALNRKQIAALAGLAPFNRDSGSLHGSRCIWGGRAQVRRVLYMATVAGVRSNPVIKNFYTQLRARGKYPKSALTACMRKLLVILNAMLHNKTHWQTPALTSSTSAVSAFLGAVPEHGCC

SEQ ID NO: 287089 - protein, 357 aa, unidentified
MQGVTTIGLDIAKSVFQVHGVDAHGKVVVRRQLKRRYVLAFFKKLSPCLVGIEACATSHHWSRELQALGHTVRLMPPAYVKPYLKRQKNDAADAEAICEAVARPNMRFVATKTAEQQSCLMLHRTRHLFVRQQNAVINCIRAHLAELGIVAPVGRNGVEELLDVVADPDDDRVPEVARECLASLGAQLRMLKAQILEFDRRIMAWHRSNETSKRLDEIPGVGPALATALVASVADPRAFRSGRDFSAWIGLVPKQNSSGGKEKLGNITKRGDRYLRSLFTAGALAVIRYAKTHGTKHRPWLTALLARRPTKVAAIALANKIARVAWAMMAKGERYKEPVALASKFSVSTGDDAEAHH

SEQ ID NO: 287090 - protein, 447 aa, unidentified
MSNGRGLSRGDNRRNARLGRLRQVLPREHAVLALDLADDKQVFALTDHDSQILARRTVKCRPWHLAEAIAWGQQQALAAGFAGVTLACEPTGHRWKVVDRLAAAAGIELVCVQPLLVARAREAEDFTRDKSDDKDAQLIARLATQLHVYFPEQADATWARLRHLGARRVEKVTRLGAARQQLRDLLECAWPAALDAAGKPLDSMTWRAAMSVARCDPDRIHRLGRARLARAVAKELPRWGGQRVCHRILDALYEAAADPRGVPAQRLGGLERARFALADLLHAQNSRDQVETLMVQVLDELELTDLVTTIDGLSAVGAAAILAETGDLTRFDSARALVKHAGLCPRENASGTYAGKTTISGRGRPLLRVASWRAVWGALPHNEVLAARHAHLTSREHNRLTDAQARVAVAGSLLRQLFVVVTTRTPWDAEIASGQHRSRSEVDAPAA

SEQ ID NO: 287091 - protein, 334 aa, unidentified
MKSGIVHIGVDVSKEKLDVFVPAQKEGMRPTTKGVDNCVAGFREIRDIARKARATVCVEPTGGYELELIAFLHKFEVPVAYADALRVRQFARAEGSLSKNDTIDAALISRFADKIGVRVLAPQEVEAVELKRKAKFRQTMVDSRTAMANRLETETDPEMKALLKEQIRHMDKVIGKAERLCLDTVKKDERMNALLERFAKVGGVGDMTAMSILAGLPEIGNLTDAKLNRLVGIAPEEKQSGTKEWQRRIWGGRKDVRNALYMACLASIQWNAVLGGYYRKKRAEGHPHKWAIVPTMRKLLSLLNRIARDPDFIPSPEPESTKRNATAGRKRKAA

SEQ ID NO: 287092 - protein, 342 aa, unidentified
MNDVTIGVDLAKSVFQVNGATRMGEVLFRKRLPRGQFLRFMAGHPPAVVVLEACGGAHHWARELAMQGHEVKLIAPQYVRPFVKRQKNDAADAEAIVVAAQRPEMRFVEPKSPDQQARAILFRARERLVHQRTELVNALRAMLYEFGQIVPVGIANVRRLEALAQDADLGLPHLVREECRDLLAQIAEKSARIETKAKTIADLARQSDVARRLQTMPGVGPMTALAVEAFAPAMTTFRCGRDFAAWLGLVPRQFSSGGKDRLGRVSKAGQVDIRRLLIIGAMARVSWAGRRPPGSGSWLGRMLARKPRMLVAIALANKMARRIWAMLTKQEDYRDPVLAAAA

SEQ ID NO: 287093 - protein, 446 aa, unidentified
MKEKNKAFPILYPDAAGIDISSKEHYVAVNPANEKPVRSFGSFTEDLHAIAAWLKGCRVNTVAMEATGIYWVSLFLVLEEAGLEVILVNAKHVKNVRGKKTDMSDAEWIRQLHSCGLLSASFQPDASARTLRAYMRHRKNLVEMSATHIRMMQKAMEQMNIKLQHVIADITGKSGQAILRAILDGERNAENLLELIDGRIKASRDDIRKSLQGVWKEEHLFELGQSFEMYHLYRTKIAECDSRIKKAIEQKAGPEKKGDGNPARQYARSNRNNLNFNAKEILQQITGTDLTEIFGINDSTAVEILSETGFDMDKWPTAKHFTAWLNLAPNNKISGGKLLSSKIPRKKNRAGQAFKMAAFAVQRSKNWLAVFYHRIKSKGGAKKAVTATARKIAVIFYRMLKDKVMFNPLSIENYTEAHKERQLKKLEKQAKQLGMCLNPICNARDH

SEQ ID NO: 287094 - protein, 312 aa, unidentified
MTQTTIGVDISKDSLEVHRLPDGKSRRYRNDRTGHRALLKWVRKTPVERVVYEATGPYHRAFELALGTAGLPLVKVNPRQARRFAEAVGTLAKTDRIDAAMLARMGALLEPEPRPLQDPDLNELKDLQRAHRALIKDRTAARNRAKQLGLPLLKRHNAERLAQIDAQLKAIEAAMHARIDRNDALKERFAILLSIPGISAITAFALLIDMPELGTIDARQAASLAGLAPVTRQSGTWMGRAFIRGGRAPLRQALYMPALVAARFNPDMKAKYRTLIEAGKPPKVAITAIMRKLVILANALLRNHRKWQPDIP

SEQ ID NO: 287095 - protein, 415 aa, unidentified
MNAAGIDVSSRKSTVAVLRPFGEVVHLPFDVAHSTEGLASLAERLKALDGETRVVMEHTGHYYEPVAKALHEAGLYVSAVNPLLIKEYGANSLRRVKTDKADAVKIARYALDNWTDLRDYTPMDTIRYDLKTLNRQFQLASKQRTACSNNLIALLEQSFPGIRKCFDSPVRSDGTQKWVDFAHTFWHVDCVRKQSCNAFSERYRKWCKRHGYFFKQSNAEEVYALAKNAVVLVAKSGVTKILVQEAANQLTSTSRSVETYRTEMERLASMLPEYPVVMKMYGVGKSFGPQLMAEIGDVRRFERKQSLVAFAGIDPMPNQSGDKNVRSNKSSKRGSPYLRKTLFNVMGIYLKCAPQDEPVFQFLDRKRSEGKPFYVYMTAASNKFLRRYYAKVRDYLATLEDLPPVELDSTGLQRS

SEQ ID NO: 287096 - protein, 404 aa, unidentified
MNAIGIDVSKGKSTVAVLRPYGEVVVSPFDVAHTGSDLRALADLIKKLPGETKVVMEATGNYFESIARYLHEQNIFVSVVNPVLISDFGGNTLRKPKTDKKDSVKIASYALTYWLDLKEYTPQEDLRKSLKLLNRQYQQSIKLKTMMNNNLISLLDLTFPGINKLFTSPSRESDGHEKWVDFVLEFSHCDMISKLTIKAFAKKYKKWSDKNSYHFTKSSREKIYAFAKDCVSSVSSDKAIVFSVVQAAKMLISATENCHAIQSEMNRVASKLPEYDTVMNMYGVGKAVGPQLMAEIGDPRRFHSRKAITAYFGYDSENNDSGQKTTRSNPMTKKGSGVLRRTLFIIMQVLLQTKPQDNPVYDFLIKKKSEGKHYYSYINAAANKFLRIYYARVKEVLNVSEQMT

SEQ ID NO: 287097 - protein, 400 aa, unidentified
MLSIGIDVSKGKSTVCGMKPGGEIVYAPFEVQHTREGMLELVSLLRSSGEEVRAVLESTGSYHCPVVAALLENGIFVSVVNSLRMKRFCSQSIRKVKTDRIDAMQIALYGLAYWQELQPARLPEDTYRELQLLARQYYQMTSILIKAKVDFNAICDQVLPGMQELMNDHAGRHKLSDFVLRYRHTTHILEMGETRFRKDYCKWAEKKGYRNCERMAVLIFATAQNGIPVLPNAPSTQIVITEAIRVLHTVEASRDAILTQMQALAKTLPEYSLVREMPCIGDTLAPRLIAEIGDVRRFHSKRALIAYAGIDAPPYQSGKFRANNRHISKRGNRYLRKTGYEVMQSYVMHKPANDPIFTFIEKKRGEGKSGKLAMVAGLNKFLRVYYGKVTELYRSLSAIE

SEQ ID NO: 287098 - protein, 430 aa, unidentified
MNTTTQNKKIEAITEKTLVVGIDVGSETHYARAFDWRGVEYSKKPFRFSNDEYGFEEFKAWMQQFKDAHGKDKVVPGMEPTGHYWFNLGKFLQDNEIKPVLVNPHHVKKSKELDDNNPTKNDRKDPKVIAGLINEGRYMIPYLPEGVYAELRTASNLRFQLQSELTRIQNRLSRWFSIYFPEYKTVYGKPYAVSGMMILKQAPLPEDIKALGVEGINQIWRDAKLRGVGRNRAKTLVSAAEHSVGSKEGAKAARIEIQMLFEDYESRNNRLQEVMKLIEELLLQIPMAEKMMAIKGVGIKTVSGFLAEVGDITRFNNPKELQKLAGLALSENSSGKYKGKTTINRRGRKRLRYLLFEVAMSLVSKNPEFSALHHYYTTRTLNPLKKMQSLMAVACKLIRVFYAMLTKGVDYDPTKMISDIRRPAVYMQAA

SEQ ID NO: 287099 - protein, 334 aa, unidentified
MIAVGVDTHKHWHVAVALDVVGQVVGEVVVAASTAGYHELVVWLDGLDDQVVVGIEGAGSYGAGLCQHLLDAGITVVEVERPRRRDRRTGKSDSIDALLAAKRVLAGDGVSTPRSAGTHAALRVVLVAYRSCVEERTRLLNQLQGLHVRAPATLRERIGHGNGARLADRLARMRDRPGAQLHEQTMLTILRDLARRARALDAQASHYRRQITALVRELHPTLMDEPGVGPISAAKLLVLDPARFHSEAAFARSNGTAPQPASSGQTIRHRLSRGGDRQANNAIHTIAMNRAINHAESRAYLERKITAGKTRREAMRALKRQISRRIYRQLTEPT

SEQ ID NO: 287100 - protein, 339 aa, unidentified
MMIIGCDYHPSFQQIAFVDTGTGECGERKLSHKLEAENFYRGLHGQQVRIGMEATGHARWFERLLAELHHELWIGDPGEIRSKRVRKQKTDRQDGELLLQLLVENRFPRIWVPSAENRDLRQLLWHRHRLVQMRTRVKNQLQAIALNEGLRRQKGLWSKLGRAQLEALQLAPWSAGRRQDLLELLDRLNPRIDELSASIQQAAEQRPEAQRLMSHPGVGPITALAFVLILGVPDRFRCGKQVGSYLGLIPCEQSSGGRQRLGHISKQGNSLLRFLLIESAHAVVRYEPDWRRRFLHLAMRRGRAIAKVAMARKLAVRLYWMWRRGWDYQQISKFGAHVE

SEQ ID NO: 287101 - protein, 341 aa, unidentified
MARYYVGLDVHWLHTAVCVLDSRGKRVKRQTIRGPWSRVVEELKTLGGKISVCFEASTAYGHLHEILSQVADRVVVAHPGQLRLIFRSKQKNDRADAEKLAKLLFLGEVPPVYVPSKDVRAWRGLVEYRRRLIAKRTRAKNALRAILRSAGLRPPREFGLWARQGLAWLKQVELPGLTALQRDLLLEELEVFARQVTRADKELEHYSQDHPAVALLRTIPGVGVRTAEAVVAYLDAPQRFRSSKSVGSYFGLVPSQDQSSSMNRLGHITRQGPAAVRQLVAEAAWHAVRLSPTIRRFFERIQQGNPERKKIALVATSHYLVRVMHAMLRDNRTWEETALAA

SEQ ID NO: 287102 - protein, 340 aa, unidentified
MPLYGGIDLHANNSVVVLLNEQDQVVYQKRLPNDLPTILEVLAPHHAEIKGLVVESTYNWYWLVDGLMEAGYRVHLANPAAMQQYSGLKYSDDHSDARWLAHMLRLGVLPEGYIYPKAARAVRDLLRKRAHWVRQHTANVLSVQNIMVRNTGVRLSVKRIRELPKKELEGLLPEADQVLAITSSLAILDCLSQQIKALEKIVHQRLHHTPSYEQLLTVNGIGTILAQTITLETGDINRFPTVGNYASYCRCVDSNKISNGKRKGQGNVKNGNPYLGWAYMEAAQFALRFNPSAQRFYQRKLAKSNNNTTLARKAVAHKLSRACYYVMRDLVPFEATKAFG

SEQ ID NO: 287103 - protein, 400 aa, unidentified
MLSIGIDVSKGKSTVCGMKPGGEIVYAPFEVQHTREGMLELVSLLRSSGEEVRAVLESTGSYHCPVVAALLENGIFVSVVNSLRMKRFCSQSIRKVKTDQIDAMQIALYGLAYWQELQPTKLPEDTYRELQLLARQYYQMTSLLIKAKVDFNAICDQVLPGMQELMSDHAGRHKLSDFVLRYRHTAHILEMGETRFRKDYCKWAEKKGYRNHERMAALIFATAQNGIPVLPNAPSTQIVITEAIRVLHTVEASRDAILTQMQALAKTLPEYSLVREMPCIGDTLAPRLIAEIGDVRRFHSKRALIAYAGIDAPPYQSGKFRANNRHISKRGNRYLRKTGYEVMQSYVMHKPANDPIFTFIEKKRSEGKCGKLAMVAGLNKFLRVYYGKVTELYRSLPAIE

SEQ ID NO: 287104 - protein, 408 aa, unidentified
MRVVGLDIHRVFAEAVMLENGAVRRLGRISMTRDHLTAFAKTLTHDDHVVVEATGNASAVAEVIRPHVGRVVIANPRQVRLIAEARIKTDVIDATVLARLYASGFLPEVWIPDEATLALRRQVTRRTQIVRQRTRLKTMVQSILHSHLVPPCPHADLFGPRGRTWLLAQPLPGDESDAVARHLREYDRLSEDVKVVERELAREARANANVTRLMTIPGIDLVVAVGLIAAIGPVARFAGPDRLVAYLGLNPNVHQSGSGKPRHGRITKQGRSHARTMLVEAAWQAVRGPGPLRAFFQRVSARRGPHVAAVAVARKLAVIIWHLLTRGEDYAWVRPALHAKKLRELELRSGEPARRGQRGTAYAYNLTRVRQEERRRVEQAEVAYRHLTEGWSRRGRRVPTGAAKEERL

SEQ ID NO: 287105 - protein, 456 aa, unidentified
MWEGSITSVQRRKDHETDPCVGGRGCGVQRHRVAIGVPGEALACEFDLDHTPEGFATFFRQVEAHTAGGVLPVAVAMEGWGGHARPLDQQVLARGWRPFNVNNLKLARYKEIFPGPAKSDPIDTRRMLELFALREALPLAKDVLGEVAGVPEAHAQLKRLTRRRRVLVNEKVRAVNRMRSDLHAVCPGLAEITGAVDNRWFLRLLTCREDLTKLARLQRSSLLKIRGIGVKYAGLIRAWQARAQFAAEVAYVGPMIVADARRILELLAQIDALEATCAQIAEGSELAGRIDSIPGFGPITSAELAGEIGTLERFPTEASLALYVGMACLSQQSGQHSRGRAPRQVNRRAKAALMIALARHIEQVPQSKADSRPQTDGRQAAQPGPPRPRPSPDPRPLGHGPTPPRLRSPEPCPATRRGPRPCSESQPCRLKIPAGCSVLPESGAARYRRWPKGEPG

SEQ ID NO: 287106 - protein, 347 aa, unidentified
MNSSHDDPQWVGMDLHRRRSVLVRMAPDGAPLGNPVRFSNDPVRLKREIAKAGPGAKVVLEATLGWYWAADALAEAGAEVHLAHPLGVKAFSYRRVKNDERDAQDLADLLRLGRLPEAWLAPPETRELREMVRGRHKLVSQRTSCRNQIHGVLGKLGIAVPMSDLFGAGGTEFLDKLPVPDGYGARLRALNSVMSELKKQIAGLDKQIAHRLRDDAGYRAIQRIDGVGPVLAAVFVAELGDVTRFPGPKHVCSWAGITPRHHESDLKVTRGHITKQGSKLVRWAVVEAVQRVPAGTWIRAHKDRIEARRGTEARNIATVAAARKLLTLVYYGLRDGEVRCLTRTDTR

SEQ ID NO: 287107 - protein, 403 aa, unidentified
MNSVGIDISKGRSTVAVMRPFGEVVISPFEVRHTDSELSALARQLKSLNGETRVVMEATGNYHAPVAKLLHDAGLYVSVVNAKLVHGYGNNDLRRVKTDRKDAVKLANYGLDRWLTLPRYVPEEDTRLLLKNCYRQYRQYSKVQTVLKNNLISLLDTVFPNVNRLFNSPVRADGSEKWVDFVAEFWHCECICERSEKAFVSKYQKWCKKHGYNFGEEKACAIYAEASGHIGVMPKSETTKLLVEQAVSQLRATSAALAALKHEMQSLASMLPEYPVVMDMFGVGPTLGPQLIAEIGDVRRFYSKKALVAYAGLDAPPNDSGDVTGRHKSMSKVGASSLRRTLFLVMSIYLQNAPLDEPVYQFMDRKRAEGKPYRVYMMASANKFLRIYYATVKAYLESLEHTA

SEQ ID NO: 287108 - protein, 401 aa, unidentified
MTTMQDNAQRVKRFREVKATLRTEHHRLLVGIDVAQAEHVVQVRHAHTRIVGPTLTIPNTTRGFTQLWARIQQAQRATGCREVVCGLEPTGTYHQAVATFLDAQGATVVLISSSVAYWNRRTQDGTWDKHDRKDAANCADLLEQGKILFYSQPEGPLAELRPLVKCLRRARAELASCKARWRTTLRPALGPMGEPLPNRLRVELPAVLQAWEAVAPGRSAQPKGRLPLGLATACADLGAQVTAVQARIRAIEAACTPLAERLPAYTLLRTIPGVGPTVGAILLAEIGDVAWFTQFSQLRKLAGLDIVRVQSGQFAGQARISKCGRGLLRWALYQAALGQARTAAGRARLAALKAKRQGDRYAGFKATVELAAKVLRVVWGVWRSGTPYDPRRMGGLQRQPR

SEQ ID NO: 287109 - protein, 381 aa, unidentified
MTVISATTSNEQSIYAALELRKNSWLLAIQDPCRDNPSLHPLLGGDAEGLMAKLDAARDRVAKATGQPPAVTLCYEAGYDGFWLARFLEQRGITCQVMEPASLRVNRRARRVKTDRIDVENILHTLIAWCRGERHVCSMLVIPSVEEEDLRRCHRERDRLIRERTAHTNRIKGLLFGQGIRGINVKSRYKTLKPSELVTGDGRPLPDRLGREITREIERLAQVQAQIVSVERERDHPVTSCAATEIKRHDLLRLKGLGPALSSTLTREVYYRRFTNRRQVASYIGIAPSAYDSGDGHRSQGISKAGNRLARVAMVEAAWLWLRHQPDSALSQWFHDRTQGQKGRIRRIMIVALARKLAIALWRYLETGLIPEGAILKSRVR

SEQ ID NO: 287110 - protein, 400 aa, unidentified
MRTVFGIDVSKASSEVAILVNGEKIHGYTMLNDAIGFNRLLNDLKTVHNPEIIFEATGVYSRRLRAFLEEYGYAYTQLNPLEAKKQLDCLRVRKTDKIDAEKLAHSQFILNRKPTYAQEEVYQHLRDLSRFYQNLTEDIVRAKNRLHKVLQVTFPELENLLSTPTGEQYWNLVMAFPCKEFVLSLSQSNLCEIIRQSTSKRISEKRIAYLTDKLIKLAKQSFCAVKKNSPMLEEVRYYAQELLRLSERRQVVLNDMVALAQPLPEYDILRSIPGIAETTATSIIGELGDIRRFQSTNQINAFIGIDLRHYESGNFLAKEHITKRGNPYARKILFKCIHNIASASHTNPCHIADFYEKRKRQSTIASTKPHTIASIHRLIRTMYYLITHNKLYDYSLTQNR

SEQ ID NO: 287111 - protein, 372 aa, unidentified
MNYNTVYVGMDVHKESFTLCSCKYEDEKASHYQRTPASYKNVLRYLAFLRTIYGEDTRFVCGYEAGCLGYSLYHQLENFNVECVILAPTTMLEQRSKRRIKTDKRDAEIIARSLAQHNYSPVHIPTETDNQTKEFIRMRDDHKAELKKIKQQILSFCLRQGYQYDGSGNWTAKHVKWLRSLKPAGLYKEILDEYLLTYTILTDKLNRLDQRIEELASKEEYKESVSKLTCFLGIKTHTALSVIVEVGDFQRFVSARKFAGYLGLVTGQHSSGDDRNGLGITKAGNTHVRRLLVESAQSYTRGKIGYKSRVLRSRQAGNSPQVINYADRANERLRRRYYKMVLKDGKKYNIAKTAIARELACFIWGMMTDNIY

SEQ ID NO: 287112 - protein, 336 aa, unidentified
MGKMYVGIDIAKDRSSACGIEEGGRSLFELTFTMDGAGFAELLKTIEANGGTIGNVVAAMESTACYHINLYSFLSAKGIEAVIINPLLIANYAKLSLRRTKTDKKDAKTIARFILAHKDSVTQLAISQEMQDMRDMARERESLCHQTSAAKVEIQRVLQTTFPELAAMTNPLTKVMLHFIQRFPSARLVSIAKPSAIEKTLKEKPCSCRLRFTPKELIEAARTSIATVSPAKELILSGKIETLVHLQKRRDELTKALTKYCESTIVEDLRIVTSISGINNTMATALLAEIGQIGNYLSHKHLIAFAGIDPTVYQSGKYEGTSRISKRGNRHLRRVI

SEQ ID NO: 287113 - protein, 359 aa, unidentified
MLGSRPIKGINAIQLLTRKNKFMQKLFTAFVGIDVSKHKLDVCLLHTAEKQGSCHVFDNNTKGIKTMINWLGKLSAATKQEYLFCLEYTGIYTMPLCCYLSEQDYMFAIVPALEIARSIGIRRGKTDKADARAIAKYAQIRSKDIQLYQLPEKKLIKLKTLLTHRNRMVKVRKVFYVSMTEPAGFIDKHITIEVNRQSKQLVANLDKKIKQTEKQIAELIAYDQQMKKIYDLLISIPGVGPHIAAHLIVYTRCFTVFENSRKFACYAGIAPFEHRSGISIRGRSRVSHLANKRMKALLNLAALTARKTDGQISQYYDRKLKEGKNPMLILNNIRNKLVARIFATIKRQTPFVFTMQHAA

SEQ ID NO: 287114 - protein, 369 aa, unidentified
MNKLAKFVGLDVHKDSIAVAVAEGGPLEAPRSLGRIAHDLPRLLKLLARLGEPKDLHVAYEAGPTGYGLCRALREHGMQCMVIAPSKVPVRSGDRVKTDRRDAEKLARYLRSGELVAVAVPDRSSEALRDFLRLREDTVWALQKARQQLAGFLLRHGRHFEGRTRWTDAHFRWIRAQRFEIEAQRRVLEHYLAEVLRERERLDQLTGELVELIESLPQSALFRNLQALRGVSTIVAATVVAELGDLRRFARASQLMSYVGLTPSERSSGNDVRRGRITKAGNSHVRRVLVEAAWSQRLRPAKSLHLLRRWKAVPLEIQDIAWKAQLRLSQRYRRMLARGKSVQHTIVAIARELTGFIWAIGQQAPRKAA

SEQ ID NO: 287115 - protein, 337 aa, unidentified
MKYCGIDLHSNNSVVIVSDEEDRIVFSKRLANDLRQIGAALEPHREDLTGVVIESTYNWYWLVDGLMATGYQVHLAHPSAIKKYEGLKHSGDFADAAYLAQLLRLGLLAEGYIYPREERGARDLARKRMQLVRYRTAQILSIEGILMRQTGARMKGEAVKRLTAEQVDAFAFAPDVSLAVEANRAVSQTLSQQIEALEKRLKQRVILRPEYHLLKTVPGIGDVLATTIMLETGTINRFTQVGNFSSYCRCVDSLKESNGKRKGEGNTKNGNKYLAWAFVEAANFALRCCPQAKRFYDRKKSKTNRVLALKALAHKLARACYHMLRDQKPFDVHLCFG

SEQ ID NO: 287116 - protein, 389 aa, unidentified
MRTKVKVTRIGLDGHKTFGSATGRGADGGIVWRERLDYRDRGKLREQLARWPKGTPVVLEATFGYGWQCDELAGAGLEPHLANCRKVAGWRKARGLPKSNRIDADLLSELLGEKSRWWEVWLAPPEVRDQREWLRYRMALVMIQTGLKNRIHAVLHRHGIVWEGSDLFGVKGRRFLSLLVVPNDATLSESAQATLKGYLQLLDHVRRQVAKVTWQFRKQLRKLSTGDRLRTLPGISWILAYTIVAEVGRIDRFKSARHLASYSLLAPRADDSGEPDEGDPKGRHLGRAGRRTLKWAWIEAAHGAARRGRFREIYDRVTDGNKRNRNRGYIVVAHELCRIAYVLWKKDVDYREDRPVRPGRRSEVQDSRPGTGQPDPAMVAAVHGRLQAS

SEQ ID NO: 287117 - protein, 335 aa, unidentified
MSLKLLAIDLGKRSFHCHGIDSDGVIFSRKVSRSKLIETIKELAPETVAMEACASAHFWGRNFLADGHQVLLINPRFVKPFVKGSKNDAADAEGIYEAALRPTMRFVPVKSTEQQDLQSLHRARERVVCARTALINHMRGLLGEYGVILPQGAWRFLTQAADAIATAELSDLTRGLFDDLLEELRALDLRLDKLDGQLLGICRTNEACKRLSKLPGVGPVIATAFVAAVDDGHHFRSGRELAAWIGLVPRQYTTGGKPRLGGIGRRANHYLRRQMIHGARAVMFRLAKHDDRRSQWLKGLAARRGFNRAIVALANKTARIAWAVLTRKEDYLAAA

SEQ ID NO: 287118 - protein, 359 aa, unidentified
MHEDKEIILVADYHAENIEFRWFNQATGEERTGKFPTSQAGILHLIDQATQELEPGGQVVWIMESTTGWARVKDLIGPRAKFLLANVLQMPLPPKARRRKTDKIDTGRIMREYLHGSLPLSFQPEVWWRRVRRVVDLRQDLVERQTAIKNWIGSLLHHETWQNRKNLWSDCGLRRLRAMRLPAEDRMLVDLKLAQLEQLEQELVQVEAQMRQIYDAWPEAQWVDEVRGIGMVTSVSLLAHIGPIGRFPTAEDLISYAGLAPGMWQSDGTCHHGRIGGGGTDSHLRYLLIEATMWLRQIPRYRPTYERVVKKRGKKIARIVVARLLLRSLHKMLTERVRFNPMRRPTATAKETATAGCSK

SEQ ID NO: 287119 - protein, 341 aa, unidentified
MEHIAIDLGGRESQVCVRSADGTIIEEKRWPTRELGDYLATRPVSRVVLETCAEGFFVADQATKHGHETRVVPGTLVRSLGVGERRMKSDKRDARKLSEVSCRVDLPSVHVPSSESRELKTLLGMRDALVGARTMLINTVRGWLRAEAIPIRKSAEAFVHRVREAMGRELPPHVERQLQTIDVLTEQIDQADRQVAERAKKHSTCPRLMSVPGIGPVTALHFVAVIDDATRFKTAHDVEAYLGLTPGQDSSSLRQRTTGITKAGSTPLRRCLVQAAWAARRARGHHPMVNWSLQVEKRRGKRIAIVAFARKLAGILFALWRDGTLYNPKEGAHLVVTAPAA

SEQ ID NO: 287120 - protein, 312 aa, unidentified
MASLYLGLDVAKASVEFASEPAGLGGQFTTDPSGLAALVTQCQAQPVTLIVLEATGGYAAPVAAALASAGLPVAVVNPRQVRDFARALGRLAKTDRIDAQVLALFGARLQPAPRPLPDAATQELEAVLLRRRQLLEMLHAERQRLPRAHGREVRRNLRAHIRWLERSLVDTDATLATLIQASPLWRVQDQLLQSVPGVGPALARSLLALLPELGHLDRRQIAALVGVAPLAQDSGMQRGRRHCWGGRPALRTVLYMGALVAARWNPVLRPFYQRLRAKGKPAKVALIAVARKLLTILNAMMRDQRAWQTAHA

SEQ ID NO: 287121 - protein, 392 aa, unidentified
MFFVGINIGKNNHVASMMDDSGKVVFKAFSFPNTSDGGHALFSKLTSYSSSTDDFEIGMEATGHYWLSVYSFLFEKKFLLHVINPIQTDGWRRGTEIRKRKNDIIDSVLIADLIRYGQFVETRLADEDLFSLRTLTRFRTYLVESISNLKRKVVCVLDQVFPEYQSIFSDIFGKTSKEILLQFSSPIDFESVSSQTLAELLAKLSRKQVGPAKAAQLKAAASCSFGVTFAKSSFTFQLKALIEQIAFIEKQVKETETEIAGIMEKLESPITTITGIGNVTGAAIISEIGDISKFDSPRKLVAFAGLDATVTQSGEFEAAHNVMSKRGSPYLRKAIFQAALVAAFKDPVLSAYYQKKRAEGKHHLTCIGAVARKMCNIIYAVVKNNQPYVPKA

SEQ ID NO: 287122 - protein, 329 aa, unidentified
MEKPLNVFTGVDISKDKFDFYFKTIEGKVLKGKVSNDTKGFKEFLLKLPQNTWVVMEASGPYYYQLASFLFEKGIKVSVINPLVIKRFIQMQLKRTKTDSADAQSIAAYGSLMDMKPWEPLKECYLQIKQWYAYQKQLLKHQHAILMKMESFIAAGPVDVLIRKSMEEELIRIEENIKEADKHLNELIERENGELRKQLESVPGIGPKTSLLLIVALRGLDNFENYRQVISYLGLSPRIYESGTSVKGRAKICKMGMTEVRKCLYMAARSAKRYNQTCKDLYLRLRAKGKAHRVAMIAVVNKLIKQAFAIAKSGIKYDKNYTSINPIAK

SEQ ID NO: 287123 - protein, 355 aa, unidentified
MDSVKYIGMDVHKESISIAVMNGAGKIVMECVIETKASMILQFIDGLRGNLHLTFEEGTSAAWLYDLLKPHVTKLLVCDPRKNASMREGNQNDKIDARRLAELLRLNHLSPVYHGEHGLRSLKELVRSYLTITKDLVRVMTRVKAIYRSWAIPCTGKQVYAPRHRAEWLGKISEPGVRRRAEFYYQQLDALRTVRQEVRRELLAEGKKHQAWKRLCQIPSIGPIRSAVLLGILQTPHRFRTKRQLWTYSGFGIETQSSADHRSVDGQLHRVKKQSSIRGLNRNCNHDLKNLFKGAAIVASSKPGPFQEFYTALLTKGIRPEMARLTLARKIATIVLIVWKRGACFDAQHLQPQTA

SEQ ID NO: 287124 - protein, 347 aa, unidentified
MANGSKTEAQVFVGIDVSARELSVAVRGGTEDREALTTFGNNAGGHKALLAYLLRGNGRARVCLEASGNYSLDLALTLHAQRQVEVSVVNPRRARRFAESLGERSKTDPVDAGVLCEYAMRMRWVPWVPPNLVALRLRALTRAIEDLGVMQTQEKNRQHALTISRALPALLIRELQKHQRYLQLRITRLRQEALRLIARDPELDRRFRVMLTTPGIGETSALQILGELAVLPDTLDARQWVAFAGLDPCRFTSGTSVEKKPRISRGGSRHLRRALYMPALVAMRREPYLRAFYQRLLARGKAPLQAVVAVMRKLLHAFFAMFHSDQPYDGSKLCPVKFAPDTVALCA

SEQ ID NO: 287125 - protein, 317 aa, unidentified
MTYTNRFIGIDISKSSFDICVLPDSSLASFSNDASGIAQFLAFVSRLDNVARLVLEPTGGYERSVVDALLAAQLPVARINAKQIRQFARACGQLSKTDRIDAFVLADYARRMETKVLTQASAAQTTLVDLVSRYRQLSHMIVQEKNRREKLRARNEDRAKAWIEETLDFLMRQRQSVVDAMEACLRSDKDLADKAQVLTSLKGIGLKTACFLIAWLPELGLLDKGQIAKLVGVAPVNRDSGLIRGKRMIAGGRKPVRDALYVAALPAIRFDPAMRAVFDRLKAKGKPGKVALVAVMRRMIIILNARMRDYRATVLDP

SEQ ID NO: 287126 - protein, 390 aa, unidentified
MSQVFAGIDVSKDSFNYCIIDESMSTLTSGSLQMNKKGFESFKEVIDGYPDSVVALESTGSYHINLVSFLVSFKKEVCLVNPVLIKKFAQSVTLRKTKTDIIDAFVIAHFILKNREHIPYLILDVTDEIRALARIREDMAKDIARAKTRLKGHLTVTFPELVSRFNPFTRTMLAILRSFPTVEDIQRAKVAEIKAVMDGIPGRDTYISPESLKDLAFDSIGKGSPRYRMIILHDVEMLLFLMGKLEEITKVFTDEIEMTKKKEIDIIKSIKGIGDITASHFMAEIGDIGRFESKGSLIAYAGTDPSITYSGISIKRNGRISKRGSKSLRRCLYLMASGVMKFNRYFREYYLKKRQEGMQHRKAMIALCNKLLRVIYALLKKREYFCCPVH

SEQ ID NO: 287127 - protein, 370 aa, unidentified
MPIVNLQNSAEFKDQKFFIGMDVHKKSWAITIRSLGFQIARFTMPPSVETLVLHMKKNYPEGKYYSAYEAGFCGTSIHEQLCQSGVENIIVNASDIPTTDKQRKNKTDLHDSRAIAEKLEKNEIHGIYVLTREQQELRSLFRLRQQKVIDVTRANNRLKGYLAFMAVEIPATLNTTEYLAKKALDWLSNLEMAIDAGTISLKICVDELRYQRTQLSQITKLLRQHITLHHAKSYQCLVTVPGIGPITAMALLAEIADFNRFKSPDEYCSYLGLMPWEESSGEVIKTKGMQPRCNRFLRPLLMEASWAAIRSNRDLFAYYSKHAKKDSKKAIVKVSRKVALTARGVVLKKQPYDPEYLKKKENLKQPIPVV

SEQ ID NO: 287128 - protein, 316 aa, unidentified
MAQDGREVFVGIDVGKARLDVHIRPLGQHFVVANDEVGLAELATRLEAHAPRLTVLEASGGYERLAAITLIDRGLPVAVVNPRQTRKFAAALGQLAKTDKIDAAMLAHFAEAIRPAARAVTNDALDRLQKLLARRRQLVVMRNAEKQRLGKATDPITQRSLKAMITSLDKQLGVIDKAIGRLIEADPALAEKLERLKTVPGIGDVSARTLLAELPELGLASRHEIAALSGVAPISRDSGRYRGRRKIQGGRVEVRAPLYMATLVAIRHNPVIRPFYRRLRDAGKPAKVALVACMRKLLTMLNAMLRDRRSWAPAEA

SEQ ID NO: 287129 - protein, 418 aa, unidentified
MEKQTLKEYEKMKVIHSKAAGIDVGSKSHFVAIGQQKNEVREFGCYTNELHELCRWLKEKSVNTVALESTGSYWQSLFVMLQDYGLNPILVNGKFTKNVRGRKTDVLDCQWIQKLHMLGLLEGSFIPDLFTETLRQYCRHRQTLLEDAAGYIKKMQKALRLTNIRLDVALRDMTGVSGKAMIEAILKGERDPEKLAALAHFNVRKSREEIALALTGDWREEHLFELKQSYEVYNYFHEKISECDQEIEKLLNKKVEDNEKQDGEARLEYKGKKKKNNKNDPKIDLQKLSFQLTGGIDLSSIEGIGRSSLMTILSETGIDLSAFPTAKHFASWLRLSPNNKISGGKVLSHRTNKGKSRLADALRHAANVIGNSVKKGSLHQFFNRIAYKKGQLTAITATARKLTIIIWNMLLRSKVTSR

SEQ ID NO: 287130 - protein, 340 aa, unidentified
MEKASMIGLDIAKNVFEVHGRNAAGEVVLRRSLKRGQVEKFFAKLAKAVIGLEACGSAHHWARVLSRLGHEVRLMPPAYVKPYVKRNKSDAIDAAACWEAMGRPDMRFVQIKTVEQQAALSLHRSRELLVRQRTQLGNALRSLLSEFGIVAAKGREGLARLVEELRAGTLVLPQEATFAALTLADQRAALDLAANDLERRIIAQAKADERTAMLQTAPGVGPFSAHAVLATMPDPAIFKSGRDFAAWLGLTPRLDGTGGKTRTGHITKQGDQTLRRLLVLGATAWLRQAQAHPEKASPWLRGMMARRPKKVVAVAQAARTARILWAMLTHNQPYRAPAIG

SEQ ID NO: 287131 - protein, 391 aa, unidentified
MYIVGIDCSKYKHDCFIATETGEVIRDTFTFDNSGTGFAQFFSILETLKCPKNQIKVGFESTSHYMVPLMKHLSVKGYEFILLNPVIVSRFRRSTTLRRIKTDKIDAKSIAQVLASSDYESYHMQVYHFPELKSLTRLRDRLVKQRSYYLVMLTNVLDEVFPEFKEFFDDSLKSKTAFYLLDTYKIPSRMANMNSNSFDNLKKVSYGHFSYAKFVKLKELAKNTIGSSSEADELEISSLLNIYKTINDEICRVESKIEEIMTIIDSPTVSIPGVGLMSAASIIAEFGDLSRFANADKMLAYAGLDCGRSQSGTTDYKGKMVKHGSSYLRQALMNVVETMMIHAPVFYDFYHKKRDEGKAHRVALSHLARKLVRLIYKLETSHTRFDLNNSK

SEQ ID NO: 287132 - protein, 348 aa, unidentified
MHYVGLDVHKKTISYCLRQADGTIVQEGTIGSTRQALTGLLERFPQPWVAGLEATLFSAWIYDHIRAQDGSVKVAHSMMLKAIAAGKRKNDSVDARKIADLLRCDYFPECHMATPEIRDRRRVLRFRNLLVRQAVRMKNKVSGLLMETGIEYNKGKLHQKKYFSQMLEEQKAQMPESLPELLQLSRTTIETLTRMDRQLLRVLEHDPLLAARVERLMTIPAVGTIVALTWALEIGDIRRFPSLKHVVSYCGLCGSERSSAGKQQRTPISKQRNKHLQTMLVEAAKLAPRWYPELALVYEREKQKGNRNQATLAVARKLTAYLLAVDRGERSFQAAAPQRERTDSSRAA

SEQ ID NO: 287133 - protein, 399 aa, unidentified
MTSMRANGDRIKRFRILKATLRTRRDRLLVGIDVAKVEDVAQIRLAHTRILEKTVMIPNTTAGFTAFWQRVHRHQRATGVTEIVVALEPTGTYHQALAQFLDAQGADVVLVDNHVAALHRRLLDRTWDKSDPKDAHNLCDLLEQGRVLFCALPDEPVATLRRLVRLLRRARVELGACKARWQNTLRPALGPAGEPLSATVITALPAPLRAFLPAAERNAARGRPRALPPGLAVEVTDLATCCTAVRGRIATLEAALVVATAPLPATAWLRSIPGLGPTLTAIVLADLGDIAWFTKFSQLRKLAGLDIIRVQSGQWAGTARISRCGRPLLRWALYQAALGACRTPAWRVKRAALLTKRQGDPHAFFKTTVELAAKLLRVIWGVWRSGRPYTAGRTGVPVA

SEQ ID NO: 287134 - protein, 308 aa, unidentified
MIAQNYVGCDISKQWLDFFDETSGRLRRIDNQADAIAAYVAGLDPSRDFVVMEATGVHDRLLRHALAKAGVPFSRHNPAHTHHYAKSARRRAKTDPLDARMLSDYGRRYNPEAEPAPREEVEQLQSLARYRDQLVEMRATAKKHLAEAFNEIVIADLEETIAYLDTRIKAIESQIADVIRQAEDTARDYTLMVSVPGVSKVGAFSLLALLPELGQRSPKAIAALVGLAPFDNKSGKLNRRSQIQGGRSRVRRALYMAALTAIRTCERFKTFYTALAARSGSKKLAIIAVARKLLVVLNAIMRDKTAFA

SEQ ID NO: 287135 - protein, 415 aa, unidentified
MKFEKDTSGIQRYVAFDIHKEYALVGGQNARQEWVMAPRRIGIEKFREWAAANLRAGDAVVLETTTNVWDIYDIVAPLVNYVVVAHAGGVRQIAEARVKTDKKDVERLIRLLIADIVPEVWVPPAHVRELRGMISYRNRLVKTSTMIRNRLQSLIHRHNLILPKGALTDQAWWDGQRISALEKIQIRQELAMLDEIAKHKAEVDGELGRQSLGETWNKQAVRLLQLSGFGVVLSMTVLSAIGDVSRFESAKKLVGYSGLGAGVHDSGKEHIEKRITKSGRKELRWALVEAAWRAIRISPYWKEQYEKYLRRMRKPNQAIVVIARKLLVAVWHVLTKEETDIHVSEEDLAYKMLVLAWDLNEDVRMGLTYKQFAKYALMKLGVETDITRFVRKNVARRVAPRAEVLARMEELGIPA

SEQ ID NO: 287136 - protein, 341 aa, unidentified
MQITTIGLDIAKNVFQVHGIDGDEKVVVRKQLRRNQVIGFFRDLPPCLVGLEACATSHYWARELARLGHEVRLMPAKDVKAYIKRNKNDAADAEAICEAVRRPTMRFVQIKSADQQAQLMQHRARDLLMQQRTQLINAMRSHLAELGIIAPQGREGVKELLAIIAHDDNRHLPVDARASLVVLAAQLQALQTMIGAIEKRIVKQHRASKDSKRIQTVPGIGEIGASAIAATVTNPRIFRSGRDFAAWIGLVPRQMSTGGKPKLGPISKQGDRYLRRLLVVGAISVLRQAKLHPGKFPWVTQMLARRPFKVVAVALANKMARTAWALMMSGKTCRAARYAAA

SEQ ID NO: 287137 - protein, 465 aa, unidentified
MADCTITFLFFEPQVTLLFHSKCKIMEKVTVFETIHELAAGIDIGAAKIFVSPDGVEVKSFGTFTSDYYECIEYLQEKGIQKVAMEATGIYWMALYAMLECCGLKVCLINPRETKQVKGRKTDVKDCRWIQKLFSAGILRSSFIPEGKYMEIRYLVRERLDIIDMGSNYINKMQKCLELMNIKLTEVISQIQGASGIKMIKAIIAGCRDKGYLLSLCDTRIQANKSEQILKALEGTYNDTFLFMLEENMKAWEYHQNKLTTIDKQIEKLLNELCKEKAQVKIESKPKAIRHHSPAINDFHQMMVQIHGVNISSISGFNDYTLLRLLGETGVDMSRFPNQKHFVSWCGLSPKNHQTGKTTKRVKGTSCNRAGQIFKECAQGLLNSKHIAIGTFMRKLKARKDTSIAIKAGARKLAEAYYNAITKGVVYVEKGVKKYEDQLKQKEVSLLKKLAKKHNLQISEIQCAA

SEQ ID NO: 287138 - protein, 314 aa, unidentified
MNTSNEINVGVDTGKSQLDIYIRPLDQAFSVANTAAGIRDAILQLKKVKPTRVVIEATGRLELPFVLQAQKAGLVVSVVNPLQMRRFASAAGQLAKTDHLDARIIAHYGEALRPIPTVLKPAKTRLISDLLARRSQLLDMATMEKNRLSILPKALHASLKRHLKQLQAEVKKIEALLDKHIEQESEWREKRDLLLSVNGVGKVLAYTLLSDLPELGRLNRKEIAALVGVAPMNKDSGNYKGKRRIRGGRANVRKVLFMAIMSAMQSNPKLKRQYTAMKEAGKPPKVAMVACMRKLITILNTMVKNGEHWNPELA

SEQ ID NO: 287139 - protein, 368 aa, unidentified
MIKQAIVHHEGAAAPAAAGTQISHQPAVIKLGLDIHTKTYVVVAQHDHAALRPPRRFAPGEFVPWVEGLLAQGHTVHVVYEACGFGFGLSRALQKAGAHCLVIAPRKLDEQRTGVKTDARDAATLCQRLSRYVDGNTRELAVIRVPSEEEEQQRHVHRQREALVRLRTRLQAQGRGLLVSHSQAAPPHWWRTQTWNRLGKVLPAWLLVRLEVLRPVLTVLDTQSAALSHELEAAAPPDLPRGLGKLTSVALTREVCDWTRFHNRRQVASYTGLCPGEHSSGNKRVQGSVTKHGNPRLRASLVELAWRLVRFQPSYPPVRARLGLLAKGARATGAQRKKAIVAVARHLAVDLWRLHTGQCSAQQLGFHN

SEQ ID NO: 287140 - protein, 348 aa, unidentified
MKHNAVVIGLDIAKNVFYAVGKAEHGNEVLKRKMSRNQVLEFFANHPVAKVGIEACATAHYWARELIKLGHEVKLIAGQHVSRRVVGNKNDYRDAKAICDLRSEPATLYVPINTEAQQDMQMVHRVRQRLVENRKALMLQIRSLLGEYGLSFPTGVTALRKGLRAVLGGEHNGLSSDALALFSEMQAQLTELDRWVSDYDGHIQKISRQKEAERLMEMPGFGPLNSTAFIAAVGDAHHFPSGRSLAANTGLTPHEHSSGGKQRLFGISKRGDCYLRTLVIHGARSALRCAEGKNDRMLQWALKLKEAKGFNVAAVALANKMVRIAWAMLAHGRRYEPQWNDSQGGMAR

SEQ ID NO: 287141 - protein, 338 aa, unidentified
MEQAHSQAEVILGVDTHLTLSIETNPSGYEQLLTWARSFGRLNRAGIEGTGSYGAGLTRFLERNGVAIVEINRPNRSRRRNRGKSDPTDAESAARAVLADDATGVPKAQSGMAEALRILSVARRSAVKAKTQAVNQLRALLVSAPSFIRDALLKVKPEHCVAACAALPDDDEKNPALGSLKTTLKLLARRWNALHDELRELDKQLARLTKLAAPRLLGRFGVGPQTAATLLVTAGDNPTRLRNEAALAALCGVSPLEASSGKTSRHRLNRGGQRQANNALWTIAMVRMRSDARTREYVARRTGEGLSKKEIHRCLKRYIVRELYPLILADLADSARPA

SEQ ID NO: 287142 - protein, 355 aa, unidentified
MTGEKYIGLDVHQATICVAVMDAKGKVVMDSILETKATTILEFLAGLRGTLSVTFEEGTWAAWLYDLLKPRVAHLVVCNPRKNALLKHGNKSDKIDARKLANLLRLNDLEPVYHGETSVRMLRELARSYLTIVKDVSRVMNRLKAIYRSWAIPCAGRDVYYTRHRSQWLEKIPEAGTRRRAEQLYQQLDLLQPLRQQARRELLAESRKHTITAKLRQIPSLGPIRSALAVALIQTPHRFRTKRQLWTYSGLGLETRDSGEYHYVQGQVQRRKKQVFIRGLNKDHNHDLKGLFKAAATRASVQPGPFQDFYQRSLAKGIQPTMARLTLARKIAAITLTLWKKGENFDAEKLKAQAA

SEQ ID NO: 287143 - protein, 422 aa, unidentified
MGAKQQAPFTAYVGIDWADSKHDVCIQPADVNAREFDVIVHRVEAIDQWAHDLHKRFGGLIAVALELSKGPIVSALQKYDFIVIYPIHPSTLAKYRETFTPSRAKDDPTDAELAVDLLLRHPERFKPLQPQSSGMRALATLVEHRRQLVGEKIRVTNRLRSALKQYYPQALDWFDHIDTLLFCDFITRWPTLIQAKRARATTLRKFFGEHNMHRHDVLDRRLESIKISVPLTLDEAIIVPYRLQALVLIRQLRLMLQSIKEFDEEIESIASKHPDYALFRALPGAGPSLAPRLLVAFGEQRDRFRSAADLQKYSGVAPVTERSGKKHWVHWRWQCSTFLRQTFVEWAGQTINKSYWAGLYYYQQREKGCSYQAAVRSLAFKWIRILYRCWQTGKVYDEAVYLKALERRGSPLLARQVVQESA

SEQ ID NO: 287144 - protein, 407 aa, unidentified
MGEVITIGLDIAKSVFQVHGVDAAGAVVIRKRVTRAKVLEFFAAARPCLIGIEACPTAHHWSRQLQALGHTVRLMPPNYVKAYRKRGKNDANDAAAICEAVTRPSMRFVPTKSEQQQSGLMLHRSRQLLVRQRTMLSNAIRGHMAELGIVAAKGRNGTAELIKIVANEEDVRIPATARFCLDALARQYAALAEEIGAIEKQIHAWHRSCEESRRLEDIPGVGPIVATALVAEVGDWKAFSSGRNLAAWIGLVPKPHSTGGRERLGGISKQGNRYLRWLLVAGAMAVIRHARQHGQAAAAYAPHGTPAGQGRGCSSGQQDRTHGLGHDGARRAVQGASSVASRGIAGQAKAFNELARARRRNADTVVPGIGAARLGQRTSECVLSIGIRSAQSIRASGHTCRTNRPDT

SEQ ID NO: 287145 - protein, 400 aa, unidentified
MHKKSITACVLWAGGAGKVRKEKRRFETFTRELLKLADWLRECGVTHVAMESTGVYWKPVWNILEGQFEVLLVNAQHIKAVPGQKTDPKDSEWIADLLQHGLLRGSFVPPRETRELRDLTRYRVSLAEECNRIANRIQKVLEDANIKLASVASDALGASGRAMLEAILAGQQDPEQLAEMSKGLLRNKIPELRLALTGRVTDHHRFLLRQLLDHLKFTESKMTEIEAEIDRRLRPFEEQVTRLCTIPGVQRVTAWGILAEIGFRMEQFPSAAHLASWAGLCPGSYESAGKRLSGKTRKGSAALRRCLCQAGWAVSTQKHTYLSALFRRLAARRGGKRAVIAVAHTILVAAFYMLTRKEDYEEVGAGYFDRLHADRLKRSLVRRLEQLGHKVNLEPLAQPA

SEQ ID NO: 287146 - protein, 416 aa, unidentified
MDMEREVVCGADIHKQFLLATVLSNDGKKLQDRFDANFEGLLNFRQWLLDLGCQKLAVESTASYWLPIYLVVGKDVEFILANAYQIKHVPGRKTDVLDSEWIAELCLKDLIAPSRIFSEDERDLRSMTRTRESYVKMRTQNKNRIHQELESACIKLSSVLSDIFGKSGIHIIRGILKGSSIEDILDSIPSKKLKAKRKEIQDAIRMNMSPAQVDLISLLLDSVDILNREIESIDKQIQDLISKRQDDLKIAMSIPGMGFTTASAILAEIGDFKDFRTGDKLAAYCGLVPSVYQSAGKLITGHITKHGSPHVRRMLIEVAHAISRTKADSNLKRFYFRIKGRHGAKVAIVALARKVICILHHLIVNREMFEDVGTNKSKRNKPGRSFSSPEPTITDAIQILVRAGYAIQKRSEREGG

SEQ ID NO: 287147 - protein, 421 aa, unidentified
METLIERAAGLDVHQATVVACVVIEQDGAKLKRETRTFETVRRGLEQLREWLGSMSITHVAMEGTGVYWMPVYAVLEDYFDIALVNARHVKKVPGRKTDVSDAAWLADLLRKGMLRKSFVPPKAIRPIRDVCRYRRMLVQSETAEKNRILKLLETVGLKLATFASDVFGKSGMAMLRAIAEGTSAAEAIAQLARGRLRAKLPQLQRALDTVVADHHRMMLRDQLSRLDRTADDIARYDRVLAEMVKPYTQDIELLCTITGIQRTAATEIFAEVGPNLESFPDAAHFSSWAGMCPGHNESAGKKGRTRRRRGNPYMQSILVECALAATRKKDSYHKEKHFRLKARRGPMRALFATAHALARAVYRVLVRKEPYRDLGAGHLDAKNKPAVARKLIDRLLALGYDRQTIVDAFPDPRPAAPGSQ

SEQ ID NO: 287148 - protein, 336 aa, unidentified
MYKGSLIDMSECIGIDVSKSKIDVCWLRDAHTLKIKTRVFRNTRKGYEELAQWLLKYTQVTAKEHLITLEPTGVYHETLMYFLNQQGFVIFLANPGKAKAYGKSLGLLHKTDKSDAIMLARFGHSQPSTVRLWQAEREELRELKAMLRRLSALEADLQRENNRNEMTQRAEASSRVLASQRGMISVLDNEIKQLTNDIDQHIDNYPDLKEDRRLLSSIKGIGEVMSRELVYLFAAKHFTSARQVAAYLGVIPKLNKSGIHIGRTTLSKKGPARLRAKLYMAAIVAGNHNPDVMAQKQRLLDAGKTNMQAVGASMRKLLQICYGVVHHQCEYQPRVG

SEQ ID NO: 287149 - protein, 413 aa, unidentified
MDAIVERCAGLDVHLDTVVACVLYGKLDIKPKKEVKTFSTTTKGLLELLDFINQKECTHVAMESTGIYWKPVWNILESGAFELIVANAKKIKNVPGRKTDVKDAEWIASLLRCGLIEKSFVPPERIRDLRDLTRLRKELLGEVNRNKNRIHKVLQDANIKISSVLSDVFGETGKSILNQIIGNQCITEEFIYSLYEGRGKSKLKSTPMEMYEALNGKIRGHHVILLGMHNSNIVFLEKQINELEKEIDILLQKERDSLELLETIPGISKISASSIIAEIGTSMDVFKTEKHISSWAGLCPKNNESAGKKKRSGIKSGNNWLRSMLCECAWSATKKKDSRFKNKYWSMVPLMGRKKALIAIANMMLRLIYHLLKTKSTYKELEIQYFIDKDKRREDRIIKELKSKGYLVEKDSL

SEQ ID NO: 287150 - protein, 344 aa, unidentified
MQITTIGLDLAKHVFQVHGVDATGAVGVRKALRRAQVLPFFAKLPPCLVGIEACGTSHYWARELIRLGHEVRLMPPAYVKPYVKRGKTDAADAEAICEAVTRPTMRFVAVKSREQQAALSMHRARNLLVKQRTQLVNMMRGLLAEFGIDIPEGLERALLMARQVVEGATPDVPEAAVKIVGMLSQQALDTHAQLREIDRALFALQRTDDMARRLATIPGIGPVGATALAASITAPGQFRSGRQFAAWLGLTPLQNSSGGKEKLGRITKMGDKYLRKLLVVGATSLVRRARQKPETMDPRFVALLARKPVRVATVAMANKMARIAWAVMTRGEVYKTSHVPALAA

SEQ ID NO: 287151 - protein, 361 aa, unidentified
MQSTTIIAFDQHAATTVAAVLLPNHRTPALRSLTSDVATIVRFVERVGRQGAVRCCYEAGPCGFELQRALTAHAAPCAVIAPALIPRRAGDRIKTDRRDASQLAILYRAGALTAIHIPTDQEEAARDLLRCREDIRADLLRARHRLSKFLLRHGRRFTGTKKAWTRAHDTWLRTQAWSIPALDQTHAAYLRAVDEAVARLRAVEDDLRSLLDLEPLRPRVQRLRCFRGIDDLTALTIAAELGDPRRFPSAPRTMAFVGLVPSEHSSGTRHARGAITKTGNAHLRRVLVEAAWHYRHRPFVGGALRRRQHGAPAAVVAQAWTAQQRLHRRYHRLAARGKPTPHVITAVARELTGFVWAALIQ

SEQ ID NO: 287152 - protein, 482 aa, unidentified
MKKKNIFQNQSQEILTLFEDAKDRAKVMCIPMDYAKKDHLVMFCNGNGKIIRKPFSIKNALEGKNYLIDQVRKSCRHHGINLKHTFFGGEDCGSYADNLITALRSENWLVAGVNARDAKNQRENMQASTDRLDLLGICKMLLNCRGNCSPAQSGVYLNLRILVRQRRKLVRMKTGVKNRIHTIVDQLFPNFLNENKSGIQSFSKASLLLMEDRFSVHQIQRRRQPALVKLLTRMSLSQPEKSAEKLLHHAAQVLRPPDKNIDTLQISLTHEIRLFKCLKENIQHLENRIAANLAQTQGAFLTSIKGIGIILAAGVCAEIGDPDKQKSLNNLVSYAGIIPRVKQTGGVQGKTKIKKVGKRCNRILKDYVVQSACHIGIHGPENLMLDHKRRDAKGQHADFGIARRYLRMAMCLMRTHQTYLPKRLRSINTSKNERAEYYLKTWTMLYKKWSGSGVLNIVFDKKNPLGQWKNMIQELYGIKLTI

SEQ ID NO: 287153 - protein, 345 aa, unidentified
MTTMNYIGLDVHKKTISYCVKDASGRIQQEGKIGSTRRELDCWMRTLPQPWTVAMEATIFSGWIYDHLLPHAAQIKVAHPLMLRAIAAAKKKNDQIDASKLADCLRCDFLPECHMMPRAIRDRRRTLRYRHLLVRQMVQMKNRVSGLLMETGVEYNKQRLHKVSYFRELLSANGEVPPSIRPLLKLSRETIERCQKTEYALVSSLRRDPALADRIKRLRTVPGVGPITALTWALEIGDVSRFGTIKQAISYCGLCGDERSSADKAMRMPLSKQRNKHIQRALVEAAKLAPRQNHEMAVIYDQERQKGNSNRATLAVARKMVAYLLAVDRQQRDFVPAEERRTTAA

SEQ ID NO: 287154 - protein, 317 aa, unidentified
MQVPTNFLGVDVSKAELVISTHGQDACLCVPNECTAITKWLRTLTSGSLLAMESTGRYHQLLADLAASMGMLVFVLNARDVYFYAKALGARGKTDRVDSRLIARYLAEHHARLHPYHTPSACQAQLQQLLSQRWTITTKRTALRESLKICDPCIAQATSQLDDAFASLLRCIDQRITALIKTNDQLQHARTLLQSIVGIGPQSSALLASLFVRLPFANPDALVAYSGLDPRANDSGRSKGRRRLSKRGSPALRHQMFMSAMSACHTKTFAPTYQALRARGLKTTEALVILARKILRIAFAVWRSGQPFEAHRIISSA

SEQ ID NO: 287155 - protein, 315 aa, unidentified
MSDMPCCVGIDVAKAQLDIALRPSGERWAVANDASGVATLVDRVQTLHPTLIVLEATGGLERAVTSALAAAGLPVVVVNPRQARDFARATGQLAKTDALDARALAHFADVIRPTPRPLPDAQTQELRALLGRRQQLIVMRTAEQNRLAGTSERLTKDIVAHITWLNADIATLDNDLETTLRASPLWRENDDLLQSAKGIGPVCARTLLLELPELGTLTRQQIAALVGVAPLNCDSGTLRGRRTIWGGRAHVRTVLYMGTLVATRYNPQIKVFYERLLAAGKVKKVALTACMHKFLTILNAMLKHRTPWQPQEVQN

SEQ ID NO: 287156 - protein, 343 aa, unidentified
MVYIGMDVSSKDFVVHAIDQRKQKVFEGCIPPSRAGLRKLVEIIGGGPKLFVFEAGNQTKWIALMLMRQEGVKIHVVHPNEVKWISQSSGKTDQVDARKLAHLARGGLLPRPVHMVEGKTRQLRELVSAREQLQGKRVALINALRGYIRQEGVRFPAKFFQRSGWKASLEKLSVGSTQRLIFQSFMEAIDALKRSEDEITARMLEIQDSRCELLETIPAIGKIASRVLVGALDDARRFDNKKCVANYGALTPTIYQSGGTTNLGRINRDGRQEVRKVLLQCAHTIQRTGTYHAAPIREFLERIERRRGKKRAVVATARKLLTIAYGVLKSGVPYDPMRLRAFA

SEQ ID NO: 287157 - protein, 342 aa, unidentified
MKFYCGIDLSARDCHVCVIDEQLKIVVQQKLRNELTKICQLLEPYKANLKIVVESTFNWYWLIDGLQAEGFDVVLAHTLGLYLITGAKVKTDRRDAYALAKLLLVGAVPAAYIYPVETRPVRDLLRRRAHLVQVRAGEYGSLRRLLLRQGILSSKQQEIKTATEAELEQWFAHPLVRLHASQELQRIELYSQQITELEKTILLLAKTEQSYELLLKLPGVGQTIALTIMYEVGELTRFANVKVFSSYCRVVPGIAQSGNVSRRGRASKQGNHYLKAAFSQAAVHAVRCYPKVRRYYERQLKRHQGRGRQMICYNIIAHKLAQGAFHILKEQTEYREELLFGR

SEQ ID NO: 287158 - protein, 355 aa, unidentified
MLYAGVDAHKATSHITVVDEAGVVVRRLKVASSPGGIRTALGDLPGPVKAVVEASYTWGPVYDWLGEVADEVILAHPAKVRAIADARIKTDAIDSRTLAHLLRADLIPEAYAPSKEVRAIKRVLRQRMFLVRVQTMVKNRIHALLSQHAVTRPAVTDLFGTVGWKWLHALSLPDPDAALLREDLDLLETLRKQLKETKTRIKRLAADDMAIRWLISVPGIGIFLAVLIRYEVDDIARFREAKKFIGHTGLVPSTYASGLRQAHGRLTKQGNKWLRWAFAEAVTPAIRHSPSLRQYYDRIRTRRGVKDARVATARKLMELAWTVWTEQRCYVEQRPTQTTTNQGTKTAAALARAWA

SEQ ID NO: 287159 - protein, 388 aa, unidentified
MKEATVERRVIGLDIHPDTFTAAALVGLDAAKAQIQWVTQSLPMTQLETWASSNTRAEDTLVVEASGNSFETVERLEKRGRHAVVLESLRAGQIKKAYCTTDKISAIKIARVYLSGLAVLVWTPDETTRARRDLFHRYRRAVTDSTRHRNRLKSFLSDHGVRLPKGTRLTQASRQTTILTARTWNALQQNLLRMMHADLIQAEGQRKELSRLMAREVVQDPTLLRLVRPFGVRHIVAFALAAFIGDIRRFRSPKQLVAYIGLNPRVALSGQGGYVGSIAHQGRWELRTLLAEAAHSILQHANPLHAWGWKLAYRKGKNCAIIAVARKLTVACWYLMQGLFTPLQEITATLRLKIRKIVTVLGRATVREMGYKTSFEFEKCLHLQIMKA

SEQ ID NO: 287160 - protein, 329 aa, unidentified
MSALVCGLDVHKDSTYATILDSDGKIVDQTRMENEKVAAYLSQFKVGKVAMESSTAVAPLYRQLKKEGFNAVVSHPRKTKLIAEAKIKSDRVDSKAIAQLLRMDWLPLSYVPDEVTGALREKVRRRAFLVRERVKLRVKIKSYLTYQGLKWPTEHGLWTKAGIVWLHDLNLASVESYIRLIDVLSEEIKLLSKELKSEAEEDEDVRLLMTVPGIGYYSALLVRSEIGNIDRFPFAEKLCSYAGLVPSTYQSGGMVHHGSITKEGSRWLRWIMMECASTHVAKYDTWISRSYSCLAGRRGKKTARVAAARKLLVVCYSVLRHKKPFYDQP

SEQ ID NO: 287161 - protein, 361 aa, unidentified
MVKVRSWAGLDVHARSVLAVTMDAETGELRTARLGGETAKVVDFCAGLPGPTRVAYEAGPTGYGLARALEAAGVGCVVAAPGKIERPAQDKLKTDQRDAERVLRLLMIDALHPVRVATVEEEALRDLVGAREDVRGDLMRARQRLSKLLLGHDILYDDAHSTWTQRHRAWLRAQDLGGGAQATLTDYLGAIDTLECRRGQLETTIEQLVPCSPYAQTVARLRCLRGVDTLSAVGLAAEIGDFTRFERAGRVASHLGLVPSETSSGETRRQGAITKTGSRHARRLLVEAAWHYRKTPARGVTLQRRQDGQPANVIAISWQAQRRLYNVWQRLAEQRGKRRTIVAVAVARELAGFCWALARAD

SEQ ID NO: 287162 - protein, 365 aa, unidentified
MKKLVRPVQKVNTEVVGLDVHQDLIVFTWMDRRGDELEQGSLGGTKEALDGLLDRLPSPVHISFEAGRCTFWVYDALVERLGSKYVHVAQPKKIRAIANSTQKNDFNDSWWLAYLTYEGRLPECYVPTGTMRELRIAVRERFELVKMITRAKVRLRSHLAQMGERVPTRKIDSITGWNALLDLTESREGVQSQAVAHYLALLEYYLQSLEEWETVIEELANDLPVVRTLREEMPGIGRVLSAVIAAELGPIERFHSPKKLGRYTGLTPSDRSSAGRQAPGSITREGSSHLRWALTQAAMGCLRSRSGPGLAVGNWIRAKERRMGCKGKARVAGARKLAESIWRLIHWGECFDAAKPFGGIPAEVR

SEQ ID NO: 287163 - protein, 365 aa, unidentified
MKKIAYVGIDYHQNTLTIAVCVEDENKIHETVRIRNEDKLIRMYLKKLSEKFTIRACYEASCSGYYFQRKMKSWGYHCEVIAPSSLPKKRGDRRKNDFRDARDLAQNYANGTLSIVHPPTEQEESVRSLVRCRMAFKEVEKKGKHLINSLLLSQGLRWPRSKWTFQHRKWLGQLKMPHEYLQQVLDEHLAHLDYIQSRIKHLDQQIEQIAESEIYGSAVKKLRAFKGIGTLSAMLFIAEITDFRRFSNPRALMAFLGLIPSEKSSGDKQRGGPITKTGNPRCRTQLIESVQHYAKKPQISYKMKADLAQVDPHSAAIAVKCLKRLHKRYWALSMKGKIRSIALTAIAREFAGFIWAMMQPEPAAA

SEQ ID NO: 287164 - protein, 430 aa, unidentified
MKYNTQNAKIASITEKTLVLGIDVGSETHYARAFDWRNYEYSKTPLAFSNDEVGFLTFKAWVEDLKEKHGKTAVIPGMEPTGHYWFNLGKFLQDSGMRPVHVNPHHVKKSKEMDDNNPNKNDRKDPKTIAALVNEGRFSYPYIPTGIYAEIRSLSNLRFQTQEEITRIRNRIARWISIYFPEYKDVYGKMDAVSGLMVLKEAPLPAKIRELGAEGINQIWRNAKLRGAGMKRAKTLLSAAEHSIGSQEAPEAAALEIESLLEDYEKYKGRMAELMGRMEEKIKEVPYVEKLLAIHGIGLKTVCGFLAEVGDLSRFDNPKQVQKLAGYAIVKNDSGKHAGESHISYRGRKRLRYVLYEAAISVIGKNAEFREIHQYYQTRDRNPLKKMQSVIAVACKVLRVFYTILKKGVDYNGEKMLQDIRRPVRNIKAA

SEQ ID NO: 287165 - protein, 422 aa, unidentified
MSYCPVAGIDVSKKFSDMCILSPDNKIFAQEKIYHDETSINRANALLQKAERLFFSKPVIVMESTSHYHLILFQFFSEHGYDVIVVNPLQSNSMKDFSIRKRKTDRVDAFKLAMMYRTKTLRPSQIPQTATRALRQLCRHRAELLNDVSSYKNRLTALLDQTFPGYDKVFSDVGGVTSCAVLVRFPTPTILLVEEESELVEVIAAASKSGYSFAKKKAGLLISAAQKAQTLGIHSCADETLIVCTIQMLRTLSESVLQIETAIDNLLAQRKEMRNNVSLLQSIPGIGSHSAALLLGEIGDISLFKKPKQLAAYFGLDPTERQSGSFRGTKNKLSKRGSSYARAALHMGIVNSICKRGKDSAANPVLLSYYEKKCKNKPAKVAQAASMHKLVFIIFAVLRDQKPFELKTPEQHAVEQGFVKAA

SEQ ID NO: 287166 - protein, 469 aa, unidentified
MTRSGKNAAGGREAKKAIRPVDVTEGLPVLNRNCAGIDVGSAEHYVAIPPGRGPQSVRKFGSFTADLFRLVTWLLDSGVESVVMQATGVYWFGLYQMLEDHGLKVVVTNARYTKMLPGRKSDVQECQWLQKLHTFGLLTPSFRPTEEFRVLRSYMRQRENLVTAAGICIQLMQKTLTEMNVQLTNVLSDISGKSGLAILRAVLQGQRDPYKLAELCDRRVKASRKEVAQSLEGHWRTELLFILQQNLDLYDTYSQKIADCDRKIEAHLQTMERKEKVAGLPLLPPRRQNMQPNRKHIPQFDLRTYLYQITGVDLTQIDGIGVQTAQVVLSEVGNDMSKWQTEKNFASWLGLSPDNPKTGGKVIKRGTKKVVNRAATALRLAARSLQRSQSALGAKFRRFRSRMEAPKAITAMADQLAKLMYRMLKFGGHYVDKGMEHYEQKYREQHLRYLKKQAAKQGFQLIPLEAVAR

SEQ ID NO: 287167 - protein, 404 aa, unidentified
MEVYLGIDWSEKSHTAVFVDRWGKELCQRTVDHSAKGFIELDRLREQLGVGAGDCVVGLETAHNLIVDWLWGHGYQQVYVIPPNVTRSRQASYRQSGARTDESDGNLIGNLLRTDRQRLIPWQPDSELTQRLRAKVRMRRQLVTDKVVHVNQLRQVLHRYYPAALEAFDLKSYIGLDFIQRYPAPEDAQALSQSEFQAFAREHAYGTRRTAAAYAKLKAPYPQASPVIVTAYQDEAVMLAQMLVQVKRFISQVEKGIATLYAEHADAPIFASLPGVGKHLAAALLVKFGDHRERFPYSGAVQALAGTAPVTVKSGKRHTVHFRQACDHEFRTYAQQWAVASLRCSPWAITYFHQVRNRGHSYNHACRALANRWLAILWKLWQTGQSYDEAHHLAQALLFRERSQ

SEQ ID NO: 287168 - protein, 385 aa, unidentified
MDANHVTEPHAEDVILAVSLELAVGKWKVALHDGRRERPAVHTVAQPQPAARLQAVLDVIEQQKLKWSLPAGVRIVVSYEAGQDAFWICRALQAHGIECYVIDPASIPVERHRRRAKTDRLDAIKLVINLRAWLRGERDRMHVVHVPSPQDEASRHLMRDRGQLQKEVLQHRDRMRKLLATLGCWDEVNHKAFAGRLARDQVRCHDGTPLPPELRERLLRECERLALAEQQLAALEKTRQASLPAPARQRSDDLARLKGIGEVGASRLALELFWREFSNRRQVGACVGLVPQPYDSGESQVDQGISKQQGNRRVRALLVEMAWTWLRYQPDSALTQWFNQRTQGTGPNRRARRIAIVAVARRLVIALWRYLTDGVIPEGAQMKPV

SEQ ID NO: 287169 - protein, 282 aa, unidentified
MSTICGVGIDVSARELTVSVASKTAQSFENNAKGHRAISRLVAGCAKGEVQVCVEATGSYSLDLCFHLQGCGLRVMVANPRAVANFAKAMMSRSKTDPMDAGVLREFAERMPFVEWVPPSQAALELRAASRRLDSLSNMLTREKNRLHAARATKTTISIVSDDLKSSIKHFEGRIERLIKKIESFIETQSSLHARYRRLQTVRGIAARSAIRLLGELATMPADMSPRQCVAHAGLDPRQHQSGSSIDRPARISKRGNRYLRSALYMLGRRCFSARPHHQGFL

SEQ ID NO: 287170 - protein, 342 aa, unidentified
MEHIGIDLGSRDSQVCIRNGAGEIVEEMRCQTDRLVALLARRAPARVVVETCTEAFRIAGRAQQRGHDVRVVAATLVRALGVGQRGLKNDQRDARTLSEASCRIELPSVHIPSSVSQEVKAICVSREALIKARTQLVSRVRSYVRSRLGQPMRATPESLPKKVRRTLLQDAEGLPAHLDRLLVALETLSEQIAGADAELKELAAEDARMRRLMTVPGVGPVTAARFVAAIDHVERFPNASSVASYLGLVPGEDTTGFRIKRKRLTRAGAPQVRWALGQAAWPLYLRRPEDPMVQWAKRIAERRGAPVAITALARKLSHVLFAMWKHETTYDPARSARAIVAA

SEQ ID NO: 287171 - protein, 309 aa, unidentified
MENIALIGIDLGKNSFHIHCQDRRGKAVYRKKFTRSKLIEFWATCPATTIAMEACGGSHFMARKLEELGHFPKLISPQFVRPFVKSNKNDFVDAEAICEAASRPSMRFVQPRTESQQAMRALHRVRESLVQDKVKTTNQMHAFLLEFGISVPRGSAVISRLSTILEDNNLPLYLSQLLLKLQQHYHYLVEQIKELESQLKRKLDEDEVGQRLLSIPCVGTLTASTISTEIGDGKQYASSRDFAAATGLVPRQYSTGGGQHCWASASEATRRYEPCWFSAPEYLYKNWNTSQAGWPTGSGSYCAGKVTLS

SEQ ID NO: 287172 - protein, 354 aa, unidentified
MIIIGMDYHPSFQQLAFVDTETGEYQESRLQHREEAEKFYRDLAARGVKVRVGMEASGQARWFERLLAELNMELWIGDAAEIRAKRVRKKKTNREDARHILRLLLEDRFPRIWVPSWENRDLRQLLWHRHRMVQMRTRIMNQLQAVALNEGLCCKKRLWRESGRKQLEGFPLAPWGSRRRRDLLELLDRLNPTIAELTQTIEQEVEKYPAAQRLMTHPGVGALTALAFVLIIGEAERFRCGKQIASYIGLVPTEESTGERQRLGHISKQGSALLRFFLVEAAQVTVRSDAEWRSKYFHLAMRRGRKIAKVAMARRLAVRLYWMWREKRDYEHLKKFGSYVGGPGTGVGARQNIA

SEQ ID NO: 287173 - protein, 349 aa, unidentified
MMRFYKQQHQFYCGVDLHARSLYVCLLDHNGTKHIHRNFNTNDPDGFLAALEPFHHYDLIVGCESTFNWYWLADLCTTQNIPFLLGHALYLKAIHGGKTKTDRIDSEKLALLLRGGNFPVSYAYPADLRDTRDLLRRRATIIRRRSGTITHVQMVNYQQNLPAFPKSISYKANREGLAERFPEGSLRTMMQMDADLIDFYDTQIQKLDLYLEQHAKLDDPDTFFRLQSIPGVGRILAMTLLYEIHDIDRFPTVGQFLSYARLVKGTNSSAGKSYKPTGSKIGNPHLKWAFSEAITLLKRECPLAKAFAERIEKKHNKARANSLLAVKLGRAVYWMCKRKTAFDPAIFIR

SEQ ID NO: 287174 - protein, 347 aa, unidentified
MTIVEAPPGITGGVDTHLDTHVAAALDPLGRLVGTESFDADAAGYKALLDWLEGFGQVTKIGVEGTGSYGTGLARFLRRNGVEVVEVDRQNRQARRNQGKSDPLDAVEAARAAISGRATGKAKTKDGAVEAIRVLVVAKRSARQARVKAIVQMRHLGVSAPDELHQQIKGLSVTALVHDSARLRPSRSPDPVTAATKSSLSSLAHRIQSLDAEIASLDEQIASLVHAAAPDLIGLFGVGPDTAASLLVAAGDNPERLHSEAAWARMCGVAPIPADSGKVTGHHRLHQGGDRQANSALWRIVMVRIAHDPDTRVYFERRVKEGRTKRDVIRILKRYVAREVYRHLPRG

SEQ ID NO: 287175 - protein, 411 aa, unidentified
MNPVVGLDISKGESQVQAFLDKGKPYRKSFKVSHTVEGLSSLVSFLEDVKKESGKKPSIILEATGHYQTPVVHYLEERGYLLIIINPLISYKARSSSLRKVKTDVIDAYLLCELFYKEELEPYKKRGVQLLNLRNLTRQHENITGVMIQTKLQFQAVLEQVFPEYKGVFGDLYSVVSLLTLSEFPSSEDILNASEEVITDKINGLCKSRSSRWAKEKAIQLKAAAARNPFEKTVYQSHILSLGMYIKMILQYKEHLAKLETEIDALAKDIEEYTIIKSIPGIGEKIAATIISEIGDIDRFNDPKKLVAFASVDPSVFESGKFSATKNRITKRGSSRLRHALFMAVRCAIRDCRKKKTTDEIIPRNKRMREFYDKKRDEGKPFKAAVIACVNKLLHWIFALLKNRTTFQDIA

SEQ ID NO: 287176 - protein, 429 aa, unidentified
MRTESTPGARGPVFCGVDTHADSHWLCVLDWRGRKVLSRQFPADAAGYEALAGAIAAAGEPACVAMEGTSSYGAGLTRHLASLGMPVREALSPARTQRRRPGQGKCDESDAERAARAAMSGSKLGTPKSQDGWVDGVRCMLAAHPGAVKARTSAINTARSLLTTAPEGLRSRFRGMGGPRLMEELPSVRAEGALGAALGALADLWEAARDAALDMERAIEASLEENCPALLAMYGCGPVSAAKLAVAAGDNPGRLRSEASFAAICGACPIPASSGKTVRHRLNRGGDRQANSALHEIARQRVMRDPETAEYAERARGRGKSDREVMRCLKRYVAREAYRALMHPHEIRRPEDASELVAARRAAKVSQVRAASILGTSEKYISMLERGQRELKPIRRAYEAWVEAGLPLDWDRQAFEAERKMDSKKHLAK

SEQ ID NO: 287177 - protein, 408 aa, unidentified
MNPLYVGIDVSSKSNVVYLMLPDGKKHSNFSVPNSQDGSTQMIKRILSVLTSHSLDTVIIGLEATSVYGDNLVYFLREDAILAPYNRKIHVLNPKQVKKFKDSYNDLPKNDYIDSFIIADCLRFGRINNEVYVSDYRYKALQNLTRARFYAVQNLTKEKQRFINVLFKKYSTMTQEKVFSNTFSTTAFAVYQEIESAEALANMDLQELTDFIIEKGKNRFPDPDAVAKAIQKAARSSYRLPKTINDSVNQVLSISITSMKALEAQIKEFDKAIEAEIQLLPNVLTSIPGIGPVISAGIIAEIGDINRFPNQAKLGKYAGLAWKQHQSGDFDSEHTRLVQSGNRFLKYYLYEGAFSLVRCDTEYSNFYHSKYKEVNRFQHKRALALTARKFTRLVFRLLKDNRLYRAAE

SEQ ID NO: 287178 - protein, 351 aa, unidentified
MQIVGALDVHRRQITHKTLDLATGDVHRGRLSPANRESVREWLERFAGCEAEFALEGTTGWRFVTEEIARAGHVAHLADPAETAARRGSKRRAKTDRADCDLQLKLLLAGELPESWIPPAHILELRTLVRTRKTLVDQRSAWQLRLTAQLFHQGVPAGINPRTRAGREALARVELSPAGRELVSIALRMIDVLDVELVPLDRELRAFAARQPGCRALSERLYGVGPDTATAVLAELGDCRRFSSSDDAVRHAGLDVTVYQSDSKRAAGHLSHEGAPVLRWALYEAGQQATRQTSPDHEYFLQVRERTNHKSASLSIARKLCRRAFHILRELGEEALAPVDVHVEEAIRAAA

SEQ ID NO: 287179 - protein, 357 aa, unidentified
MKKTYRLQDYVVRGKEIFVGLEDSKRTWKLAVRSEKMVIHQASMEAKYPVLIGYLRNKFPDCAIHVMYEASFKGFNLYDQLTEDGIDCVVIPPHVVTEPKVNRIKTDKRDAKRLAMVLENHDFKEPCYVPDKERREDRQVTRTLIALQKDIIRTRNRIHRFLEFHGIEVSFPDKWRREEFRALKKIDLSEPLRISLDIFLAQLEELWVHQVALRAALRKLCKKERYQKAYGIARSLQGIGWFTAIRFVLELGEDLTRFTSGKKIASFVGLTSSEDSTGERIQKGRITGMGPGFIRATLIENSWGAIRKDPVLLAKFTRVWRASGSRKKAIVAVARVLIVRFRTCIISGTPYLIGVAA

SEQ ID NO: 287180 - protein, 449 aa, unidentified
MSKGSGITRGDRRKNARKARLRALVPHENAVLGLDLGEKKQALAVTGGDGLVLARRSLRVAVHGLGPHLDWAAGQARAAGYAGLSVACEPTGSWWMAVQDLCQARGLPFVCVQPLVTHVAREQEDLTGDKTDEGDSGLIGRLARELHCYVPERLEGAWAELREEGRRRAQLITNATAAKQLLRDKLGLVAPAVLEAACEPFDSATWLASLEVVLERCGGDVATVMAMGYEAFAAAAAAMLPGWGGQRVGGTCRALFTALADDRGVARMRRAALRRARGALADLKYARSRRAQAEADMIALLGELGVDADRICQIPGLSPVTLAAILAETGDLHTYESSSSVVKHAGMSPARNESGSFRGQAKISRRGRPGLRLAAWRATWAVLRHCDVLAAKHAALTGRDDDSRLTPEQSRVACAASLLRWIWSLTVHGTRWDARIAAGELGHDHAMAA

SEQ ID NO: 287181 - protein, 338 aa, unidentified
MVVIGIDPHKGSHTAVAIDEDEHKLDEVRVRADRRQLERLTSWALAFPERSWAIESANGLGALLSQQLVGVGEEVFDVPPTLSARVRVLASGKSQKNDPNDAFSVAVAALRSPRLRSVVTEDHVAVLRLLWNRHKNLTSLHTQAVCRLHALLAGIVPGGTRCRLSADKAAAVLSGFRAKTAVEKARRDQAQILVGDVRRLDAQLKASNRTIAEAVAHVPTTLEELSGVGPVSTCIILAHTGDIRRFANEDNYASYNGTAPIEASSGPKKRHRLNPRGNRQLNHAIHIIAFSQPSHAGPGRDYYERKLAEGKTQKEAVRSLKRRISDVVYRQLVRDAQR

SEQ ID NO: 287182 - protein, 411 aa, unidentified
MICVGDDWAEDHHDVELVDEDGRRLVRARLPEGLGGIARLHELIAAQMPASWAELEPVEVAGRVRIGIETDRGGWVQALVAAGYQVYAINPMSVARYRERHSTSGAKSDAGDAHVLAEIVRLDHAHHRKVAGDSPQAEATKLVARAHQSLIWERTRHVLRLRSALREFFPAALQAFDDLAAPEALELLDRAPDPDTAARLSRTQIVAALRRANRRDLAAKATAIQEALRVDQLRQSRPVQAAYAAIVTSQVQILNILNVEIAELGQVVADHFGRHRDADRYLSLPGLGAVLGARILGEFGDDPHRYIDGKARKNYAGTSPITRASGNRRVVLARYARNRRLGDAVHQWAFCAMRGSPGARAYYQALRERGIGHQAALRQLGNRLVGILHGCLKTGTSYDETAAWGHIQPTS

SEQ ID NO: 287183 - protein, 394 aa, unidentified
MGSEKRESGELEHTPEAVEAWVVQQCQRFGTGPIAVAVEQSRGALVFMLSKYEAMHLFPVPPTMAAKMRAALYPSGVKDDPRDADLLLDVLLKHREKLRRLLPDTEATRRVQNLVEERRKLVDERTEQSNRLTSHLKIYFPQILNWFEHLDTELVCALLLRWPTLEELQRVPPAQLRTFLRKHHCRNQELNERRIQEIRQAIPAIRDRALIEAKSTVVKVTVRMMRSLLEGIAALDEKIEEAAAAHPDFFIFDSLPGAGAVMAPRLLAAFGSQRERYGSAGEVQTYSGIAPVIERSGKKKWVHFRRACPKFLRQSFHEWAGHSIAQSVWARSYYQQLRSRGKGHHAAVRALAFKWIRILFRCWKDRVAYDEVKYLVVLGRRGSPLAAVDVAISG

SEQ ID NO: 287184 - protein, 412 aa, unidentified
MVYVGVDWSDKFHQVYITDDAAGCLDAFSISHSPEGVVELFSHLEKFAISTKEALFAIEKPSGLLVGAILDKGFILYPINPKAVDRYRDRYKVSGKKDDFFDAKVLANILRTDRHNHRPLLPDSPLTRHLKILTHQHESLSRLKRRIINQIISTLKDYYPVALEIFGKIDQQVTVNFLKKFPTPETFSKLTRGKIKRFLHAHHYPGIEKETEEIYQLVQGPHFQVEEFVVESRSLYLSTLLVQLENLLVSLKTFEEKIEGLLFQHPDKDIFLSLPGSGKITAAKFISEFGDHRERYEKASSIQAIAGTCPVTEQSGRYKNVYFRRSCRKFFRNTVTQFAFSSLRESDWAKERYRKHAHSGKKKSHALRCLGNAWLEVIFPMWKNQSTYDERKHLKIVKEQFLEDFLPVSLSC

SEQ ID NO: 287185 - protein, 369 aa, unidentified
MSKKVLHVGLDVDDKSFHIGAFCKETGEIFEMTSKPNVGNLMKKLEKLTKQGFELKLCYEATYIGYSLCRDLRKNGLETEIIAPSMIPELASNRVKTDRLDAIKLAKYYSNELLTPIHIPEKEDEEDRDILRSRSFLVDLRKTLRRHLLSACRRNNLHYKLETSAKHHWTKSHENWLIDKVNKLSGVVRDNFELLLRQLEKLNEGIAEYDKMIEEMADKERYKTRKDALNCFRGISTLTAMTLITEIGDVRRFKHPKQLTSYCGLDVSEYSSGGKEKKLGITKMGNKRIRTSAIESCQRLDRVKPLSKRLKAHREGQDIKVIDIADRCTKRLKKKANNLLDAGKHRNKVKVACAREFLGFVWEALHVVA

SEQ ID NO: 287186 - protein, 389 aa, unidentified
MTTPITAVIDSSPELEVVAGVDTHADTHHVAVLSVTGARLGDLQVPATSRGYEQLLVFIRSFGTTRLVGIEGTSSYGAGLARYLIAQRVEIREIVRPRRAHRRHGKSDPIDAYAAAAQALADPEALPLAKTGEGVVEQIRVLLGVRRSAIKARVAVIRQIKSMLITAPVAIRTRWEGLNERCLVESLASTRPGPATGSVTTATGQALRRLARRHQYLSVEITELEDELRVLVGRAAPAMIARKGYGVITTATLLVTAGANPERPRSEGCFAALCGASPIPASSGKTKVPPQSRRGPASELGSAPDRPGAAVQRRTHEELRAATARQREVEEGRPAVPQTRDRQGSIPPHHPPRTPACDGGSARSPAPARSHPGPGRDEHRSRTDPAERT

SEQ ID NO: 287187 - protein, 349 aa, unidentified
MEYVAIDLGRPNSVMCELGTDGRKVQRGFRLDRPNLTRLFSGRPACRVLIESCTESEWVARHLEDLGHEVVVTDPNYAAMYGERNRRVKTDRRDADALFEANRLGIFRRAHRRSDRQRHVIATQGEREALVRTRTRWINVVRALLRREGYSVPSGAPESFHDRVQELELPAELRSLVAPLLSLMGSLNEQVAKLDRQTASLGKEDPRVRLLQTAPFVGVHTSVAYMALIDDVARFPKAHKLESYLGLVPSEWSSSERRIKEGITKRGDSRVRWLLVEASWSILNRPRPDTLALRNWALAIAARRGKKIAVVALARRLGGILYAMLRDNKPYDPTRLSATLSRRPRSVAA

SEQ ID NO: 287188 - protein, 372 aa, unidentified
MSQSSTLYVGMDVHKESIAVAYVAQAHGAEVVSLGTIGTRQCDIDKLIRQLRSKSKQLVFVYEAGPCGYWLYRYLMKQGYVCWVVAPSLIPKKAGDRVKTDRRDAMQLARLMRSGDLTPVYVPAVDDEAIRDLSRAREDTLRDLKAAKLRLKAFLLRHDIRYTGRANWSPAHLRWLSEVVCPTPAQQIVFQEYVQTVTEQTERLGRLELELHEQVQTWRLSPVVEALQALRGVQFTVAVTTVAELGDLTRFDNPRQLMNYLGLTPSEYSSGGRRQQGSITKTGNTHARRALVEGAWAYRYPAKVSRHLQLRLEKLPKAIQAISWKAQVRLCKRYRQLMAKGKNANQVVVAIARELSAFMWAIAKQVTVPPKA

SEQ ID NO: 287189 - protein, 361 aa, unidentified
MEYYIGLDVSQRQTAICIVDGKGSLVKEGKTVTTPSDIYAWITKHIDPKLIKTVGLEAGAMSAWLYTELSKLGLPMLCMESFQAAEFLKAQRNKTDKNDARGLAQLVRMGGEFIKPVLIRNQSNQEARTLLTMRHFLVGQKVDLENNITGTLKPFGLITPRGNTSAKTFRERVLAILDRADERDILIRGSVMPSLDIYDTLCKQVAVLSKKVEIMAKADPICRLLMTAPGVGPIVALSFVTAIENPKRFKDPDDIGAYFGLTPKQYQSGETDKQTGISKRGDIMTRTHLVQAATVLLTSCKKWSVLKAWGMKIAKRHGFFKARIAVARKLATILCKMWLKGQEFCWTKAPANTVLAVATPA

SEQ ID NO: 287190 - protein, 343 aa, unidentified
MGDVITIGLDIAKSVFQIHGVDADGAVVIRKRVSRAKVLEFFAAVPRCLVGIEACPSAHYWSRKLEVLGHTVRLMPPSYVKAYLKRSKNDANDAAAICEAVTRPSMRFVSTKSEQQQSGLMLHHSRRLLVRQRTMLSNAIRGHMAELGIISAKGRNGTGELLEVIANAKDNCIPAAARFSLEVLARQYIAIATEIGVLEKRIHAWHRSCEESRRLEEIPGVGPIVATALIAEVGDWKAFASGRSLAAWIGLVPKQHSTGGKERLGGISKQGNRYLRWLLVAGAMAVIRYARRHGTKRLWLTRIMERRPIKVAAVALANKIARMAWAIIVRGERFREPRLLLAA

SEQ ID NO: 287191 - protein, 418 aa, unidentified
MERIVQRCAGLDVHKASVTACVRVAATTTSEGEEPHQQTRKFSTTTAGLLELRDWLASSGVELVGMEATGVYWKPVYYVLEDDFECWLLNARHLKNVPGKKTDVTDAEWICQLVEYGLVRPSFVPPKEIRELRNLTRYRKRQIEERAEEVQRLEKVLQEAGIKLSSIATRVLGVSGRAMIEALLSGTTDPEVLAELAKGRLRSKIPALKEALEGSFCAHHAFMVGNILAHVDYLEESIARLSAEIERVLAPLCEEVALLSTIPGVDRRTAETLVAEIGVDMSRFPSSAHLASWAGMCPGNDESAGKRRSGKTRKGSKWLRSALTEAAHAAARTKGSYLSAQYGGIRGRRGSKKAAVAVGHSILVIAYHLLERKVPYEDLGEDYLHNRRCSREARTNGLVRKLERLGHKVVLEPLVQSA

SEQ ID NO: 287192 - protein, 469 aa, unidentified
MIKAKRSRPGQDQGGAMSPIHPHAAAVDIGATLHVAAVGPGRDAEPVRSFGTFTADLHRMADWLKQCGTRTVAMESTGVYWIPAYEVLEQRGFEVVLVNARDAKHVPGRKTDVSDAQWLQRLHEYGLLRASFRPQGEIAALRAYLRQRERLLDYGASHIQHMQKALTQMNLQLHVTRRRVPDHVVSDITGVTGLRILRAIVAGERDPAVLAGLRDVRCKSSDETIRQALVGNCREEHLFELAQALELYDAYQAKVAACDVRIEAALERLRETAAKPVGRLPPPRNTTRQTNALAFDVRAALHALLGVDLTQVHGLGPYVALKLVGECGTNLSAWPSAKHFTSWLCLAPSNKISGGKVLSSKTRRTGNRAAALLRLSAVAVGRTDTALGAFYRRLSGRVGKAKAVTATARKIAVLFYNTLRHGMAYADPGASYYEERYKQRVLANLQRRAKSLGYVLQAASPEPAGAGVS

SEQ ID NO: 287193 - protein, 410 aa, unidentified
METIFERVAGLDVHKAQVTACVRLPAASGGREQHLAEFSTTVRGLVALRDWLEAHGVTEVAMEATGVYWQPVWHVLEDAFELMLVNARHVKQVPGRKTDCSDAAWICQLMEAGLLRGSFVPPKPQRALRTLTRYRKTQIQARADEANRLHKALEDTGIKLDCVATNILGKSGRAMLDALCRGTTDPEILAELAQGKLRPKIPALREALEGRFEPHHALVIGAILAHIDFLDEHIDRLSEAIEEQLGPFAPGVPLAATITGVAARTAQVMVAEIGTNMSRFPTAGHLASWAGRCPGNDQSAGKRRSGRTRKGSKWLKIALDEAALAATRTKDSYLQAQYQRLRPRIGHSRALVAVQHSMLVAYWHMFSTGETYRDLGGDYYRKRDPERTTRRLISQLEALGHRVTLQPAAA

SEQ ID NO: 287194 - protein, 424 aa, unidentified
MNLTQNDRLKQVTSDTLIVGVDVGSQTHFCRAFDWRGFELSRRVFKFSNTGMGFLTFLRWTEELMNKTEMKKVIVGCEPTGCYWLTFQKFLQDHDIQLVTVNPFTVNRSMELDDNSPEKSDLKDPKTIALLVKDGRFSTSYLPSGVYAEIREASVCRDQIMKQHVRLSNQIQGWIQKFFPEYFECYADWDSTSGLMLLREAPLPQDILKIGAGGINQIWRNAKVRAAGIKRAQTLVEAAQNSVGLEAGEAARLEIWVLVNDYILKAEQLKRLDEYLEEKVKEVPNVEKLLAIKGVGMSTVIGFIAEVGDIGRFTDPKQIQKLAGLEIVKKSSGKKKGQPRISKRGRRKLRRTMYESVRALMTWSPAFQDVFLYYRNRTKNPLGWMQAKIAVACKAIRIFYVVLQTGCDFDEEKFRKDIIRPEAA

SEQ ID NO: 287195 - protein, 309 aa, unidentified
MVFVGVDVSARRLDVAIGSEVRQFPNPEGIPDLLRQLPPGAVVGLEATGVYGRPLAFALHRSGFRVYVLNPLAVKSYARSLLRRAKTDRADARLIARFLAERHADLEPYEPTEDVLYQVGLLVRFARGLVAQRVAVLNRLHAWEYGWPEGLGLVRRVPEVLASLRREVEAIAISLLGTDPEVWRHFQALQSLPGVGSSIALTILAYSGDLRRFRSARAYAAYTGLTPRVHQSGQLPERASISRMGPSALRAAFWMAALSASRVEPYASLVARLVQSGKPKKLAITAVANRLARAAWAVVVKGGLDKWEL

SEQ ID NO: 287196 - protein, 353 aa, unidentified
MIELSKVEAQEVMGLDLGDRSSQICRMDRKTGAVLEERRLSTTTASVQRYFSALPPQLVALESGTHSLWMTRLVKSLGHEVIVANPSQVRAISASLKKTDERDARFLAYLVRVDPRLLSPVEPRSEESQQAITVVRAREGLVKARTMLVNQVRGVVKSFGYRIASCSTAAFAHKARQEKTLPSSLKETMEPLLRVLDEVTQQIARFDKEVEALARRWPVTLRLRQIKGVGVLTALVFVLTLGDPLRFANSRAVGAYLGLVPGSRSSGQSTPQMRITKQGDRLARRLLVQASQYVLGRFGPDSDLRRFGLRLAERGGKNGKKRAVVAVARKLAVVLHRLWVSETDYEPLRKATA

SEQ ID NO: 287197 - protein, 416 aa, unidentified
MAIKRLIERCAGLDVHKQSVTACVRVPGPGAGERSSETRTFSTTTAGLLVLRDWLASFGVTVVGMESTGVLWKPVFYLLEDDFECWLLNAQHLRNVPGRKTDVKDAAWICELVEYGLVRPSFVPPTPIRQLRDLTRYRKAVIEERTREAQRLHAVLQDAGIKLSSVATDILGRSGRDMLQALVAGTRDPKVLAELARGRMRPKIAALCEALEGRFSAHHALLVAEMLARLDHAEETIARLSAEIERAMAPFAEQVELLRTIPGIDRRVAEIIVAETGGDMARFPSPGHLASWAGVAPGNNESAGKHRPSRTRKGDKWLRKALTEAAWGAARTKDTYLASQFARLKGRRGPTKANVAVAHSILVIAYYVLERGEPYSDLGADYFLHRQSSDAYKARLVHQHQRMGLKVTLEPIQPAA

SEQ ID NO: 287198 - protein, 347 aa, unidentified
MKEQNNRSEFTIGLDLGERRHRFCALNGKGEVVEEGTLGNDRASLARLTARYRRTLAVMEAGAHSPWVSRYLEGLGWEVIVSNPRKVRAIYQHERKSDRRDALMLARIGRMDRALLYPVRHGSEEAQQDLLRIKLRDSLVRARVALINSVRFSLKSLGYAVSNPSSERFHKVAFETLPEVVREMIAPSVQALAELSARIAVLEREISLLARTKYPQTLWLQQVPGVGAITALYFVLKIEDPKRFKHVRDVGAYTGLCPRRDQSGESDPQLRISKRGDAYLRRLLVSAAQYILGPFGPQSALREYGLRLAADGTTRAKKRAVVAVARKLCVLLLSLWKNQTPYQPYPA

SEQ ID NO: 287199 - protein, 544 aa, unidentified
MKKISTAAAKATRNFRDHKLTIGLDLGDRSSWYCVLDEAGEVLLEQKLGTTPKAMQEVFGGMPRSRMALETGMHSPWVSRVLSELGHEVIVAHARNVRLIGESRRKDDRLDARTLARLARIDPQLLAPVKHRSAQAQAHLTVIRARAGLVRARTALINTARGLTKSYGERLRGCNPRNMNPEKAQGLSPELQAALEPLLAAIESLSERIREYNQQIEKIAGESYPPVARLKQVKGVGTLIALTYLLTLEDPHRFRKSRDVGCYVGLQPGRRNSGQSEPQLHISKEGDPYLRTLLVQGAHHILGPFGADSDLRRWGLKLAERGGKNGKKRAVIATARKLAVSLAKSSSATKNGAILGSEGLNTISMLRQSTETLGGREGWESGTPVGACVAHIYILRTGGKLVWTRQLDRDDGGGLPIAPAKGPDLRLPNEFCRSAFPSRVQDACGPHGSNEHTPRAIASDGVHSPRQCGPVGLVDSFRPNAPPHRFARGSRRRCGQGLSSWIEQPREPPTRISHRGRRSETWAATRMETPPVAAARSTGSSDGL

SEQ ID NO: 287200 - protein, 364 aa, unidentified
MEQITRGGAAGEVVRVGVDLAKRVLQVHAVDAQGRVVTRRALRRDALLGWCAQLPSGCVVAMEISSSAHHWARRLVAMGLQPRLMSAQLVKPYRSEGATGKNDANDAAAICEAASRPTMRFVPMKSVEQQSMLCVHRLREGLKADRTACINRIRGFLAEFGLVFAQSPEALSSVLADVLEDGSNEMNALVRRVIEHAREQWRELEVHIAWCDERIAQHARDNAAVRQAAKLMGIGPITASAVIATVDDFAQFKNGAQFGAWCGITPSQDSSGGKTRLGRITRRGDTYLRSLLVQGAKSAVMTAHKRSDPISRWTLALRERSGWQVAAVALANKNARILWAVMTKGTRFDPSYVSVKPCAVPATA

SEQ ID NO: 287201 - protein, 415 aa, unidentified
MNYVGIDIAKSFHVVSVIDDNETKVINKPFKINNDAKGFEKLITVLNSITLDKSEFTIGLEATGIYGENLQEFLKSQQYLVKLLNPFQTTRYREQITLKKVKNDEIDSLVIALLLKSGKFSSGYITDDEYQSLRTLYRNRATIQADMKDVKKRILTQITVTFPELEGFMKPFSVTGLVLLDKYPTAHHYKHSSVDRIMKLFRHIQGNNFTQSKALQLLELSKESIYSGKAKDARAIAIRSTIRLLQMYLNELDIIEAEILSLLQNSSVETTVDEAGIEIQKADNLLANLKTIPGVAEKTIAALISECGDLTRFPSIPKFIGYLGLFPTENSSGNSKYIGHLSKRGSPLAKHALYMSAVSCLIHNTQLKQLYDTKRSQGKSKKEALIAVSRKIAVIIYSIVKYNVPYNPNRVFAKS

SEQ ID NO: 287202 - protein, 386 aa, unidentified
MPQSKDDLSRSLVAFDQSSSICAVIELSLDSWLVGAIVPGLARDPLKKLAPDPEALFTLLHRWRDEAVKAGVKIKRIVIAFEAGRDGFWLARWLRARGIEAYVIHPASVPVSREQRRAKTDRLDIGLLQRSLMGWLRGEKKHCSMAAIPSLEEEDAKRPHREREQLVNKRTSSVNRLKATLVRLGIRGFNPKLRNAPQQLATLCTPEGCPIPANTMAELQREIAYYRFINDQIKQNETTRLRQLKQEPRQGLNDKVWQLQRIKGLGLETSDMLVNEVLWRNLRDQRAVSRYVGLTGSPDESGRRRREKGLAKAGNRRARRGMVQLAWRFLRHQKDSALAVWFQTRVAEGKQRKTMIVALARKLLIALWRFVTTGEIPQGVVLHSMP

SEQ ID NO: 287203 - protein, 427 aa, unidentified
MVVVMIGVDPHKASHTAVAINAAEEPLGQLRVRASAIQAERLLEWAQAWPERAWAVEGAGGLGHLLAQQLLSAGERVLDVPPKLAARVRLLATGNINKNDPSDARSVAVAALRSADVREARRDDHAAVLKVWSKRYRDLGRARTQVACRLHQVLCELVAGGVPGEITAGQAARFLESVTPAGAVDAARWELAAELTEDLRGIDVRIRETRKKAAVAVRAAGTSLTGLFGVGPVIAAAVIGDVRHVSRFGNRDRFAAYNGTAPIEVSSGGRKVYRLSRRGNRRLNHAIHMVAVTQIRYRHTKGRAYYDKKLAEGKTPKEALRALKRQISDAIFGCLQEDARRAAATAAKSPGGQPGNHSASRAAGSHPDHRLFGQATPGPATHPMTPAASFPAPLPPRASERPGPGPGAARPRSGARRASSTRPRESR

SEQ ID NO: 287204 - protein, 353 aa, unidentified
MLAELVHHVIGVDPDRDWITLAVVDAHTTGVTAHDRFPATAVGYAEAVEFVDGHSVDTERAWAIEGTASYGRGLSVALSRLGEWVIEFDRPTRKTKDGAKSDHLDAVRAARETLGRDRLSEPRAHQGAREAIRVHAVTRAGAVRARTAAINELKAMIVSADEELRGSLRGLRTSQQVARCARFRERASMSIEGRGTRLSMRALARRIEHLNDEIDDHDRALKTLLDDTAPQLLTERGIGYITAAAFYLAWSHPGRCRSEAAFARLGGTSPVEATSGQKQTCHRLNRGGDRQLNRALYLVAVTRRRCDPATRAYIARRAADGISERFAIRCLKRFIARRVWRLLEHPESVLDKT

SEQ ID NO: 287205 - protein, 410 aa, unidentified
MNKLFVGMDVSLNDVKVHILDQEGNDASSRFSVENNPHGCDVIVSRILECCNKYNIQKVFIGLESTSVYGWHLQYYLADHSALKPYQPSITTFNANIINAFKKSLGNLPKNDWIDAFAIAEKLRFGRLPKSCSVDFRYLALQRLTRHRFHIVNSIVREKNYLLSNLFLKFSGLCQNKVFSNNFAKAATEIFNEFFTLDDIAARPLDELAGFLVDKSKDRFDDPEATAKLLQEAVRKSYRINATVDDSLNFVIKSCFDNLQSLEKQKKAVEKAIINEVKGFNNEFLCLTSAGLISEIGGISRFDNDNALAKFSGLYWSEYQSADFKAEDTYLKRTGNEYLRYYFIQAADQLRKYLPEFSQYYARKFKESKTHKHKRALVLTARKTVRLVFALLREEKLYKSPIMKGDDCIS

SEQ ID NO: 287206 - protein, 429 aa, unidentified
MSLALTLPLAEFAAFVGLDWADQKHDLALLVAGHSRLEASTLKHTPEAIDAWACDLRERFGGRPVAVCFEQTRGAIAFALLKYDFIVLFPLPPARLTKYREAFSSSGAKDDPTDAALLLDYLLRHREQLRMWRPDSPETRELQLLAEARRDAVNQRTRVSNQLTAVLKLYFPQALTLVGERLDTPLACDFLRAWPTLQAVQKAKPATLRKFYYGHGCRSEERIRERLDLIPSAVPITADPALLGAGPLQVQCFVAQLRALHQAIGAYEARLQQLMDQHPDAALFRSLPGAGDALAPRLVAAFGSDRERFSSAGELQTLAGVAPVTRRSGRRCTVHRRWACPKFLLQTFHEFASCSRRRSVWADAFYQQQRAAGKGHHAAVRALAFKWIRILFRCWKSHLPYSEERYLASLQQRQAPLLAYLNQPHALTP

SEQ ID NO: 287207 - protein, 349 aa, unidentified
MRHIGVDLHKTNFVVCFIEADDTRRLETYPLTGDGLSRFKRQLDAADELAVEATQNVHYFYDQVKTHVRRVAVVDTYRFGVVAKSKKKTDKADAAALARFLKLGWLPEVPVPSERVRELRQLLQARETLVSMRTKLKNMAHAAFSRNGVARARAAFASAAGRARLSARAELPGADRLVLDVALRQIAQLDAEIKRVEEEVVRRGKSLRGVSRLLQVHGLNLLSAISLLAEVGDINLFETSKQLVSYAGLATSTRQSSETVRHGGITKRGRKRLRTVCIQAVLAMVNRTDTPLISFYKKKKREKGAGKAICATARKLLTVIFVLLKKELDYWYLEDRLYNRKLRTLNAAA

SEQ ID NO: 287208 - protein, 381 aa, unidentified
MYLVGIDIGKLKHSFCLLEKETGEILVEPVFFENNRDGFNVLLSSFKHLPQKDILIGMEDTGHYNLALLKFLLDRNYQVALINPVATNLTRKMQGGISKNDKLDTLTICDVLSSSQRVKSYRISKYSSFDLYEQKLLTREHHNLKEEENQLTNRLQKCIDVVFPEFNSLFKSKYGIVYMNILKEFGSADAIAHADIRTIRKCFDTGRGKHISLTAEELKEAARNSIGFPSSSEATQIKHLVARIELIKEQIAEIDKKIEEFSIQNNSPILSIPGISHFSGTSILAELGDIHNYSKPSQIIKFAGVAPLTYESSQFTAQHTAITKKGCKYLRKTLYQIITPVIQYNPVFRKFYLLKIAQGKGHRCAQGHCVRKLMRVIYHLL

SEQ ID NO: 287209 - protein, 372 aa, unidentified
MNVIGIDLGKMVFHLVTMDQDGKILSRKKLSRPQLLKHIATSPCSVVGMEASCGAHHLGRSFRAYGHEVRLIPAQFVRPFVKSQKNDYVDAEAIAEAVQRPTMRFVPIKTEDQLDLQAIHRVRDRLVLRRTSLVNQLRAFFLERGIALRTGRPRLRRMLPALLADAEQHLTPRMYRLLCLVAEEWRSVEEEIEKLDLEIATIASQDAACQRLLTVRGIGVLIATAIVAAIGNGAAFSRGREFAAWLGLIPKQCSTGGKPKLLGISKNGNEYLRRLLIHGGRSIQHRVARDHHAFGSWLTDLEARANTNVVAVAMANKLARIAWVVLNRQQEYRRQATAVENAGFGLSTVDTPASATGQGSPINSLRSALTGA

SEQ ID NO: 287210 - protein, 337 aa, unidentified
MMNASEMIFAGIDVSKDSLELALDDKSRTSYFDNDEKGIAALLAAINAALLANEAGGAGNAQRTVGAVVLEATGGFEHQAAVELCLAKLPVMVVNPRQAHDFAKAMGFLAKTDAIDARVLSHFARTLYQSEKREQLLMRLPDPKQMALHALIARRRQLVEMRVTEDNRWLMSQKIQRKSIDAVRAVLNKEIGNIDEEVKAQLTEHFADKLKLIENCKGIGQVTQACLISALPELGSLSHEQIGKLVGVAPLNCDSGKHRGRRITWGGRAEVRSALYMAVLSAVRYNVLIKAFYQRLLAKGKPKKVVLVACMHKLLTILNAIMKSGKPWDDHFVRKTA

SEQ ID NO: 287211 - protein, 395 aa, unidentified
MNKKVHYIGLDVHKETMAVSIAPQATTEVRRYGIIGGTLAAVDKLVKQLSREGVELRVVYEAGPCGFVLCRHLRSRGIHCDLVSPSLIPRKASDRVKTDRRDADQLARLYRAGELTAIHIPDQEDEAVRDLIRARSAVVDDLRKARNRLKGFLLRLGFRYTGKSSWNEAHKRYLSGLVMPQAPQQIAFQEYIHALDDAGERLERLTQAVEDALAGWKWEPVVRALMSLRGVQVLTAMTLVAEVGDFSRFSDARSLMHFLGLTPSEHTSSDKRVQGGITKCGNAHCRRVLTEAAWQYRLKPKVSEAIQKRQEHQSKAVRLIAWKAQERLHKRFQQLAVRKKSVVAATAIARELAGFVWAIACQVKAADQPAAPEIIRTCRGKVYRLDPEKKLAQAQ

SEQ ID NO: 287212 - protein, 473 aa, unidentified
MSFLPRRPNGDQARRWIGLDLAKRETQMAVLDSDGEQVSTVRFATTRQNFLDLAEELSSFDTIALEVTTNSNAIVRLLQKSPAEILTSNPIRTKMIASAKIKTDKIDARVLAELARAGYLPLVWLPDLDTESLRHLFCDRRSLVHRRTELKNTVHSVLHRNLIEYQFDDLFGVSGRRWLEALCDSSDAHCDQLDRLRLRALLIELDRLESHLREVEGAIAAFVVERPRMRSQLDHLLSIPGVSLTVAAGLLAAVGDVRRFSRPKKLAAYFGLVPTTYQSGDTKARHGRITKTGRSDARWLAVEASEHLRKAPGPLRALFNRVALKRGHNVALVAVARKLSELVWHLLTKDEDFLYQKPLLTQDKRSLVRKLAKRRTGRKTPSAAPPHLGNKSALYGSGLKGKVIKEELARLASEQSEAIYRALIEHRNSGEDAAEVYCPEGFDPLHPRTTEWQSVLKTLAEKYAKDLALAQSR

SEQ ID NO: 287213 - protein, 360 aa, unidentified
MTKARTLVGLDVHAAKIVAVVLDAETGELQTFTMSGDSAGAAGFCAGLPRPARVAYEAGPTGYGLARELAKRGVECVVAAPSKIPRASGDRVKTDRRDAELLARLLLAGKLHPVRVPGDEEEALRDLVRAREAVRVDLMRCRHRLSKLLLRHGIRFEDGRAWTQRHRDWLATVTLPWPAAQATLLDCRGAIDALTHRRDALEREIVGMIPTSPWTMQVGRLRCLRGIDTLTAVGLCAEIGDFERFARAEQLMSYIGLVPCENTTGQQRRLGSITKTGSGHARRLLVEAAWHYRPRPRIGKALTDRQQHQPAEAIAVAWSAQQRLHRTWTRLEARAKRRTIIAVAAARELSGFCWAVTQIE

SEQ ID NO: 287214 - protein, 395 aa, unidentified
MYSLGIDIGKRTHVASLMSEEGKVILKGFSFPNTTEGADSLIERLSKYSETPADFIVGMEATGHYWLSIFSYLHESDFLIHVVNPLQTDGWRKGTEIRKQKNDIIDSVLIADLMRYGSFVETVLSDENVFSLKQLSRYRTYLVGTASDFKRKIIAVLDQVFPEYASIFSKQGIFGKASTELLLEFSSPIELEEISAETLAQYLAELSRNRIKPEKADQLKQAASNSFGVKFAQEAFTFQLRSMIEQLKFIESQVKETEKEIKRIMSNLDSVILTIPGIGPINGATILGEIGDIRKFSNPKKLVAYAGIDASVSQSGQYEATHNVMSKRGSPYLRKALFSAALVASQCDPVFRAFYQKKISEGKHHLTALGAVSRKLCYVIHAILTKNEPYKIVSD

SEQ ID NO: 287215 - protein, 341 aa, unidentified
MDHYAGIDVSLEQSSVCVVDGSSNIVREAKVASEPGALIEWFRSLGSRVVRIGLEAGPLSQWLFSAMKEAGLAVELLETRHVRNAFKTMPVKTDRKDARGIAELMRLGWFRPVHCKSMEAQETRAMLTARDVLKQKLRDIEMTLRGTLRGFGLKIGETTPVRFGARVKDLVAGHSTLETIAASLLAAHTVLLREFKAIEKRVLSMARHSSRARLLMSTPGVGAVISLTFVSAIDDPKRFKSSKNVGAHYGMTPKKYQSGETDITGRISKAGDKRVRRALYQAAHIILTKPVKGSGLKSWAMQLAKRAGMQKAKVALARKLAVIMHRMLADEKKFEFAAKVA

SEQ ID NO: 287216 - protein, 331 aa, unidentified
MEQNVLYVGLDVSNETIQAAFLDGEARTVRRGCRYANDPEGWRALRTAIVSATALVGPKARVVCGMESTSNMHKRLEQALREEKRRPIEVHVLNPKAVKHFAKALLKDAKTDRIDSHTIALFLLRMKPEAKDPQPQEFEELKEATRTRRRLIEERTDHKNRLHKLLRYHFPGYRKVLGTRSFSKRLLVALAQCGSPHLLAQQSLEDLSQIPLGTRHRLGQGFAKKLHKLAAQAPRQELPKLSRLLIETTARRILELDALIDEMDQALEEWLPRVAPSQLLTTIPGIAAVSAAGILAEVGDVVVSRPRRTLWATAGSTPLSGKAARPKGATA

SEQ ID NO: 287217 - protein, 425 aa, unidentified
MTYRIAGIDVHKRMLAVVVADVAVDGEYACAHRRVSTSPAELRELATWLVAQDVEEVVMESTAQYWRPVWEVRERDWLPACRGRDGASPMAGTLHLAQAQSNRGPRGRKRDFPDAERLVKRLVAQELTLSCVPDAEQRLWRTVMRRKYQLTRNRVQLHNRLEALLEEAHLKLSSLVSDLLGASARRMLQAGADGETDPAALAALADRRLRATPAQLGDALGACTALNPVYRHLVRMALEELRLIEDQIQQHDREMAGLIRPHQDAVQRLAEVPGLGVDSAQQIIAEVGPTAATFSSAKRLASWVGTCPGNEESAGVNYSHRSPQGNRQMRRLLHQAANSAVKTTGSLFQAVYHRLVPRLGHAQAIGAIAHRLCRLIWAILHRAVRYEERGPAVTARRRQARATKMIRELRALGYRVEPGPASSPA

SEQ ID NO: 287218 - protein, 290 aa, unidentified
MEHAITYVGLDVHKDTIAVAIAETGRRGEVREHGKIANTPTALRGLVSRLTRSGAALQFCYEAGPCGYRIQRQLTAAGHGCVVVAPSLIPRKPGDRIKTDRRDATNLAKLHRAGELTPVWVPDPAHEAIRDLLRARLAAVRGLRQARQQLSGFLLRHGHHYNRPAWTLIHRRWLAGLKFEQAVHHIVLEDCIAAVEAATARRDRLEAHIKAALPEWSLAPVVQALQALRGMALVAAATLVAELGDITRFANPRQLMAYLGLEGAGTTVSAISQARPGGKAADSGHYRNRA

SEQ ID NO: 287219 - protein, 361 aa, unidentified
MSSTFQSFVGVDLHKCTVTLTGVDAAGEITRLKISTKSTGKIEAWLRALRGPVWMAVEACPFVEWFIDRFRACVQRIDIADATELSNRRGKRRKTDWNDSLDIAVRLSRGECPLGFIADEELMQLRKLGRHWRHLSRLLSRAKHSMKSMLNAANIRGPKFDGAAAQRWLLANRNLLKPVQQQTFADFIDLVMLTERHRERLRREIIFATRSARFVPIVSLLTSVPGIGEIWAAIIAAEIGPFDRFPNADTLEFWAGLTADMKESAGRTQSGNITKAGSVTLRWALCQAAVTLCQCDARQEAIRQQLVKRLGKPKANVAMGRRLLRVLYAMFRDGKTFERGPARDRTSAANRIRLGRKRQVA

SEQ ID NO: 287220 - protein, 343 aa, unidentified
MSEVTTIGLDIAKTVFHAHGADERGRGVLSKRLTRPKLLAFFAAQPRCIVALEACGGAHHWARELTALGHEVRLIPPAYVKPFVKRHKNDAVDAEAICEAAQRPTMRFVAVKSEEQQASALVFRTRDLLVRQRTQLINAIRGHLTEYGWVAPKGPAYVSMLSDLLDDELGASLPPAAVSMFRVMLDLLADLDERITALDKEIAQRVREQETARRLMTIPGIGPITATALMALAPAAETFAKGRDFAAWLGLTPSQHSTGGKQKLGATSKMGERTLRRLLIIGASAVIIQATRRGTAKGSWLEQMLARKPRMLVTVALANKMARIVWALLAKGGTYRAPMAVAA

SEQ ID NO: 287221 - protein, 316 aa, unidentified
MQYLGIDWGTRRAAWCSLTPAGELTEGAISADEDGLARLVSRLGPDVRGCIEMMSGAVWVRDNLQACGWTIEVADARKVKAIAPLACKTDRVDARVLAELARRDLVPTVWVPPLDDRAIRERLRRRSHLIRLRTSSMNRTFGLLTQWGLRRNLTALRKPGALDELTEHGVPEVWRHSIVTLLGVIDDLDRQLAPLERELRPLARADERARLLMSIPGVAELLGLTIASEIGDISRFASARKLVGYSGLTPRIKQSGQSSRVGRLSKAGPDTLRAGPPSRHPSRPGGPTTPGTSSTPTSSAATASPTPPRRPSPARS

SEQ ID NO: 287222 - protein, 335 aa, unidentified
MKSYKRVIGIDISTERLDVADSNSKIVHEVDYTIEAIKSKILRLIKKPSETLVVCEATGGLEYSLVDMLHDAKIDVVVANPARIRDFAKGHGFLEKSDKIDAKVLQLYGQQVDATLAIPRTLQERNFIALTRRRTQLLQLISQESNRLRQSNDTQVKSFIEEMLKSLENQMKTLDSWISKALDEQSKTNPSIDVMRSVPGVGVVMTATLVAELPELGTISRTKIAKLVGVAPMIKQSGKSEERRRARGGRGGVRRVLYMATLAATQKNDVIKKRYIKLLASGKPKKLALVACMRTLLTILNDMVRHETKWGEKKKSVAGSVVSNRPAPAHVLDKS

SEQ ID NO: 287223 - protein, 334 aa, unidentified
MENIALIGIDLGKNSFHIHCQDHRGKAVYRKKFTRPKLIEFLATCPATTIAMEACGGSHFMARKLEELGHSPKLISPQFVRPFVKSNKNDFVDAEAICEAASRPSMRFVQPRTESQQAMRALHRVRESLVQDKVKTTNQMHAFLLEFGISVPRGAAVISRLSTILEDNSLPLYLSQLLLKLQQHYHYLVEQIKDLESQLKRKLDEDEVGQRLLSIPCVGTLTASTISTEIGDGKQYASSRDFAAATGLVPRQYSTGGRTTLLGISKRGNKKIRTLLVQCARVFIQKLEHQSGKLADWVRDLLCRKSNFVVTCALANKLARIAWALTARQQTYEA

SEQ ID NO: 287224 - protein, 286 aa, unidentified
MTEQRRSYAGECVYVGVDVHKETYTVPCVCHKQLVKTATVQAEPASLAASVRRWFPGATLASAYEAGFSAFVLHRALTQAGISNIVVNPASLAVAANAKVKTDRRDSKRLAVDLADGRLRGISVPTEEEARARLLPRTRAQLVEHRATLARQSKATLHQFGLIAPSRPGIGEVVARPVATALGDMTRFANERALCSDTGLTPSAYASGAAGRRGPLSRQGSSRGRHLLIETAWRAFPYDAVLQTMFERIAATRGKKRAIVAIARRLIGRIRACFRQGTMYAVGTLT

SEQ ID NO: 287225 - protein, 383 aa, unidentified
MKSVCGLDVHKDSVYLCILSEFGELIEKVFGVLTYQLEEMRDLMLHHHVVEVSMESTSVYWIPIWRVLSPHFKLNLANPYFIKQLPGRKSDVKDAQWIAECTMKELIRGSFVPPETIQQLRQYDRRIFDLNEEIVRKLSKLDAVLQRCNIRLSNYVSNVDSKSYKAVVRAISQGITAPEELVRLIHGRIINHHGIDVITASLKGVVSLAEIDMISQLRDELDMAEAHKEKCQARMLEICEREFPEELKRLQTIPGIKERAATSLIAEIGTDMNKFETANHLASWSGLKPRNDESNKKIKSRSITHGNVYLRKTIIECAWAASRTKDCFFSRFSFHQTQVRKKNKMKVLVAVARKMLIAVWHVLHDNTIYIDFTTDRKTSRTKG

SEQ ID NO: 287226 - protein, 429 aa, unidentified
MEEVDEVELVVQRVAALDLGKATLEACMRVPHPSKPGRRMQEIRGYATTTATLLEMAIWLRQWGIERVVMESTSDYWKGVYYLLEAEGFDCWLVNAREVKNVPGRAKTDRADAVWLAKVAERGMCRPSLVHPPPIRRLRDLTRYRRALVSDRSREMQRVEKLLEDAQIKISSVLSDIHGVSGRAMMEALIAGQRDPRSLARLAKGLARKKTDRLEEALRGFFTDHHATILQMMLDNIDRIGAQIAALDARIAEAIGPFSRQGSRLADIPGVNTVAAAELIAEIGVDMTRFPSAAHLVSWAKFCPQIHQSAGKSRSKARGKGNPWLAGTVGRIVFSASHTETFLGARYRRLARRRGKPKAIVAVGNSVLTVVYHLLSDADLDFCELGPAHYESRINKHRRARDLATQLQALTGQHIVIRDGKAIITDNAA

SEQ ID NO: 287227 - protein, 378 aa, unidentified
MAPSATPDKDGVDGPNGIDVPHCGLSEPATGEPPTVSITMIGLDTSKSVFQIHGVNETGKAELKRKVRRSELIAFFEKQESCTVVMEACGAAHHWARILTGLGHTVKLIAPEAVKPFVKKGKKNDAADAAAICEAASRPDAQFVPAKTVAQQGILALHTVRSLLVKQQTMLANAIRGLATEFGHVVPKGLHNLEPLVALVDADEAMPAQARQAIAELHERFGELAKGIQSCEAGIVKHARNDATARRLATIPGIGPITASLTAATVVDISLFKTARQFAAWLGLVPRQHSTAGKTRLGRITKAGNKEIRKLLVLGATSMLGRAEGWHSALGAWLRDILQRRPVRLVTVALANKMARIAWAVMTRNEVYRAQGGVAAKA

SEQ ID NO: 287228 - protein, 344 aa, unidentified
MDLGDRSSWYCLLDEVGEVLREQKRATTPKAMREVFASVPRCRIALETGMHSPWVSRVLSDLGHEVIVAHARNVRLIGESRRKDDRLDARTLARLARIDPQLLSPVKHRSAKAQADLTVIRARAGLVRARTALVNTARGLAKSYGERLRGCNVRNMNPEKAEGLSPELQAALEPLLGGIESLSEQIREYNDRIETLAQQSYPQVALLKQIQGVGTLIALTFLLTLEDAHRFRESRDVGCYLGLQPGRRNSGESEPQMHISKEGDPYLRTLLVQGAQHILGPFGIDCDLRRWGLKLAERGGKNGKKRAVIATARKLAVLLHRLWVSGEVYEPLRNRHQVTMPAAA

SEQ ID NO: 287229 - protein, 469 aa, unidentified
MENNYILYVGMDSSKGKADAAILKVSDRRSVKPKFLRKKLSFKFVKSEVTSFLETVRSYSDDNCTSICFALEVTGIYSTNVYDYIKANLYENESIKFLNTDFVNQWRIAHNIAKSDPLDAQTISTIIGTDLDVQYVNDNVFENKNGYQDLKALVHRHYQIKKIYSQEINRLIAQCDCLFPELQYVFEPKSAAFIAVLSSYPTTHDIINASRLEVFNVVYEATKHRCSMDKIDKLFDLCHDTLVPDNISSYGRSIILDLVENIKNIKGQLKMIERYIRDVASLNPAYKLLLTIAGCGPLTAATVIAETGDIKRFKNADCFVSYSGTSPRNKRSGTSVETMGKISKRGSRYLRHAIYMIAEFARRHNPVLKQQFERIKNGNKKRHKLANIAIANKIARYIYSIMKNESGFVIFHEHIMRLPEETQNTFFNSISLDFPENTRKQIYQYSDIDGEVHKFVYTKLEETMIINSI

SEQ ID NO: 287230 - protein, 348 aa, unidentified
MAVTIVETYAITGGVDTHADVHVAAALDPVGGLLGVREFPVTPAGYAGLLGWLGGFGTVCLVGIEGTGSYGAGLARHVTAAGVRVVEVDRSDRQDRRRQGKSDPLDAVSAARAAQSGRAAGAPKGRDGTVEAVRALMVAQRSARADRIQTINQARSLIVTGPDDLRARFAGHTPAGLVAELASLRPRPGSTVGYATRIALRELGRRAEFLDAQLGRLDELVVPLVTEHAPGLLALYGVGPHTAALLLIAAGDHPERLRSEAAWAHMCAAAPIPASSGKTVRHRLNPGGNRQANHALWRIVFTRMSSHPATRAYVERRTAEGKSKKEIMRCLKRYVAREVYPHLRPPAG

SEQ ID NO: 287231 - protein, 376 aa, unidentified
MERDSTVYVGLDVHKESITIAYAVGIGDVELLGRIGTAKGDIDRLCKRLHSKGRRVHVVYEAGPCGYGLYRQLVAEGFECMVCAPSLIPKKPGERIKTDRRDSIKLARALRAGDLSAVHVPGIEDEAFRDLARAWVSAKDDLKQARQRLKSFLLSHGVRYPGKADWGSSYRRWVSQHSFSNEWQQLAFEEHRRTLGDRMAQCERLEAALRDSVVNWRFYPAVLGLQAMRGVQFTTAVGMLAEVGDLSRFEHPRQLMAWLGVTPSEHSSGDKRRQGGITKTGNSYARKLLIEAAWSYRHQARVSENIGRRHPGLPKPIIDRAWDAQLRLCRRYRKLAARGKNANTAVVAVARELAGFIWDITRLSMSLAIPRTGLSA

SEQ ID NO: 287232 - protein, 418 aa, unidentified
MKVVHSICCGVDVHKTFLVATLITSEGITPQYSKKRFATFNKSILQFKQWLIDNNCFDVCMESTGKYYVPIYNLLEDTIRITIANPKWVKAVKGNKDDTKDSKWIGDLFRLGLVPGSYIPDKPIRILREYTRYRYKLISCKSSEKNRFQNAFTVCNVALDAVVSDMFGKSAASITDYLISTDNFDPQHCSSLLLKSLKKKADTVIESIEGYQMTEEQKNRILLIRSHLEFIQNSIVKLDQKLNEMITPFEPVIKLLCTIPGVDRNSAITIISEIGTDMSQFANSKRLCCWAGLTPGNNESAGKKKSVRITRAGVYLKPALVQVAHASVKSNKSPYYQNKYERIYKRRGKKRAIIAIARMILTAIYNMFTTGEEWNPSDLYKIDMPQELLERQKEKAIKQAVKLLIANGVIKATDIPAV

SEQ ID NO: 287233 - protein, 453 aa, unidentified
MEQPQEIEDEEYERTWERVAAIDVAKGSGVVCTRVPDEDRPGRRRSHVWTVTATRQAVIELADHLRGLQIQIVTLESTSDYWRIWWVVLEAAGLKVQLVNARHVKNVPGRAKTDKKDAVWLAKLTERGLLQPSFVPPPEIRRLREFTRLRTDLVHERTRYWARLEKLLERALIKISVVLSKLTTDTARAMIEALIAGQRNPKILAELAIGKARSKRAELAESLDGDWQPHHSELARILLDQIDALTKQIDTLTDRVSELIDQVPAAWGVDGDGATGPQAGAGPDAVILPAVARLDEITGCGIIAAQAIIAEIGLDMTVFGTSGRLVSWARRSPQTRQSGRKTTTGRAGKGNPYLNGMLGEIAASASRTDTFLGERYRRIARRRGKRKALAAIARSILVIIFHLLADRTARFHDLGPGWYDTYIDKQRKVRNLIRQLEALGYPIPPAAAEAAAA

SEQ ID NO: 287234 - protein, 340 aa, unidentified
MNLLKYIGMDVHKATIVIAVLNSMGKVLMEAIIETKASVILDFLKGQRGTIHVAFEEGTHAAWLYDLIRPHVANVVVCDPRKIVSVGNKNDKVDAKRLAELLRTNALVAVYHGSRGTRAVKELAESYDSIVRDGTRIKNRLKAIFRGRGIDCSGTGVYSPEQREQWLAKLDHAALRARVARLGQELDCIEGLSEEAGKDLWAEARKDPATKILRSVPGIGPIRAAMILGIADTPHRFRTNRQFWSYSGLGVVTHTSSEYEVADGRIRRSQKRPLVRGLNRNYNRALKQVFKGAAKTAAAGEWKVLFDAIVSQGRPESLARLTLARKIAAVTLAIWKKGER

SEQ ID NO: 287235 - protein, 329 aa, unidentified
MSDSASRPASADAFVGIDVAKDKLDLARSDADGSAALLTFANDPDGVARVVALLRTIPALAVVAVEATGGLERALLGALLEADLPVALLNPKHVRHFALALGKLAKTDPIDARVLVAFARHVQPRLAQKRSQNQAELDALVTCRRQLTHVRTEQANRRATTTSRAARASIDAVLRTVERQIRKLDDRIRKLIESDDDMKHFDGLLRSVPGVGNVVSATLLAELSELGTLGRRQAGALVGVAPFNCESGRFRGRRSIRGGRAAVRAALYMTTLAAIRFNKVIRTFAQRLKRAGKLNKVVIVACMRKLVSLLNAMLRDGLRWDQLDVVSNA

SEQ ID NO: 287236 - protein, 351 aa, unidentified
MTTATPIAAGTILAIDLGRYKSVACAYDRASRAAAFQTLDTGRADFERLFQRHPGALVVVEACSNAGWAVDLAAAHGLAVKVASTNGEAWRFTHLKRKTDRDDARRLAELEALGQLPTVALPDAAARQRRALIAHRQALVGRRDASQNRNGQGLPAPRGHRAWTAIGRAGLDGQAKPLADCAPAELWRGLLHLALADYRHLLGQVADCEAALDKLAAADPATRRLTTIPGVGPRTAEAVAAHLGDPRRFASGKQVSAYAGLVPRQYQSGESDRRGRITRRGPSVLRKLLVECAWVMLRYNAWARATYARLTRGGVTRKKPAVVALARRLLVRCWAMLRDGTDWRAGPAPAP

SEQ ID NO: 287237 - protein, 372 aa, unidentified
MKQNIIHIGLDVDDTQYHGSAFNKNTGEVIDFKSRPTLKGLLQQLDRMARHFKGCKIKLCYEASYIGYCLQRDLISNGIHCDIVSPSSIPSPRGKAIKTDRIDAGYLAQFYANDLLTIVQPPDEEQEQDRDLLRSRQKVMQQRNQLRKHLQAVLRRSGLHYKAETGNKSHWTKHHYCWLVRTIDGLPGSLKVNLELLLRQLKALNEVLTDYGQQIEVLASSPRYRPAVHSLTCYKGIKNIFALTMITEIGDIKRFSHPRKLVSWIGMDIREYSSGGKHNRFGITKHGNRYLRTAFVEANQRGYSTARIGKDVKARRKNIAPELINIADRCLRRLNKKGNRLLLAGKHPNKVKVACAREMVGFVWESLNKAAA

SEQ ID NO: 287238 - protein, 400 aa, unidentified
MFCGWDWGSTHHGVCVIDSDGAVVKRWLVQHTDEELSQLFCELAGFAKPEALPIAIERGEGLVVGLIADAGHPVLMAEPAAFKAARPRWGSAGAKSDLGDAFMLADYARTDGHRLRRVEPVEEATRELGTLVRARSSLVAARTVASNQLWALLAEHWPGAGVVFQKLISQIALAFLTDYPTPQSAALLGVGRMSQFCRRHAYRGGKSPNELLGRLRAAPVSANPIAPTVLAAVIRGSVAQIRMLNSEIAQLERDLQTALAAHPKSDLLKTLPRVGCVSLAQLIAEIGPLLERCDNPEQVAALCGAAPVTRESGKTRTVGFRYAANKPARVAITGFADNSRHSSAWANNRYRRARDRGARHPHAVRIVARGWVRVIWACWHTNTAYDPSRHRGEQLAATAT

SEQ ID NO: 287239 - protein, 361 aa, unidentified
MKLFVGIDVSLKDFKARMFDVEGEETAKRLRAKNDDPGAESLVKYLVEICSTNAVDSLRIGMEATSVYGWHLQMHLAGEPSLVPFHPQVYVFNPKIIANFRKQYVDISKDDWFDCLVIADRLRFGRLPESCQVDFRYLPLQRLTRFRHHLIQTITREKNYFLTNLFFKFNTICQDKVLSNTFGAASEAILTEFLSPEEIAARPLDELIDILMEKGKSHFSDPEATAKALKHAANCAYRLHGSLLEPVNLILATSLQTIRTLEQQVKSIDKAIEKELSHFQNTLQSMPGIGPVCAAGLIAEIGDIHRFDNEAALAKFAGLTWRKHQSGEFEADDTPLTKTGNSYLRSYFVLVERFLNNVAIC

SEQ ID NO: 287240 - protein, 326 aa, unidentified
MQGKEASEQETKVQCNVGIDISKCWLDAHVLPGDDRLRVANNCAGIRQLKRWLSHYRIALVAIEATGKWHRHLHRSLVASAVPVAIVDPYRVRMFAKAQGILAKTDQLDARVLALFAAMMAPPVRPVAPQVMVELAELVVARASAVEAQAALKNQFAAAESTFLKRQLDRRISRAGKDIAALDREILKRIKADASLARRYAILTSIPSFGFAVAATLIACLAEIGSATAKQIGMLAGLAPVADQSGDRDGVRVIWGGRPAVRRVLYLAALSASRFNADMKAFYKRLIDNGKPSKVALIAVARKLVVLANTLVSEDRTWQPRAPILA

SEQ ID NO: 287241 - protein, 355 aa, unidentified
MNYFLGVDIAKTNHVASLINNTEDVVLRAIKFTNSNDGFNKLLTTIQNKLGDLSNIEVAMKATGHYWLSLYSALTDNGFNVSVYNPYQIKSYRGVYNNRKQKNDVIDSILIADYLRVFGSSKSKLPQEDILSLKQLTRFRTNIVDNVSSLKTQVIALLDKVFPEYKKLFCDTFGTTSKQLLLNCPTPDDVLKISTTKLANLLSKHSKGRFNKDTASHLKEVAKSSFGIKFTTDACSFEIKQLINQIIFLENQIDEVSKEIKDLYNKLDSHLLSVPGVGVNLAPIILSEIGDIHNFDKPSKLIAFAGTDPSENQSGNKASSNEKTSKRGSPYLRHAIYTASLVAISNEPELRAYYD

SEQ ID NO: 287242 - protein, 370 aa, unidentified
MQTVNRSQTLFVGVDVHKDTHTAVGLSSFGEKVFEMTIGNETEDFISLVEKTKVEAEKSGLIPSFGLEDVHSWGERLSSFLVEEGLPVRAVAPILVDHRRSKMTHPEKSDSLDASGVAEVMIQKIDSLPLYKVTEEAQKAKQIRELSLEREWLVKERARLKNQLHILLHRIHNTGYRAKFKDPFSKKALRYWMRGAPKDTDAILEQRMKRAVRRLLDLREEIQEIEDGLETMMKDNGTTLSTASGCGTVIAAEIIGEVGDVNRFHSPGALAKYAGCAPKEHSSGKTIRWRKTRSGNRRLNRSFHRMALSQISRSGNDAARAYFKRKVSEGKTKAQALVCLRRQLVNVVWMMMKHKTEYRYPQEKVVDFFS

SEQ ID NO: 287243 - protein, 454 aa, unidentified
MSDRFVPHRALVVGVDPHRESLDVVGICFPEEVVLDEAFANTRVGHERLWSQARGMAGERGVNLVFGLEDGSNYGYALARYLVGQGCQVKEVNPRMTNRQRDFYGQDKTNRLDALATAAIVMRAHEQLPDVGASEQAIQATQELSRYREQLVREQTAEMNRLHTHLANQYPGYKSFFDEVNGTTALHFWAAYPTLSRLRSCTPQQLADSMYEWSHHRLSRAACLRKANHIFHSLDDCPALVEDLLTQAQATIICDLAQRLLHLKRSIEAIEAQSHDTLPATGQQLETFRGIATVLAAVFVGESGDMARFHGDKDRFASYNGSAPATRGTGQHSRQVQNRWCNRRLKSALEQVAFTAYRQDPLSADYYQACLDRGLTPTEARKRLMRRLSDVLFAMMRDKAPYDLEVHRRKQAEKREREARHPPLPVAKPCASPSLKSKTITPGSTCQTTAQALG

SEQ ID NO: 287244 - protein, 393 aa, unidentified
MRRVIGMDIHRTFAEVVFWEDGRLRHHGRVDMTRSGLEGFARGLAEDDEVVVEATGNAMAVVRVLAPHVARVIVANPLQVRAIAHARIKTDKIDAGVLASLHAAGFLPEVWVPDAETERRRRLVARRNQVVRHRTRVKNEIHAILAAHLVPPCPHAELFNGPGRAWLAGQVLPDDERATIERHLRELDRLGEDLAVLDGEIGAAVVDDPAVKRLLGIAGVNVTVAAGLVAAIGDIKRFPSPQKLVSYFGLNPRVRQSGLGLAQHGRISKAGRAHARALLVEAAWAAAKAPGPLHAFFVRIRARRGHQVAAVATARKMAVLVWHLLTKEADYLWARPALVAQKVRALELQAGGPAKKGNKRGAAYAYNVKELRDREKAIAEQAERAYEHLEPSG

SEQ ID NO: 287245 - protein, 384 aa, unidentified
MGGIILDVLMTRCAGLDVHAETIVACVMIGEQDDELFIETETFPTLTKDLFRLLKWLENHGITHIAMESTGVYWKPVYNILEDYFDITLANAQRIKNVPGRKTDVSDAEWIAKLLRYGLIEKSFVPPEDIRNLRDLTRLRKKWIGHLTSEKNRILKVLECSNVKLNSVISDVFGVSGRKLLSKLIQNGYVDSIDVENSIHGRMKHKKQMITDSLFGTLNDHQIFLIKQSWQHIVYLESLISQIEERIDEILKNYKEEVELLLTIPGIKKDSAAIIIAEIGVNMEQFPTSQHLASWAGVAPGNHESAGKRKSTKTTKGNPHIKTVLCEVAWAISRSRNRWLAAKYWSIAARRGKKKALVAISHRMLRIIYSMLINKEPYKEPLIN

SEQ ID NO: 287246 - protein, 379 aa, unidentified
MQHLAIDLGSRTSQICIRSEAGEIIEERKVPTKRLPEYLGKQPRSRVIVETSTEAFFVADAALALGHEARVVSATLVRSLGVGERGLKTDQRDARKLSEVSTRIDLPSVHIPSEQSRERKALCNSRGALLHSRTKLINHVRSRLRSNAVVILKRKPNTFPAQVRQLLLAQPSGVPAHLERVLQVLESLNAQLKDADSELNELAEQDALCKRLMTVPGVGPLIATRFVAVVDQPERFESSHHLMSYIGLTPGEKSSSLRSHRTAITKAGASDLRSALVQGSWSMMHARKDEPMVFITFEDTNGLYETVMFPREYRRLAPLTMNAGPFVLIGQVTEEYGAVTVTIKDLRLLTGRPSAPRGWRDSSDATKAPDAEFDWMRAA

SEQ ID NO: 287247 - protein, 361 aa, unidentified
MRIIGCDLHARQQVLAMLDTTTGEIVAMTLKHEGNNVREFYSKLPRPVRVGIEATGSMQWFVNLMEELGIECQVGHPANIRAAEPRKQKHDRRDADLILKLLVENRYPKIWLPSKEQQDLRALLRHRHQWVRIRTRIQNALQAIALANGLRRGPALWSQDGQRTIASLPLAPHAAYRRSELQAMYAKFAKEIEKLNQRVEEQACERPGARLLMTHPGVGPITALATEVFLGDAARFADSKALASYVGMIPSEYSSGERQRFGGLSKQGNPLLRFLWGEAAMHAVRRDPELQRFYRRKLVQKGVGKTRVAVARKLGIRLWIMLRDEIDYNEFCRRGQMQQKSSEACAGMPDTGHGAKQSPAD

SEQ ID NO: 287248 - protein, 348 aa, unidentified
MRFYTGQHRYYCGVDLHARTLYLCILDAQGKVCLHRRLRCERESFLQAIKPYRPDLVVGVECIFCWYWLADLCAREQIPFVLGHALYMKAIHGAKAKNDHIDSRKVAVLLRGGAFPEAYVYPREMRATRDLLRRRLFFVRKRGELLAHIRNTFHQYNLPPPSGQLLYKKNRDGLARAFDDPILRSTLEADLALADRYDTVIRELERNVLAQAKVQDRDTLDRLQTIPGVGLILSLTLLYEIHDIRRFSSVQRFSSYCRLVKSEHKSAGKRTGSGGAKIGNARLKWAFSEAAVLFLRHNARGQAHLKRLTRRHGKGRALSILAARLGRAIYFMLKNLQDFDAERFYART

SEQ ID NO: 287249 - protein, 348 aa, unidentified
MLYSGIDLHKRTVAIHTLDEAGTVVRQADLPTERAVITAYFATLPGPHQAVVECTGMWYWLRDLLVPLGIDLRLGHAKYLKAISYAKVKTDAVDAATLAQLLRVQLVPEAHMISDAHREIRDVLRARLLLVGRTLRCQRSIGALLEKYNVTTPAQLPDLPRLQADLHAAQGTLLKTHVRRLEHELRDRVLATPAAQRLVWVPGIGKMVAYTLLLEIDDIHRFPSVRHFHSYCRLVPGSANSGGKTKHKRSRDGNRYLKMAFHFAAIRAIQYVPEIRAEFQRLQRRKGKPIARALIAKELATIVYAMLTKETAFNGHFRGHHLTRTKRCTWPRLASPPGITDASEAPPH

SEQ ID NO: 287250 - protein, 331 aa, unidentified
MTNASSAQDSVTPPTVFVGVDMAQKTFVWAIHGQSQTPCASNDDSGFEQLLKALAGQPVGLLVLEATGGLERALATRLLQQGLPVAVVNPRAAREFARSMGHLAKTDAIDALALAHYAQTLAARADQSGVRYAPASEQVQQLQALVMRRAQLLNMRTAEKNRLGGNIRVLRQSILEVIRTLEQQIARIDKDIDAHVREHFQEQAKRLEAIKGVGSTTSATMLAFMSELGAIKAGSAAKLAGLAPLNQDSGKARGKRHVWGGRAIVRSTLHMAMLSAVRYNPVIRAFYERLIAAGKPKKVALVACSHKLLRILNAMARTGEPWNEALHVKNT

SEQ ID NO: 287251 - protein, 416 aa, unidentified
MPDSAEIPAAFVGIDWADCKHDIHVHPADGSAATHEEIEAKSDAIQDWILKMRAQYAGEGRKVLVCLEQSKGALIYQLMSYDFFVLYPINPKTLASFREAFRPSGAKGDVSDADLLCELGRLHRHRLQPWRPDDEQTRKLDGFCQKRRQAVQTEVRLVQQLRAVLKTYYPLPLETLEMNTVLACDFLLRWPTLEDLRRAKAQTIRKFFYAHNYRRGDKLEALSEKLSSAVIVTSDQAIIEPAAFHVRLLAAQLRVVLLAIPQFDQRIAELLGAHPDAPIFQSFPGAGPRLAPRLLTAFGTDRTRFENAGQVSLISGIAPIRIASGKSSLTSFRWACPKYLRQSFHEFAGCSLPHCAWAKAFYDGQRARNKKHHTALRALAFKWIRILFACWKNRTPYQDSLYLEQLQRHGSPLAGE

SEQ ID NO: 287252 - protein, 391 aa, unidentified
MSKKNTRNALDTSLSYAVIGLDLAKADCAVAAVPCSDDELGLIDRMDYESLFEQAEKLEPTLFAMEPCCGYSQISLRLQNMGHGVKVISGHAVKNWIATHKSNQKTDLNDATALAKLALYDHDLQPIRVKNVEECRIASVQAIRIQLRTQATKSLVCFKSLCQCWGIVIRRGSLNTKKMAEAVAAVEKLLGAEVASSLMILRDAYKFTMKQINALDKLLDALVEANEQARTMKTVLGIGTQTAARLAVTTGDIKRFPMPRSYVAYFGLAPRNIITGHSGTPSPSKRDALKPVSSRGQGKVSRRGDRVARSFIIQGAATIYMLYCKDMLPECQLRRWLHEQIKRGKPYGKIIVSLAAKLLRIVWALLTYGEKFDIHKAGVPRSVLAAMEKPL

SEQ ID NO: 287253 - protein, 376 aa, unidentified
MIKTDVQYPTVHLAIELSRSVWLVAARLPGVEKPSLHRIGGGDTAALLALAETLRARAAAKLGAPVRVACCFEAGRDGFWLHRLLTAEGLAAHVLEPTSILVSRRARRAKTDRLDALGMLRVLAAYLGGDRQVCSMVRVPTPEEEDAKRPHREREELVRERVRLENRIAALLATQGVRERPSLRSWERDLAALRTGDGRPLPPHLRAELDRLRRRLVLTLGLIRELEAERDAALAAGPRDAAGRKIAALCRLRGVGANFAAVLTREVFYRAFDNRRQLAGYVGLAPVPHQSGEADRDRRISRAGNARARTTLIQLAWLWLRYQPDSAPARWFRDRVGALRGRTRRIAIVAMARKLLVALWRYVETGLVPEGVEVAA

SEQ ID NO: 287254 - protein, 428 aa, unidentified
MKYNQNFRISQVTNQTLVVGVDIAKKVHYARAFDYRGIEFGKCFNFKATSEGFKSFIKWTKVLKKEQNMEKVIIGIEPTGHYWFTFAQAILEEEMLLVQVNPYHVKCSKELDDNTPSKSDLKDPKTIAFLVKDGRYRIPYLPKGEYAELRKANNMREEWVQKKVAVKNRIIRWFDIYFPEFKDVFSSWEGKTAIMTLANFALPKDISDLSAEEILTCWRTEVKRGVGIRKAKELLYVAQKSIGIIDGSNMADYEIKLLIKEYTEINEVILDLESILEKIVVTIPGAKNLLEIKGVGMRTVCGFFAEIGDIRRFESGKQIIKLAGLNLKLNSSGNHKGETTITKRGRSRLRAILFKGILPLVATNEVFKRLHNDNITKGNRPMKRKQSLIALCCRFIRIAFTLITKNERFDPEKLLKDIYRCSDGKEAA

SEQ ID NO: 287255 - protein, 482 aa, unidentified
MAFSRPQQGMKMILRLAGRERNVTGFRTRDRVCIQSRRGTTNCETRQRVSTQGSFPSFAAATGDGAMEVSMEVVHSRCCGLDVHKRRISACVMIREHGKLEKSERRFGTFTHELEDLVAWLLEHNVTHVAMEATGVYWKPVWNVLEGHFDLMLVNPQQIKALAGKKCDRRDASHLTDLLQHGLLQGSFIPSSEIRDLRDLTRNRARTVQEAAGIKSRIQKVLEEANVKLGSVATDVLGVSGRLMLNGLIKGNKTPSELADMAVGVLRKKHAQLVEALSGKVNDHHRLMLDKLLRALKTRETEIAEDEKDIRNRIEPFRQAVSAWMQVPGIDEITAWALVAEMGPDMAPFATAEEAASWSCVCPGNHESAGKQRDGRTRKGNPWLRSAICEAAWGASRTKKSYFHAQYARICARRGPKRALMAVAHSMIIVGFYLIKYDLQFKDLGADFFDRRNREHATRRAVKRLRALGYNVHLEQTTPAPA

SEQ ID NO: 287256 - protein, 390 aa, unidentified
MSQPFDVSRSLTAFEQDNTLVAVIEMSQSKWLVAAMIPGVTRRPLKKLDADASALLKLLQRWCEEAHKAGRAVKRVVCAYEAGRDGFWLARWLRARTIEAYVIHPASIAVSREHRRPKSDRIDTELLMRSLLGWLRGEKRHCSMATIPTMAEEDARRPGRERESLVSEQTRIVNRVKSVLALFGIGGFNPRLRKAAQQLETQRTAEGTPLPDKARAELRRDLERLCLVRDQIRAIESARLQRLTAAPATSQGPHAMVRLIARVLGIAIETADMLVNEILSRNLRDRRAVARYAGLTGAPDESGQRRREKGLARAGNGRVRRGMIQLAWRFLIFQKGSRLANWFRERTADGRRTTRKTMIVALARKLLIALWRLVTTGQVTEDIKLRPAST

SEQ ID NO: 287257 - protein, 386 aa, unidentified
MIYVGIDIAKLNHFASIISSDGEVLIEPFKFSNDSDGFRLLLSKLNQFESDSLVIGLESTAHYGNNLVKFLVSRHFHVCVINPIQTSAMRKNNIRKTKTDRIDTLLIAKTLMVQPHRFYDKQDIDLMHLKNLGRFRQVLMKQRTSAKIKLTSFLDQAFPELQYFFNGIHHKSVYSLLKEAPSPEKIASMHMTHLAHLLETTSHGHFKKDKAQALRILAQKSVGSSDSSISIQITQTIEQVELLDSQIHDVEAQITTIVKSSGSVILTIPGISCIEAGMILGEIGDIHRFSSPSKLLAFAGLDPSVYQSGNFNASHTRMSKRGSCVLRYALIYAAHNIVRNNDVFRSFYDAKRSQGKNHYNALGHCAGKLVRVIFKMLTDNVAFCLS

SEQ ID NO: 287258 - protein, 309 aa, unidentified
MNIAPGLIGIDIAKQHLDVFDAALGRAVQIPNTPAAISALIARWPNKPACVLFEATGAYDAALRHALDQDGIRFARVNPKRARDFARAAGFLAKTDAVDAKMLAAMAQCLSPPAEPPAQPERERLARLHKRRDQLVATRQQERTRRHDAPAEIVCDITRHIAWLTAEIAALQTRIDQLIAASSTLKQTCRLLRSAPGVGPVTATTLIALLPELGDRSPQTIAALAGLAPINVESGQFRGKSQIRGGRKRVRDALYMAALATTRSQSRFAKLYQSLRAAGKPTKLALVAIARKLLVTLNAIVRDNLAFQP

SEQ ID NO: 287259 - protein, 402 aa, unidentified
MNCVGIDVSKGKSMIAVMRPFGEVVVSPFEVRHTANELSELAGLLKSLDGETRVVMESTGNYHAPVAWLLHDAGLYVSVVNAMLEHDYGNNSLKRAKTDKKDAVKLANYGLDHWLTLPRYIPEEDTRLMLKICYRQYQQYSKVQTMLKNNLISLLDTTFPDANRLFTSPPRADGSEKWVDFVATFWHCECVCGRSEKAFTTQYQKWCRKHGYNFSEDKALDIYASACRHFGVIPKTDTAKLLVEQAISQLQTTSSALAALKQEMQSLAASLPEYPVVMGMFGVGPTLGPQLLAEIGDVRRFHSKKALVAFAGIDAPPYQSGQIDVRSRSISKRGSASLRRTLFLVMGVLLQCAPMDEPVYQFMNKKRSEGKPYRVYMMASANKFLRIYYASVKAYLESLEHD

SEQ ID NO: 287260 - protein, 316 aa, unidentified
MPVEHFGCDADKAFLTVACHERPGHLQRIGNDVGPIDEWLSGLAPDSVLAVEATGTCHQVLLERAVRHSLTIYLLNPRDVRHYAESMRRRAKTDRVDAQVIARYVAREKDNLRPYVPPSAASARLQVLLRRRASVVQNFTGLKLSLSDLEMPEKDHLYTGYAALLKALDEQVDAVIAQEERGVRQREQLRTIPGVGPLSSAALVSLFWRLPGITADGLIAFVGLDPRPRESGSFRGQRKLSKRGDPELRRLTYMAAKTFGRHELGRALYERYRQRGLSAIATYVILARKILRLAHALITKDTFFDPERFAAACVRT

SEQ ID NO: 287261 - protein, 398 aa, unidentified
MRFAGIDIGGECHAVAVVNDNGVLLVRSTLFGEEAVGYQRLRELLGDPNDCLVAMEATGHYWRNLFAFLVGHGFKVALLNPLRTRRFAEEELERTKTDSVDALGIARFAAQKRPAPTPVSDEVTGELRELVRLRTRYVDQLSDRMRQLHRALDLGFPEFTGHLRLNTLLATAILARYPTARSFARVSIRKLARLAYDGRHHVGEVLARTLIEGAKVSVGSHHSEPYQLQVKYTCADIELLRGRVKQLEQDIERKLQDHEVGKLLTTIDGIGARTAACLIAELGDPSRFRDAAALASYVGVVPRLRQSGKRAFSGARGLPLGNARLRHRLWMPTLVAVRRNPWLRAHYDRLLAASKRPKVALVACMRKLLGAIYSVARNRRPFVLHLATAGHEQPVTAG

SEQ ID NO: 287262 - protein, 348 aa, unidentified
MAHFVGLDVSVKETSVCVVDDAGKVILEQKVPTEPEDIIALLSSLGETYGRIGIEAGPLSQWLVNALTAAELPVICVETRHMKALLTAQQINKTDRNDARGIAQMMRVGLFKPVHVKTLVAQEQRMLLTSRKLLQRKLLDVECDLRGTLRNFGLKVGVVSSGRYEARVRELVEGFPRLAAIAEPLLKVRQVMRQQLAVLHKMLLDTVRDDPVCRRLMTAPGVGAVVALTYRATVDQPQRFVHSRAVGAHVGLTPKRYQSGEIDYDGGVSKCGDALLRTMLYEAAHSLLTHSGKWSWLKAWGVRVAQRRGMRRAIVAVARRLAVVLHRMWVDGSEFRWSKDSAAVPMAA

SEQ ID NO: 287263 - protein, 350 aa, unidentified
MEKRITTFVGLDVSDRFTEMCVLDGKGAVVDQDRMRTTKGSLEKRLSKFQDARVILEVGTHSRWMAELIGTLGHEVIVANPRQVRLIWKRRTKTDRSDALVLARLGRLDVDLLAPVQHRSRGAQVDLACARSRDILVRNRSQLISHVRGMLKPFGHRVRDCSSNTFVDEAEAVVPAELVPALGPVLAVMRVLNEQIAAQDRQIEQLVTTVHPATKRLTQVPGVGSITALAYYLTIEDPTRFKKSRFVAAFLGLVPGKNQSGESDPQQHITKTGDPFVRKLLVQCAQYMLGPLGPDSELKRWGLALAGRGGKNAKKRAVVAVARKLAVLLHRLWLSGAPYQPLGYGKAHAG

SEQ ID NO: 287264 - protein, 360 aa, unidentified
MIVIGTDAHKRSHTCGAVDALTAAVRGEQTVPVRHERFDRLLVWARGLDSQRVWAIEDCRQVSGQFERFLVARGERVVRIAPKQMAGARRSARERGKSDSIDAFAIARAALKEGIENLPTAQLDGPALDVRLLVDHREDLLAARTRDQQRLRWHLHDLWPELEIPAGALDRANWLGRITRRLARAEQATRVRIARELVRQIAQRTTRIRELETELHTLLGTLAPQLLAERGCGTLTAAKLVGEIAGAERFATDAKLARTSGTAPIPASSGNSNRHRLDRGGNRQLNCALHRLAISKANWDPETAAYLARKQAEGKSRKEALRCLKRILTRRVWKLLNPPNPNAPHTKQPPPQKPQQANLT

SEQ ID NO: 287265 - protein, 345 aa, unidentified
MKITTVGIDLAKHVFQVHGIDERGKTVLRKQLRRAQVAVFFGNLPPCLIGMEACASAHYWGRTLQHYGHSVRLMASQFVKPYVKTNKNDAADAEAICEAVGRPNMRFVPIKSIEQQAILSVHRVRQGFVKARTAQANQIRGLLGEFGLIIPQGICNVAKRVPELLEDAANELPVPFRQLIDRLTEHLKELDRQVKDFEKQIIAWHRSCELSRKLENIPGIGPLAASALVASIADANSFDNGRQVSAWLGLVPRQHSSGGKSTLLGMSKRGNPYLRTLLIHGARSAILAAQRKTESTNVWLANLLNRRHPNIAAVALANKNVRTVWAMLAHGREFKADYVPTRMAA

SEQ ID NO: 287266 - protein, 342 aa, unidentified
MNIIRIGLDIAKHIFYLHGVDAPGKTTLRRKLKRHELLAFFAQCSPCLIAMEACSGSHYWGRELRKLGHEVRLISPQFVVAYRKNQKNDYNDAEAICEAASREHMRFVAIKSEQQQTTLMVHRIREQCIADRTSKANQIHGHLHELGIVLPQGVTRLLALLPPLLEDNQLPALLKSLLRDLLEDIHLLNKRIESLDKQILEFVKSNDTATRLMTIKGIGPITASALVATVGDAHLFKNSRQFSAWLGLVPKQFSSGGKTKLGGITKAGDGYLRKLLIQGARAVLIKCTTSEDYRSKWIMQLRMRKPDNVVATALAAKLARTAWAIMTSDKIFQENYSVLTAA

SEQ ID NO: 287267 - protein, 405 aa, unidentified
MNMNAVGIDVSKGKSMIAILRPYGEIVSSPFEIKHTSSNIQSLIEQIRSIEGESRIVMEHTGRYYEPLARELSLAGLFVTAVNPKLIKDFGAHSLRKVKSDKADAVKIARYTLDSWTELKQYSLMDELRNQLKTMNRQFGFYMKHKTAMKNNLIGILDQTYPGVNTYFDSPAREDGSQKWVDFATTYWHVDYVRKFSLNAFVDHYQKWCKRRKYNFSKDKAEEIYGAAKELVPILPKDDLTKLIVKQSIEQLNTASKTVEELRTLMNDTAAKLPEYPVVMGMKGVGPSLGPQLMAEIGDVTRFTHKGAITAFAGVDPGVNESGTYEQKSVPTSKRGSSSLRKTLFQVMDCLIKTKPQDDPVYAFIDKKRAQGKPYYVYMTAGANKFLRIYYGKVKECLRNLEQAE

SEQ ID NO: 287268 - protein, 456 aa, unidentified
MKVMHERVAGIDVHKKMIKVAVRSPGAKPWTRKTEVLTFSTFYGVLQAMARELRRRGVTHVAMEASGVYSEPVYYALCEEDFTEVLVVNPAHVKAVKGHKTDAKDSARIAELLECGLLQGSYLPPAELKEVRDLTRYRMKTVQNRTSEIQRLHKALESAGIKLGSVASDITGKGPSAMIDALIDGERRGAVMADLAQGRARTAGKLADLSMALEGRFTEHHAMLCRLHRDTIGAYDAAVSGLDRQIAGKAAPWQREMDLLKTIPGFGDVVAHAWIAEIGPAPHQWFSSAGKLASWVTLAPGNYMSAGKRRYGRTGDAGAYIKPMLVQAAWSAIKGRNWLQARYDRLVRRMGGTRNPAARKKAILAIAHTLLKIAYAVLKSGRPYQEPGADFYARRESPSHRRAWLEAQLQQLYPGCAITVTITPPSGEPPDGHVPEAALPPHCHPANPDPASRRAP

SEQ ID NO: 287269 - protein, 406 aa, unidentified
MEKLDEVWVGVDAGKGHHWACAVDIAGNTLLSKKIINGESEILTGLSEILSLPPKVNWVIDISSSPSSLLIALLVTHGQQPRYITGTLVKQMSRALGSENKTDANDAHVIARTSIFAADRLSAIKVPVQVISDLSLLTSHRTDLVRDRTRAYNRMRDTLTGVFPALERTFNFSAHKGAVVLLTGFQTPSGIRRMGRSRLAAWLAKRGVRLAHGVAESAIEAAEAQHTSLPGEDAAAEIVEDLAASILNLSERIAKVEKRMDKILAEHPHSHILLSMPGMGKILAAELLVAAGDFSAYATEGKFASAAGMVPVSRDSGTRTGVHLRPKRYSRPLQRALFLSAQASCLHHVRDREYYLRKRAQGMRNSAAIICVARRQIRMLWTLLEEDRTYQLEPPTAVSASPAPPS

SEQ ID NO: 287270 - protein, 370 aa, unidentified
MAKRSMFVGMDVHKESIDVSLAEEGRSGEVRHYGVIPGDLEAVAKVVRALRAPNRRLRFVYEAGPCGFGIHRYLTAQGEDCVVVNPSSMPKRSGDRIKTDRRDGDALARLHRAGELTAIYIPTPADEALRDLVRAREDAVGLSTQAKHRLKAFLLRQGRRYPGRAGWTRPYRRWLADLSFSLAPQHIALQEYRDTIDETERRVERLTDQLRQQTPAWRWAPVVDALQALRGVSFVTAVGLVTEIGDIRRFTHPRELMAYLGLIPSEYSSGPSVRRGGITKAGNPHARRLLAEAAWAYQGVPRIGRQMLYRQEALPTTVCDIAWKAQLRLTSRFRKLVARGKAKPKVATAIARELIGFIWAIAREVPPPPA

SEQ ID NO: 287271 - protein, 323 aa, unidentified
MQGKVSFEEDAMPVVYAGVDVSKEWLDVHLHPLGESRRFCNDKTGIRQLKRLLARHRLASIVMEATGKFHRPAHRSLWLDGFAVAVVDPLRARMFARACGYLAKTDRLDARFLALLAESLRPPADTPPSPHIEALQELVNARSAAKCDITALQNRSKTATTALLRGELNRLVRRLEQHVERLDKEIERCVGEDPQLCRKAEILTSIPGIGRVTALALMAGMGELGTCSGKQAAMLAGLAPIANDSGARTGRRSIRAGRPAPRRALYMAALSACRYNPALARFADTLKAAGKPAKVILVAVMRKLLVLANCLLSQDRLWTPTPP

SEQ ID NO: 287272 - protein, 420 aa, unidentified
MGRLKIVYPVCCGMDVHRDFLIACIAATNAQGVTEYQSRRFSTYTGSLRELRDWLLANDCKDVCMESTGKYWFPVHNILDESCHVVVSHPKFVKAIKGKKTDKKDAQWIADLFKHDLVRGSFIPPKDIRQLRDLCRYWVKLSSYMTGEKNRAQNCLTVSNFKLDDVFSNVFGKSASAITTQLLEHPGEQFDVAPFVDGRCKTPIAQIQEAVDGIFTYEQAEKLKIIRGHMDSLERHKAELESLILEIAQNYLPQIELLLTVPGIHDAFTAIRILAEIGADMTVFDTSKHLCSWAGLTPQNAESAGKKKTTRIGKSGAYLKPLLIQVALAASRGEKHPEIYGKKQALQKRRGKKKAIVAIARILLPSISHILSKNEPYNPAAYIQEDKNPMARQISQEKAFEMLARMGFIVSNPSPLSSSG

SEQ ID NO: 287273 - protein, 350 aa, unidentified
MIVGIDVHKQTHAAALIDERGGLIDALTIANSPKGYRHLIDWLVDQQAASAVIGVESPGSYGRCLVAALAGAGFEVLQVPAWRTHRERHRRGPGKTDPGDALSIAKVVLTDRADLGPAQEPELVRALGTLELQRRRFVHDRTQAIQRLRSDWTQHDPVAESGTLRCDRKRELAKLKKIDLGQSLAQRTATRCIRELAHDIDDLNHRIAALDTEIADLLAEHGSPLEELHGVGSNLAAVIVAQAGDVRRFRDASAFARFCGAAPIPCGSGKTAGRHRLHRGGNRQLNAALYRIAIVQQRHHPQAKTFLARKINEGKTPREARRALKRHLANVLYRRLIAWANTTPAMNNLT

SEQ ID NO: 287274 - protein, 338 aa, unidentified
MAILYVGIDLAKNVFAVHGVDESGKPALMRPAVPRAKLHELLAGLPPCTVAMEACTGAHHWARLFAAHGHTVRLIAPKFVTPYRMSGARGKTDAADAAAICEAVQRPNMRFVPGKSEQQQSQLMVHRARQGYVQARTACINRIRGLLAEFGHVLPLKADTVRRQAAGLLEELPGWGNTVIGDLLSELHRLDERITQYDRHIAQIAREDERARQLMQLPGIGTTTATAIVAMIGNGHEFKCGRQFAAWLGLTPGQYSSGGKTRLGRITKAGDGYLRSLLILGGRAVLALAKGRSDALSSWALALQQRRGYWRAVVAIAAKNARMAWAALSRGENFKMPA

SEQ ID NO: 287275 - protein, 402 aa, unidentified
MIYAGIDIAKSSHVIGAVDERGKDAAKPMQFANSAGGFGKCAAYLEGLGAPAEEVLVGMEATGHYWLPLFSFLHAQGYDVVVINPIRTDAMRRFKGSSRVKTDLVDCILIADTLRLGEFRPSKLGDESMVELRQLTRLHQGLKESVADLKRQVIVALDQVFPEYDSIFSDTFGESSKAFLKKCPTPEECRGVRVDALGNTLSRASRGKLGREKAEEIKGIAKESCGIDRGTRTLSFQIKLLVEQIDFIEGQIEEVEARIEEGIETTEPLILTIPGIGHILGAQIASEIGDIHRFRNASAVVSYAGINPSVSQSGKFSSSENHITKQGSPYLRRALYLAATAQLRLSTPFRDYYDKKRADGKSHREALIAVARKLVHVIYAVLSKQEPYRSDAVNANPVSRSE

SEQ ID NO: 287276 - protein, 339 aa, unidentified
MRREEFECIGVDVSKKTLDVALFHGKVDWNEGHIKVDNNSSGYKELKRWLRLKNAKKKQLRICMEATGLYTHDFRSWLEQEGIIYYVVDPKRMHNFAPPQSIKGIRQTKTDKADAFRIAIYCSLFHDSMEPSRLPSAAYFKLKRLLAERRQYVKQSVLYKQQLHDISVYDSAGSIARKKDEVKSLQDNIKQTDAEVMAVMATDPAIKKNYELLTSIVGVGIVVAVTTIVLTENFTTFTNPRKYASYIAIAPFPHESGTSVRGATRVSRQGFRQAKADLSISVLTAITRDPDIREYWQRKKAEGKHAGCILNAIKFKIVLRMFAVVKRGKPYVNTKGYKG

SEQ ID NO: 287277 - protein, 370 aa, unidentified
MEHTRFIGLDIHKERISVAVAESGRSGAVEYLGEIANEPGAISKLCDRLRRPGKPLAFCYEAGPCGYGIHRQLPRLGHRCDVVAPSLIPTKAGDRVKTNRRDATMLARLHRVGELTPVWVPDADHEAMRDLIRLRSVIRQIVTRARQHLQGFLLRHGRKHGRGTAWRMAYRRWLSTLAFEHPAQQIALQDYVDAVMDAERRLKRVEEQVFGLLPDWNLRLVVDGLQAMRGIALINAVVLVTEVGDFTRFSNPRQLMAYFGLVPGERSSGETVRCGAITKTGNAHVRRALVEGAWAYRMKARIGRHKVDRIEALPKVVRDIGWAQVRLCTRYRRLRARGKTANVVNVAIAREMVGFIWSIACTIQSAPRAA

SEQ ID NO: 287278 - protein, 323 aa, unidentified
MPSSIGVDVSKKKFDVALITAQGKYRCKVFDNDVGGFEAFLDWIKLHVPEGGAQACMEATGVYHEALANFLFDNQVTVFVVNPLRVKRFAESEGSRNKTDEGDAKALARFVAKNDLEVWEAPSKAVRELQALVVRLESLQTMRQSELNRLDIAHSSVRASIEAVVAALDKEIEVVRSLIRKTIDDDPDLKQRNDLLFTIPGLGNATIASLLAYIGRPERFKSVKALIAYAGLTPAIRQSGTSLDKRKGLHPAGHRDLRKALFYPAMAAGRFNPIVAAFWQRLKAQNKPGKVIVVACMHKLLAIAYGVLKSKRPFDASLASKGA

SEQ ID NO: 287279 - protein, 410 aa, unidentified
MPERFVGIDVALRDHRVAVLDRDGEAVGQSFTIAATKEGVTTLLQTLPARGATPAQSVIGLEASGHLWENLEGALVGAGYRVLVLNPVQTRRYRDLVRRKAKTDDIDAHVIAGLVRSGAAQQSYVPDEQIQSLRELARLRARLLEDRQDYLRQLIAQLDVVLPEHRTALGDLLSARARGILAQFPTAQHLAQASPRAIRRAAHDAGTRGFSLDEATAVRAAARSSLYSGKAAGARAHVVRTLVSQLERLTTAIEDVDRAATTLLPPSAPGTGPSDAELLQTVPGIGPHTAATLLGELGALTRFTDARALVAYVGFYPVISESGERAATPRLSPVGSPIARHALYLAAVNAVRRSAEWRTLYLRKKAQGKHAKQALIVVAVKLLHTVYAMLKHRQPFNASRLLVAPTTLGA

SEQ ID NO: 287280 - protein, 360 aa, unidentified
MTTQNTPNSSEQYETIKLGIDAHAKWYYVSRQVDGATPQPVQKMTFEELLLFVARQQKLAGKVYTCYEAGPFGYHLHRRLEAMGVTNFVVQPQDWDDRGKGVKNDRLDALALYQRLDRYVRGNQKAFSVVRVPTEAEERERAMSRQRQQLVRERQRLAAMGRSLLAMHNIYVTGRWWKGKAWARIKAQAPGWVVERLEVNIAVIVAVEAHEVKLTGAIQEAGRQKKIPRGVGPLTFEVLRREVGDWSRFNNRRQVSSYTGLCPREHSSGGKRRTGSVSKSGNPRVRAMLVEMVWRMIRWQPDYQPLKKWESVFKNSIATAGAKKKAVVAIARQLAVDLWRVFTGQTTAEKFGLIYQADAA

SEQ ID NO: 287281 - protein, 392 aa, unidentified
MIYVGIDVAKDKHDCFAMNSDGEILIEKLTITNNLDGFETLYNSLMNFSDSLDNIKVGLEATGHYSNNILNFLTEKGFNIYLINPLQTNLYVKCQSLRKTKTDKLDAHVIATMLVSDNLKPYIPVSYHISELKSLTRHRFRLVKENSKFKTSLVRLVDIVFPELPKIVSSVAQKSCLALLYELPSAKDIAECNLTHLTHLLSDNSNKKFDREKALQIRDLARKSIGLNSNSVSFELKQTINIIQFIQEQLDDVEKRIKEILKEINSPILTIPGISFKTAGSILAEIGDISRFDSPAKLLAFAGLDPSMYQSGKFFSTHSVMVKRGSKYLRFALMTAARMGCLNDATFCAFKDRKMAEGKHYMVTMGHVAKKLVRVIYYLLKTNNVYQASKVA

SEQ ID NO: 287282 - protein, 324 aa, unidentified
MIDGILGIDVSKNTLDVSIAICTKVRSKSFANSSDGWRLLLDWLIAQNIQRVHACLESTGRYSLGIAYALYEAGHVVSITNPAQIRDFARTKLGRNKTDGVDASHIREYCELFKPSPWEPPTQAHRRLGELQTIRAGIIAGLTEWKNRKNSGIVDVEAQALADATISHFTSQLGAVDEAITRTIDNDCDLRSKRDLLLSISGVGETLAGVVLAELPGPDVLRSSAEVVAYAGLNPRQYQSGTSVVRATRISKIGNAVLRAALYMPALSAMRYNPAVVALVTRLKSQGRLKPKQIVVAAMRKLLVLCFGVLKTRRPFDAAIAMGC

SEQ ID NO: 287283 - protein, 350 aa, unidentified
MVVVGADVHKRSHTFVVADAVGKQLGQLTVDATTKGHHKALAWVRKSFPGEVVWAIEDCRHLSARLERDLLTAGQRVVRVPPKMMAMVRASARTRGKSDPIDALAVARAFLREPDLPVASHDAVSRELKLLVDRRESLVNTRTRTINSLLWRVHEIDPEHAPKPRSLDLGKHQQALRSWLLGLDGIVAELALDELDDVIALTGRIKEFRKRITDLVEKAAPTLLALPGCGPLSAAKLVGESAGITRFADEAKFARHAGVAPIPVWSGNTAGRVRMTRSGNRQLNAALHRIAVTQIRMDGSLGKVYYEKKKAEGMSKTEALRCLKRRLARTVFNHLNTDGKAATGSQPAAA

SEQ ID NO: 287284 - protein, 404 aa, unidentified
MSENYAVFVGLDVGKSAHHACALAQDGSRLYDKPLVQDEVALRKVFVELQQHGPVLMIVDQPNTIGALPIAVARDCGCEVAYLPGLAMRKAADLYPGRSKTDARDAFIIADTARTMPHTLRAVDRDSEVLSALKMLAGFDDDIARDCTRAKNRLRSVLTQIHPAFERVLVGEVLARAIVLDLLIHYGGPAKLAAAGRGRVLKWARNRSRKDPVELIDRIFAALAEQTVTVPGTDAAELVIPQLAANIKALQQQRETIAGQVEGMLDEFPLAEVLISMPGIGIKTASNILLAVGDCSDFASASHLAAYAGIAPVTRRSGTSIKGEFPARSGNKRLKNAMFRSAWIASNCHGPSQAYYQRKRAEGKKHNAAVMCLARRRSNVIYAMLTNREFYREPPAPNDVAAAA

SEQ ID NO: 287285 - protein, 329 aa, unidentified
MDNQSMQNEVILGVDTHLDIHVAVVISHAGKFLGTYAAPTNSSGYLKLLDWARSWGCARRAGVEGTGTYGAGLARVLREQGIEVLEVNRPDRAKRRLQGKSDPTDAESAARSVLSGEATAVPKSQSGAAEAMRTISVARRSAVKAKTQAINQLRAILVSAPQDIRERLWKAKPEQCIAACARLRQLGSTVLLQTLVTTLRMLAKRWLMLAAELKEIDAMLEKLTSQSAPRLRGQFGVGPLTAATLIAVAGDNPERLRSEAALAALCGASPLQASSGKTTRHRLNRGGDRSANNALWTIAMVRMRSDPRLVPTLSDERQRVCQPRRFSAA

SEQ ID NO: 287286 - protein, 387 aa, unidentified
MTVRTVSNLPAAMHVEMARCLFAIELSKQSWVIGFITPLSAKISRRILSGCDWKGLLDLIEEVRARVSRETGRAVDVLSCYEAGYDGFWLHRLLEAHGIRNYVIDPASLQVDRRARRVKTDRIDTERLLRSLMAYLRGEPKVWSVVRVPSVAEEDARRLHRERDRLVSERVQHVNRIKGLCALHGIYDYQPLRPQAMARLEQLRTAQGLSLPPRLTSEIKRELQRLELVVEMITTLEAERDAIVEDEASTHVNAKKIQNLHQLKAIGPEFAAVLVGEIFHRDFNNRRQLASYVGYAPSPFQSGNVAHDQGISKAGNRKGRTTGIELAWLWLRYQPDSDLSVWFRARVGTTKGRIRRIAIVALARKLLVALWRYLETGVVPRGAVLKG

SEQ ID NO: 287287 - protein, 343 aa, unidentified
MEYYAGIDVSLKESSVCVVDAAGKVVREVKVASEPEALVRYFDELDLAVSRIGLEAGPLSQWLHAGLMAAGRDAVLLETRHVKAALSAMTVKTDRKDARGIAQLLRMGWYRPVHAKSAPCKDTRALLAGRKLLQGKLLDVELSIRGILRGYGLKVGEVSRGRFEARIRELTAGHAILETVIGAMLAARMALWNEFTRLHREMLKIARADRVCRRLMSAPGVGALVALTYRSAVDDPSRFAKSGAIGAYFGLTPKKYQSGETDRDGGVSKVGDGMVRTALFEAAHIMLTRAVRFSSLKRWALGVAQRRGMKRAKVALARKLGVVLHRMWVEATEFRWSNAVPAA

SEQ ID NO: 287288 - protein, 370 aa, unidentified
MAQGSTLFIGLDVHKESLAVAYVAEEREAEVVFLGTIGTRQGDIDKLIRKLQSKGKPLHLVYEAGPCGYWLYRYLTKKGLKCWVVAPSQIPKKAGDRVKTDRRDAVQLARLLRSGDLTPIYVPGVEDEAIRDLVRAREDTLKDGKAAKVRLKAFLLRQDIRYEGRATWGPAHLRWLAQVVCPTPAQQIVFQEYVRAVSEHTERLQRLEAELQTLVQTWRWLPVVEAIQALRGVQFTAAVILIAELGDLTRFENPRQLMSYLGLIPSEHTTGEHRRQGGITKTGNSHARRALIEGAWAYRYPAKVSRHLQLRLEKVPKVIQDISWKAQVRLCKRYRRLMARGKNANQVVVAIAREMAAFVWAIARTVAGTH

SEQ ID NO: 287289 - protein, 404 aa, unidentified
MQAIHRAVAGLDVHRSLVVATVLLEQADSRVVSHTREFGGFRRDRRALVEWLHSHSIELAVMESTGIYWKSVYAHLEMAGIAALVVNAHHVKQVPGRKTDVKDSEWLATLARFGLLRGSFIPPADLRELRLVSRYRQKLVHVLASEKNRLHKWLADAGIGLGAVVSDLNGVSAKAMLDGLLQGKSAEELAALARRRLKHKHQALVEALDCPLSSRHRLLIEMAREHIDYLERRVGELDAYVATAMKPYDWAWRLLQTLPGVDHISAAQILIETGVDMQQFGSAHRLASWAGLCPGNNESAGKRKSGKTRHGSPILRRLLCELANAAARTKSVFKAKYESLALRRGHKRAIVALAHKLLRTVFVLLSRRLPYRDGTIDYDAMSVARNAPRWIRALKKYGYWPQAT

SEQ ID NO: 287290 - protein, 404 aa, unidentified
MELDVIYRSVAALDVHQAKLTVCVLFETNTGEVVSQIREFGGFKRDRREMATWVSSFNPELVVMESTGIYWKSPYSALEKHDLKLAVVNAYHVKQVPGRKTDIADAQWLAILARSGLLRGGFVPPQHFREYRLISRQLQKLTGLASGEKCRLHKLLTDGGLRLSVVVSDLYGKSAKAMIQGILDGETPEQLLAHADPRLKASPDELRDALEGDLSESHRFVIRELMAHIDELEARILRFRQMLLAHLSSYQVILQNLQTIPGIDELSAAMLFVEIGDDMSAFGSPAKLASWAGVCPGQNESAGKRKSAKTRKGNPYLRRILCEAANAVSRTRCSLQDKFKGLMIRRGRKRAIFAIAHKLLKTVFLLIQRGDYYRDANTDYEALSVQRNAPRWIKKLVQYGYISA

SEQ ID NO: 287291 - protein, 395 aa, unidentified
MRFAGIDIASETHTVAVVDDAGGVVVPATTFREDHGGYARLQEILGPPQDLLVAMEATGHYWQNLVATLVAEGYSTALLNPLRTRRFADADLERAKTDAIDALGIARMAAQKRLRPTALPDAVTLELRELVRFRQRVQQEIGDKTRQLHRLVDLGFPEFRCHVRTLDSELATSILREYPTAEAFQAVSRAKLARLCYDGRHKVGDELAGALRATAKVSVGRHHGSPYRMQVRCLCDDIATLRRRLRDIDKDIAGTIEAHEVGRLLTTIDGIGPTTAANLVAEIGDFARFRDANALASYVGVVPGTKHSGKSRPTRSALSPLGNARLRGALWMPTLTAVRRNPWLKAHYERLRANGKLPKVALVASMRKLLHAVYSVAKNRRPFVPLLPPHPPHPA

SEQ ID NO: 287292 - protein, 355 aa, unidentified
MSEEKYIGMDVHQATISVAVMDAQGKLIMECLLETKASTIVEFIQGLQGTLSLTFEEGTSATWLHDLLKPHVSRLVVCDPRKAALLKEGNKSDRIDARKLAELLRTNQLKPVHHGEHGVRTLKELGRSYLTLTQDVTRVMNRIKALYRSWAIPCAGTTVYAPRHRAEWLAKIGEPGVRVRAQRLYQQLDGLQPVRLEARRELLLESHKHSAVKLLRQIPSIGPIRAALLVALLQTPHRFRTKRQLWAYSGFAVETHDSGEYRWVRGKLQRNRERMTVRGLSANYNKDLKNLFKGAAISASTRPGPLRDFYVALLAKGMRPTMARLTLARKIAAVSLTIWKKGVDFDAKQLDQQAA

SEQ ID NO: 287293 - protein, 438 aa, unidentified
MSNKVIFNVDELFISVGIDVGADFSWMSIALPNQQFVGKPYKILHNSMDSLTAAVSKIKEAEELYSLESRIFLESTGIYHYPLFCYLRDKGFNCSVINPIITKNSTNLNIRKVHNDRFDSKKAALVGLKPDLKVSLMPSDLALNCRNLCREYYDLMDNRSAYVNKLLGELRMAFPQYLGIFSKVTINTSLTLLETYTSPSAFLEADKQEIIDVIKSTARFGLTYAENKYHAIIQAANDANEFGYIIDSNIIRIRLYIGFIRKYDEEIAGIIEALHELVDSNQDTDFVKQIHLIETFKGAGFLSAVSLMGEIGDFSAFSKPKQLFAYFGLDPAVKQSGKFEGTKVQMSKRGSAIARRVIHTLTLQSISTSRNGEPKNPVLRDYYLKKCESKPKLVAMGAVSHKVCNMIFAILRDNKPFEIITPQEHIKQYNAAKCDIAA

SEQ ID NO: 287294 - protein, 454 aa, unidentified
MDILMEYGVTQQDKPKRRGPKLEVTNPNAAGIDIGSASHYVAVPADRDDQPVREFKSFTVDVHKLADWLDACGVDTVAMESTGVYWIPVYEILERRGFTVLLVNARHVKNVAGRKSDVLDCQWLQQLHSYGLLRGAFRPADQVCVLRSLSRQRAMLLRLQARHIQHMQKALVQMNIQLANVISDVVGETGQKILRAIVAGERDPYALAGMKNVRIKASEEEIAQSLRGNWRDEHVFALKQALELFDFYAERVADCDALIEQQMIELHQSDRLPGKARKKSNRNNPKFDVRTRLYQMCGVDLTRIDGIDVCTAMTVLSEVGVDMSKFPTAKHFAAWLGLCPGTKISGGKVLGSKTQKCANKTAQALRQAASCLKNSQSALGAYYRRMCAKMDKPKAITAAAHKLARLIYSMITKGEEYVDQGQAYYEERYRQRVEMNLRRKAEMLGLRLVPMEAA

SEQ ID NO: 287295 - protein, 400 aa, unidentified
MISIDGVGVFLGLDVGKHAHHGHGLTPAGKTVFDKPLPNTEPKLRAVFDKLKAKFGTVLVVVDQPASIGALPLTVARDAGCQVAYLPGLAMRRIADLYPGEAKTDAKDATVIADAARTMPHTLRTLDLADEVTAELTTLAGFDQDLAGEATRTSNRIRGLLTQFHPSLERVLGPRLDHRAVTWLLERYGSPRALREAGRRRLVEVVRPRAPRMAERLVDDIFAALDEQTVTVPGTGTLDVIVPSLAKSLAAVHEQRRALEARIEALLEAHPLSQVLTSMPGIGVRTAAVLLTTVGDGSSFPSAAHLASYAGLAPATRQSGTSVHGEHAPRGGNRQLKRAMFLSAFAALHDPASRTCYDRCRARGKTHTQALLRLARHRISVLFAMLRDRTLYEPRTPRLT

SEQ ID NO: 287296 - protein, 351 aa, unidentified
MNNIDYIGFDIHKKTISFCAKAQDGRILDEGTIPARRTDLSAWAQRRSRPWWGAMEATLFTGWVYDHLKPLAQELKVAHPAMLKAIAASKKKNDKVDARKIADLLRCDLLPECYMAPSAMRELRRVLRYRNLVVRQATRMKNRIAGLLMETGTLYNKERLHGKAYFSELLGSVREIPASVINLLKLSRGQLEFFEGIQQRLVKGLRADAGLRERVERLQSIRSVGEMVALTWALEIGEVNRFPSIADAISYCGLTSAQRNSGGKEQRGPISKQRNPHLQTILIEAAKLAPRYNPELAAVHERELKRGHRNQATLAVARKLVAYLMAVDKRGKPFQVRAHAGEESHHEQPVG

SEQ ID NO: 287297 - protein, 347 aa, unidentified
MWEIPLFIYLIMIMKTGVIKQVVGIDISKDDFQVCFSVLTDNLDVKIRASRKFKNTQDGFDSFCDWFSSKQTADLPIAFTMEATGVYYEGLAYFLYNKGFTVHVILPNQVKKYGQSLGVKSKTDSIDAAVLARMGLERKLSPWKPFSPNLQLLKQLCRERDRLIAERTTIKNHLHSYSHQGVLPKDSIKRCQKQIAFLNKLLTQVEKQIEGVVQKDTALHQRLKHVQTIKGVAFWTAIIIISETNGFATFHSIKQLTSYAGLDIRIAESGKWKGKSKISKQGNSYIRKALYFPAFCMAKHDPHTQQYYQKLRLKKGVTMIAAVAVQRKILALIYTLWKKQEDFKPQM

SEQ ID NO: 287298 - protein, 476 aa, unidentified
MKANYRRCCGIDVHKNSVTVCVLAPVGQRRIETKRRKFRTFTRDLKQLRAWLKNCQVTEIAMESTGQYWRPLWNLLEGEFAKLILVNPQHIKGLNGYKTDPKDAQWIADLMESGKLRGSWVPPRPIRELRDLIRQRVHVLEDLNRAKNRIEQLCQTGNIKVSSVATDLFGVSGRKMLKAIVEGKHDAGWMADYAKGQLRRKRGELELALEGTFTSQQRWLLEKELRQVEWLEGQVETLEKEIERQVVVFEEPIRRLLTIPGIERRTAWTIVAEVGVDLGTFIDAKHLASWAGLCPGNRESGGKRMSGRTRKANRYLKRAMCQAAWAASHTKNSYLSAFYRRMAIRKGANKAIMALAHHMIVVVHQVLSRQEEYVEFGGDYYDQRNKPRTVARLVMRLTRLGYEVDLKQVERMPPAQAGMPEATPPAGSGEPDTSPKPKRKRGRPCKCGERGIICQHRTSSDVKLLILQQASAGEFS

SEQ ID NO: 287299 - protein, 397 aa, unidentified
MSAVVGIDVGAYKHAAAVCRTGEREAERGVLRLSADRAGFDALDRWLERQGPVERVVLESSGHYYWPLASHLHRRGFGVAVVNPLQAKYFAKSPLQRSKSDPADARTLAAMGMSEEPRVKDPLLGAEAKEAARFWGGLVKEQAQVRQKLLRLVEIGFPELKECFEDPLCETALAVLREAPTARAASRKRVSTLADTTRPGGRRRLGENKARRLHELAKATIAPPELDAQMSFEVGMLIQQFDLLDKQIEIAEQRVADVLDSELARRLQTIPGVGPALAATFIAEIGDIWRFEDFDQLASYAGVHPKEQSSGTKGQNPETSWHMAKTGNAYLRSAAYKMAVVGTQHNPVIRAHYLRKRAQGKSAMNAIGHCMSKALAIVWGVWRTGRDFDPTLGGPRT

SEQ ID NO: 287300 - protein, 371 aa, unidentified
MGITDTNGRTEYKQARFSSFTKGLQELADWLAKYDCNDVCMESTGKFWIPVFNILEKTCWVTLAYPKYTKPQKGNKTDHKDAKWICDLYMCDMVNPSFIPPPDIRQLRDLMRYRSKLTNIMTSEKNRALNCLTVSNLKLDDVFSDVFGKSSRSVIRYILEHPGETFQVAPFIDRRCKHPVEEIQAVIDGTISHQQAVKLRECLQHLDELEVHKTNVEKEILCLVQQYPYQLELLQTVLGFSGNIMTAIALISEIGADMSVFPSAKHLVSWAGCCPRNDQSSKKVKSTRISRAGVYLKPLLVQVAIQPFTANADKLSAAGALEIRCQICDGRFLSMWAALFIFLGCPLSPCPKNLHVHNGRIVILASVAWIF

SEQ ID NO: 287301 - protein, 310 aa, unidentified
MEAIFVGIDVSKDRLDVHVRPSGEAFAVRRDGSGLQELVDRLQIVSPMLVAVEATGGFETIVAAAIAGAHLPLAVVNPAQVRHFAQAVGKRAKTDPLDAEMIARFTEAVKPEPRSLPDAAARLLAELVGRRRQIIEMLVAERQREKRAGNVRVRKSLARHIKVLEQELPNIDGDIAGLVRGSPVWREKEDLLVSFKGVKTTLARTFLAELPELGTLTRRQIAGLVGVAPYTRQSGRWKGKSMIGGGRACARWAVYMAALSASRHNPILKAFYQRLLAAGKPKMVALVAVARKLLTILNAMLRDKQPWQHA

SEQ ID NO: 287302 - protein, 401 aa, unidentified
MAPTGGIDWASEAHEVCISDEGRVTGRFSPAHDEEGMVELVTRLTRAGVDRVAIERPDGILVERLLDAGIEVLAIHPNQVKAARPRFAVAHGKSDRFDAYVLAELARTDAHRFRALVPDGDETKALKALTRAREDLVGVRVELANQLRSQLEAFWPGALIFADVDSPISLAFLRRCPSPADAKGLGPRRLAGFLARHGYPGRRSPEELLGRMRKAPAGRAEELETEARRAVVLGLVASLEPVVAEISELTSQIRGTLATHPDRVVFAPLFRDAKTVICPATLIAELGDCRGRYPTDAAMAADAGMSPVALESGKLRVATFRRACDKRLRDAVATLADSTRHWHPWAKDVYRKARARGQDHPHAIRTLGRAWLRVLWRCWRDRVPYDPARHGNLQRLQPAGG

SEQ ID NO: 287303 - protein, 412 aa, unidentified
MPDDQSLPNLSNLSWEVYVAFKIFRKNCCGLDVHKTWIYACMGITDTNGRTEYKQARFSSFTKGLQELADWLAKYDCNDVCMESTGKFWIPVFNILEKTCWVTLAYPKYTKPQKGNKTDHKDAKWICDLYMCDMVNPSFIPPPDIRQLRDLMRYRSKLTNIMTSEKNRALNCLTVSNLKLDDVFSDVFGKSSRSVIRYILEHPGETFQVAPFIDRRCKHPVEEIQAVIDGTISHQQAVKLRECLQHLDELEVHKTNVEKEILCLVQQYPYQLELLQTVLGFSGNIMTAIALISEIGADMSVFPSAKHLVSWAGCCPRNDQSSKKVKSTRISRAGVYLKPLLVQVAIQPFTANADKLSAAGALEIRCQICDGRFLSMWAALFIFLGCPLSPCPKNLHVHNGRIVILASVAWIF

SEQ ID NO: 287304 - protein, 452 aa, unidentified
MEQDVISMEIINVHAAGIDIGSRSHWVAVGQQESDVREFGVFNEDLFSMASWLKENQIRTIAMESTGTYWQNLYAILISQGFHVILCNGKFTKNIKGKKTDIKDCQWIQKLHSLGLLSSSFLPDGQTEQLRTYCRHRSNLLELAASTSKKMQKYLRLLNLRLDVVVKDVCGLTGLAIIRAICDGEKNPQKLAALRHYNCRKSEEEIAKALQSNGREDYLFALQQELDTYDHLQIKIEQCDRKIEQMLNQIISGDDNKKQHHIDSKPHKRINKNTPKNIDLNLKSYQMFEGTDLLAIEGMSYATVLALMSEIGIEGIKKFPTAKHFTSWLRLAPNNKVSGGKILSSKVPKGSNRIKIALRNAANAIGNLKDSTPLRDFFQRVNFRKGRVSAISATARKLAVIIWNMVVKNVSYLNPEGYLFLAQKRKLGMIKRIQKQIDKFGLTDNDVKFSTT

SEQ ID NO: 287305 - protein, 342 aa, unidentified
MNGDYDGRQYVGIDLHRRRSVIVRTTEQGEQLGWVRIDNDPVALGLELAKAGPDPEVVLEATYGWYWAVDALQTAGAHVHLAHPLGVKGFAYRRVKNDVRDAADLADLLRMHRLPEAYIATPHERELRELVRHRAKLVALRSGLKAQVHATLAKQGQLPAASDVFGRAGTAWLRSAPLELVYRQRIDSLLELIDAYDGEIETFRTMIANRFTGHRGYRAIQQISGIGPIFAAVFVAEIGEVTCFSRPEKLCCWAGLTPRHRESDTTVHRGPITKQGSKLVRWAAIEACQHTRAGTKLSADRSRIIAARGRNVGIVAAARRLLTLVFYGLRDGEIRALAARAG

SEQ ID NO: 287306 - protein, 422 aa, unidentified
MLGVGIDWAEEFHLVALGRPGEGVFDVARVEHDPRSLDALIARIATLEPDPAEVRVVLETSYGMLVERLLDARYTVVPVNPDLIARRRGPAKKKDDAEDARIACLLALDRFERLRPLVPHGDEAAELRAIARDDERAARDERRLLNRLRADLIATFPAAITIAGDDLGSPTFLRLLERWPTANALATASRDELVAFARAGRHGWPDRFADRVQTALSAEHFEPRDWLVRAKADTIRLAATQLLALGTQRRTWERRMGELLLGAPRHGRAHRPKDGDRGPAVPGGEIYLSFPGLGDRLAARVAGEIGDIGNYPSPNGLQCYAGKAPVTRRSGKSELVVANRLACNGHLRDAVQHWAFCSLRTSGWARDFYDTQRARQKTHHAALRALGNRWLEVLWHCLTRGVAYDEATHVANRNRYLTKAAA

SEQ ID NO: 287307 - protein, 317 aa, unidentified
MSHRNKVCVGIDVSTQKLDVAVSNNSKVRTFPYTKTGLEQLRIFLKKENPQLVCLEATGGYERELVDHLHKHEFVVAVVNPRQVRDFARAGNQLAKTDAIDARVIANFALLMKPRITTPLPENLRKLRDFSARQRQLHKLIVQEKNRLGTTVDQDLRKMIRQTVKLFQRQLEVVRQTQQELIENDERLQAKAKIIESIPGLGPASASVLIAELPELGSLNRKQIARLVGVAPTNRDSGTMRGKRTTGGGRADIRNALLMPIVVAKKYNPTIKAFYDRLVENGKPKMVALIACMRKLLTILNVMIRDGKSWNKNLKAT

SEQ ID NO: 287308 - protein, 412 aa, unidentified
MLFVGDDWAEDHHDVEIVDECGRRRAAKRLPEGLAGITGLHALIARCMPSGWADLDPAEAAVRVKIGIETERGPWVAALVAAGYEVFAINPMSTARYRERHSTSGAKSDAGDAHVLAEIVRLDRAHHRPIAADSADSEAMKLVARTHQTMIWDRTRHVLRLRSALREFFPAALQAYGDLDAPDTLALLGAAPDPDRAARLSISKISAGLKQANRRHVPERAAQIQAVLRAPALRQPPVVQDAFAVIAAGEVRLIAALNIEIEQLGEVVGEHFGRHPDAEIYASQPGLGVILGARVLAEFGDDPHRYADAKARKNYAGTSPITRASGTKRVVLARYARNDRLGDAVQQWAFCSMRGSPGARAYYKTMRARKIGHQAALRQLANRLVGILHGCLKTRTLYDENTAWAHHITAVA

SEQ ID NO: 287309 - protein, 402 aa, unidentified
MIFINCLGIDIGKSESVVAHYKDEVLVKEMVIQNNQNGYRYLKNYIKHLDSLFILFESTGIYSRGMKRFCEIHKIDYLEMNPLEAKFKTSSLRSWKTDKSDAHKLALLAFRMKDSKVQRQSEEIYFELRERARFHLEMEINQNRLKVELVETLHQTFPGLEKLFTNRYSKIALNIAKAFPHPDFVSTLTHDELVEKVLHSTDKGISVNKAHKYVQKLIEIKNNSFPNVDKSSFLLQKVQYLCDKLLIGIEEMKEFDQEMIDLAENTTEFENILSIPGIGELTAALLIGELGNIREFKTNKQLNAFVGIDIKRYQSGTSKSRDTINKRGNKKARRLLYLIIMNIIRGRNHYQSHIVDYYYKLREQPHGKTHKTAVIASINRLLKTIHYLIVNNKLYDYQKAPH

SEQ ID NO: 287310 - protein, 429 aa, unidentified
MSEDKAIELRVSVDVGYRRHSVAIGLPSGEVLEEFEIEHRPEGFHEFFSRIEKHHKTKSSPVAVAMEGYNGYARPLDSLVRGRGYRLYNLNNLKFARFKEIFPGAAKSDRIDARKGLELFQLQDHLPLAKEVLQEVKGTPAENEILKRLTRRRRRLVNERVRVVNNLQADLQAVCPGLLEITNDASNQWFLNFLLSGESLTQIARLRGRTLLKIPAVGVKTAAIIAGWQKRAHFSEEVEWVGEMIQEDARRCLELDEKVKRLEAKIAGLAATSRIAKIFRSVPGFGAVCSSELAGEIGTIERFGKEGSLALYLGMSTLDNRSGKYQGTKAPKQVNTRAKAAMMIGVDRHRKKVAESQRYYEKKRAEGKKHNQAVRALGRHLTRIIYRLLKEEREYEIRPEKGNTKTKVSPVACVKTQMRRPKISGKKKN

SEQ ID NO: 287311 - protein, 463 aa, unidentified
MKNKRWTGKPSRRSRPLLERVNVNAAGIDCGSAMHYVAVPPDRDPEPVRCFKTFTEELHRLADWLVACGIKSVAMEATGVYWIPIFEILEARGLEVLLVNARHVKNVPGRKSDVTDCEWLRELHSVGLLKGSFRPTAEIKALRSYLRHRETLIQGAATTINRMQKALVQMNLQLHVVISDIGGATGLRILRDIVDGQTDPRHLATHRDARCQASEAEIAAALTGHYRPEHLFVLRQNLELYDALQRQIESCDTQIEAHLKALATSTTPPAALSSIPRARRKASSNEPHFDVRTSLHQLSGVDLSQLDGIGPYSALRLISEIGTDMSRWRTEHHFTSWLTLAPDNKVSGGRLLSSRTRPSANRAAAILRMAAMCLGRTQTALGAFYRRLAYRIGKAKAITATARKLAILVYRCLKRELVYQDPGAAEYDRKHRTTVLRHLRQRAGALGFHLVNGQTGEILEGVS

SEQ ID NO: 287312 - protein, 345 aa, unidentified
MPIVGGLDIHRKQITFDYLDTVTGEVRRGQITPADRAHLRAWLARFAGRDDVAFAMEGCTGWRYVAGELAAASIAAHVGEPADTAFARGRKRHAKTDKTDSRHLRQLLADGRLPECWIPPAQILECRALLETYHDLRREHTAWIQRIHAVFFHQGAPALGEGALRTEQDLAALRAAATAHLSPAGQLQIATALDMLAAVEARMDMLRQQLLHTARHLTGAKVLTARLYGVGPLAALAMTCWLGGAGRFSSSRKAVRFAGLDVTVYSSDGKRSPGHLSRQGPEILRWVVYEAGKTHARASAPGHDYYAAVKDRTDGKLAALSQARKILRQACHILTELGDDALTAA

SEQ ID NO: 287313 - protein, 315 aa, unidentified
MKENGKEIFIGIDVSKSKLDAGVRPTWQKVTFPNNEEGISLMMGFIEPFSPTLVVLEATGGLEVPMVIALAARGIPVVVVNPRQVRDFAKATGRLAKTDSIDADVIAWFAEAIKPEIRLLKDEDAQRLDALTTRRRQIVDMLTAEKNRLSSAPRWTRKDIQAHIEWLSKCLAKINKELGDFIKKNPIWREKDKILRSVPGVGPVLSVTLLAELPELGKLNRKEVASLVGVAPFNRDSGLFKGKRTIWGGRGKIRSVLYMSAIAATRFNPVIKRFYQRLIAAGKLRKVALTACMRKLLVILNTMLKNHSTWKELPI

SEQ ID NO: 287314 - protein, 349 aa, unidentified
MVTLGIDAHKRTHTVVAIDEVGRKLGQKTTTATATEDHLELLRWAARFDGDRVWAVEDCRHLSRRLEADLLAAGERIVRVPPKLMAGTRDSARTYGKSDPIDALAVGRAALRHPDLPAAYLDGPARELRLLVDHREDLVAERTRCINRLRWHLHELDPSWDPKPGALIRYVQLDAAAARLAACDGMVARVAADIVAHIRDLTVRERALSKEISARVQQLAPALLAVVGVGPLIAAKIVAEVADIRRFKSKDAFARHNGTAPLPAWSSNHPRHRLSRTGNRQLNAAIHRIALTQARCHPDAIAYLQRRTEHGNTPAEARRVLKRRLSDVVYRALLLDAQAAHSTGLEEAA

SEQ ID NO: 287315 - protein, 459 aa, unidentified
MNRKRSKSKAERTLPVMHPNAAAIDVGATMHMAAVRADRATEPVRSFGTFTADLHRLVDWFTECGVETVVMESTSVYWIPIFELLDARGFTVFLVNARDAKHVPGRKTDVSDAQWLQRLHSHGLLRASFRPKGQIAELRAYVRQRERLLEYAASHIQHMQKALTEMNLQLHHVVADITGTTGLRIIRAIIAGERDPEVLARLRHYSCHSSAETIAKALTGSYRTEHLFALEQALALYDVYHEKASACDGRIEAVLKGLSIDRARSGSKELPTPRRHRTDQPNALAFDVRAALFRLLGKDITMIDGLGPYLSLKLIAECGDDLSSWPSAKHFTSWLGLAPSNKISGGKILSSRTRRSGGRAAALLRLAAVTVGRTDTALGAFYRRLSARIGKAKAVTATARKVAVLFYNAVRHGMEYVDPGASAYETRYRARIVNNLHRRAKAFGFVLQPMEPTPNIVVS

SEQ ID NO: 287316 - protein, 366 aa, unidentified
MRPSITPLGVPVGVDVHKRRCKVVEFNHGEIKVRKSIANTREEWVELLTELPPEAEIGLEVSTAGYYAMSVLEEAGWRERAHWVHTAGIDSNRRQKNDRLDAERLARKLAAHHLDPLPEAWFPPPEIRALRLRVRQRCWLALLRTQTKNHMQSLLQMHGLLLPGSDPFGAEGKAWLEQQKLPAPLSESIPQIQQVLKLLGKEVEISEKNLAAMEKQFPQLALLRSIPGIGPLLAAVIWSEIGDIERFASAKALANNTGLVASFYDSGDVQVSGPITRQGSRWLRWALVTAANVAIQHRNPFADRYHRLRRKKKPNVAKAAVAHSLARCVYGVLKHGCPYREDRWGRKVGALEQEARGSQRSTKTVP

SEQ ID NO: 287317 - protein, 313 aa, unidentified
MTKTTKTNPIDYIAIDVSKATLQIQDDQLAFAVDNDSEGHSKLLKHIKTRKNPLVVFEATGGYERGLCEFLREETIPLTMVNPARVRDFARSEGVRAKTDPIDTKMILAFAKSKALCAMETPSETCTKLAALLDRRGHLVEQLAREKNRLQNSEKLILRSIQRMIKILEKEISALDKAIDELVSSEPGLQSRSKLIQSIQGVGKITAWTLLAYLTEIELLNRNRLVALAGIAPFNRDSGKFSGKRSIIGGRAKVRRCLYMATQSAANCNPIISAYVKRLRERGKPYKCAIVAAMRKLLLHIQSLIKNPKLSTC

SEQ ID NO: 287318 - protein, 330 aa, unidentified
MNESPPISAYLGIDVAKAKLDCALLVDDGKKRKFLSKTVPNTPEGYAALSDWLGQKGAAAAPACLEATGVYWEDAALALADAGHAVAVVNPALAGAHARSLGLRTKTDAVDARAIADFCREKRPPAWVPPPASHRALRALVLRHQALVGMQTQEKNRLEGARDAEARASVEIHLEWLATELERVERAIAKTIDDDPDLKAKRSLLDSIPGLGERSISTWLAYCAEPGRFASARQVAAFAGLNPRHRESGSSVRGKPRISKIGHAFLRRALYMPAMVALYKTEWGRRFRERLAANGKPPKLIIGAMMRKLVHVAFGVLKSGKKFDSALHGA

SEQ ID NO: 287319 - protein, 377 aa, unidentified
MGSQTFIPREYDVFAGLDVDKKSIAATFSSHQGFIRSVSMPYKVEDLLNHVRNHFADQKVAFAYEAGPTGYGLYDGLAAQGYTCLIAAPSMIPRAPGQRVKTNRLDSKALSESLRGGQLKSIHVPSPLYRELRHLTQLRDTMMSEAVAMKQRIKSLLLFEGIAFPPAPAGSQWSLIVKAKLRKLPCSSTVRFKLDQLLDSLEFAEKQVFKSTKEIRRFCQTDPELSQCIEYMMTVSGVGWIVASQLLARIGDWRELENIRQLGGFLGLVPREHSTGDKTDRGPITHTGDGRLRSKLIQASWSAIRKDGELREFFRSVCQRHPRKVASRVAIVAVARKLSVRISVVLMQQRPYEVRKKVHSAPLTQEETSPQGTTRRR

SEQ ID NO: 287320 - protein, 334 aa, unidentified
MKYQFVIGMDISKHSFDMAILLADSPENIFHNAFSNDENGFKDLMFFVNETMPDFDIKKALFCMEATGLYCKALLQFFHTQQANVWVENAVQIKRSLGVKRSKTDKVDSIEIAKYAFKNTELVRLWKPSGVVLEKIKQFATLRERMVVTQKRLITPINELRDAGQKQMADLLFKSIKKSITAIDADLKKIEAKIMECLKEDASLHHVFSLITSVVGIGFVTAVNLIIHTQGFNIMCDSRKLACFCGVAPFPYQSGISIKGKTKISHMANKKLKTNLHLAALSAIKCDPEIKTYYEKKVLEGKPKMSVINAVRFKLLARVVAVVNKNEAYVKKAA

SEQ ID NO: 287321 - protein, 346 aa, unidentified
MEHIGIDLGKTSSQICILTEDGELIERRIKTTRDDFFKWLGNRAPACVLIEATTESEWVARYLEQMGHEVIVADPNFAPMYATRSRRVKTDKRDARTLCEACRLGSYRPVHRVSETQRQVKKMLTVRGTLVHTRAKYITTIKTLVRAEGLRIPASSAESFVERLLALTLPEHLAAVIEPLVTLLAQLNKQLKQADSQLQELVEQDPVVERLCTAPGIGPVTAVTFVATLDEVKRFETAKQVRGYLGLVPSEKSSGERQLRGRITKAGNGRLRALLVEAAWSLMRSKQASVKAIQQWTKSIALRRGKQVAAVALARKLAGILFAMWRDGTAFGCKGVMGEGASAFAA

SEQ ID NO: 287322 - protein, 424 aa, unidentified
MPSNLRSLGLDVHAETIAVAVAEPGGEVRPMGIIPHRPDAVAKLIRKLASREQLRVCYEAGPCGYVLYWQLTKLGVHCDVVAPTLVPTKPGDRVKTDRRDAAKLARCYRAGDLTPVWVPDAAHEALRDLVRAREAAKGDQLRARHRLGKFLLRRGIRPPAGAKPWTQAHRRWLDSLHLELPALEATLADYLHEVDHAAARLDRLEQALDAAIAAAPETLRSVIAALQCLRGIRQITAATIVSEVGPLSRFTHPRQLMGYSGTVPSEHSSGASVHRGAITKTGNAHLRRVLVEAAWAYRFSPKCAKGLRQRQRGQPEAITALAWKAQQRLCSRYRRLLARGKPTPHVHRRRPRARRLHLGDRRRGRTSAGHGGVTSRRIGGRGVRERRILGHPMRSGPGRTRAASARGSSRRIMIMPAPLGAIRE

SEQ ID NO: 287323 - protein, 412 aa, unidentified
MDEVVEFCAGLDVHRDTVVATVRFPQGRQRGSETKTFGTDTAELVALGDWLISHRVTRVGLESTGVYWKPVFYLLEDRIEQLWLLNAQHLKNVPGRKTDVVDSAWIAQLVEHGLVRPSFVPSPPIRELRDFTRHRRALSEERTRMVQRLEKVLQDAGIKLTSVASTVLSKSARAMLEAMLAGESDPVVLAELAKGRMRSKIPALTDALRGSFRVCHHGVLVRQILAHVDFLDAQLAEIDEQITTRVATFEPIIERVQTIPGVARKCAIGMIAEIGVDMSVFATPAHLASWAGICPGNNASGGKARSGRTRHGPVALKTVLTEAAQAAGRTKNTYLGARYHAIRGRRGTFKAVGAIRHDILIAYWHIVTADVGYQDLGVDWVARRHSREHQIARLAKQIEKLGAAVEITMPAA

SEQ ID NO: 287324 - protein, 358 aa, unidentified
METTNLRQKVDFTDKNIFAGMDVHEKSWNVSIFLEDMFLRSFTQQPSVEALEGLLKRDYPGAKYLCGYESGYCGFSIQRKLTKLGIACQVLHAGDIPQTNKEKLLKRDPVDSKKMGEALSTKKAKPIYIPDEESEQDRGLVRYRDRVQKDLTRCKNRIRSILYEFGISLPERFAKGWSNRFIQWLKETEQVIGSTRTTLNHMIEQMETHRSLLLKVNRDIRTLQKSPKYKQKAQYLTSIPGIGPLSAMIILTELIDIRRFGSFRDLNSYVGFYPMEHSTSDKEHKGGIMIRHNKHLRKLLVEDAWVAMRHDPALTLAFNQWSVRMTGKRAIVKVARKLLSRIRYVLINGTFYTKGIVK

SEQ ID NO: 287325 - protein, 366 aa, unidentified
MQLLLIERLRAPVSLIRACPWACEINSGELLERPSRPTPGAGPAWPARILQAGVIYHVKEEVVYLGVDVAKAYLDAAMGSEKRRLANDGTGHRQLINWIKQMETNVQVICEPSGGYERMLIQALVGAQVKVSLVQANRVRQFARAAGILAKTDSIDAEVLCAFGQAMRPQTLSASKLQQEHLRELESQRRHLSRLLVMEQNRGARLGDSSVRTLNRSLTKQIQKQIERIDLLITEHIAGSQELSAKAHKLTAISGVGPHTAALLLAQMPELGQLNRREVAALVGVAPFNRDSGKWRGKRTIFGGRRHVRHGLYMAALVAARHNPILRAFYQRLRAAGKPAKLALTATMRKLLIVLNSALKPDPIYA

SEQ ID NO: 287326 - protein, 351 aa, unidentified
MYMLADSVEVVIGIDTHKQTHTAAVVAAATGQTLATLTVTATPAGYQQLLELADQHHGRRVWAIEGTGGYGAGLTRFLATHAERVVELDRPKRAARRHGAKSDPLDAARAAREALGRDQLAQPRATGPRAALSVRLAARRSAVQAAGDAQRQLHALVIAAPEVLRERLRTCSTQRLVAACAQLRVQTSWDVETATTAATLRSLARRIRELTAEAADHRQAILALVRAWRPDLLARPGVGPIVAATVLCAWSHAGRCRSDAAFAMLGGAAPIPASSGQTVRVRLNRSGDRQLNQALYTVVLTRLRTDPATRAYADRRRAQGKTNREIKRCLVRYVARQLYRLLKTQRALDPT

SEQ ID NO: 287327 - protein, 342 aa, unidentified
MDIVVLGIDLGKNVCSVVGLGAAGQVLLRRRMKRESVVAFTQRWPSSLVAMEACCGAHHLGRQLAAQGHTVRLMSPEYVRPYVKAQKNDDRDAEAIAEAATRPTMRFVEIKSEAQLDMQTLHRARERLVAERTALINQVRSVLLERGIAVAQGRRKLETQLPDILTDEALGLSTRIRELIADLREEWQTLNERITAFDAEFVSRARTDEAARRLATIPGIGSINATALVAAVGDGRAFERGRDMAAWLGLVPRQRTTGGKPRLLGISKRGNRYLRKNLIHGARAVLPYLAQRDTPLGRWVQGLLARAHKNIVVVALANKLARIAWAVLAHGSLFDAVHMANA

SEQ ID NO: 287328 - protein, 320 aa, unidentified
MDKAEVFVGIDVSKKRLDVATHPALETWACANDGPGIAKLVERLEALQPAGVVLEATGGLQLPVVAALVVARLPVTVVNPRQVRDFARATGKLAKTDTLDAGVLARFAAAVRPPLRPLPDAQTQALGSLVARRRQVVEMLTAEKNRLRTAGAPVRPRIQRHLGVLEQELSEIDDDLGQMLGESPLWREREKLLRSVPGVGPTLTSTLMAELPELGALNRRQLAALVGVAPLNRDSGTRRGKRTVWGGRAPVRATLYMAALVATRFNPVIRAFYQRLLGAGKPKKLALTACMRKLLTILNAMLQHQTPWRPLAHPIIGPCS

SEQ ID NO: 287329 - protein, 403 aa, unidentified
MTKYHVGVDVGKYRHHVTIRDISGDTYCKSFSLTNDREGFDEFISSLEKLSVDKNDFLIGIEACPYGVNLSYFLLGVGFNLVEVNPFRAGQFRKAQGKKAKTDKIDSRTIAAILSLGDHKILSIPDPILDNLKDLTRFRTDLVNERATMIIHLQEALSILFPEFNSVFRQLDSAGSLAVLATFPGPEHIIAAGEETVGKTLSLASPHRMGRGMARRITEAARNTVGVIQKQPGLGIKISILAKRITSLQLTIRELDKQITEMFDSLPCKLQGFPLGRAPTLAAIVSEIGDIHRFPTLKKFLSHLGWCPQTFQTGNFRLEHPRMSHAGNKYIRRLIWMLSVSGVRVVPLYREYFQRRVLEGKAKMHILIAVGRKILSTLYAMLKKGVPYDPNWEENGYIAVAGR

SEQ ID NO: 287330 - protein, 373 aa, unidentified
MGEDSEVFVGIDTSKLRHAVAIAQGGRGGEVRFLGEIEATDAAVTKLVRRLAAKHDKLFFCYEAGPTGYGLYRLIKELGRDCVVVAPSMTPKRPGDRVKTNRRDALSLARLLRAGELTSVWAPDERHEAMRDLVRARSTVVADLRSKRQQLSAFLLRLGRHFTGKKTWGRAHMKWLLGQKLAHREQRLAFEEMMLAIGEAQGRVARLEQAIGAAVPDWSLAEMVTALMAMRGIDLIAGTTILAEIGDLGRFSTPRELMAWLGLVPSEASTGDRVRRGSITKTGNSRARRMLIECAQSYRFPARVGLAKQARVAAAPRAVREIAWKAQTRLTARYRALIKRGKLRNVVVTAIARELAGFIWAIHRALTEPQTAT

SEQ ID NO: 287331 - protein, 388 aa, unidentified
MHVYVGVDIAKELHYAAIMDSDGVVSKPFSFENNDKGFNLLLSHLAPYNKESILIGYESTAHYQENLAYFLKSLGYRTAEINPLQTAALRKANIRNTKTDSVDARLICLALMNHHIQGDQRDSVRLDDLYQLCKMRMDTMKKRTTCKIQLVATMDRIFPELASFFDNNLHINTIYRLIESFPLPSQIKKTRIDILTKLLHKASRGHFKKEKAQKLKDLADISVGIPSDIFAFQAQQLVHQIEFYTDQIQTIEERINTNPDVMSSPLMTIPGIGTFCVACILSAIKNINDFGAPCKILAYAGLDPVIRQSGKFNASHTRMSKRGNSLLRYALVWSAGNVVKNNHTFAEYYRHKTEDQGKSHYQALGHCAKKLVKSIYHMLKYNESFNLD

SEQ ID NO: 287332 - protein, 400 aa, unidentified
MISVGIDVSKGKSTVCILKPYGEIVSKPFNITHTQKDLSELSSMLFRLNDEVKIVMEATGIYHLPVLTYLQEKGFFVSVINPYLMKSYRNESLRKAKTDKIDSRIIANYGIDHWFKMKEFQTSGEIYEELKLLGQQYRHYMKLHLLSLAELTHLLDLTMPGIKNLLASWNETNRKDKRSDFVERFWHYDVITSMSEQEFTEEYILWAKEKKYVPSQEKAKVIYTLAQESIPTLPSETSSIKMLVTEAVRVLKEVDATLGLILSRMQEIAKTLPEYSVVREMGGVGNTLAPKLIAEIGDVRRFRNGKALVAFAGIDPPPYESGQFVGCNRKISKRGSASLRKVGYETMRSLKMRSRPEDPVYRYVVKKESEGKSKKAAKIAGLNKFLRIYYARVTELYKNI

SEQ ID NO: 287333 - protein, 394 aa, unidentified
MRFVGIDIGSDAHVVAVVDEAGAILVSPTRFTEEATGYERLLTLLGAPGDVLIAMEATGHYWRNVFAVLASRGFAVALLNPARTNAFAREDLRRTKTDALDAVLIARFAQQKRPRITPISDAATQELHELVQLRDRLVQDLGDRQRQLHRLVDLCFPEFTQIIPGLDSHRATTVLHAFPTAQALRHASVRRLTGLRHDDRACVDKDLARRLIEAAKRSVGQHHGEVYRMQVRFVCEDIDTLRTRVKQIDIDLESTLERHEVGQLLTTIDGIGPTTAARLVGEFGDFTRFQAPEQLVAHVGIVPGLRHSGKSCPTRAGISAIGDAKLRRALWMPTIVAVRCNPWLRSFYERLRQRGKLPKVALIAAMRKLLHAIYSVAINRRPFVPILPATVSVP

SEQ ID NO: 287334 - protein, 394 aa, unidentified
MAFKIFRKNCCGLDVHKTWIYACMGITDTNGRTEYKQARFSSFTKGLQELADWLAKYDCNDVCMESTGKFWIPVFNILEKTCWVTLAYPKYTKPQKGNKTDHKDAKWICDLYMCDMVNPSFIPPPDIRQLRDLMRYRSKLTNIMTSEKNRALNCLTVSNLKLDDVFSDVFGKSSRSVIRYILEHPGETFQVAPFIDRRCKHPVEEIQAVIDGTISHQQAVKLRECLQHLDELEVHKTNVEKEILCLVQQYPYQLELLQTVPGFSGNIMTAIALISEIGADMSVFPSAKHLVSWAGCCPRNDQSSKKVKSTRISRAGVYLKPLLVQVAIQPFTANADKLSAAGALEIRCQICDGRFLSMWAALFIFLGCPLPPCPKNLHVHNGRIVILASVAWIF

SEQ ID NO: 287335 - protein, 440 aa, unidentified
MAKSKNKLQVINEHAAGIDIGSRQIFVSVPNKEVKSFNTFTSSFNNAITYLRENNINSVAMESTGVYWVTLYDMLDQAGFDVCLVKSTMVKNVPGRKTDVADCQWIQQLHSYGLLRASFIPDDNTRKIRSYVRLRRTNIRLGADNIQRAQKALDLMNIKLHFVINQINGVSGMRIIKAILAGERDPLKLVDLCNIQILNKKKQLVIESLYGNFREEQLFALKQAIDAYEFYQKQVLDCDKQIEMLLCNITLDVPSPEFIKKPKPIRHNKPQIDNLHPSLMKLTHGNDPSQITGMTDSTLLQIISEVGTDMSQWPTVKHFTSWLGLAPNSHQSGITNKKKLFRHNSIAGQIFRLSAQTLVLSKHNALGAFYRRLQAKKGKLTAMKATARKLAVIYYNVMTKGVEYVEYGINNYEQKIKEQRIKYLQKQAIRYGFSLTPLLE

SEQ ID NO: 287336 - protein, 417 aa, unidentified
MAQAMTLVGLDVHARQTHAAMLDRRTGELRNCRLRIAPEEVVAFLAGLPAPVLAVYEAGPTGFGLARAAGERGIEVRVVAPGSIPKGPGDRVKTDRRDAIRLVRLLAAGELAFAFIPSVADEAFRDLIRCIEDLRGDLMRARHRLSKFLLRRGYRYQDGNAWTPKHGRWLRTLSFEDGAQATFADCCASVDLLAGRQTTLLATLERVVPDCSHAPTIARLRCFRGIETLTAAGVCAETGGFERFPRPTMLSGFLGIVPSERTSDTKRRQGSITKAGSPHARRLLVEAAQHYRKAAGDQPDARPPPSRPGPARDRDRLARATTPAPTLDPPALPATQARRCRRDRGRTRAHRVPLGGRHPQCLTAAPPPPTRSRRDVAGASTSTQEGSAPSREARAAYYGQPAPAGRARSSYGGTSVK

SEQ ID NO: 287337 - protein, 348 aa, unidentified
MRFYTGQHQHYCGIDLHARTLYLCILNAEGNVLLHKNLPCDRTRFLEAVDPFREDLVVASECIFNWYWLADLCAEHDIPFVLGHALYMRAIHGAKAKNDRIDALKTASLLRGGLLPMAYVYPAGMRSTRDLLRRRTHFVRKRAQLMAHVQNTFHQYNLPRPPGRLVYKYQRAPIPDAFEDPLLKKSVETDLALCDTYDELIRDLEKTVVRQARVHDPQTLLRLNTIPGIGEILSLTLLYEIHDIGRFESVQRFASYARLVKCEKSSAGKRIGTSGHKIGSVHLKWAFSEAAVSVIRHLPQSQRLHDRLKRKYGKGKALSIFAHKLGRTVYFMLKRNQAFDADRFLANA

SEQ ID NO: 287338 - protein, 461 aa, unidentified
MSEDTEVIAVGKAKPQVIEDDEHQRVFERVAAVDVAKASGMVCVRGPGADGRRRASRVWEVTAVMGAVTGLGRELARDGIEMVTLEATSDYWRIWYYVLEMCGLAVQLVDPSQARAIKGRPKTDKLDAMWLARLTEWGMLRPCFVPPAPIRVLRDYARARTDLVHERTRCWQRLEKLLEDALVKLSSVASKLTTVSARDMIAAMIAGERDPAVLAGLARTRMKARHADLVAALDGMFDSHHGDLAQLELDQIAFLDQRISWAEDKITAVLAGIPAAWGIDADGSTGPDAGTGPDAAVLPAVRRLAEIHGVTVLTAAQIIAEIGLDMARFPTAAHLVSWTGLCPIDSQSGRRHGKRKGHGNTYLRGYLGQAATGAASTDTFLGERYRRIARRRGKARAQVAVARSILIIIWHLLADPTARYTDLGPDYAATRTSRDKKIRNHLRGLQALGVTVTITEDEQVA

SEQ ID NO: 287339 - protein, 420 aa, unidentified
MSEMFDWYVGIDWASEVHQVCLVDDRGVVRGERAVRHSGEELAALAAWLIATTGAAPERIAVGIELPHGPVVESLMERGFAVHALNPKQLDRFRDRFSVSGAKDDRRDARVLGDSLRTDTRCFRRLKPDEPRLIELREQLRMTEECKHERIRLTNRMREQLWRYYPQMLDLSDDLSAAWFLDLWALAPTPAKALRVRESTIAKLLKKHRVRRFDAAEVIRRLRRPALTVAPGTVEAASVHVSALRDRLRLVTRQIAAAECRVDRILTELAASPEEPEAAPGQPPQQSDVTILRSLPGVGRIVCATLLVEAGGPLKAGDHQALRALSGVAPVTRRSGKSCVVLMRQACSQRLRDAVYHWSRVAVQCDATCKARYQALRKAGHSHGRALRTVGDRLLETACAMMRSRSLYDPQRTAREPQAA

SEQ ID NO: 287340 - protein, 408 aa, unidentified
MLFVGDDWAEDHHDVEVQDQHGRVMRTARLPEGVDGMARFHELVAGFLADDAEPAQVVVCIETDRGPWVRALVAAGYQVFGVNPKQAARHRELVSLSGAKSDKGDAHALADMVRTRRHQLRPVAADSDLAEAVKVVSRAHQTLIWERTRHMLRLRAALREYFPAALDAYQPLTLTGVDTLELLAKAPTPDQAATLTLTQISTVLKRARRRPIADKAATIQRALRTAHLRQPEVVTAAYAGTIGATVAILQTLNAQIRAMQGQVEAHFGQHPDAEVYRSQPGIGVILGARVLAEFGDAPGRYADAKARKNYAGTAPITRQSGKSKTVHARIVHNDRLVDALHTQAGAAILHDPAVRAYYDELRARDIGHNAALRQIGNRLVGILHGCLKTATLYDQTTAWSHRAQPVAA

SEQ ID NO: 287341 - protein, 341 aa, unidentified
MEQATTIGLDIAKHVFQVHGADAAGHVLFRKRITRVKLLGFLAAQAPCIVAMEACAGAHYWAREIGKLGHHVRLIAPAYVKPFIKRQKNDAADAEAICEAAQRPSMRFVPVKTEEQQANGIVFRARDLLVRQRTQCVNALRGHLMEYGYIFPKGITHVETLVALVEDLQSSLPDSVRIILKLLIDTFTALEAQIAALDAEINRRSKSDPTARRLMTIPGVGPIVSTAIIALVPAAEGFPAGRDFAAWLGLTPLQKSTGGKQKLGAVSKRGERTIRRLLIIGASAVVQQASRRGAPKGSWLAQMLARKPKMLVTVALANKMARVIWALLVKGGTYRTPAAAA

SEQ ID NO: 287342 - protein, 340 aa, unidentified
MAIVAGFDVHRAQITFDAVDRRTGEVHRGRIRATPEAVRGWAGRFRGEQIDVAVEACTGWLFVCEALVEAGATPHLAEPVETSALRGKKRRAKTDREDARWLRTLLCEGRLPEAWIPPAHVGEWRTHTRLRKTLVDERTTWLQRVQATLFHHGISGAPDKLLSAQGREFLAGLELPEAARGRIEVSLSMIEALDRQLGPLEQALRQLARRQSGCQALMRHYGIGELTAPTILCELGDVTRLSASRKAVRCAGLDIGVHRSDRRSRAGKLTRQGSPQLRWALYESAQAACRPTSPDRGDYLALKARGLSHTRASLTIARKLARRCFHTLRELGPEALEPVT

SEQ ID NO: 287343 - protein, 338 aa, unidentified
MNIVFLGIDLAKNVFQLCGLNQAGKPVYTKRTGRKELLQTLANIPACLIGIEAPTGAFYWQREFEKLGHKVKVISPQYVNPFVRGQKNDGNDAQAIAVALMQPTMQFVPPKSPEQQNIQALHRARQRIVNHRTATVCQIRGLLLDRGIPIGSAVSRARRAIPLILEDAENGLSSRMRRTIAELYDLFNDLGRRIHFFDKEIETVFRQSEACQRIAKIKGIGPKTATAVVAAIGKGTEFKNGRHFAAWLGLVPRQHSSGDRQVLMNMTKKGDKHLRTLFIHGARAVVRVATNNNDGHMNQWVNQLKERRGFNKTTVAVANKNARIIWSMLRNETGYQVV

SEQ ID NO: 287344 - protein, 394 aa, unidentified
MIYVGIDVAKDKHDCIIVNSDGKVVFDVFTIQNNIDGFEDLLFKIKATEKYPDKVKVGLEATGHYSCNILGFLKNKGLSTIVINPLYTSLSRKSISLRKTKTDKVDARTIACMIMSDVNLKPYSDTLYLNEDLKSLTRYRFNKVAQRAKLKISVSRLVNILFPELEKLVSTLHGKAVYELLSEFPSAQHIASANLKHLTNLLHTASKGRFQRASADQIRQAARKSIGSYLPAKSLELKHTIKLIRELNSEITEIEAEIKKIMDVIDSPIISIPGIGQNLGAVILAEIGDFYRFESPDKILAFAGCSPSTYQSGQLYSSHAKMEKRGSRYLRWALLNAAAYVCKWEPTFATYLAKKLAEGKHYYVALSHAAKKLVRVLYHLETTGKTYKPTSILS

SEQ ID NO: 287345 - protein, 335 aa, unidentified
MPKQDRGRSFAGGDVSSKEIVVALERQDGKRERATFPNTTAGHKLLLSWLARHGSEVQIVIEATGIYSLDVAFALQRAKGVVVMVANPRAIADFARALMQRSKTDKLDAEAILEFSCRMPFVPWIPPSQARLDLRSIMRRICSLKLQLQQESNRLHAAEHADEITPLIRRDIKTHLQQLQRHVEKLDAQAFAVVCADIELKRCYDRLISTRGIARTSALHILGELVILAADMTARQWVAHAGLDPRAFDSGTSIHKPARISRRGNHYLRAALYMPALVASRRDPNVRAFYEKLVARGKTKMQGIVAVMRKLLHAIHGMLRTNTDFEGQKFFTMEG

SEQ ID NO: 287346 - protein, 364 aa, unidentified
MPNKVHDHSTARSIPHDSSVAWLGLDAHAQNCVLAQLDDEGTPRQFWRVPTQGDKLVAQVRAIAARDKRLALEESNLARWLWQLLRPHVAQLVVCDARHNKLISTHPNKKDARDAFALARLFRLHELKPVWQAPTDERALFKSAAQSYEEAVLRQTQLKQQIKSTFQHWGLFPTGTRLYAEEGRGAWMKKLPHTDLRAQVELLYHSMEQAVQTQRDTRKLMVRLGKPFPEIKLLSTAPGLGVVGAHVFAAYIADPTRFDSPAGLIRYCKLGIRDRSSDDKPLGYEQLDRHGHGVLKAISYRAWLQAMKRQRGAVHRFFLWSKQHTGSAVHARLNTQRKLLRAWWTLWNEGQEWDEEKFFPTPHP

SEQ ID NO: 287347 - protein, 449 aa, unidentified
MPWSTLPRILCIQVPHAGGAVVEEEAMEIMYERVAGLDVHKATIVGCVRLGTGRKVTRECRTFDTTTDGLLALLAWLVECRCSHVAMEATGVYWMPVWKILGEGDFALIVANAAHIKNVPGRKTDMNDAMWIADLLACGLIKASFVPEEDVQELRSLLRTRKQLGREQTRHVQRIQKTLAEANIQLDSVLSDIMGASGRRMIEAMIEGIRDPRKLAALADQRLKATPKQLYDALHGRLTDHHRFLLKLHLRQWDGLDATIREIDLEVAARIAHMDEEVKAGTAPFCDLIELLCTIPGVSILSARTILSEIGRDMSRFPTAGHLVAWAGLCPGQNESAGKRKPARLRKGAPWLKTMLVQCAWAAKRKKDSYYKAQFFRLQSRRGPQKAICAVAASILTAIYHILKNGTEHHDLGIDHFNRRSTESHTRRLVTQLTKLGFEVQLQRTVQAA

SEQ ID NO: 287348 - protein, 387 aa, unidentified
MKKDSIFEKDSQKKRKGTKKGEVSSQELVTKIEALQRERGAALKLTIGLDLGDRSSCYCALDEKGEVIGRGVVVTEAKELEQLLGRLPASVVALEVGGHSPWVSRLLEKLGHEAIVANARRVKLISQSSRKNDRLDAEFLGRLARADKKLLAPIRHRSETAQADLMGVRVRAQLVELRTETVNAARGLVKSFGQRLAKCDADSLKESHAKDLEPAIRGHIERLLRVVGELTKEIAACDEELEKLSAERYGEETKRLKQVPMVGPITSLAYVLTLDDASRFGRSRDVGCYLGMRPKRDDSGQSQPELRITKEGDVYLRKLLVQCAQQILSRRGPDCDLKRWGEKIAAKGKKKAKRRAVVAVARKLGILLHRLWVSGQPYQPQRHKQAA

SEQ ID NO: 287349 - protein, 341 aa, unidentified
MYTIGWDLHQRESQLCVLDASGSVVREQRIATNAARFATIIPPLLPARVLLEASTESGWVATALEQLGAEVIVANPRYAPMYATRSRRVKTDKRDARALAEAALRGTYVATHRVSAAQRTVRELLTARDTVVRNRTRLIVVARALLRSQGLRLASGSSATFGDRVRDVAVPPDLAQVLTPLLTLMPQCSAQVAALDAQLAQYAHAEPVVARLRSVCGIGPVTALAFVAALDTADRFTSGAQVAAYCGLVPTERSSGEQQRRGHITKAGNVRLRALLVEAAWTHWRSRTAATAPLRAWTDAIAARRGKRIAVVALARRLARLLWVLWRDGTVYDPTRVRGRA

SEQ ID NO: 287350 - protein, 346 aa, unidentified
MEHYAGIDVSLELSSVCVVDAQGKIVKEAKVASEPEAVVAFFEALGFAVKRIGLEAGPLSQWLHAGLKEAGFETVLLETRHVKAALSAMTVKTDRKDARGLAQLLRMGWFQPVHAKSMASQEVRALLVGRKQLLGRLIDVELSIRGILRGFGLKVGAVTRKGFEARIRELVTGQATLERIAEAMLSARAALKAEYEKLHKAVLAIVREDAVCRRLMTVPSVGPLVAITYKSAMDDPSRIAKSKAAGALFGLTPKKYQSGEKDVTGGITRTGDEMVRTALYEAANVLLSRVTRFSKLKRWGMDVAKRRGSKRAKVALARKIAVILHRMWIDGTTYRWAEAKPIAAQA

SEQ ID NO: 287351 - protein, 345 aa, unidentified
MNKTIVGVDLAKKVIQVCIYTNRKVHSNTEMTPKAFTYWLVNSRPATIVFEACGTSNYWKQLASSHGHDARLISSRLVAVVRQNQKTDKNDALAIVQASLLPDVNFIQGKTAEQQQLQSIVRLRELSIRQKTASKNQLIALLSELNIQVSNRNGGLRATIDETLEDADNGFSPSFRQAISTAWDQYLSLVESIDIYDNCLEESLNYHPECKKLLKIEGIGILNAVNLYIALGCADIGAFSKGKAAAACIGLTPIQHSSGGRAKIGSIGRGFKNTLFRSQLITGAMSIVSKVANRPPKTKKEEWLKNLIERRGKKCAAVALANKNVRTAFAILTQGTEYKAEPLVS

SEQ ID NO: 287352 - protein, 409 aa, unidentified
MDLLYTRCAGLDVHATTVVACARIATGGTVTYERLTVSTSTRGLLQLADWLMAKGVTHAAMEATGVYWKPVWHVLEGSCTLILAHAHHIRNIPGRKSDKNDAAWIADLLALGLIRGSFVPPAAIQELRDLTRTRKQLVRETARHTQRVQKILEDANVKLTEAISDILGATGRAILQALIDGETDPERLADLTKGRLKASRGQLVEVLHGRVTAHHRFMLKLHLTHIEAIEQAVTDLEAHIEETLAPFRAAIDLLITMPGLSTVTASVIVAEIGTDMTVFSTAGHLVSWAGLCPRLDESAGKRRSTRTRPGALWLKPTLVQAAWAATRKKDGYFHAQFLRLKSRRGPKKAILAVAASMLTDVYHMLRDGTEFQDLGSQYFDQRDKEHLTKRLLRRLHDLGVDVEVKEPAA

SEQ ID NO: 287353 - protein, 369 aa, unidentified
MQRKEISFKGQKVFIGIDVHKDSWRIAIAPEVGVVKGHSQKPSAQELLDFLKKYYPDGEYHAVYESGFSGFSTYYALQDVGIDCIIIHAADVPTTQYEETMKTDKVDAAKLVRSLKSGLLTGIYIHKRDDIDARSVVRLRKTVQKQLGSYKSRVKHLLHSNGVTFPERFSTPGSHWSKVFIRWLKEEVALLSATRISLDLLIAQVEAIRKTLLMATRNVRELSRSERYRHGCELLTSIPGVGVNVAMTLLTEIGDINRFNNEKEFASYLGLVPTSHSSGGKVAHGEKTFRGNKYLGPQIVEASWVSIYRDRGLGCAYLNYKKRMKPQEAIVRVARKLSNIIFSVLKTGQKYKPYEWDEQQKHTDLQATS

SEQ ID NO: 287354 - protein, 405 aa, unidentified
MPYILALDVSMGHSYSVLYKDDICLFEDEIEHTQRGFHALLEEIQHLPERPLIVFEATGIYSRPVEKFFQDHHFPYCLLNPLEAKKQMEESTLRSWKTDKSDAHRLAQTHLKNQRQPKEVQSNFYLEMRDLARFYQEIEKKITRLRMDLHNCLQLTFPELEQFFSNRLTPYALTLIRLFPHPDFVLASTRTKIKNKLINETRKKISANRAEQKADQIIHYAQCAYPVVEKDSIHCQKTIYYAELLQDLLEQKKALATQMIKKAEGSPCFLLYQTFPGIGALTAALLLGELGDITRFKTHKQLNAFVGIDIRRYHSGKYTGQDRINKRGNPKARKIIFFTIRNMIRQQRAAPNHIVDYYYKLKKQPIPKKEKVATVACMNKLLKCMHAMVRAHTEYDYAYAVSVDH

SEQ ID NO: 287355 - protein, 375 aa, unidentified
MTVTRTLSGSVSEPTLYVAFELGKKEWKLAMTSSFGVQPWLRTVASRDWVRVERALTQGRARFGLPATAVVVSCYEAGRDGFWIHRALRQRDIRNRVVDSASIEVNRRARRAKTDRLDALKLVMMLVRVCAGEQRVWSEVRVPTVAEEAGRHVSRERTALTQEQTRLVNQMRGWLATWGATLPSRRRGSWWTTVRDWAGAPLRSTVQARLARAEVRLQMLEAQIVELDAQQVAALRTATPTSALRQLVQLKGVATTSASVLLDAGLVWRAFRNRRQIGGLLGFAPTPYDSGERTREQGISRAGNARLQAIGIQLAWNWVRWQPHSALTAWYRTHFGKGKRARRIGIVALARKLVIALWRYVTSGVVPDGAIVKVA

SEQ ID NO: 287356 - protein, 343 aa, unidentified
MSEVSIIGLDIAKNVFHAHGADASGRALFSRKIVRGKLLEFFAGHQRCTVALEACGGAYHWGRELTRLGYEVKLIPPAYVKPFVKRNKNDAADAEAICEAAQRPSMRFVAIKSEEQQASGLVFRTRDLLVRQRTQLINAIRGHLTEYGWVAPKGPSHVAMLGDLLADEVGSSLPEAARSMFRTMLDLLEELNEKIGDLDKEIARRAREDAVARRLMTIPGVGPITATALAALAPPAETFTKGRDFAAWLGLAPRQMSTGGKQKLGSISKMGERTLRRLLIIGCSAVVLQASKRGAPQGSWLEQMMARKPRMLVTVALANKTARIIWAVLVKEEDYRAPVAAAA

SEQ ID NO: 287357 - protein, 408 aa, unidentified
MNPLYVGIDVSSKNNVIYLMLPNGDKHSSFSLANSHDGSTQLVKRIFTAMTSNNIDSVLIGLEATSVYGDNLVYFLKEDTTLASFDRKIHVLNPKQVNKFKESYNDLPKNDYVDAFVIADCLRFGRINKEVYMDDYRYKALQNLTRARYFAVTNLTKEKQRFINVLFKKYSTMTQEKVFSDTFSTTALAVYEKFESAETLAKMDLQELTAFIMEKGKNRFPDPDAVAKALQKAARSSYRLPKTVNDSVNQVLAISITSIRALESQIKAFDKAITKQMELLPNVLISIPGIGPVLSAGIMAEIGDINRFQNQAALAKYAGLAWQQHQSGNFEAQTTRMIHSGNRFLKYYLCEAAFSLVRCDKEYSRFYHIKYKEVNRFQHKRALALTARKFVRLVFALLKDNRLYRPAE

SEQ ID NO: 287358 - protein, 349 aa, unidentified
MKILAIDLGKYKSVACNYVTATGKARFATIVTHVIELDRLLQRESPDLVVIETCSIAGWVHDLCCQRGVKCQVANPSGEAWKWKNVKRKTDRDDALKLAQLAALEQLPTVYVPAPETRQRRALLKYRQSLITRRVAIQNHLRAIAQRQGILLDRGSRAWTKAGFEVIQQIAKPLEECSAEELWRGEVALELQALKAVTKLLREVERKLEAFAASDESVKLLRSIPGVGRCTAEVVVAYLDNPQRFENGRQVSAYAGLVPKQFQSGETDRRGRISRRGPSLLRKMLVEAGWILLRYNSWAQRLVLRLSRGQKTRRKQAIVALARKLLVRCWAMLRDSTEWREPPPATATA

SEQ ID NO: 287359 - protein, 410 aa, unidentified
MQTMVERGCGLDVHQATVVACLLIVLKKGKVQKQIRTFGTTTRELVSLREWLLSEGCTHVAMESTGVYWKPIYAILEGAFEIVVANAQHVKKVPGRKTDVKDAEWIADLLCHGLLRSSFVPPKPIRELRDLTRYRRKLVESRSAERNRLLKLLESANIKLASVASDVFGVSGLLMLQALVEGKATPHEMAELAKRQMRKKIPELELALEGRVEEHHRFLLRVQLRRLQSVEQDLGVLEQRIQEKLKPYAAQLTLLDEIPGVDWTLAAGIIAEMGVDMSVFGSVSQLASWAGICPGNNESGGKRKSSRIPKGNVYLKTALVEAANAAAKAKGTYLRDKFYRLKARRGYKRAAVAVAHKILVAIYHMFSHQVCYNELGDLYLDKLNKHHLTRNLVHRLERLGYTVTLEQKAA

SEQ ID NO: 287360 - protein, 422 aa, unidentified
MLEATSDREEIIERVAALDIGKAELVCCVRVPGAEGKSRRVQEVMSYPTMTRALLGMVDRLTELEVTRVVMEATSDYWKPPFYLLEAAGFETWLVNAKDVKHLPGRPKTDKLDAVWLCKLAERQMLRPSFVPPPPIRVLRDLARYRADLIGVRTAEKQRVEKLLEDAQIKLSVVATDIFGVSGRQMLAALIAGQRDPQILAQYARGRLRGKLAALEEAFTGRFNDHHGFLLSKMLARIDQVSADLDDLDAAIEGEVAPFAQAAARLDEIPGIGHDTACVILSEIGMDMSRFPTAAHLCSWARFAPGVKESAGRRKGNGTTGHGNSYLARVLGEAAVSAGRTDTFLGERYRRIARRRGKKKAIVAVGRSILVIIWHLLGDDQARFHDLGADFYDTRAGTEHAKRNHIRQLQALGYRVTLEPAA

SEQ ID NO: 287361 - protein, 389 aa, unidentified
MRNITSVMEYHAILGIDVGQDTLVVAALTHPHQDRPARLTVPNSPEGYQQLHQWCQTHFGTPENGVLVWVVEATGGLELPLLQFAHTHGYLPARVSTKAVNALGKARLRRAKTDMDDAFWIARWAWLSAPLRRWEPPLPELAVLRDWVRRRSELVRQRQAIKLRLRSARQRGVAPAVIASLEREWAFLSAEVKQAEQQVKAWLKAYPHWHALLQRWQTVVGVGLWTACLVLAEAGDLGRFEDGRALASFAGLVPAIRQSGRDAGVGRRLASDGNRRLRWGLYLAAQSAVRHRAHFRGIWARLQARGKARKVALCAVARRLVLVLYALWRDGTVWEEPCGGSSVSSEVGLESGVAGVEAEGACLGEASSVMGREVGGSMVLDSGGGVDNG

SEQ ID NO: 287362 - protein, 338 aa, unidentified
MYYTGIDLHKFTSYLTTIDSDGCIVKQANIKNVDYNFLQYFSDLGVEHQTTVESTCTWYWLNDLLTSINIPLTLAHAKYVKAIAYAKVKTDKVDSHILAQLLRLNFIPQAHKISNENRTLRDARRARLKIVQRCTSVTNSMALVLAKYNLTEPEGLQDIPKLQYDQLSVHASLLKEQMLTLEKSLYPYLIPNEDIQRLLWIPGIGKMNAFTIALEADNINRFAGVKNFFSYCRLVPSARNSAGKSKQQSSKDGNRYLKIVFTDAATHAVQYYSEIRKYHNSLLRKKSKQIAKTIIAKEIAEIVFYILKNKTNFNNKFKGVELQHKKSLQWPRVVSPDV

SEQ ID NO: 287363 - protein, 407 aa, unidentified
MYYLGIDISKKSFTVSVLDEEGEAITKVITFPCTGRGFEKLVDKISSLKLKKSEVVIGIEATGNLWENLYSFLKGYRVIILNPYQTRKYHQVLSKKAKTDKVDSLVIAGLLRSKEALASFVPEEEVQALRELVRLRHHLQKDKKNYLRKAYSLLNLVFPKYTDLVKSPFKKVSSMILKKYPTAIHMARARKTDLIKMARRIQGNNYSSELAEKLIQAAKESIYSGKAAEVRGMALRILIDEIQFLKNKIKEIEDKIEEILSSNEPSSPHKRLLSIPGVGPKTVAAFLGEVGGDVTRFSSANKLIGFIGWHPRISESGESKNLHPKMSKKGPSALRASLYMAAVASLKHNPYLRSLYHRKISEGKESKQALICVGKKILSIMYSMLKYEEDYDPQRIFFQLEKEPVLI

SEQ ID NO: 287364 - protein, 351 aa, unidentified
MENPTTIAVDLSKNVFEIAVERQGRICQRKRLNRRQLVEFFSRSPSATVLMETCGSSHYWGRKAQEFGHTVKLLPAQHVKPYRIGQKTDRRDAEAILSARHRESIVPVPVKTVEQQTICALHRIRAALMKTRTARLNTVRGLLREFGVTIAEGAERVLPAVREALSESPSPVPESLHAALFSMMAEAGELDERSGQVEKQLKALSRTVSLVERFEEIPGIGLLNATAFSAMVGNFARFKSGRKFASSLGLTPKESSSGKRRWLGSISKAGDPYLRTLLIGGARSMILAAHRTKRPHRLQAWALEVEKRRGRNRAAVAVANKLARIIWAVASRGVPFKPQFDIQNTPTSVPA

SEQ ID NO: 287365 - protein, 351 aa, unidentified
MIVIGSDPHKRSYTSSAVDAGTGELRSSETVPATSAGHERLLGWARGVDRERVWAIEDCRHVSGKLERFLLARGERVVRVPPKLMAGRRRGSREAGKSDPIDALAVARAALEEGIQTLPVAALAGPAREVKLLLDHREDLIAERTRIQSRLRWLLHDRWPELELPTGCLDRPLWLDRLAGRLARSSQDADVRVMRAQVRRIKELTREANALERELRLLVAGLQPHLLDLPGVGPLTAAKLIAEIAGIERFPTPAKLARLAGIAPIPASSGNRTRVRLHRGGNRQLNAAFHRIAVTQMRVHQPARDYIARRLTDGKTKREAIRCLKRHLVRTIFNTMTTATRETPAPALALT

SEQ ID NO: 287366 - protein, 368 aa, unidentified
MWCGVSETPEQEESEMNATTVAVDLAKNVFEIALADVHWKILERARLTRAQFERWFDNRKVDLVVMEACGSAHHWARTLRARGIEVRLLPAQYVRAYVKRNKTDAADCLALLEAARAQDIKPVAVKSVEQQALQALHRTRSGWMSTRTRRINTLRGFCCEFGLVVPEGAATGLAQIARYLADERSGLPQMLRPSMRLVLEEIRLMEARIGQLEQQLAALARQSPACQVLLSVPGIGLLTSTAMVAAVGDPRSFPSGRRYSSFLGLTPREYSSGNTRYLGRISKRGDRYIRMLLTHGARSILRAATVARRAGRQIDRLKTWALAVQARTNHNKAACALANKLARIAWAVWVKHEKYRAEPAPVAPSFST

SEQ ID NO: 287367 - protein, 345 aa, unidentified
MHIASIGIDLGKTTFHLVALGERNKILLRKKFSRTQLLAYTAKLPLSLIGLEACAGAHFVGGALREQGHQVRLIPAQFVKPYRKSNKNDFLDAEAIAEAVTKQNMRFAQLKTQEQLDWQAMHRVRDRLVQRRTALINEIRGFLLERGITFAAQPIHLRKNLPGLIEDAEQILSPRLRWLLDRMWQEWKQIEIDVETITDEIERISNDDARCQHLRQIPGFGPLVSTATVAAIGNGSAFRRGRDFAAWVGVVPRQYSTGGKQKLYGISKRGNVYLRRMLIHGARSVLFRVKYDTGGFGQWVRRLAQRAPSNKVVVAIANKLARIAWAVLSSGRDYRHQPLRQLTAA

SEQ ID NO: 287368 - protein, 340 aa, unidentified
MTIATIGIDLAKNVFAVHGVDHNGKTVLVKSRVTRSALPELIAGLPPSVIGMEACSGAHYWARLFRQYGHEPRLMAAKFVSPYRMAGKSGKNDAADAQAICEAVRRPHMRFVPVKDESQQAMQCLHRTRQGFIEEKTAIYNRLRGLISEFCVIAPQSTDALRRIVSEQKSYLPLQVQQCVDDLLEHIDRIEDKVSEYDRTLSCMAKTDHRSQRLMELKGIGPTTACALVASIGNAHDFKNGRQLAAWLGLTPSQYSSGGKSKLGRITKAGDSYLRTLLVQGARSVLIGAEKRSDSFSRWVCSLVERRGYWRAVVAIAAKNARLCWASLHYGDDFKLYSAS

SEQ ID NO: 287369 - protein, 345 aa, unidentified
MDFIGIDLHKNSSHVCILTDDGELVERRIKTDPESFDKLFGERPAAHILVESSTESEWCARHLEALGHEVIVADPNFAPMYATRGRRVKTDKRDARALCEACRLGAYRPAHRTSDRQRDVRAHLAVRETMVRTRSKYISLIGALARREGCRIPAGPSPSFARRVAEAGLPAHTLAQIEPLLGMLVVLNEQIKLADKRLEEIVKADEVVQRLCSVPGVGPVVATTFAATLDEASRFLGAKHVRSYLGLVPREYSSGERQHRGRISKAGSVRARSLLVEAAWSLLRWKTERTKALHEWWARVAQRRGKATAVVALARKLAGIMFAVWRDGTEFDPQLLRARGAPAAS

SEQ ID NO: 287370 - protein, 379 aa, unidentified
MQQDSEIYVGLDTSKLKISVALAEAGRSGEVRFFGDIDSTPEAVARLVAKLEKRHVRLAFCYEAGPTGYGLHRQITTLGHACTVVAPSLIPRRPGDRVKTNRRDAVTLAKLHRAGELTAVWVPDPGHEAMRELVRAREATMAELRRARQQLQSFLLRQGRIYTGRAAWTKAHARWLSEQAFTQPALYLVLQEHRQAIADAEKRLERLTRQVTEAAETWSMAPVVAAYQALRGVAFLTAVTFVAEIGDVRRFDSPRQLMAYLGLVPSESSTGEQVHRGRITKAGNSRARRVLIEGAWTYRHPARMSRLLQERQADLPPAVREIAWKAQVRLCARYRKLMARGKRQTVVTTAIARERAAFLWAIGHEVEPTAAAPADGQLH

SEQ ID NO: 287371 - protein, 415 aa, unidentified
MRENANASLCRYIALDIHKHYSVIAGVDRDGQELLEACRVEHEELEGWLTRHLKPSDRVVIESTTNAWHVYDLLEPLAAEVLVANPIRVKQIACARVKTDKKDTLILARLLAANLVPTVWVPPKEVRELRQLISQRRRLVGMHTQVVNRMHSVSHRHHLGHPRGKRFQEKDMGWREKLEGMERFQLDLDLETKQYLQGQIERITGELRRMSHEEPWAEQMLYLMQIPGFGVVTGMTVLAAIGDVSRFESPKKLASYSGLVPGVEQSGVKLRGKGITKEGRRELRWALVEVARRAVKADPYWKRFFAILERRMHRNQAFVAIARRLLTLVWYVLTRQEAYGHYSEERIAYKYYTWSWQLDEAQRKGLTRPQFVRYYLMKLGIGSELQRVALDPKHPHRLASEAEILELMPDLQPPG

SEQ ID NO: 287372 - protein, 420 aa, unidentified
MEELTEEPAELLERVAALDIGKASLVCCVRVPHESRLGARRQEVRTYGTVTPALLELRDWLICQGVTRVVMEATSAYWKPPFYLLEDDIECWVVNARDVKNVPGRPKTDKLDAVWLCKLAERGMLRPSFIPGRPQRQLRDLTRYRRTLTHERTREKQRAEKLLEDAQVKLSSVISDIFGVSGRDMLAALIAGERDPHALADLARKRMRAKISVLRQALTGHFTEHHAFLLGMMVDRVDALTAQIDTLTTRIEKAIAPFAAEVAQLDEIPGIGITTAQEIIAETGTDMSRFPTPGHLVSWAKFAPKARQSAGRSKAAATGKGNPWLGGTIGEAAAGAARTSTFLAARYKRVVKRRGKKRALVAVGNSILTICWHLLSDPGAHFTDLGPDWHDRLAPQRRKRQLIAELERLSGKKVTLNDAA

SEQ ID NO: 287373 - protein, 345 aa, unidentified
MNAAFIGVDLSKSVFQIHGATIEGRTVFKQKIGRGAFAETMAALPSACVGMEACASSHYWSRRLEDLGHTVRLINPAFVKPYVKSQKNDAHDAEAICEALSRPSMRFVPRKSLLQQDLQAQHRVRARLVKERTALVNQIRGLLGEYGIIVSRGIHKLRKSLPSLCESPELTPRATTLFQELSDEFRQLDARISIKDREIKDFAQADEACRRLLTMPGIGPLTATALVMSVGNGADFKNGRHMAAYLGLVPRQHSSGGHDRLGRITKRGDRYTRTLLIHGARCIAMRADRTKGRRDVWIRDLIERRGFNLACVALANKMARQAWVILNRQTDYQPSPIANSEHQDG

SEQ ID NO: 287374 - protein, 350 aa, unidentified
MIIIGCDYHPSFQQIAFVDTETGELQERRLQHREEAEKFYRDLAAQGMKVRVGMEASGHARWFERVLAELQFELWIGDAFEISAKRVRKQKTDRQDAQLILRLMLKDDFPQIWVPSWENRDLRQLLWHRHRMVQARTRMMNQLQAVALNEGLRCKKKLWREAGRAQLEAFKLAPWASQRRVDLLELLDRLNPTIAKLTQAIDREVEKCPAARRLQTHPGVGPLTALAFVLIIGKADRFQCGKQIASYLGLVPLEKSSGNQRRLGHITKQGNSLLRFLLVEAAQVTVRSLPEWRSKYCHLTLRRGRKIAKVAMARKLAVRLYWMMRKEWDYEQLRKFGSYAGKPGHRDGVK

SEQ ID NO: 287375 - protein, 394 aa, unidentified
MKLVGIDVGKNSHHFCIMDKETGELNITPTPFPNNKEGFDFLINSLKPYSKKSVLFGMEDTGHYHIALLKFLLSNGYTVALINPKTTDLTRKMEGGITKNDKLDTITICDVLDTPERKKQYRITKVDRFDLYEQRQLTRHHHNLKEELNVYCNRLQKSIDLVFPEFNTLFSSKYSIVYMNLLKTFGSAEAIASTDIRTIRKCFEVKGRGGRISLTPEKLKECAKNSIGISSEVETIQIKHLVNQITLIKEQIAEIDKKIEEFSIKNNSPILSIPGISHFSGTSILAELGDIGNYSKPSQIIKFAGVAPYHYESSQYNAQHTGITKKGSKYLRKTLYQIILTVINNNPVFKKYYRLKISQGKGHRCAQGHCIRKLLRIIYHLLETGQSFDPALLR

SEQ ID NO: 287376 - protein, 341 aa, unidentified
MQVTRTVVGVDIAKRVFQLSWVGLETGELMNVRLTRAKFLEHFANHAPCLVAMEACGGAQHWARRLLALGHEVRLLPAKMVRPFVSGNKDDAHDARAIWTAVQQPGVKTVAVKSEEQQGILALHRMRQQLVKFRTAQINCLRGLLAEYGEVMPRGRAGMRRDIASALERVSQRLPALVVETLREQWVRVTDLDGEVDRIEQRLTVWHRQNLASRRIAAIPGVGVLSATAAVATMGNPAAFRSGREFAAWLGLVPRHTGTGGRVRMLGISKRGDTYLRTLLIHGARSALVHAKLPSAWQLRLLRRRPSNVVIVALANKMARTIWALLAHDRTYEPNFARQSA

SEQ ID NO: 287377 - protein, 400 aa, unidentified
MATIIKTPQDSLQPSYQKKRFSTFNSDLNHFADWLHENDCLDVCMESTGKYWVPVFNILEKRGICVVIANPKWVKAVKGNKDDTKDSKWIGDLFRIGLVKSSFIPDKDIRILRELTRYRYKLTSMRSSEKNRFQNAFTVCNVALDSVVSDMFGKSATAITDYLTSGEDFDAQHCISLLQRSLKKKADDVLQSIEGYEITAEQKTRIGIIRDHLHYIDTLIERVDICINTMIDKYEGYIVLLRTIPGVDRSSAITILSEIGVDMTQFGSSKRLCCWAGLTPGNNESAGKKKSVRISRAGVYLKPALVQIAHAAVKDKLSPYYSLKYERIAKRRGKKRAIIAIARMILTAAFVMLSNLEEWNPVDLYKVDMPEHLKEKQLAKAVKQAVRFLETQGLTVLDSA

SEQ ID NO: 287378 - protein, 337 aa, unidentified
MKITLIGIDLAKSIFQVCGVNRAGKPVFNRQIRRNRLLAFLAQYPEVSIAMEACSGSNYWGRTLEEMGYTVLLIPPQYVKPFVKGNKNDRNDALAICEAARRPNMRLVKPRTLAQTDILMLHKILERRVRGRNALICQIRGLLGEYGIVVAAGKERLKAQLPCLLEDGENGLTWSARELLSLQLDEWCQLDRAVAELERRIRHQVSGSDQARRLIQIKGVGQKIASAGCALLGDGSAFRNGRQFAANLGLTPKEHSSGGKQRLGRISKRGNAYFRRLLIQGAWSVIRYCDRGDDRLSRWARKMVARRGKHKAAIAVANKLARIIWAISYHQTEYRPS

SEQ ID NO: 287379 - protein, 351 aa, unidentified
MEYVGIDYHTRYAVATRMTGEGEILSEKRIPNLKDDIRNYFSQLPVDTQVVLEATNNWAAFVEWTHDLPIEVKLANPAKTRAIAEARIKTDSLDSRVLADLLRSNFIAESYLAPREVRDIRELVRYRMTLVRLRSQLKTRIRSVLFKVGERVPTANIAGPLAREMLSKFSLRDIYRDEINSCLSLIETFSKQIGEFEEKIESQAKLDSDTKLLMTIPGISFFSALLITAEIGDYRRFSSGRKLCCFAGLVPSVHASGGKIRHGRIIKRGSANLRFALLQAIPHLIRKHHGLARHYQRISRKKGVKTARIAISRKLLAIMLTMLKTRAPFRLDTRVKEKPMLTLSASARESV

SEQ ID NO: 287380 - protein, 400 aa, unidentified
MPELWAGTDAGKAAHHCTVIDTDGTKVLSRRVPNNEAELLELIADVLALAEDDPVTWAIDLNAGGAALLIALLTSHGQRLLYIPGRAVHHASRSYRGDGKTDAKDAYVIADQARMRRDLQPLQNWDEIAVDLKVLTARRYDLAADRTRAINRLRAQLLEYFPALERAFDYAASKGALVLLTGYQTPAALRRIGASRLATWLKNRKVRGTQALAEVAVAAVQAQHTAVAGEATAAAVVCTLAKAVLALDEEITVDLKIAARFREHRDAEVITSMPGMGPLLGAEFIACTGGDMDAFGSTGRLAGVAGLAPVPRDSGRISGNMRRPHRYHRRLLRVFYLSAQIAARFCPTSKTFYDRKRAEGKSHKQAILALARRRLDVLWALIRDQRHYTVQPPQPEPLAA

SEQ ID NO: 287381 - protein, 378 aa, unidentified
MKAARFTADEIERVAYLTTKGYLPVAVDVASRVFQVCYYDLGAKHIRNYQLSREKFFEFIDDTHTPRKLIGIEACGSCNYLCRYIQEHNHKCHILPALKVKAFLHLDKTDRIDALGILKALITPSMQHIPARTQENQYLLNLITVRDQLNKQFIQTVNAAHAFLYESGVVVGTASVSSATKVTEALKALCNTETEKEHSENDCSYSHLNCLSESLLSNIESLQTKIKEINSHLLSYASNNEICSNLQTVPGIGKLSAVALYAAMGDPDRFSSSRAFAAFIGVAPVTTGTGGKTIVLGIRKSGIRSIKKMLYMCAMVYLSQAMKNGTESSWLKQRLNQNRSKKIIICAIMNRLTRIAYAIAKSGQPFDENKCNMIKKIR

SEQ ID NO: 287382 - protein, 507 aa, unidentified
MDEVDEQELHVERVAALDLGKTVLEACVRVPHESRPGRRMQELRGFATTTSALLAMADWFRCWGVTRVVMESTSDYWKGAYYLLEAEGFECWLVNAREVKNVPGRAKTDKADAVWLAKVAERGMCRASLVHPKPIRELCNLTRYRRSLIRDRTREMQRVEKLLEDAQIKITSVVSDVFGVSGRAILHALIDGQRDPAVLAGLAVGRLRPKTAQLREALRGFFTDHHATILAMMLDNIDRLSAQITALDTTIGDAVDPFAHQVAQLGEITGAGRTAAQELIAELGVDMTRFPSDAHLVSWAKFCPQTRESAGKTKNKGRAKGSPWLAATLGNIAASACRTDTFLGARHRRIAKRRGTQKAIVATGNAVLVIAYHLLADPAVRYHDLGADHYDTRINKHRRARNLATQLQALTGQTTGPHRPKDHHPRRQSHHRLTTRPQTRPPPGRCHLPTHRWIFGSDSASSNPATRSIPVASDRSGYIKSMIARKPRLTPRQNADGNDDPVSRASR

SEQ ID NO: 287383 - protein, 424 aa, unidentified
MSKKNSRVAGLGALYGRVCGMDVHKNSVVACVRILNAKDGTVQSRLRRFGTMTADLVELRQWLAQEQVTHAAMESTGVYWQPVFNVLEGHLEVWVVNAQHIKKVPGRKTDMKDAEWIAQLMQCGLLKPSFVPDCQQRELRDLTRQQTKLVQQRNAVDNRIQKVLETANIKLGSVASDVLGVSGRKMIEALIAGETDVSVLAELAHKRLRAKIPQLQRALEGEITEHHRFLLRQLLDQYDFLEKEIARVSERLGAIAPPSFRAAVEQLDAVAGVAERGARALLAETGTDMSRFPSHKHFASWAGRCPGNRESAGKRKSGKTPAANRHLDAVLTEMAHAAVRTKNSYFKSQYHRLAGRRGKKRAIGAVKHSLLVTVYFMLRDNKPYKDLGVDYFDKLNPQQRIRYHVRRLQELGQEVELSPVAAAA

SEQ ID NO: 287384 - protein, 420 aa, unidentified
MKYARVPRPEAPPGALSAGIDWASADHAVCIVDAAGAVVSRFTVAHTAEGLKTLVSRLARAGSAEVAIERGDGPVVDALLAAGVTVVVITPRQVKNLRSRYGSAGNKDDRFDAYVLADVLRTDRARLRPLIPDSPATATLRQACRARKDLVRHRVAVGNQLRAHLLCAFPAAAGLFCKLHSAISLAFLARFDCQDRAGWLSQKRLAAWLKAASYSGRTDPADLYQRLTSAPRGATGEAGAASAQVTRALAAVLASLNTQIKALDAQIAAQLASHADGHIFTSLPRSGTIRAARLLTEIGDCRARFPEPQALICLAGAAPSTRQSGKHKAVTFRWAVSKQLRDAVCDFADGSRHASPWAAQTCNAAIARGKDHPLAVRILARAWLYVIWECWHNGVAYDPARHRGLQRLLAAQATGADQAA

SEQ ID NO: 287385 - protein, 414 aa, unidentified
MTSSVNISAGLDVHNKFVLATILWSTGQLIQERFERTKDGLLSLKAWIMLQKCEVVACESTSDFWVPIYDLINDSIPVIVGNARDIKALSHKKTDKVDSEMIARLALHGMIQPSRVFCGEHREFRKILRLRHRLVEKRTSFKYQVKGILNAEMIRLSSVLSDVFGKSGMMLLTGIINGMQLNDIIPTLPKRAQEKKDKIIEVLGNNISKDALFQIKVLLDVIRCLDEQELLLKNSALHFAYKNYPREMGILMSVPGIGEIGAATLIAEIGDINDFPSGDKLAGWLGMVPNVYQSAGKLRTGSITKRGSVHARWILTQIAHAAARCRHNSLRFYYERKSGLIGKAKATIALARKIVTIIWHLLKNNEYYDDPLFPRKKVQTMNKVMVPKEVSLEQLLEIIAKADILIKAPDPDIL

SEQ ID NO: 287386 - protein, 344 aa, unidentified
MTNYAALDVSLEATAVCVVDEEGRILAEKKIPTCPDAIVSWLAKTVPDLVRVGMETGPLAVWLWNELRDKGLPIVCMDARHANAALKVRPNKTDRNDAAGLAQIVRTGWFKQVRIKSRVGYELRSLLAAREVLVRSRVKIENEIRGLLRTFGVLFGKSVGGFSRRVDEIITGELDASPAIRDVIISLAKARTALLDRIKDLDRRVLTSAKTHSTARLFMSAPGIGPITALSVASAFDDASRFKRSSSAGAYLGLTPRRYESGEASRNGRISKHGNKMTRKHLYEAATTLLTRNIGFSTLKAWGLRLAKKVGFKKARVAVARKLAVILHAMWKTNTAFRWSANAA

SEQ ID NO: 287387 - protein, 312 aa, unidentified
MDATVIGIDVAKDRLDVCVRPSGESFVVARNGAGIEDLAERLKKIAPRVVAIEATGGFETVVAAGLAAAGVPLLIVNPAQVRAFAQALGKRAKTDPIDAAVIAHFIEATKAQPRPLPDETTRLLADLVTRRRQIIDMMIAEGQRDRRLANKRLKNSIARLRKALEKELAEIDSELDDHVRGSPAWAAKEELLASVPGVGPIIARTLIAELPELGTLDRRKIAALVGLAPWTRQSGQWRGKSFIGGGRKTVRTALFMAAMVAARHNPVLKTFRDKLVAADKPKLVALIAVARKLLTILNALLRDNQRWQPKTA

SEQ ID NO: 287388 - protein, 360 aa, unidentified
MLRAPLHPPSTEATMRFYQQQHEFYCGVDLHARSMHVCIVDHAGQTKVHKNIDATPDRFLPLIRPYREGLVVAAECMFAWYWLADLCAVEGIPFVLGHALYMKAIHGGKAKNDRIDSQKIALLVKGGMLPVAYAYPKAMRATRDLLRRRNKLVHTRAEALAHIQNTVSQYNLPPLAKKLTFAANREGVAERFTDTSVRRMVASDLALIGHIDEQLKGLELYLVRHAKVDDPQAYHLLQTIPGVGKVLALILLYEMHDAGRFNDQRHFVSYCRLVRPCHESAGKKSAGKGHKIGNAHLRWAFGEAACLMLREVPAAQTYVARLEKQHGKAKAISILAARIARTAWLMLKRKEAFDATQFLN

SEQ ID NO: 287389 - protein, 388 aa, unidentified
MLLDHPSDGLAAIRTQFGAIFVSLELSRSTWLVTSLSPCKGEKMSKRSMKAGDLSELLKLFAELKRKAQARTGESYPIITIQEAGLDGFWLHRALQQEGIESHVVDPASIATPRRRRRAKTDRLDGETLLRTLLAYKRGEVRVCAMVVAPSPAEEDRRRLCRERETLIAERIEHVNRIKGLLFAQGIFDYAPLRRDRRKRLEALRTGDGRALLAHLKAQISRELDRLELLLDQITAVEREQDALLAASKAAGEKTVSNPVAMLLELKSLGPNFTAVLWSEAFYRQFANRRQIASYAGLAATPWRSGGIEREQGVSKAGNPRLRTTMIQLAWLWVRHQPQSALTQWFKVHSQRGRKRAIVALARKLLVALWKYVTAGVVIEGAEIKAAA

SEQ ID NO: 287390 - protein, 344 aa, unidentified
MDHFAGLDVSVKDTSVCIVDDAGSIVRELKIASEPVALLQVLGNPIYHFKRIGLEAGPLSQWLYSALAEAGLPVICVETRHMRAVLKAQINKTDRNDARGMAQMMRAGLYRPVHVKTLRSQKLRMLLTHRKLLQSKAIAVENDLRGTLRNFGLKVGMVGTVRFEARIKELVENLPDLAVLVEPLLVVRRVLREQIGILHRRLLAIVRDDDVCRRLMTIPGVGPVVALTYRATVDVPARFKNSKAVGAVFGLTPSKYQSGESNRSGAISHCGDEMMRVMLYEAAQAMLTRTNKWSWLKAWAMKIARQRGMKKAIVALARRLAVIMHRIWVDGTEFRWTRKEAVVA

SEQ ID NO: 287391 - protein, 320 aa, unidentified
MTKKQQIEFEQIIERGCGIDVHKKIIVATVRGTGIKEETRTFDGFTESIETMRDWLKSLKITHVAMESTGVYWKPIYNILEDGFEILLVNARHIKNVPGRKTDKKDSKWITKLLLSGLLRGSFIPPKSTRELRDLTRYKRKIIQQVSSEKNRIQKILEDANIKISSVVSSTSGATATKIINAMISGEQNIDELLKFRHGRIQSSVEDMISALKGNLTPHHKFMLQTIKESMDEKQILIDKLDNQIAIHLKEHELELESELLQTIPGVGKDGVAYLLAEIGSNMEQFPDEKHLASWAGMSPGSYESAGKKKVVESLTEINI

SEQ ID NO: 287392 - protein, 407 aa, unidentified
MNDSGKRYIGLDVHKHYLIALGVDTDLNVVLSARRVELFRLETWMKKNLTKQDEVVLEMTTNTWQLYDELAQYAGSVTVVHPPHVALITRSQVMNDKIAASILARVLAKGLLVGIWIPPQEIREARGLVAQRQKLVRLATQAKNRLHAVIQRHHLVPPKGNPFGAKNKEWWMSLSLGKLEKLNLQSDLETLQFAEKQVKDMTEIMAGMAAEQEEIGRLLHLAGFGVVTAFTVWAAIGDIQRFAEPQKLVGYAGLGTRVHDSGMTSRSGKITKAGRRDLRTVLIEAANAAANSHPHWKAELARLEPRLGRNKAIVAIARKLLIAVWFVLQGKTDKYAEPEAVAQKMLKFAYAVGKANRPKGQTAAQFARIRMDALGVGSELTSIPWGSKKPIPLPPSKLKERSAVPNK

SEQ ID NO: 287393 - protein, 339 aa, unidentified
MKVIKQNVGIDVSKETLAVCIVMMYENLSVKVKGSKTFANNKSGFKQMLTWVLSKRTPEICLSFTMEPTGVYYENLAYFLYAQNEIIHVVLPIRAKRYAESLPGDSKTDKLDAKALGRMGVERKLDVWQIETPIYKDIKQLTRERDALIKERTNVKNRLHALLNSANPYKKSLRRLKGLIKYLDKQIKAIEGDIQELVISDEWLSKKVEQITSIPGVGLLTAVIVIAETNGFALIKSIKQLVSYAGLDVKIRESGAWKGKSKISKKGNVHIRKALYFPAYTNMKHSNNYLGLYSRIFAKKQKSLIAATATQKKLLGLIYTLWKNETVYIENNQQQKKVA

SEQ ID NO: 287394 - protein, 401 aa, unidentified
MNAVGIDVSKGKSMVSIMRPFGEVVASPFEVSHTGSELSELADKLKSLHGETKVIMECTGSYYYPVAYALHEAGLFVSAVHAKLIHDFGNNTIRRVKTDKADAIKIASYGLSHWLELPEYIPEEDVRRMLKAFSRQYTKYGKLKTMLKNNFISLTDEIFPGVNELFTSPPRKSDGHEKWLDFAAHFWHCECICTVSPQDFALRYQKWCKRAGYYFSQEKADDVYAAASGHLIGMPKNDMTKVLVKQAVGQINAISEAIAIMAREMQRLAKMLPEYPVVSEFYGVGDILAPQLMAEIGDVYRYRSKGSLVCYAGLEAPPYQSGKFDSANRHISKRGSPHLRKALFLVMTTLIKHSPVDEPVYQFLDRKRTEGKHYYSYMTAASAKFLRIYYARVKAYLDTLD

SEQ ID NO: 287395 - protein, 420 aa, unidentified
MKVVYQTCCGVDVHKSFLVATIIQTTSGVEPSYQKKRFSTFNNSILQFKHWLIENQCRDVCMESTGKYWIPVFNLLEDEINVTIANPKWVKAVKGNKDDTKDSKWIGDLFRLGLVPGSYIPCKPIRILREFTRYRYKLTSCRTSEKNRYQNALTVCNVALDSVVSDIFGKSATSVIDYLIEQSDNSINHEEIASRLFRSLKKKSDSVIESIEGYQMTDSQKYRMRLIRAHLDYITSTINDIDTMLDSLIAPYENAVQLLCTIPGVDRNSAITVISEIGTDMTPFSNSKRLCCWAGLTPGNNESAGKKKSVRITRAGVYLKPALVQVAHAAVKSDKSPYYKQKYERIMKRRGKKRAIIAIARMILTAIYQMLSTGEAWNPTDLYKIDIPEPLKEKQKEKAIKQAKKLLIREGILSESQLAS

SEQ ID NO: 287396 - protein, 354 aa, unidentified
MNKDKYVAMDVHKASVVVGMRDAAGKYITEAIVETKASTLLDLIRGMSGTIHLTFEEGTQSAWLYDLFKPHVAELIVCDPRRNKLLEEGSKGDRIDVQKLSELFCKGMLKPVYHGDHGTRALKELGHNYESLVSDRTRVKNRLKAIYRGRGISYQGAEIYQPKRQKEWLAKLNERGVKRRAELLYQQLESLDGLVKEARREMLAESRKQKVSRCLRRISTLGSISAALLIATVDTPHRFRTKRQFWTYCGLAVVTRTSSDYYFDQGQLRRSRRPVVTRGLNQNYNRRLKRIFKQAALTASRRGPFKPYYERLLGRGLSEELVRVTVARKIAAVTLAVWKKGAQFDPEKILKPTT

SEQ ID NO: 287397 - protein, 436 aa, unidentified
MDQVIIGVDPHKLSVTIEARDSREVLRSTGRFGTDTAGYRQLLRAARQWPQRVWAVEGANGIGRPVAQRLLADGERVLDVPAKLAARARVSGTGQGRKTDATDAHAIVMVALRDTGLRELSSDPELMVLRLLCDRRDEISRARAQALNRMHRLFLELVPGGAPVKKSTSQYKSLLARVRPRDLAGKTRRRMAAEELADLARYDAKLKTMKAELKATVQARGSRLMDIHGIGPAGAARILADVGDVARFPDRNHFASWTGTAPIDASSGEHTRHRLSRAGNRRLNHVLYMAGIVQLRNDTPGRAYYRRKVQQSKTSMEAMRCLRRRLSDVVYRQLVADAARTAALDQAGPGGHSGTTLKSSATDLTPDIGSSDQPFPGPAPSTLPPPPPARNPARPGTGAIPRRRAGGVNVERPTGRTTLTPTSAGAHSKGLPDPPP

SEQ ID NO: 287398 - protein, 356 aa, unidentified
MICNHSHRGQGVIVGVDTHKDQHVAAVVDRLGALIGQRSLPTTNTGYVDLEHWASGWGEIDAFGVEGTGSYGAGLARFLRAQGHRVVEVNRPDRSTRRRLGKSDPTDAEMAARAVLAGVARDQPKSGVAEVEMIRMLKSTKDSAMKGRTQAINQMKALIITSPVELRAQLRGLTTINLIDNCSRRHQGHPTTPLAAAKYALRSLARRYIQLTQEIEALNTELARLTMAFAPALLEPLGIGPDTAAALLVTAGSNPERLKSEAAFAALCGVSPIPASSGKTNRHRLNRGGDRQANAAIHRIVLVRLRYDDRTNLYLQRRTEEGKTKTEAIRCLKRYVAREVFVILHDIGERLATHSV

SEQ ID NO: 287399 - protein, 462 aa, unidentified
MNCTTKRKKIQEGQSTSNSMPVIFPDTAGIDIGSKSHFVAVPADRDPTSVREFSSFTSSLYEMAKWLKECGIKTVIMESTGVFWIPTFELLESSGFDVKLVNSRHVKNVSAHKTDVLDCQWLQQLGTFGLLKSAFRPADAILPLRAYLRQRDMLIKITATHVQHMQKALTQMNLHLHNVINDITGATGMAIIRKIVAGESDPKVLASLRDGRCRNPEDVIESSLVGNYRREHLFSLNQALDLYDFYSKKIQECDERIIEETKKIETKCDVKRMELLKKKDKNSKPKKLKKHEYNFDIASELIRATGVDLTKIPSIGASIALTIVSEIGLDMSRWKSAKHFASWLGLSPGNKVSGGKRLSGKSKPCKNRVAIVLRIAANTLYKSQCAYGAYLRRMKGRLGSPKALTALAHKLAKLIYIMLKYGNEYVEKGAAFYEEMYQARREISLRKKAKEMGYELIPVAAA

SEQ ID NO: 287400 - protein, 312 aa, unidentified
MTKSVESILVGIDVSKAELVIARSDAPQIDTINNSPSAIKRWLKSLPQGSRIALEATGIYHRQLATLAHAAAHPLYLLDGYRLSRYRDGVGTRAKTDPSDARLTLRYLSNELEELKPWIPAHDAFYRIQSLMRRRASLVHTRVALSQSLQDVPELKQASKQLDTHIRRVELLITQRLKQALADVGWDADAKRCMDIEGIGELSSMALANTFHRGRFKSSDAFIAYLGMDVKVRDSGKQAGRRKLTKKGDPELRRLLYNAAMAARKTAAWKALYETYLSQGLKPIQALIKLARKLARIAFALMQNQTVYRPKT

SEQ ID NO: 287401 - protein, 430 aa, unidentified
MQHDILVWVGIDWATEEHQVCGVDGQSKTLFEGKVKHTGDDIGAFVERLLEHAGGAAERIAVAIETPHGSIVEALIERGIAAFSINPKQLDRFRDRHTVGGAKSDRLDAFVLADSLRTDLRLYRRIELGDPVLVELREMVRAREAMVADGMALGSRLREQIHRYYPQVLKLGSVYDDRWLQALLELAPTPAQAARLSRAKVASLLRQHRVRRLTTDEVLETLGEKPLVVAPGVVEAASAHVRLLLPLLRGNREQLAECDRRIEELMNRVGRSPEVDVSTRPDPADGDGSGPARRHRDADILLSVPGLGVLTSATMLAEASTALRDRDYQMLRTQTGVAPVSSQTGKQRRPTVSMRHACNPRLRTAVYHWARVSTQRDAATRAHYARLRQAGHSHGRALRGVADRLLSMLVAMLKSDTLYDPTRRTLPAAA

SEQ ID NO: 287402 - protein, 336 aa, unidentified
MKLYCGMDLHSTNTMVVVIDEEDHRLIEQRRPNDLPALLELLEPYREQLVGIAVESTYNWYWLVDGLMDHGYSVQLVNTTAAQQNYSGLKYAGDRHDAFWLAHLMRLKILPTGYIYPRPLRWQRDLLRQRLNLVRERARHRLALQSLWALHRGRRLSFRQLHRDLAQLRLGEPALDLALDAHRRTIRLLDDLVEELESAVYRQLKPTAADQLLHTVHGIGPVLAATINLETGSIERFARVGQYSSYCRLVKSERRSNAKKKGEGNRKCGNKYLSWAYSEAAHFAVRYDDRARRFYDRKKAQRNGIVAIRAVAHKLARACYFILRDQVEYRSEKVFA

SEQ ID NO: 287403 - protein, 355 aa, unidentified
MNQEKYIGMDVHQATISVAVMDSSGKLIMECILETKAATILEFIAGLRGTLSVTFEEGTSAAWLHDLLKPHVSHLVVCDPRRNALLKDGNKSDRIDAQKLAELLHANKLHAVYHGEHGIRTLKELGRSYLTITKDLTRVMSRIKALYRSWAIPCSGATVYAPRHRDEWLAKIPHPGVRLRAERLYQQLDLLQPVRQGARRDLTVESHKHHAVKLLRQIPSIGPIRAALLVALLQTPHRFRTKRQLWAYSGFAVETHDSGEYRVVRGKLRRNRERITVRGLNPNHNHDLKNLFKGAAISASTRPGPLCDFYVALVEKGMRPTMARLTLARKMAAIALIIWKKGVDFDAKQLNRQAA

SEQ ID NO: 287404 - protein, 407 aa, unidentified
MKHEGRVVYGGVDTHQDVHVAAVIDDVGALLGTKSFPTTPLGLKGLQRWLVKHGRVVKVGVEGTGTYGLGLQRVLQAAGLEVVEVNRPNRQLRRAKGKSDTIDAESAARAVLAGHATAAPKGHDGVVEAIRVLLVAHASTIGALQKVGARIRSLTVTAPDALRVELTHLTTPARAARAARMRPGGDLADVATATRIALRLLGRQYLALVEDQKMIEGQLEELTTRANPGLRQVPGVGPLVAATLLVAAGDNPDRMTSEAAFAALCGASPVQASSGKTTAVRLNRGGNRQANSALFRIAVVRMSHRHPSTVNYVNRRTAEGKTKRAILRCLKRFIAREIYSHLVNPRPAIRTDDLRARRIAISHPMRVVAEAVGATLTEISRLERGLNHDADLAQRYRHWIYHQETAA

SEQ ID NO: 287405 - protein, 295 aa, unidentified
MTNQASRFIPRDYDVFAGLDVDKKSMAVVFTNHDGPMRGLRMAHSAKPLLNYVRKHFPGQRVAFAYEAGPTGFGLHDELVTEDYTCLVVAPSKVPRASDERVKTNRLDGRKLSESLRGGQLRSIHVPTRAYRDLRHLVQLRDTHVRQLSASKLRIKSLLLYEAIPFPDPQEKWTARAMRELQTLPCSETVRFKLDDLLNTLHFHFQAAAAATKQIRRYCWQDAELQQSIDLLLSLPGIGWIVGSHLVARLGDPQQIQNGKQIAGFLGIVSSEHSTGEKENRGEITRTGDSSCAIS

SEQ ID NO: 287406 - protein, 356 aa, unidentified
MSVYLGVDFHARTQTVCWCDQADGLVHLRTLDHEHDDVRGFYTQFAVPAIVGLEATGYARWFHRLLESLGHRLLVGDAYVIRKCALRRQKNDRRDAELLLDLLLHGDFPAVHIPPMASQAVLRLLRYRQRLVEIQTKLRNGLQALALNHQLRLGAKLWSKPGQQELLALELDDTDVLQREHSLELLGQIRTRVRAIEKDLTLRADQDARVRLLRTHPGVGLLTSLAVVHTLEPVTRFDRARRIAAYCGLDPREASSGDTVRMGHISKQGNRLLRHLLVEAAHRAVHSKADADLRNFYFRLIERKKNAAVAITAVARKLVLRLYRMLREDIDYTEFRRRGREARRARKAPSPTAGGC

SEQ ID NO: 287407 - protein, 342 aa, unidentified
MSIVYVGLDLGSSNFQQVALNHDGVSRVNRDFSTSEANLVKAFSDLKGEIHVHLEAGELAPWVAVVIAPLVTRVVCSHPQSNAWIAKDADKCDRVDAYKLAELLRLNRFKEVHYAPDQPRRNFKQLVQHYDELTAQQARLKTKLKARLRMPGVIVTGERLFSAPGRKEVLARVAARDLRIAITQLYSVLDQSVEAQTKARWLMLRAAQAFPEIKLFRTAPGVGPIGACRFSAYIHTPSRFSTTRKLWKYCRLSVSHRSSNGKPLRRPRLDRSGCGRLKDVSRKAFEVAVRSQKDNGFKRAYQRALETTHDKTHARLTVQRKIISTLRAMWLNQTTYCDELRR

SEQ ID NO: 287408 - protein, 367 aa, unidentified
MDEAITSFVGLDAHAESVAIAVAEGRAAPRFIGTVGAKFAELSKALLKLGGPEGVLIVYEAGPCGYTLARELRSAGYRCEVVAPTKVPRRPGDRVKTDRRDALSLASLARAAALSFVVVPDERDEAMRDLSRARIDAVRARLKARQQLKALLLRHGRRYSGKTSWSAAHERYLAQVSFAHRAQDIAFVEYRSAVSQAHERIERLSGALTQELEHWRMRPLVQALMTLRGVDQLVATTLVAELGELRRFAHPRELMSYLGLVPSEHTSGEKRRLGAITKTGNTHARRVLIEAAWNYRYPPRITGRLQLRQEHQSAPVRAIAWRAQLRLNHRYRQLTARGLQHNKVCVAIARELAGFIWSIGQQVVLQA

SEQ ID NO: 287409 - protein, 431 aa, unidentified
MRVLHERVAGIDVHKDMIKVAIRSPGEKPWTRTTEILEFRTFYGVLQEVGRLLRRRGVTHVVMEASGIYTEPVYHALCEQDFTEVAVVNPAHVKALKGHKTDAGDCARLAELHECGLLHGSFMPSAEQKEVRDLTRYRMKTVQARTSEIQRLAKALESAGIKLGSVASDITGDSATAMIKALTGGERRGGVLADLAIGRMRTAGKLADLSMALAGRFTEHHALLCRLHQDRIALFDEAVAGLDEQIGTLAARWQREAGLLASIPGFGDVVTQAWLAEIGPAPHRWFPSHQKLACWVTLCPGNNISARKRKHGRTGDAGAYIKPMLIQAAWSAIRTKGRLRSRYNRLVRRFGGEKNPAAKKKAITAIAHTLLKIAYQVLKSGVPYQELGADFYTRRESPEQKQAWLERQLQKLHPGCTITISAPEAALAPGA

SEQ ID NO: 287410 - protein, 342 aa, unidentified
MDYYVGIDVSLEASSICVVDGAGKIIKEAKLSSEPEAFIAWFKALPFLLARIGLEAGPLSQWLYAALKEAGFAVELLETRHVRDAFKAMPVKTDRNDARGIAQLMRLGWFRPVHCKSAPAQETRALLTARKLVQGKLYDIEMSLRGILRGFGLKVGRTKKAGFASRIMELTEHHPALKAIAKALLTVHEVLLKELNRFENQVRKLARSDARARLLMTTPGVGPIVGLTYVAAIDDPARFSSSKMVGAHFGMTPKKYQSGEIDVTGRISKMGDKGVRAALYEAAHVILTTPVKGGALKSWAAKLARRAGMRKAKVALARKLAVILHRMLADGSVFDVTKAAAA

SEQ ID NO: 287411 - protein, 351 aa, unidentified
MKEFIAFDCHKRYTLMEREQIKTGQRKQMRIEHCPGAILQCLRGREPGTPVALEATGNWYWIAEEIEQAGLEPKLVHPRKAKLMMGMINKTDKLDVHGLNRLQRNGTLPTVWIPPRELRDQREITRARMVMTRHRTRLKNRILATLSKYGWAGTEASDPFGKKARKQLNEAVTQLPAETARVTEALLKQLDFIQDQIEDLEQRMRELVRDTAEMNQLRMLPGIGWILSAVIGLEIGVIGRFASAERYASYAGTTPRVHASGDKIRYGRLRPDVNHYLKWAYVEAAHSVCMHRRTYPERHVSQLYERICKKKGHPKAIGAVARHLAEASFHVLTRKEPYRDPGLKKGQSREV

SEQ ID NO: 287412 - protein, 390 aa, unidentified
MIYVGIDVAKTTHYAAAADSDGVVLVEPFAFDNDAPGFAKFISKIASFPKEQLIIGLESTGIYSENLICFLFDSGYKLAVINPIQTATLRKTNIRKTKTDKVDTLLIIKSLMVNSYRLYTEQDARSLKLKSLCRFRQNLKKSKARLKVQLSGYVNLLFPELLSFFKSGIHNSTCYTLLKRCSSPAEIAALRLDSLSKFLSNASRRRFSRSTAEALKSLAKSSVGVKNPYISIQIAQTIQQIELLEQQIDEIENVIKDTICELDSVIMSIPGIGAIDGAMILGEIGNIDRFASPAKLLAYAGLDPTVCQSGKFKARSTKMSKRGSKILRFALINSAWQLTLKNDTFFNYYQLKLSQGLSHYGALGHVAHKLVRVIFTLLKHNVLFDPTRLV

SEQ ID NO: 287413 - protein, 478 aa, unidentified
MKLVRPALREPKDGALEAREAKFIYVALAPALCRTGVGMKQFLECCAGIDIGKREMTVTILTGSVEVEPIPQMGTFGTTVQELNRCLEWLLGNHCSTVVVESTGTYWVPVWNVLHERVAVIVANPEHVKARRGEKTDPEDSRRLAERLRVGDVRGSFVPSAQVVELRDLTRRRKRLLSAANSERNRIQKLLEQANVKIGNVLTDVFGVSGQRILHALLQHPELPPAALADLAKGRLRHKRQALIETLQGHRLNDHVRWMIQHSLDHLVFLENQLTELSQRIVLKLQPFEREYELLQTIPGIAAETAAVILAETGGNMAQFPSPKHLTSWAGVCPGNNRSAGKQKSASIKRANKWLLAALVQSAWATVRQRGSIFQKRFYRQMQHRGRKRALIAAARSLLEVVWQVLQRMTPYNEPANEVLQQQERGKKIRHHLQRLRQLGIDISDLQLPPLTPLIPSDGTRLLTGTPHPLGVLGIHAR

SEQ ID NO: 287414 - protein, 426 aa, unidentified
MTNRQPIPTDALLVAIDIAKVRNEVLIEAPNHRRRRRLSILNTRAEHDRLIETLRAYGKPVICAFEATGNYHRPIAWRLIEAGFDVRLVSSMALARTREALHNGWDKNDPRDAQVILHMLRIGATQRYHDPLRAGINDVQELSKTHEAIAKAKTEIQHRILTHYLPLYFPEIERFRGNSRSDWYFAFLDAFPTPASIIALSKEAFIEAAWDVVGRKVSKERLLADIYETARTSIGLPLPIVAPAMFRMVIAEARSLIRQRNEIEDMADAMLRDSADYKALRKVPGIGPVIALTILAEGGDLRRFRHHRQFLKFCGLDLSTQQSGQHRGQTRLSKFGNARLRRTLWIAGQVAIRQRENGFRHKFERYIAQDRDNPDLRRKALAAITAKMARVVHAIIKSGSDYRPFVEGRVPGGRISFCGAVRAPKG

SEQ ID NO: 287415 - protein, 481 aa, unidentified
MAENTTARTRQTERLTRKQRRELGRRIWSEHPGLEVVHRDAAGIDIGSEQHYVAVGPDRDAEPVRTFGCFHRDLHRLARWLKECGIRTVVMQSTGVYWIPVYDVLEQYGFDVWLVNAQDTRNLPGRKSDVQESQWLLKLHTYGLLRKSFRPEPNIRALRTCWRERAEYVQQAGTCIQRMQKALTEMNVQLSNVLSDLSGVTGMCILRAIVAGERDGRRLAEFRDARVKASRETIAKSLEGTWRPEQLAILQRQLTDWDHVRQQIAACDVDLEAMLKQLPDAEVDPQPPAANPPGKSKRRRQKKDRSSRNQPSFDLSGELKRVTGVDLTRIDGIKEMTIQTIIAEAGLDMSKWPTENHFVSWIGLAPRNDVSGGKVLKKKTRKVVSRLATGFRLAATTLRASDSYLGEQFRRLRTRLGAPKAITAMGAKLARLVYRMLKYGQEYVDKGSAQYQAKYHEQQIRQLKKKAAQHGFTLVSMPDPA

SEQ ID NO: 287416 - protein, 359 aa, unidentified
MVAVMIGVDPHKGSHTAVAIGVAEEPLGGLRVRASAVQAQRLVAWAAGWPERTWAVEGAGGLGHLLAQQLVAAGERVLDVQPKLGARVRLLTAGDTNKNDPNDARSVAIAALRSAAPREVAADDDHAAVLKVWSKRQRDLGRARTQVACRLHAVLCELVPGGISKEITAAHAARILESAKPSGAVGAARCELAAEFLGDLRRIDAQMLGTKKKLAAAVRASGTTTTEIFGVGPVVAATVVGYVVDVSRFASRDHFAAYNGTAPIEVSSGNRKIYRLSRRGNRRPATSFTWPRSPRSATATAAAGPTTTASWPRARRTKRHSGPSSDGSAMPSTAASKPTRGALLPDRLQRAREATGERL

SEQ ID NO: 287417 - protein, 347 aa, unidentified
MSHKTAATVAHTIGIDTGKNTLHLIGLDDQGAIVLREKIARGRIAARLANVPRCLIGIEAGMATHYVARELGALGHDVKQVPPAYSKPFRQGHKNDFRDAHAIAEAVQRPSTRCVPVKTDDQLDLQALHRVRSRLVGQRTAVINQIRGFLLEHGIAVRQGLRFLRQQLPDILAKRSDVLSPRMIRIIEDLGGDWRRLDERIEHVTKEIEVLAHGSEGCRQLMTVPGIGPLIASAIVAAIGNGAAFAKGRDFAAWLGLVPKQMSTGDRTILGRISKRGNRYLRTLLMQGARVILLRPANWAKHSFGPWLTAAANRLHHNVLATALANKLARIAWTVLMQARSYEARVN

SEQ ID NO: 287418 - protein, 365 aa, unidentified
MAMTNIKEKNKKRETISFKGQQINVGLDVHKKNWSVSIYLGQQFIRTYHQESNGSILLKYLQTNYPEGIYRTCYEAGFCGFSLHRELTSLGIECHVINPSDVPQTSKGMLSKTDASDSRRLGEAFSKNMLRSIYVPVSSDEADRNLIRYRKRVQEDVRAKKQMIKSILNVLGIKIPVEHDKSYWTNNFMTWLKELTVNDVSNKNTITFLVEDVVLLRKRLFATNKQIRIMSQTERYSKVYSLLITTPGVGLITAMTLLTEIGDIKRFDNFSKFNSFIGFCPSEFSSGEHIHKGKITIRCHKTLRSLILEAAWIAMRCDPALTLKYHELLKTKTAKRAIIIIARKLLSRLYTIWKTNTPYEKGIVK

SEQ ID NO: 287419 - protein, 450 aa, unidentified
MSPLALDVVTKTGKTPVLGRMLSKYVGRKTSSIENDITKARNHLRQRGKIMRVVFGIDVSKASSEVAILVNGEKIHGYTIPNDAIGFNRLLEDLGTVYQPEIVFEATGVYSRRLQAFFEDNSYAYIRLNPLESKKQLDNLRVRKTDKIDAEKLATSQFILNRKPSYVQEALYQELRDLSRFYQNLTEDIVCSKNRLHKVLQVTFPELENILSSPTGKQYWNLVMAFPCNSFVLELDDAALRAIIRQSTSKHISENRVTYLVDKLTKLANHSYCAVKKTSPMMEEVKYYAGELLRLSEYRQSVLEKMITLAQPLPEYEILLSIPGIAETTATSIIGELGDIRRFHSANQINAFIGIDLRHYESGDFLAKEHITKRGNPYARKILFKCIHNIASASHTNPCHIADFYEKRKRQSQVTSTKPHTIASIHRLIRTMYYLITHNKLYDYTSTQNR

SEQ ID NO: 287420 - protein, 360 aa, unidentified
MHATTVAVDLAKSVFQIAVADDQWRIIETQRLTRSQFERWFINRSVGLVIMEACGSAHHWARWLGSLGIKVRLLPAQYVRAYVRRNKTDATDAAALLEAARASDLRPVRVKSVEQQALQGLHRIRSLWMGPRTSRINALRGFCREFGIAIPVGARTGIETMGRILADPQSAVPDLIRHTASQLLEEIRLLEARIAQVERQLSMAAQQNPACTLLLSVLGIGLLTATAMVAATSGDVTHFADARHFSSWFGLTPREYSSGGSRYLGRISKKGDRYLRMLLTHGARSVLRAAKVAQGAGKEIQGVRRWALEVQGRSNHNKATCALANKLARICYATLRDHKLFDEAARLNRKENRQSFVMPH

SEQ ID NO: 287421 - protein, 404 aa, unidentified
MAPAPESIDSEDIVGGIDTHTDTIHVAVITLLGREVADEQFPTTPAGYRAATDFLHQHGRIARVGIEGTSSYGAGIARTCAAAGLEVLEVLRPDKTVRRRQGKSDPIDAYHAARAVLSGRATSAPKDEKILGLRALHVARRSAVKARTATIHQIQQLLITAPDHVREKYRTLSIPRLVQALARCRPDRTDLVGGAVLRALKDLAHRHAFLDQQARDLEHDIQVVAESLNPGLLAAHGVGPDTAAQLLITAGANPDRLHNEASFAALCGTAPVPASSGRTQRHRLSRGGDRAANNALHRIALVRMSSHDPTRAYVQRQRDKGRSSREILRRLKRAIAREIFKYLTRTITVPAIDDLRPLRQAKNITLTQAAQHFNVWPAHISTLERGTRRDDTLATAYREWLTAA

SEQ ID NO: 287422 - protein, 362 aa, unidentified
MAQVRSWAGLDVHARSVLAVTVDAISGEMRTRRLPGTTSEVVEFCSGLPGPMRVAYEAGPTGYGLARALHAVGIGCVVAAPGKIERPSQDRVKSDQRDAERVLRLLMIDGLHPVRIPSTEEEALRDLVRAREDLRGDLMRARQRLSKLLLRHDILYEDTASAWTARHRAWLTTIDLGAGGAQATLLDYLGAVDTLVIRRDILEATISGLVPDSPWAQTVARLRCLRGIDTLSAVGLCAEVGDFDRFQRPAKLMSYLGLVPSENSSGETRRQGAITKTGSGHARRLLVEAAWHYRKLPARGAALKRRQDGQGANIVAISWQAQQRLHRVWRRLDAERAKRRTIVAVAVARELAGFCWALARAD

SEQ ID NO: 287423 - protein, 411 aa, unidentified
MNPVVGLDVAKGESQVQMFLDKKMPYKSSVKVDHTVDGLEELHSYLLDLERQTGMKPPVVLESTGHYHAPVVQFLEAREYIVIIVNPLVSYRAKSSSLRKTKTDAIDAYHLGELYYKEDLAPQKKRGVQLLNLRHLTRQHENMTGIMIQTKLQFQAVLDQIFPEYKGVFGDLYAEISIKTLQAYPTSESVKEAGVEEIAQFIDTHCKARSFNWALERSEKLIGAAERNPFQSTLYQSLLVSLNMYIDLLQVYHQQLSTLEREIDELAAQLEEYELLQSIPGIGEKIAATIISEIGEIDRFNHPKKLVAFAGLDPSVFESGRFKGTKNHITKRGSARLRHMLYTAVRCSIRDSRKKKTTPETIARNKRLRAFYDLKREEGKPYKVAIIACANKLLHWIYAILKTKTPFQETI

SEQ ID NO: 287424 - protein, 414 aa, unidentified
MNTPVSNVSMSGTLIALDISKKHHDAKIRYPDGRTSYLRIENILEGFNRLLALTASPHDSIIAAFEPTSVYHRNIAWWLHQQGVKCHLVSSVRCARACEMLFKTWDKNDRKDASVIMYLLEQGLSSPFYDPLANGVIDIQEISKTYHQVTLARTRCLNSLVNHYLTLYFPEAEQFLHMSRAEWFCQFLLQFPTPSCITSLNRDLFVKQAWDVVGRKQYKQQFLEHLYDISANSIALPLSDGSLAVTTFKLQLHRYVELSAQRLQLEKQAENYLQERSDYQHLRTIPGIGAVIALMIIAESGDLTLFAHYRQYLSFCGFNLSASQSGQKHSGYRLSKRGNARLRYAFWLAAPVAVRTRENSFRYKYERYIRENGDKPDQKRKAMTAVATKVARVAHAIVKQAIDYKGYYEISHGT

SEQ ID NO: 287425 - protein, 391 aa, unidentified
MICVGIDVAKDKHDCFILNSEGEILADVFTISNNAEGFDVLLQTIRRCTRPADKIKVGLEATGHYSYNILGFLLNKGLPTFVINPLHTNLYRKSLSLRKTKTDRVDARTIAAMLMSDVDLKSYTDTPYHNEELKSLTRYRFDKVRERAKLKTSISRLVCILFPELEKLFSTLHVASVYALLSEFAGAKQIAAAHLTRLTNLLHHASKGRCGRDKAIQIRDAARNSIGSAMPAKSLELKHTIALIGELDAEIEEIEKEINAIMDTVHSPITTIPGVGNRMGAMILAEVGDFSNFDSPDKILAYAGLSPSTYQSGQLTNCRSHMEKRGSPYLRYAIFNAAKFVCNWDPAFAAYLTKKRAEGKHYNVAISHAAKKLVRLIYAMEKSQQPYRPLT

SEQ ID NO: 287426 - protein, 386 aa, unidentified
MLLVGVDVAKRSHEACVMDASGHTVDQLKFPSSRTGADELVSILRKLDSSATIALEASGQYWQGLYHHLVAQGFPVVVANPLQTDAYRSTGVRKVKNDRRDAFVIADFLRIGRVQANYIPGEIIMQLRELTRYRMDLEDQIGDAKRRILTVLDRVFPEYAGLFSDAFIASSRALLKEAVSAADFAAFDLEELARLLRRASRGRLGREKAEELQEKAADSLGLAFLSTTAKVKISSLLEQVELLERQVKEIETAITRLMEQESQYLTSIKGIGPVLAATLLAEIGDIHRFSSLENLVAYAGIDPTVFESGEFTGRRQHMSKRGSPYLRRALWLAAHSTRRWNTDLDSYFQRKLAEGKPYKVAMGALCRKLLARVYVVLKENRPYQVR

SEQ ID NO: 287427 - protein, 415 aa, unidentified
MGSGAQKAAAVNLLCELKTHWRDTLSKKTTATSQVEITATTRTLMMALELGEEKWKVGFSSAFGEAPLMRNLASRDRKGLLVQMAWARKKLGLPADAPIVSCYEAGREGFWLHRWLESEGVKSLVIDSASIERPQKRRRAKTDRLDLTALCDLLARHLAGSAKPVFSVVRVPSVSEEDRRHLHRELRTAKADRTRVSNRIKSLLANHGLVLRGWKDLAKRLGALRLWDGGELPPGLAARLARYAADYVDSTARIRELEAERRHQLQEKDPEDPAVAKAQQLFTLRGVGVNTAWLYSMEFFGWRTFRNGKQVGSLAGLTPTPQDSGKRFREQGIGKDGSRHIRGSAIELAWAWLRFQPESELSQWYERRFGSGSKRVRKIGIVALARKLLVSLWRYLETGVVPEGAALKTDLRVRW

SEQ ID NO: 287428 - protein, 370 aa, unidentified
MKQSVTLFVGLDVHKDSISVAHVPDDRHADVAYVGRIGTRPADIDRLIRRLQEKAARLVVAYEAGPCGYVLHRHLTRRGLTCLVVAPSRIPKKPGDRVKTDRRDAVQLARLLRSGDLESVYVPSVEDEALRDLCRAREAAVVTLKAAKFRLKSFLLRLGLHYTGRADWNDAHLRYLAKVVCPTPAQQIVFQESLRAVDEQVQRLQRIEAEISDQVPGWRLAPVVRALQALRGVQDTVAVTMIAEIGDLTRFDNPRQLAAFLGLVPSEDSTGDSRRQGPITKSGNGHARRALVEGAWAYQYPAKISPIIRKRLEGLPQPIQDIAWKAQVRLCKRFRRLVARGKHPNVVVTAIARELAAFMWAIAKEIPITA

SEQ ID NO: 287429 - protein, 358 aa, unidentified
MAGKVTETAVVGGVDTHKDLHVAAVVDQNNKVLGTQFFSTTRQGYRQMLAWMTSFGALKRIGVECTGTYGSGLLRYLQNAGLDVLEVTAPDRMERRKRGKSDTIDAECAAHAAFSGIRTVTPKTRNGMIESLRVLKTCRKTAISARRVALQIIHSNIISAPDELREQLRNMTRMQLIRTLGSWRPDASEYRNVTNVYRISLKSLARRYLELHDEIADLDVMIAAIVDELAPELIKRNAIGYESASQLLITAGDNPQRLRSESGFAALCGVIPVPVSSGKTNRYRLNRGGDRAANSALHIIAIGRLRTDAKTKEYVARRVAEGHTKMEAIRCLKRYISREVYTLLRNQNRRINSIPITA

SEQ ID NO: 287430 - protein, 410 aa, unidentified
MIEAILERCAGIDVGKKVVVVCVMTGDAKDEPHTQIKKFGTIVSELERLAAWLVAEGCTHAVMESTGSYWKPVFNLLEANVQVILANAADVQNRRGHKTDPNDSRWLAHLLRHGMIRPSFIPPLAIRELRDLTRRRRQLIGENSRERNRVQKVLEDANVKLGDVLSDVFCVSGKLMLAALLDGQMNAEQIADLAKKKAREKIPQITASVADHRLSDHQRFLIRHALRHLEFLDQEVEALNQEIRRRMTDSALSEAFHLLQSIPGIKEESAASILAEVGADMEQFPTAAQLSSWAGLCPANHESAGVKKSVRTNRGNVWLKTTLTQSAWAATNRKGSRLQSRYHALKARCGNKRAIVALGHTLLKTIHAVLSAKVPYREAPPITRDDSNVERVQHHILCLKKLGYNTLAVE

SEQ ID NO: 287431 - protein, 332 aa, unidentified
MQYYGIDIHKKYSTYTMVDEQGNIMNQGKIDNSIEAFKEVFREASGVNTKAVIESTCNWYYIHDLLEGMVDEVVIAHPLRTKAIASAKVKTDKIDATTLAQLLRADLIPKAYIAPPVIRDLRELLRYRASMVRIRTKVKNKIHAILIKNGINSPYSDLFGKRGREWLATVEVRPVYLLAINGYLQLIDFLDGQIKPVTREIDLMAKDNPQAKLLETIPGIGHYSAMLILGEVGDFSRFPSAKHLVSYAGLNPSVHSSGGITRYGRITKQGSRWLRWIMVEVASIATRHSPKLGRLHSRVAYKHGHNTAKIAVAREMISLCYYLLKKGESYKE

SEQ ID NO: 287432 - protein, 322 aa, unidentified
MSLPGPLCVGIDVSKATLDIAASSTIEPFSIANDADGFDSIIAELRKHSVALVLMEATGGLEAAVACALQAEGFELAVVNPRQARDFARAMGYLAKTDRIDARVLAQMAEVINRHPERSRFIRALPDAERQVLNAMVVRRRQLIAMQVAERNRLHPAHPQSRKSINTIIKALEDELARIDDDMNNHIRSHFKELSERLSSIKGIGAMTVAALLAEVPELGRLSRREISALVGVAPVNRDSGTMRGRRTIFGGRAGVRTALYMAALVATRCNPVIKAFYTRLVAAGKPKKVALVACMRKLLTILNAMFRKNEEWNESYHHVAP

SEQ ID NO: 287433 - protein, 337 aa, unidentified
MSEIIRVGLDTSKHVFQLHGVDAQEKVVLRRQLRRGEMERFFTALAPTVVGLEACGASHHWARVLSAMGHEVRLLPPQYVKPYVKRGKSDSLDAEAICEAMSRPSMSFVPVKTREQQAGAMLLTVRDGLVKQRTMLINAIRGHAAEFGVTAAKGACRVREVLARAEAELPALAFRLLSLLGAQLEAVEAALKAADAELRAWHRSNELSRRLAGIPGIGPIGAMALALRVPDPAVFRSARGFAAWTGLTPRLSGTAGKQRPGHISKAGDQTLRRLLVLGATAMIRRAKAGHGSPWLTGLLARKPAKVAAIALANKLARIAWAMMISGEDYRRGAPVAA

SEQ ID NO: 287434 - protein, 363 aa, unidentified
MSKRLWVGLDVGVHRTALCVLNASGETVHETELQTTIENIDAVLRPMRRSNIAVIAMEAGSTTTYLARGLDRLKYNVAVFDCRQAATYLKIMQNKTDRNDARSIAEIGRSGRGVVSEVTLKSVECQRIRSMLATRRQMIRMKVATEAALGAQFHLYGGKLSRNASASILRRNATLELSRLYREQKIDLRPEVEPVLSICESLRTYVNHLDRKIAEMVGDIEVCKRFMEIPGVGPISALSFYSAICDPHRFRKSIDVGPYLGLVPRVRQSGTTVARSRISKMGSALTRAHLTTAAMILLRSTTKDSGIKRWGSQVSERRGSARAKVAVARKLSIVMLAMWKNGTSFVPFGDVPVPASASRQPAQ

SEQ ID NO: 287435 - protein, 372 aa, unidentified
MSQSSTLYVGMDVHKETIAVAYVAKDHDAEVVSLGTFGTRQCDIDNLIRKLQSKAKHLVFVYEAGPCGYWLYRYLTKKDYVCWVVAPSLIPKRAGDRVKTDRRDAMQLARLMRSGDLTPVYVPAVDDEAIRDLSRAREETLRDLKAAKLRLKAFLLRHDIRYTGRANWSPAHLRWLSEVICPTPAQQIVFQEYVQTVTEQTERLGRLELELHEQVQTWRLHPVVEALQALRGVQFTVAVTTVAELGDLTRFDNPRQLMNYLGLTPSEYSSGARRQQGSITKTGNTHARRALVEGAWAYRYPAKVSRHLQLRLEKLPAAIQAISWKAQVRLCKRYRHLMAKGKNANQVVVAIARELSAFMWAIAKQVAGSPKA

SEQ ID NO: 287436 - protein, 342 aa, unidentified
MQHTTIAVDVAKSVFEIGISHCPGHVDKRYRVSRNQLSIFFANQPPATVVMEACSSSHYWARQFMRFGHDVKLLPPFYVRPYVQRSKTDRTDVKGMLEACRHSEIRPVPIKTEAQQQLIALHRVRSTWIATRTARINTARGILREFGIVVADGASRVPARVTELIEDAGTELPMGVRDLLNELVVEIRQLTSRIENVERQLAAMAGETPVVERLRSIPGIGLLTATALVAFVGNVERFPSSRHFACYLGLTPREHSSGLRRQLGHISKRGDAYLRMLLTHGARSVLWAAKSKAKPDKFSTWAVDIHGRRGHNKASIAVANKMARIVWAVWKHGNSFGIRSDG

SEQ ID NO: 287437 - protein, 377 aa, unidentified
MGDYSEAFVGLDTSKLRNAVAIADAGRGGEVRFFGEIENTPAATAKLVRKLSVKYTRLTFCYEAGPTGYGLHRQIKDLGFECVVVAPSLIPKRPGDKVKTNRRDALSLAKLLRADQLTPVWVPDGRHEAMRDLTRARETAMLDLRTKRQHVSAFLLRLGRPYPESRKTWTKAHASWIASQKLEHPQQRLVLEEMMLAIRQAQERLQRLEQAIAAAVPEWSLAPVVTALMAMRGIDLVSATTLLAEIGDLSRFQTPTELMAYLGLVPSENSTGDTVKRGPITKAGNRRARRMLVECSWSYQHPPRVGQAKQPKVDAAPPAVREIAWKAQCRLYRRYRTLIRKGKLKTVAIVAIARELAGFIWAVARAATTAPVAAAPA

SEQ ID NO: 287438 - protein, 338 aa, unidentified
MVVIGIDPHKGSHTAVAIDEDEVKLDEVCVRADRRQLEVLLKWAIEFPERSWAIESANGLGGLLSQQLLAAGEEVFDVPPTLSSRVRVLATNRSQKNDPNDAYSVAVAALRSPRLRSAASEDHVAVLRLLWNRHKNLTSAHTQAVCRLHALLVGILPGGARRRLSADQAAALLSGVRTKTVVDRARRLQAQELIGDLRRLDAQLKASKRTIAAVVATVPTTVGELSGTGPISTAIILSHTGDVRRFPSADNYASYNGTAPIDASSGPRKRHRLNPRGNRQLNHAMHIIAFSQLSHPGPGRDYFERKLAEGKSPKEAVRSLKRQISDAVYRQLRLDADK

SEQ ID NO: 287439 - protein, 360 aa, unidentified
MIRQRTSVGLDVHARSVLGCALDGDTGEVFQQRLSPDHGEIVAWLGDLPGPVAVAYEAGPTGFGLARALAAAGITCEVAAPSKLIRPTGDRVKTDARDAAHLARLLHLGQITAVTIPSASQEAARDLVRAREDCRGDLMTARHRVSKLLLRQGIVYSGGTTWNRDHERWLRAQRFDNPALQLTFEAAFDAMLACRDRRTRLDDAITAMAADSEFTPVVHRLGCIRGIATLTAFGLAVEVGDWHRLTGRSIGAYVGLVPCEYSSGDSRSQGGVTKTGNGHARRLLVEAAWHHRSPYRPSEQLRGRWGLACPAARARGQAANRRLHARWRSFDARKKRSVVANVAIARELAGWCWSLAVMPD

SEQ ID NO: 287440 - protein, 408 aa, unidentified
MTVVGIDISKGKSMVAAMKPGGELVAAPYEVRHSDIELSHLALDVLCMEPDTRVVMEATGRYHEPVAALLHSEGIFVSILNPLLIKQSGAGSLRKVKSDPKDALKIAKYGLDNWSTLREYTPMEAIRQQLKLCARQCDLYNKNIVMLTNNLISLSDKTFPGVNELFSSPEKADGHLKWVDFYRSFWHCDCINRMSPDAFEERYKKWCKRKGYHFSADAADALYAASCGLYTTLPRDNNARLLVTVAADQLIALRENQSKLEAEMLNFCKQLPEYETVMAMYGVGKSTGPHLMAELGDVRRFLHRSSIVAFAGVDPGVVGSGKMQLYSVATSKRGSPQLRKALFQVVSTYVKCKPENEAVYQFYTKKRNEGKPFFVCTTAAANKFLRIYYARVKECLNAAESATQVEEG

SEQ ID NO: 287441 - protein, 374 aa, unidentified
MAGIINKSCGLDIHKQFLIATILSVFGEKKQLRFERTDEGILALKNWVISEKCDVVACESTSDFWVPIYESLINHLTVIVGNARDMKAFTHKKTDKIDSEFIAQLALNNMIKPSRVFSKNHREFRSYIRLRHKLVQKRTDIKNVAHAILASEMFRLNDVLTDIFGKNGIIILSGISSGKNVDQIIGSLSPNVRKKSDKIREVLDREMSLSAAIRIQTCLSLIKNIDEQINILETEIFRYAYENHNREMKLLMSSPGVGEISAATIIAEIGDFNDFSSGDKLASWLGLVPNVYQSADKYHNGRITKRGSKVARWILIQVAQAAARKNGSKLKEFFDRKKKTIGHSKAIVALARKIVTILWHLITNDEMYEVGLTQ

SEQ ID NO: 287442 - protein, 375 aa, unidentified
MKKELYLGLDVHKDCIATAVAEEGRRGEVRDTGVISNDLHALEKWITRLRKAHGSDVILRACYEAGPCGFGIARRLKQLGVDCEVVAPSMTPRRAGERVKTDRRDARKLARLLRAGELSPVYIPESTDEAIRDLCRARTDAVDDRRRSRHRLKGFLLRHGYHYQGKTSWSAAHERYLRELVLPHPAMKVILEEYLISIKAATERIERCEAAMRALLDNWRLRPAVEALRALKGFQTVAAMILVSELGAIDRFRHPRQVMAYLGLIPSENTSNDKRRQGPITKCGNAHARWLLVECAQHYVTPPKVSKELSRRQEGQPPEVRALSWKAQNRLHGRFARLSARRLQRNKALVAIARELCGFIWELLRMQGCYQTLAH

SEQ ID NO: 287443 - protein, 407 aa, unidentified
MEVFVDRGAGIDVHKDSVTVCVMTTEGREVVKTRARFTTFHDDLVAMREWLLEMGVTHAAMEATGEYWKPVYEVLEGAVELVVANAQHVKNVPGRKTDPKDADWLARLLRHGLLQPSFVPPTPIRDLRDLTRLRRKTIEMRARVQNRAHKVLEASGIKLGSVVTDVFGVTGRAILEQLASNKTDPVVLAELAKGSLKKKKPEIIRALQGSFTAHDAALLKHQLIVHEQLQQRQMAIESQLAQAVTLHEELIARLDQMPGINRDAAIEILGEMGNDMAPWDDHRRLAAWAGLCPGNHESAGKRRKVGVRKGNPFLKCTLIQAATAAVKTKGTHYQAKFFRLSKRRGYKRAIVAIAHAMLIAIYHMIKENKPYHELGAATFDQRSAEAKTKSLVTQLQKLGYAVELRTA

SEQ ID NO: 287444 - protein, 448 aa, unidentified
MVENEYQIYVGIDWATEAHQACVLDSRGRILAERSFAHTGDAIAAFAQWLHEVAGDEPGQVAIAIEIPRGAVVETLVERGFHVYAINPKQLDRFRDRHSVAGAKDDRRDAFVLGDSVRTDRACFRRVRLDDPLVIQLRELSRVHDDLGREANQLTNRLREQLHRYYSQALALCPSADEPWLWALLELAPSPSVARHLRPQRVERLLRQHRIRRLSAHEVVAALRAPALQVAPGVVEAASEHIALLLPRLRLLHTQRQGCGVRLEALLDKLGAAEDDDGQQGEHRDVEILRSLPGVGRVVAATVLAEASAALAERDYHALRAYAGIAPVTKQSGKRRMVLMRYACNGRLRNALYHWARVAAMRDPSSKTYYAGLRQRGHSYAFRSDTPVGTRCGSRGGCMHLLTNGGESFPAGKGEQTRKSTTPGQRDGFRFTPAKAPHFHPAGWVADP

SEQ ID NO: 287445 - protein, 374 aa, unidentified
MARRQKSTQNLPVIEPNAAGADVGATQIFVAVPADRDPEPVRCFDTFTTDLEALADWLEACGIRTVVMESTGVYWIPLFQILEKRGIEARLVNARHVKNVPGRKNDVADCQWLQYLHAVGLLRGSFRPNQEICTLRSLWRHRDSLIQMASVHLQHMQKALDQMNLQIHHVISDIAGITGLAIIDAILAGERDPKRLADLRDWRIRATEETIMKSLVGDYRDEHLFTLRQSLVAYRHYQQLIGEVDEKVKQLLSELPAQVDPAEDPIPKARNPRKTPWRNEPIGLREDLYRAFGVDLTQVPGIDSLTAQRLLTEIGPDLSAFPNVAAFASWLRLCPDKRVNGCSEPQPERNVPGRVLPSHARPPRCSQSHHGRRP

SEQ ID NO: 287446 - protein, 400 aa, unidentified
MRVVFGIDVSKVSSEVAILVNGEKVHNYTMSNDAIGFSRLLGDLKTVHKPEIIFEATGVYSRRLQTFLEDNGYAYTRLNPLEAKKQLDSLRVRKTDQIDAEKLAQSQFVLNRKPTYVQEEVYQNLRDLSRFYQNLTEDIVRAKNRLHKALQVTFPELENILSTPTGEQYWNLVIAFPCKDFVLELSKDELSESIRQSTSKRISDKRVAYLAEKLIALANQSYCAVKKNSPMLEEVRYYTKELLRLSEQRQAVLDEMVELAQPLPEYDILLSIPGIAETTATSIIGELGDIRRFQSANQINAFIGIDLRHYESGNFLAKEHITKRGNPYARKILFKCIHNIASASHTNPCHIADFYEKRKRQSQTTSTKPHTIASIHRLIRTMYYLIMHNKLYDYASTQNR

SEQ ID NO: 287447 - protein, 343 aa, unidentified
MRHYAGLDVSVKETSVCIVDESGKVCRETKVPSHPEDLARALHDRAWCLERVGLEAGPLSQWLFSGLAATGLPVVCIETRHTKAFLQAQVNKSDRNDARGIAQMMRVNLFRPVHVKTLTSQKRRALLTARKLLQEKALAVDNDIRGLLRNFGLKVGPIGASRFETRTRELVDGMPELAEIIDPLLEARRKLRELFAVLHRKLLAIVRDDTVCRRLMTVPGIGPVVSMAFTATIDVPARFKSSKAVGAALGLTPILNQSGESKRLGRVSLCGDGMTRTLLYEAAQVMLTRTTKWSWLKAWAMKVAARRGIQKAIVALARRLAVILHRIWVSGTDFRWTREVEST

SEQ ID NO: 287448 - protein, 413 aa, unidentified
MVVGIDVGSEFHYARAFDWRGIEFSRKPFKFSNTEPVFTEFKAWILHIQTEHDKDAVVPGMEPTGHYWFNLGKFFQDNGMKPVLVNPHHVKKSKELDDNNPTKNDRKDPKVIAGLIKDGRYSYPYLPDGVYADLRTASNLRFQMQSELTRIQNRISRWFSIYFPEYKDVYGNPDAKSGMMILKVAPLPEDIVTLGVEGVNRIWREAKLKGVGLKRAKTLYEAEEHSIGSREGATAARLEIRMLLEDYESRAARLQEIMTLIESLVKQIPMAEKLMEIKGVGIKTVSGFLAEVGDISRFDNPKQLQKLAGLAIKENSSGKHKGETTITKRGRKRLRYLFFEVAMSLVSKNEEFAQLHQYYTTRRINPLKKMQSLMAVACKLIRIFYAMLTKQVDYDPKKMISDIRRPEINQQAA

SEQ ID NO: 287449 - protein, 358 aa, unidentified
MKKVIKQVVGIDVAQKELVVTFGKLAEDLAINLIAHHVFKNTEKGFDQLILWAKKLEDEATELRFVMESTGIYHEKFAYYMEEKGYNISIVLPNKISSYMRSLDLKTVTDKTASQAITQFGLERKLENWARPKPILKRIKQLTRERDQLVDERSAVKNQIHAEKTEAEPVESSLKRMQQRIKMLNKQELEIKAEINLLIAKDQELKNDIERAQTIPGIGALTAAIVYAETNGFELIRNKRQLTSFAGLDVKEKQSGTSVNGKPRISKRGNKHLRKAMHLPALAAVRHDERYRCLFARLVAKHGIKMKAITAVQRKLLELIFILHKNKTIYSALNQEGNDFKVKEDNPKIELPSNEAAL

SEQ ID NO: 287450 - protein, 340 aa, unidentified
MTITTVGIDLAKNVFAVHCVDQNGKAVLVKPKVSRAALSELIAGLPPCVIGMEACSGAHYWARLFRQYGHDVRLMAPKFVSPYRMAGKTGKNDAADAIAICEAVQRPHMRFVPVKDESQQAMQCLHRTRQGFIQERTATYNRLRGLVSEFGVIAPQSTDALRHAVSDQKETLPVQVRLCIDDLLAHVTNIEEKIAEYDRVLSRVAKTDHRSQQLMELKGIGPTTASALVASIGNAHDFKNGRQLAAWLGLTPSQYSSGGKSKLGRITKAGDAYLRTLLVQGARSVMVGAENRTDPFSRWVCSLIGRRGYWRAVVAIAAKNARLCWASLHYGDDFRLYSTT

SEQ ID NO: 287451 - protein, 375 aa, unidentified
MKEPTIACGIDVHKMFLQVCILSRSGEASQHRFHNTLNGILALKDLVLAEGCEIVAMESTGIYWYRLFLELESDIRTIVANARQIKSIPGRKTDMNDARWIAELALHGLIRPSRIFPRRDREFRDLTRNRETLVRTRTTIKNRIHKILDSAGIRLNLALKDLFGKSGRHLLSGLAEQKDLETTLATIPSPRILRRADQLREILQGSPLSPIQLHLLTTQLHLLEEIEEKIAHLDELILASLEDPQLEAVAICTSVPGISITAATTILAELGDVRDFSTASRLVSWAGLAPSVYQSADTQVCGKITKQGSKSLRWISYVEPGLKRVRKLPARMTLPKISIDDAVETLLRAGYRIYSPENQKSTAEGVRAERATHPL

SEQ ID NO: 287452 - protein, 354 aa, unidentified
MIIVGCDYHPSFQQIAFVDTETGELKEQRLVHREGGEDFYRALAATGQRVCVGMEASGHAGWFERLLAELRIELKVGDASEIQRKRGRKQKTDRQDAQHILGLLLKDDFPPIWVPSWENRDLRQLLWHRHRMVQARTRIMNQLQAVALNEGLRCKKRLWRAGGREQLESFRLAPWASRRRHDLLELLDRLNPTIAELSQAVEREAENNSAAQRLKTHPGVGALTALAFVLIIGDASRFQYGKEVASYLGLVPLEDSSGNRRRLGHITKQGSSMLRFLLVEAAQVTARSLPQWRSKYLHLMMRRGRKTAKVAMARRLAVRLYWMMRQGWDYQQWNKFGSHVGQPGHRHGVQSNIE

SEQ ID NO: 287453 - protein, 348 aa, unidentified
MLIIGCDYHPGFQQIAFVDTETGECGERRLSHREEAEQFYSALKGHMVRVGMEASGHARWFERWLRELQFELWIGDAAEIGTKRVRKQKTDRQDAQLLLRLMIEDRFPRIWVADADNRDLRQLLWHRHRLVQMRTRIMNQLHVVALNEGVRRKKALWRPAGRNELESLRLAPWASRRRQDLLDLLDQLTPKIQELTRALEEEVEKRPVTRRLMTHPGVGPLTALAYELVIGTAERFHNGKQIASYVGLVPTEESSGDRRRLGHISKQGNSLLRFLLVEAAQVTVRSSPQWRSKFFHLALRRGRKIAKVAMARKLAVHLYWMWRQGWDYGQFEKFGSHAGAPGNRHGAQ

SEQ ID NO: 287454 - protein, 355 aa, unidentified
MAVTIVEEARPITCRTAITGGVDTHADTHVAAALDPVGGLLGVREFPATPAGYAGLLGWLGGFGTVALVGIEGTGSYGAGLARHVAAAGIRVVEVDRSDRQDRRRQGKSDPLDAVSAARAAQSGRARGAPKGRDGAVEAIRALMVARRSAAGERTRTNGQARALLLTGPGDLRARFTRHTPAALVTGLASLRPRPGDVAGYAVRVALRELGRRAQFPDGQLGRLDELIVPLVTARAPGLLAVYGLGPRTAALLLIAAGDHPGRLRSEAAWAHLCGVAPIPASSGKVARHRLNPGGDRQANHALWRIVFTRLGSDPATRAYAERRTAEGKSKAEIIRCLKRYVAREVYRHLRPAAG

SEQ ID NO: 287455 - protein, 444 aa, unidentified
MARKSKQQRLKIVHPNCAGIDIGSREHWVAVDPDCCEEPVRCFSAFTDALYALADWLESLGVEIVAMEATGVYWIPLFEVLAARGFQVHLVNSRATRQVSGRKSDVLDCQWIWQLMSYGLLKGAFRPDDPVCHLRSLVRQRDNKVKEQSRCIAHMQKALTQMNIQLDTVVSDLMGKTGTAILRAIVAGERDPHQLATLRDRRLRADAETVARSLRGNWREEHLFALAQALAHYDFLSQQIRDCDQAIEQQLAALPSLADQPPEPVKPLRNPQRTAAQQAALHQALCHVMGVDLTAIPTMGIDTTLVLASEIGPDLSRFPSASHFCSWLNLAPPTRISGGKPLPGRAPRVSNRAGQALRQAASNARNNHSFIGASHRARLARMDGASAVKATAHQLARLIYAMMSKGQPYVEQGMEAFEARSQDRQIRALQRKARKLGLHLVEAA

SEQ ID NO: 287456 - protein, 430 aa, unidentified
MKYNTQNAKIASITEETLVLGIDVGSATHYVRAFDWRNYEFSDKPLAFSNDEAGFLTFMAWVEDIKEKAGKTAVIPGMEPTGHYWFNLGKFLQDSGMRPVHVNPHHVKKSKEMDDNNPDKNDRKDPKTIAALVNEGRFSYPYIPTGVYAEIRSLSNLRFQTQEEITRIRNRIARWISIYFPEYKDVYGKLDAVSGMMVLKEAPLPVQIKELGAGGINQIWRDAKLRGAGMKRAKTLLSAAEHSVGSQEAPEAASMEIWNLLEDYEKYSSRMDDLMARIEEKIKEVPYVDKLLEIKGIGLKTVCGFIAEVGDLSRFDDPKQLQKLAGYAIVKNSSGKHAGESHISYRGRKRLRYVLYEAAISVIGKNGEFREIHRYYQTREKNPLKKMQSVVAIACKVLRVFYAILTKGVDYDGEKMLGDIRRPAMSVQAA

SEQ ID NO: 287457 - protein, 346 aa, unidentified
MDQIIRIGMDTSKHIFQLHGVNAAEEPVLRKKLRRQDLIAFFTKLPPTVIGIEACGGSHNWARQLQSLGHQVRMLPPQYVKPYLKRGKNDAADAEAICEAMSRPTMRFVPVKSADQQAALMLIGLRDRLIRQRTQLANAIRGYAAEFGLIAAKGICRIEPLLERIKADDTLPALARELFVIHETEYAQLQAQLEEVEDKLMAWHRADECSRRLAKIPGIGPIGASMLVMKAPAPEIFRSARHFAAWLGLTPKDHSTAGKVRLGVITRAGDEALRSVLVVGATAVIRHARRRHGRASPWLIALLKRKPPKLVAVALANKIARIAWKLMVSGEHYAARVSPVGSGGAA

SEQ ID NO: 287458 - protein, 355 aa, unidentified
MTIISHLYAFVVGVDTHAKNHVYSVLTNTGEHVDTAAFPTTKAGLKRALLWAGRRTGGDLDTLWVIEGIGTYGAILADHVADNGYTVAEAASMNARDRHATGKDDRIDARRIAGTVLSMDESRLRFPRQADGPRQGLQVLVKARESMTREKTRTVNALTALLRTHDLGMDARRKLSVVKIHAVAKWRIRNESVALTEARREAIRLAKRVVEVDADIKDYATRIEALVKDSPAAVLLAEPGFGPITAAVFYLAWSHPGRVRSEAAFAKLAGVSPIPASSGNVVRFRLNRSGDRRLNSALYMVAITRLSHQKRSQAYMAKRLGEGKTKKETIRCMKRHLARSVYRILEATNSIGQAA

SEQ ID NO: 287459 - protein, 455 aa, unidentified
MAKQKQKKIKPGIVNALEQINLNAAGIDIGAEEVWVAVPPDRDEVSVRSFPTFTADLHRLADWLEACRIGTVAMEATGVYWIPLFEILEARGFQVYLVNARHLKNVSGRKTDVLDCQWIQQLHTYGLLSPSFRPPDQIVALRSLVRHREMLVQYRSAHIQHMQKALTVMNLRLTSVLSDISGVTGMQIIRSIVAGERDSKVLAQFRDERCNKSEAEIAKALEGHYKREQVFALKQAVELYDFYDRQLRECDAELEAMYQKFDPPESPGGPPPAPRTKKRRKNQAYFDLAPALYRLTGVDLTQIDGVDELTIQKVLSEVGTDMSQWPTVKHFASWLRLCPNNKITGGKVKQTGVQPTQNRASTALRVAAASLHHSDSALGAYYRRMRARHGAPAAITATAHKLARIIYFMLKERKPYHDLGADYYEQQHRARVLRNLNRQAAKLGFRLEPAALGVS

SEQ ID NO: 287460 - protein, 342 aa, unidentified
MQITTIGLDIAKNVFQVHGIDATEKVVVRKQLRRGQVMKFFAALPPCLVGMEACATAHYWARELTKLGHEVRLMPAKDVKAYVKRNKNDAADAEAICEAVRRPTMRFVRSKSAEQQGRLMQHRTRDLLLRQQTQVINALRAHLAELGIVAAQGREGLKQLLAIIADQADARLPLDARACLIVLAAQLQALHTLIKSIEKRLLVQHRANEASKRLESIPGIGIIGASAIAATVTDPKAFQSGRDFAAWIGLVPRQDSTGGKQKLGPISKQGDRYLRRILVVGAHAVLRWAKQNPGKYPWLTQLLARRPFKVVAIALANKMARVAWALLASGAKYRAPRLAAAT

SEQ ID NO: 287461 - protein, 338 aa, unidentified
MDYKRIAIDTSKHVFTIHGVDEQERPILRRELRRAQVEEFFAKQAPTEVVLEACGGSHHWGRVLSGLGHRVRLIPPQYVKPFVKRAKNDRNDAEAISEAASRPSMRAVPIKTVEQQAEAMIVKHREMLVGQRTQAINALRGHAAEFGAVIAKGCQNVAALLAALAADAAIPVAARAMFVQIGQHIADLDGRLDALDRQLMARHKANPVSRRLAAIPGVGPITAITMALMVDAGDFQSGRHFAAWLGLTPREHSTGGKQRMGRISKAGNERLRQLLVVGAMAVIRYARPGSKSASAWLVQLLERKPRKLAAVALANKMARTIWAMMARGEAYRRPPIAA

SEQ ID NO: 287462 - protein, 408 aa, unidentified
MKVLNRRCAGLDVHKDEVVACVRLAVRGKASHEVRRFATTTRGLLDLAEWLEASGVTDAAMEATGIYWKPVWHVLEERFQLVLANAAHVRNVPGRKSDVNDAAWIADLMAHGLIRASFVPPAPIQELRDLTRTRKQLGREIVQHTQRIEKVLEDANIKLSSLIADLLGASGRRLLKALIAGESDAVALAALGGSRLKCSRAELKEALEGRITPHHRFLVGQHLQMIEELEAAVAAFDARIEAALVPFHDAAERLTSLPGISDVAAQVILAEIGPDMSPFPTAGHLLSWAGLTPRLDESAGKRRSTRLKKGAPWLKPVLVQCAFAAARAKNIYLQAQFLRLKARRGPKKAAIAVAASILTAVYHMLRDGTFYNDLGPQHFARHDKTRAAMRLVRRIKDLGYDVEIKAAA

SEQ ID NO: 287463 - protein, 346 aa, unidentified
MHIASVGIDLGKTNFHLVALGEHNKVLLRKKFSRPQLLAYTANLRASLIGLEACAGAHFVGTVLREQGHEVRLIPAQFVKPYRKSNKNDFLDAEAIAEAVTKQNMRFVQLKTQEQLDWQAMHRVRDRLVQRRTALINEIRGFLLERGITFAAQPIHLRKNLPGVIEDAEQNLSPRLRWLLDRMWQEWKQIEAEVQEISDEIERISDEDVRCRQLRQIPGFGPIVSTAIVAAVGNGAAFRRGRDFAAWVGVVPRQYSTGGKQKLYGISKRGNIYLRRMLIHGARSVLFRVKYDTGGFGQWVQRLAQRAPRNKVVVAIANKLARIAWAVLSSGQDYRHQPLQQQRAAA

SEQ ID NO: 287464 - protein, 361 aa, unidentified
MDTMDTMDTHTQNVTVQDVAVWIGLDVSKDSLDACLLRAERKPQHKTFPNEPAGHQKLLGWVQHLTADRAPGQICHFALEATGAYGQAVATFLADAAQRVSVLNPARVKYSGIATGQGNKTDKADALTIANYCRLHAPPVWREASHEVRHLRALVRRLADVQSQLVQEKNRARVPGLLPAVRESLENSFTFLEAEIQRLRQLIKEHIDHSPQLKADQELLVSIPGTLWVIGEATAQLLLAELPDVKQFGSAEQVAAWAGLCPQEHRSGVSVRKRTRLSKAGNGHVRKALYFPAIAAVQHNPPVRALYQRLKDAGKSGYPRNAWVMAALGAAMRKLLMLCYGVLKGRQAFDPDWAKPVQISA

SEQ ID NO: 287465 - protein, 398 aa, unidentified
MYLNIGIDVSKNKHDACILNENGEQIGKFMKLTNTRTSLDKFLEQIKIISEKHGAEVRIGLEATGIYWYSLFSKISDDHKISIYNPTQIHAFAKVNVRGSKTDKIDAKTIANMLRFGNAPQTDYSDKQRLELREYVRFHWKLTNNKTNLKKRFKRNLHLVFPGYDQVFKDVFTKTSREILSQSPTPDDILEMGEGKLLELMKKASRNHIDKEKARELIVKAEDTIPSEILKESSLFELQIMMEMIENLEKHIDTLENKIFAIWDKVKDKHYIQTITGISEFRAAMIWAEIGDINNFTHPDQIVAFAGLDPKVRKSANKEVIGGPNKRGSSTLRWALGWAVQESKNVNPVLAPYFKKKIAEGKHYNTARCAASKKLIRIIWSVEKNKKPFQIPSNLQSS

SEQ ID NO: 287466 - protein, 343 aa, unidentified
MDQYVALDVSLQKTAVCVLNVSGRVLIEADVPSEPAALIAFIQTHAPGAARVGLESGPTSPWLWHSLKAAGLPVVCMDARHAHAALSVRPSKSDRNDAHGLAEMVRMGWYREVQVKSLAAHERMALLGVRRRLVDMRVEIDGQIRGILKTFGLVVGSGNKGAFAQRARMLAQDHPVLSALIDKLIEVREVAVAKVAALDKEIRRFVRDDLTLRRFMTVPGVGPVTALAFRSTIDEPNRFKRARDVGPYLGLTPRRYQSGVTDRHGGISKCGDRFTRTCLYEAASVLLTKVQRWSPLKAWGTRLARRIGSKKARVAIARKIAVILRCIWTDGTEFWWTKETATA

SEQ ID NO: 287467 - protein, 420 aa, unidentified
MTTLDSTPAAAVLVAIDIAKVRNEVLIEAPGHKRRRRLLVLNTRAEHDHLIEVLQAYGRPVVCAFEATGNYHRPIAWRLAEAGFEVRLVSSLALARTREALHNSWDKNDPKDAQVILHMLRIQATQLYHDPLRAGINDVQELSKTHEAIARAKTEIQHRILTHYLPLYFPEIDRFRGNSRSDWFFAFLHAFPTPASITALTKEEFVTAAWDVVGRKVSKTQILMDIFETARSSIGLPLPLDAPAIRMFRMVIDEARSLIRQRNEIEAQADELLRHSQDYQLLRQIPGIGPINALTVIAEAGDLRRFAHHRQFLKFCGLDLSTQQSGQYRGQTRLSKFGNARLRRSLWIAGQVAIRQRENGFRHKFERYIARDRDNPDLRRKAMTAITAKMARVVHAVVKGGSDYRPFVEGRVPGGRTSVS

SEQ ID NO: 287468 - protein, 368 aa, unidentified
MKKNNTCLKSSKRSKTRNRSITIGMDLGDKTSQYYVVDSEGEMVREGAVATTKKGMKQRFGSLQRCGIAIEVGTHSPWVSRLLGSLGHEVIVANARQVKLISSSSRKSDRLDAQTLARLARVDPELLRPIRHRSEKAQGDLMQVRVRAALVDTRTGLVNTARGLAKAMGERLPACDADQMGVEKMQGLPAELAEALAPLLEIVESLTKRIKECDQKLEQLAGCEYPETELLRQVSGVGSLISLTFVLTVEDPNRFRKSRDVGCYVGLRPRRSDSGESQPQLGISKEGDVYLRKLLVQGAHCILSQRSPDTDLKRWGLKLAGKGNKNAKKRALVAVARKLAILLHHLWVSGEVYEPLRNSRPLEPKAAA

SEQ ID NO: 287469 - protein, 356 aa, unidentified
MSKNKDKGIDFKGQHFYVGIDVHKKRWAVTIRHHDLTLRTYSMDPSPDLLVSQLVSHYPKGTYHVAYEVGFTGFWICRRFKELGIDCMVVSPADIPTAHKEKDRKTDPLDSNKLARELENGNLIPLYVPTESEQHLRSLCRLYRMIVQNNTRVKNRIKSHLALNGVQIDRESSYWSGDFIAYLRNLPLDDGPSKSYLNICLDELEEHRQRLVYILKELRSWVSQRELDRTIDTLRSVPGIGFKTAMILYTEIMDIHRFKRFDQLKSYAGLVPSTYSSGENERTRGLTHRRNRHLRYVLIEAAWIAIRKDPVLLQIYNELSRKMKKQEAIIRIATKLLSRIRYVWMNDCSYVPGVIR

SEQ ID NO: 287470 - protein, 482 aa, unidentified
MAKRKVSTFERLRSGKMNRKERKEWQQRLYAEDAGLEVIHPDAAGIDVGNASHFVAVPPDRDEQPVREFGSWTADLRRMAEWLKRCGIRTVAMQSTSVYWVAVQEILEREGFEVYLVNARGTKNLPGRKSDVQECQWLMKLHTYGLLRNSFHPPEQIRAVRTIWRQRDRLVKEAGREVQQMQKALTTMNVQLANAISDVSGVTGQAIIRAILQGERDPQQLAKLRDWRVAATEEEIAHSLEGNWREDVLFELQQVVDAYDFHQKQIAACDVQLQKYLSALPMRNGPGAGERNTADAPSERPKKQRRHKLQKNQPVFDLAAELQRTMGVDLTAIDGVDVMTTQVILSELGPDLSASFPSEGHFTSWLELAPRRDVSGGKVIRKKSRKSNNRVATALRMAAQSLWRSDSYLGARYRHLKARLGGQKAVKAMARYLACLIYRLLTKGQPYVDRGVAHFESKRTERELLALRRKAAELGMQLVAVS

SEQ ID NO: 287471 - protein, 331 aa, unidentified
MKKKDVIGIDVSKLTIDTYVKIAQVHAEFSNDNKGFRQLVKWIKKHTDCQIEELLICFETTGLYSLQLASFLSQINIDFVMENPIQIKRSMGVVRGKDDHVDSQRIAEYAYMRKENLKHTKLPCEELIKMQNLLAMRERMVRQKAGYQASLGEYKRVLVQQQQKDLFLLLNNMISALKKQILKADKILIEIIQSNKKLKSTYTLLTSIKGIGVILAANIMVTTICFTKFNDSRKYACYCGTAPFKYSSGTSIKGRTKVSQMANKKMKALFNLGALSAIQHDPELKLYFDKRKANGANGMSTINIIRNKIIHRVFAVIKRGTPYVVMAKYAA

SEQ ID NO: 287472 - protein, 353 aa, unidentified
MTVYVAVDFHAREQTISYCDSADGEIHRTKLRHQHDDVRKFYEQFTGEVVVGLEASGYSAWYEQMLAELGHTVWLGNPAEIRRKAPRRQKNDRRDADLMLDLMLKGDFPRVHSFSEESRTVMRQLRYRHKLVKVRTIAKNSLHAIGINAGLPLKRKLLTQAGIEQLQALPLSSVLSAQRDDWLELIALLNKRIATVEEALQERAKDDAEVALLRSHPGIGLLTALALRYTLLPVSRFTTTRRVTAYVGLDCVEDQSSERRRLGSISKEGSRLVRFLLNEAGQTAARRDPELKRFYKRLSHRRDKPKAKVAVARKLLVRSFIMLRDQIDYVEFVRRGVAARVARETHSPNMTDL

SEQ ID NO: 287473 - protein, 458 aa, unidentified
MPGAVEEPQQVQADEEYERVWERVAAIDVAKASGVVCTRVPDEDRPGRRRTHVWTVTATVPAVTELADHLRSRQIQIVTLESTSDYWRIWWVVLEAAGLKVQLVNARAVKNVPGRAKTDKKDAVWLAKLTERGLLQPSFVPPPEIRRLREFTRLRAELVHEKSRYWQRLEKLLERALIKISAVASTLDTDSTRAMIEALIAGQRNPKAIAELAIGKMRPKRAALAEALDGDFQPHHGELARLLLDQIDALTARINQLSDRVTELIAQIPAAQGVDAGGVTGPGAGTSPDAVILPAVARLDEITGCGVIAAQAVIAEIGLDMTVFGTPGRLVSWARRCPQTRQSGKKTTAGKAGKGNPYLNGILGEIAASAARTDTFLGERYRRLARRRGKRKALAAIARSILVIIFHLLANREARFHDLGPDWYDRYIDKQRKTRNLIRQLEALGHAVTLTPAEPAAA

SEQ ID NO: 287474 - protein, 340 aa, unidentified
MTTNTKFYLGIDVSKLWFDVSLLPVANHLKQDMISERFDNTIEGLKLFKKWLTFHKVPFNENSLLVIENTGVYHRLIWHFCSKYNLPIHIGNAAHIKWSLGITRGKSDIIDSKRLCQYCYKQVDELKATPPINPVFMKLKDLMTARSRLVVQLHSTKNYIKEIQCTNDKVLLTLLDNSHKAAIDGIKKSIEQVEIAITKIVSEDKCILQNYNLMKTVPGIGHLTAIYIICCTNNFTSKISGKQLASYAGVVPFEHTSGISIKGKNRVHKMANKDLKKMLHLCALTAIKYYPEFRQYFDRKKAEGKNGMLVLNAIRNKIVLRVVAVVNKQQPYVNNCIIAA

SEQ ID NO: 287475 - protein, 360 aa, unidentified
MDTNKPVVGIDLSKRTLEAVRVTGERIERFSGKTDDQGLRTLEKWLKKGETVVLEAGSQAFRIARRLAKNIGCDMIVLNPGDVAVIYDSLKKTDKEDALKLARLAQRHPREELPTVEIPTEKQEVIRRLSTEQAHWSEMISMSKNRLHSVFVEAGIVHLTRSHLSRRENRQEAFESLPEVYQAEASRLMRDIDHMEGLVEELEEQIRGALKENLDYTSLVMSMPGVGPILALALLGYLGDGKRFSSAKQVGFFVGLVPKVQISGTMVHYGHIVHTGCKPIRRVIIQAAWALTRSNEGGDLRAFYQRLYPIKGKKKAIVAVARKMTEILYLMVRNGEFYRHSNPVNLKKKLKYYGLHSAAA

SEQ ID NO: 287476 - protein, 429 aa, unidentified
MTCISAGVDVSKNRSTVCIMDQDGKFIMRPFLVWHSTEELDFLADTLKRLNGEVRVIMESTSVYQYPIALQLKERGLFISIVNAYEMKQFANTDFRGGKTDKKDSRTIASYGISYWDKLVEWQIPKDTYFNLDLLNRTYMNAKKHRQIILQELQHYIDCAMPGMDKELHSLNLNTKKDFMLDFVEKFWHRDEIVNMTEAEFTEVFTAWAKEKGYRPGKGKAAKIYAIAKSCIPYYPANPTVKTILQCIVDKLSGVNRTLVTIVTQMIEEAKKLPEYQIVREMPGVGDPLAARFFGSAGDIRRFKNSKALVAYAGIDSPPDESGDFSSTHRHITKKGSKVFRDTGYEIMMALRAQKRTWEKVRKNPEVYDYMLKKEAEGKPRKVAKIAALNKFLRIVYARIKELYDNMALAERAKTKTRSKTRAKTKVTA

SEQ ID NO: 287477 - protein, 433 aa, unidentified
METQFAALAAIDWADQNHVWAMEIPGQTKPRMGSFAHTPEAVEAWAAELAERFAGQPVAVALEQSRGPLVFMLTKYKHLVIYPVHCSTLANYRKSFRPSGAKDDPIDAQLLLDILVRHRDKLRPLRPDTVETRTLQFLVEERRKLVDQKTGCTNRLTAHLKMYFPQALGWFGEIGSPIAVAFLQRWPTLNAIQKARPATIRSFYTSHNSRTGGECLDKRIEEISRAIPATHDEAVIEAYSVAVLAWAGLLKQLLLAIKDYDQRIEGLAKKHPDYALIKSFPGVGPVIAPRLIAALGSQRDRYESAYQIQCYSGIAPVVSSSGKKHHVHCRWACPAFLRQTFHEWAQHSMVSSQWARQYYQAQRKVGKGHNTAVRALAFKWIRILFRCWKNNVPYSELVYTTSKACKHTEPTNQPVEIKWEKKAGMSKFTGLAT

SEQ ID NO: 287478 - protein, 355 aa, unidentified
MEQLSRIGMDTSKRVFHLHGVDADDRPVLRRKLRRADVLTFFAKLLPTRIGMEACGGSHHWARELRALGHAVVLIPPQYVKPYVDRGKNDAADAAAICEAMSRPKLEKRLVSIKTPEQQAGQMLIGVREGLLRRRTQVSNMIRGHAAEFGLVTPRGLAHLEPLMARIEQDDTLPRLARDMFAMLAGQYRHVSAQIREIEARLLAHHRASPQSCRLVRIPSIGPVIAAALAAKVPDPTRFRSGRDFAAWLGLTPKDHSTGGKARQGRITRAGDETLRSLLICGATSVIRQAGHRGAGGPAWLGSLVDRKPPKLAAVALANKTARIAWKMMMTGEAYDPCRHGAPREAGVCVVAEAT

SEQ ID NO: 287479 - protein, 347 aa, unidentified
MKFYTTQHPYYCGIDLHARSLYVCILDAAGESILHREIKALPEPLLDLLAPYIGNIVVGMECMHCWYWVSDFCAEHGIDFILGHALYMKAIHGGKAKNDRIDSYKIAHLIRGGNFPLAYVYPPEMRAARDLLRRRTRIVRHGADLKAHVKNTTSQYNLPPNNLNLRYDFAREAMRNRFDDDCVQRNIDLDLNIIAFYKHELSSVECFIEKHAKHHSGSDYHILTSFPGIGRILALTILYEIGDIARFNTVQDFASYSRLIKCKAESAGKSYGTQGNKIGNAHLKWAFGEIAVLYLRGNDKAKSYLLKLQKRMSKAKALSALAHKVGRCVYYMLKNQKVFDEKRFLAG

SEQ ID NO: 287480 - protein, 381 aa, unidentified
MKTVCGLDVHKDSVFLCILHENGEKIQHKFGILTDELECMRDLMLSEGVEECAMESTSIYWIPIWRVLEDHCKLYLANPYFIKQLPGKKSDVKDAEWIATCLSNNLIAGSYVPEERIQRLRQYDRRIFDLTASISRNLVKLDACVQRCNIRLSNYVSTVDSKSYREVVKKISEGQTDPQKLMEAVHGRIVSKHGEETILRSLTGVINETDIDIISQLVEEIELQQRQRDAAQQKMTTLTKEWFPEQFENLQTIPGVKERSATSIIAEVGTDMSNFQSPKKLVAWVGLRPRNEESAGKIKSRRIVHGNKFLRKTMVECSWSAAKTKDSFYNTFYHHQTVVRRKNKMKIQVAVARKLLTVVWYVLSTNCQYKPYDHTAAGEES

SEQ ID NO: 287481 - protein, 405 aa, unidentified
MGEGSFAGVDWASQEHAVCVMDADGRIAEGGRYRHDERGLRALCNRLVELGVLLVAVERPDGLLIERLLDAGLPVIAVHPNQLAASRPRFSAAGHKSDSFDAFVLGELARTDSHRFRVLVPDSDATKALRALTRAREDLVETRVALANALRAQLECFWPGAVAIFADIDSPIALAFLKRYPSPADARGLGEQRLERFLARNHYCGRRPARELLTRLRNAADGRAGQLETEARRQLVLGLVAVLEPIVVQIAQLTSEIRGALHDHLDGEIFSSLFRDPKTAICPATFIAEMGDCRPRYPTKAALASDGGQAPVAKESGKSKRAHFRWACDHRLRDAFSTLADSSRHHNPWAADIYDRARARGASHPHAIRILGRAWAGVIWRMWHDHTTYDPALHGNYQQLITARG

SEQ ID NO: 287482 - protein, 338 aa, unidentified
MDKPSEGVTGVCGIDISAQTLAVAVQRAGASPWVLGEVANTAAGHQQLLAQLQGMGGRVRVVMEASGVYGLDLAVRLAATPGIELAVLNPKTARRFAESLGERSKTDPVDARVLGEYAARMPFTPWQAPRTVVLELRAITRRIASLKVQHGQESNRLHAQESSEQLPACVRRELRSSLRRVERAVQKLTRAALALVAHDPPLAAALALLQSAPGVGETSALQILGEVSALPSQLGVKQWVAHCGLDVREHLSGSSVRRPPRISKAGNRRLRRALFMPALVAVQHDPHLRAFYLHLVGRGKAKLQALVAVMRKLLHAFYGMLRLRQPYCGARLLPALTL

SEQ ID NO: 287483 - protein, 312 aa, unidentified
MTTREVFVGIDVCKRHLEVRVHGREHGWQFPNDAEGVCQLLTKLRGLRPTLIVVEATGGYETLAVAEVCAAGLPIAVVNPTRVRRFAESLGQMAKTDRIDAAVIAHFGSVVRPAAQTLASAEEQHLRALVDRRRQVVAMLTAEKNRRHTSPACLRADVEQHVEWLQGKLKEIEAEIARLIRSNPVWQEKMATLCSVPGVGPVSAVTLVADLPELGSLSRQKIAALVGLAPFNQDSGPRRGKRRILGGRASVRRTLYMSTLVAIRFNPVIKSFYEKLIRRGKPAKVAITACMRKLLVILNAMMRKGETWRCAA

SEQ ID NO: 287484 - protein, 324 aa, unidentified
MSTRSTKTSRRSFIGIDVSKQFLEVAVHKNEYHFRCPNDPKKFPTLIAELIALRPARIVLEATGGLERPLLHALRRAGLPVVLINPRQVRDFAKALGLLAKTDRLDARVLAHFAAAIQPPLRPIKTAEDTELDALMGRRNQVSDMLAAEKNRRGSAATEAARADIDAHIEWLEQRLKALDKQLKDQLKRSVAWQQKDKILQSVKGIGFVTSVSLLADCPELGQLNRHQIAKLAGVAPLNRDSGKQRGTRHIFAGRAPVRAKLYMATLTAIRCNPVIKAFYQQLIARNKLKKVAIVACMRKLLTIINVMVRDNKVWTVKAQPVSA

SEQ ID NO: 287485 - protein, 439 aa, unidentified
MPTPCLSVLDPTAAAIDVGSEQLHVSIAGGPPKVFGTTTGELYALRDHLLVQGVHSVAMEATGIYWLCPYEVLEKAGLEVVVVNGKYVKNLPGRKTDMSDCQWQATLHAHGLLKPGFVPPEHIRRLQDYLRLRSDHIVMAGSHEQHMQKALERMNLKIHDVISDLTGVSGLKMVEAILAGQRNPVALVALCDPQIQKHKTKELRAALEGTWKEEHLFALRQAYELWQSYQQKIAECDQAIEAVLQVVAGPEDPKNPAPPATKRGGGNASQISGLHAMLWRLCGGKDPTQLPGVADYVLLQLLSEVGTDLGKNWKTEKHFTAWLGLAPGSRQSGKRRGSQRRSRNRAGRLFCVIARSVGRSVDKALGGFYRRLKGRRGGLVANLALARKLAELFWRLMVHGVNYVEQGLKKYQERVAQTEQSLLQKLARKYNMVLQPKLA

SEQ ID NO: 287486 - protein, 337 aa, unidentified
MSYLGVDLHTNSFTVCYRSCQGRQRIETFDIRRMDRFRKTLRKADKVAVEATGNTAWFVERICDRVSRVVVVDPHQFEVIRRSVKKTDKHDARTLAYFLSKDMLPEARMKSKENAQLHSLASTRDKLVKQRTALVNKIYNVLNRYGLTWKKETLTTEKGLKSIMVFNWEPIVRVELEVLAEQVRSLTKSIKKLDDQISQEGKKLDGHKNLTSIKGIGERSATVLLSVIGDVNDFADENKLAAYFGIVPRVSDSNEIVRHGRITKNGSKIGRTTLVQCTLVAKRYSPYLRGYYERIKRHRGSGKAIIATARKFLGIIYQTLKNDWIFEDFPNFVIANT

SEQ ID NO: 287487 - protein, 433 aa, unidentified
MSEIGSQPDPEFAAFIGIDWADQKHIWCLQSAGSAKRETGELEQTPEAVESWVAHLYQRFAQRPIAVAVEQSRGALVFMLSKYEPLHLFPVPPQMASSMRQALYPSGAKDDPRDADLLLDILLQHRNKLRRLSPDSEATRRVQNLVEERRKLVDEKTAQINRLTDHLKAYFPQMLEWFGRLDSDVVCALLERWPALEELQKAQPASLRAFLRKHRCRDREQIEHRMKAVRQAIPAIHDRAVIEAKSAAVRVIVRVVRILGEGIEDLDGEIEEAAAAHPDFFIFNSLPGAGPVMAPRLLAAFGSQRERYASADELQSFSGIAPLTEASGKRKWVHFRWACPKFLRQSFHEWAGHSIAQSEWARAYYQQQRSKGNTHHEAVRALAFKWIRIVFRCWQDRVAYDENTYLAALVKRGSPLAAIVATGKRCENFVDTR

SEQ ID NO: 287488 - protein, 388 aa, unidentified
MIYVGIDIAKLNHFASAISSDGEKLIKPFKFTNDNDGFQLLLSKLDPLDKDSLIIGLESTAHYGDNLVRYLVAKNYKVCVLNPIKTSTMRKNNIRKTKTDKVDTYIICKTLMMQESLRFVTFYDLDLMALKALGRFRQKTIKQRTRLKIQLTSYVDEIFPELQYFFKSGLHQKSVYALLKEAPTPDTIASMHMTHLAHLLKVNSHGRFDKEMAQQLRVLAQKSVGASDSSLSIQVTHTIQQIELLDSQLERVEAEMTEIMKFNDSVIMTIPGIGYINGGMILGEIGDIHRFASPNKLLAYAGLDPSVYQSGNFQAKKTRMSKRGSKVLRYALVNAAHNVVKNNATFKAYYETKMAEGRTHYNALGHCAGKLVRVIWKMLTDEVEFNLD

SEQ ID NO: 287489 - protein, 360 aa, unidentified
MLYLGIDQHRKQLTVSLRDEAGDVVLRRQVSTRWERVRAFFDELRKRAEAEGGFVAIVEVCGFNDWLLKMLREYGCREIVLVQVEKRSKKKTDRRDAYQLSGLLWVNRQRLLAGQKVEGVRRVVPPTDRDAEDRQLTALRQRLGQLRARTINKVKHLLRKHNLEQEQPAKGVDTKRTRKWLAALSLGPIDRLEMDLFLQQWDVFDKQIEKLDAEICPRQAQSPAAAVIATVPGVAAYGSLALASRIGAIERFPRPASLANYWGITPGCRNSGEATDRLGSITKQGSAMARFILGQVVLHVLRRDPSMKAWYGRIKKHRGAKIARVAAMRRLATIIWHMLKNNEPYLVGGPPRRKLECQTA

SEQ ID NO: 287490 - protein, 318 aa, unidentified
MNTKINQSINVGVDTGKTQLDIHIRPLDLFFSVENNDKGIKKALKTIKSHSPERIIIEATGRLEMPFVLACAEAQLPIVRANPVHIKRFAGAIGRRAKNDRLDAELIAHYGEAIKPALTVIKPKNIRLMSDLVIRRNQLLSMQTMEKNRIQILPASLHPTIKPMLTTIKNQITKLEEKLVKLIEDSPEYQAKNTILQSVPGIGNIAAASIISNVPELGYITNKQAASLIGVAPITRESGRYKGKRVIQGGRAQVRTVLYMAMMSAMQCNPVFKATYARLVAAGKPKKVAIIACVRKMVVTLNSMLRDGAMWDENTAKN

SEQ ID NO: 287491 - protein, 346 aa, unidentified
MEYHAGIDVSLELSSVCIVDATGKIIKETRVASDPVALVAFFGGLGFAVTRIGLEAGPLSQWLHAGLTREGFETVLLETRHVKAALSAMTVKTDRKDARGIAQLMRMGWFRPVHAKSPGAQEVRALLVARKQLQSKLLDIEASVRGILRGFGMKMGAVTRKGFEARVRELTTGQAMLERITTAMLDARAALWREFERLHREMLKIVREDKVCRRLMSVPGVGAVVAITFKSAVDDPTRIAKSKAVGALFGLTPRKYQSGETDVTGAISRVGDEMVRTALYEAASAMLTRTTRFSALKRWAVDVAKRRGAKRAKVALARKIGVVLHRMWVDGTTFRWTKAEPVAAQV

SEQ ID NO: 287492 - protein, 358 aa, unidentified
MGKTLFVGIDIGSDTNVVRILDNTGEDVCGFSVSNDLPGAERLVERIVTEAELIDADKVKIGMEATNLYWWHLSQALHEAPELSTFETEIAVINPKVIDGFKHIYPDMAKTDALDARVIADCLRFGRVRPTPPPDMTYAPLQRLTRFRYHLVSNLTREKNRALNLIFLKFSTYQKECPFSDLFGQASRAVVGNLTPDEIANMPVEELVDMILEHGNNRLKDVPEMARVIKQAARTSYRLNPKMRDAVDVTLAMSLETIRFFETQQKKIDQVIAKELKAIPQTLDTVPGIGPVYSAGIVAEIGDISRFKNHNALAKFAGLTWRQHQSSKFSAEDIPLTRSGNYYLRYYLIEAANSVQVR

SEQ ID NO: 287493 - protein, 443 aa, unidentified
MSESRVAAAPEPEWAAFAAIDWADRKNFWRLVPAGSQRHEQGELENTPEAVEVWAASLQQRFGGRPIAVCLEQSRGALVYMLTKYPHLVLFPIHPTTAARYRETFAPSGAKSDPSDTASMLDLLLRHPERLRQLQPDTKETRLLHFLVEERRQTVDEKTRQRNRLTAELKLYFPQMLQWFGDVTTALVGDLLQRWGSLEELQRAHPGTLRKFFHKHNCRDEELIEERIAGIYQSTPATKDEAVLEAGKLTTRGLVALLATLRANIAVFEKRIEELVAAHPDGALFASLPGAGDALVPRLLVAFGERRDRYQSAYEMQCYSGIAPVREASGKTEWVHARFVCPKFLRQTFHEFASHSIGNSEWAKAYYDHLRNDEKKDHHAAVRSLAFKWIRIVYRCWKDGKPYDEQVYQNSLRRRGSLLSKTLAAATSVGWKTVAGFQKLSPN

SEQ ID NO: 287494 - protein, 415 aa, unidentified
MTKIIRIGMDTSKSVFVLHGVDAAEQPILRRKLRRKQVLEFFAKLEPTKVGLEACGAAHYWARELRALGHEVVLVPPQYVKPYVKRNKNDAADAEAICEAMSRPTMRFVPVKTAEQQAALMLAGSRDGLIRRRTQLSNTIRGYAAEFGLTAAKGLDKIEPLLARIAAAALPELAKEMFATYAREYARLKVEITKIEAKLMAWHKDNELSRRLEEVPGVGPIGASLAAMKVPDPHAFGCGRDFSAWLGMTPQDHSTAGKTRLGVITRAGDEALRRVLVVGATAVIQKVKQGKGQPSPWLVALLKRKPPKLAAIALANKNARIIWKLMVSGERYNPARAAAARGEGVEVPSCTSGTPCSPPSRTLRAAAGDGPRGPSLTAAALGVTGPRQVGTEKRPSGRTKKLTLKKLENVAPAAV

SEQ ID NO: 287495 - protein, 355 aa, unidentified
MISLIAAGVDTHKDFHILALTDELGRELSVHRVCATKAGYEEVVRILGDVRDVIIVGMEGTGSYGSGLCAHLTRKGYPVSEVCRPKRERRRPGQAKTDGADALRAARDALRDLDEGRIPKERDGWIEAARVIKVAHDSAVKARSAHMVTLKNLIVTAPDPIRERLRHLGDADLIATCARKRSCQEEIIQALWDALRTLALLWRSADDEAHTTEDALSHLISRHAPALLSTFGIGPLVAATLATTAGENIDRLTKGEASFAALCGVNPVPAESGKTQGRHRLNRGGDRKANAALHTIAIVRMRFDEDTKAYVAKKMGEGKTKRDAIRCLKRHIAREVYKLLRDAFGKHREPYKKRA

SEQ ID NO: 287496 - protein, 321 aa, unidentified
MKKEIHYQQVIEVGCGLDVHKDTIVATIRSSSKDYETKEFSSFTSSLTELRDWCKQKSVTHIAMESTGIYWKPVYNVLEDEAFEIILVNARHVKNIPGHKTDKKDSAWLSKLLLSGLLKGSFIPPVDIRELRDLVRYKKKKTQVVAAEKNRMIKILEDCNVKLSSVVSDVQGASATKMVTAITKGETDIEKLILFAHGKLQTDKATIKKALEGKVTEHHRFMLQMAKESIEVNEALITKLDAQIEKASAKYKVELDLLQTIDGVGKDSAIAIISEIGADMKQFPNEHHLASWSGVSPGNNESGGKKKAQEPFTGTNTYSQP

SEQ ID NO: 287497 - protein, 401 aa, unidentified
MNAIGIDVSKGRSTVAIIRPFGEVVRKPFNVCHTSQDLDELAKLILSFEGESKVVLESTGKYSAPVVKKLCEAGIFLSVVNAKWIHDYAVDTIRRVKTDKVDSLKIAGFCLDKWTKLNRHIPAEQTRATLKTYNRQLHEYNKIKVMLKNNLISLTDQVFPAINTLFTSAARESDGHEKWVDFLARFWHCECVSKISLSEFADIYRKWCKKRGYNFSELKAEQIHALASNHFGILPKGNFTKTLIVQAIAQLNNICEVISALKVEMNNIAAMLPEYETVLAMHGVCKTLAPQLIAEIGDITRYPKRSSLTRFAGIEPPENQSGAYNQHSRRISKQGSPYLRKALFQVMRCVLQNKDADEPTFQFIDRKRAEGKPFKVYMIAGANKFLRIYYARVMECINTIN

SEQ ID NO: 287498 - protein, 349 aa, unidentified
MLIIGCDFHPGFQQVAIFDNRTGEIQEKEKRLQHRAEAEQFYRSLAGQEVLVGMEACGHYPWFERLLAELGFELWFGDAAKVRASVVRKQKTDRRDADHLLDLLRQDRFPRIWVPSLEVRDVRQLLVHRDKQVQARTRTKNQLQAMALSSGVQKKRKLWTKAGREELEQLPLLPYAAERRKRLLEALDGLEAEIVELNRRVEEEARQRPEAVRLMTHPGVGPVTALAMVLTLGPAERFGSGKQVGSYFGLIPSEESSGGKQRLGRISKQGNSFLRFLLVEAGQTAARLDPQLKRFYRRLAVRKNRSVAKVAVARKLATRLYLMLREDWTYAQLCQAVMQVSPSHSVAGE

SEQ ID NO: 287499 - protein, 367 aa, unidentified
MMGWMAPLRHRRAKLVFSRITRNSEPSMSEITTIGLDLAKHVFQAHGIDAEGTTVLRKRLRRGQVLAFFSRIPRCVVGLEACATAHYWARELGALGHEVRLMPAQYVKAYIKRNKHDAADAEAICEAVQRPTMRFVPVKTTEQQATALLHRGREQLVRQRTMLVNALRAHLAEFGMVAAQGLRNVGELIAIVRDDGDTRLPDVARQVLQVLAAQLEQIEAAIAALEKQLMAWHKTNAVSQRLASIPGIGPIIATAIATTVADPGVFRSGREFAAWLGLVPRQNSTGGKTRLGGITKRGNRYLRRLLINGASANLLRSKATKADPWVIGIRRRRPPLVVAVALANKTARIAWAVMLRQKEYQPRALAA

SEQ ID NO: 287500 - protein, 345 aa, unidentified
MEHIGIDVHKVESQICILTESGEIIERRIHTQRERFAAVFGVRARTKILIESSTESEWVARCLEELGHEVVVADPNFAAMYATRSRKVKTDRRDARTLAEACRLGAYRPAHRTSDRQRQVRAQLAVREALVRTRTKYISLVGALLRSEGYRIKSGNAECFGRRVEQLAIGGRLKSEVAPLLAVLLDVNKQVAWLDSRLEHLAKSDETVGRLCTAPSVGPVTAAAFASTIDEPERFRGAHQVEAYLGLVPSEMSSGEKQHKGRITKAGNGRLRYLLVQVALSILRLRSPRTEVLRDWAERIAARRGKMIAVVALARRMAGILYAMMRDAKSYEPARPRLAPQAAAA

SEQ ID NO: 287501 - protein, 340 aa, unidentified
MSEITTIGLDLAKHVFQVHGIDAQGTTVLRKRLRRGQVLAFFSRIPRCVVGLEACATAHYWARELGALGHEVRLMPAQYVKAYIKRNKHDAADAEAICEAVGRPTMRFVPVKTAEQQAMALLHRGREQLVRQRTMLVNALRAHLAEFGIVAAQGLRNVGELIAIVRDDGDTRLPDVARQVLQVLANQIEQIETAVAALERQLLAWHKTNPVSQRLASIPGIGPTIATAIATTVADPKAFRSGREFAAWLGLVPRQNSTGGKTRLGGITKRGNRYLRRLLINGASANLLRSKATKADPWVIGLRRRRPPLVVAVALANKTARIAWAVMLREKEYRPRAMAT

SEQ ID NO: 287502 - protein, 523 aa, unidentified
MEVLYDRVAGLDVHRDSVAACARLLGPRGGVVADKERFKTTTAGLGRLGGWLAERQVALVAMEATGVYWKAVYYALEHDFEVWLCNAHHVKNVPGRKTDMSDAEWLADVAAHGMVRPSFVPPPPIRELRELTRYRKTQVDVRAAEVQRLERVLQDAGIKLTSVASRVLTQSGRAMVEALIGGERDPQRLAALAKGKLRPRIPELTEALAGHFGAHHAVAARRILDHLDFLEATVAALTEQIDARTRPYAAVFELLLPVPGLDRRTIDVVIAETGADMDRFPSPAHLASWAGLCPGNHESAGKRRRVATPPGNRWLRHALIEAARAAARTTGPGSATTTWATTSSSAAATRRVRPAAWSTSSNSWATPSPWRALPHSHTGTEPLSGAARLLPRAQDPWTTHRISPARRLPADGQRQPARPASPDRPAGPRRLFPRRTTPLTAATAASSTARSRPPPRPPGCGSPTPSRWRCCNATPPTWPATLCAPRSPTPSPAWTPPAPAPPGCWRWPAANGRSRTACTGSAT

SEQ ID NO: 287503 - protein, 306 aa, unidentified
MPIVADSYEIVIGVDTHAAAHALCVVAAVTGAVQDKASFPASPAGLDRARTWIAHRAGQQAALVVIEGIGSYGAGLSDRVLAAGFPVAEPSVMGSADRRGVGKTDDLDAARIARSVLSVDIDRLRRPRADGSRVAMRVLVVAREQMTCERTRAVNALTALVRTVELGVDARKSLAYSQIKEIATWRARSEDATTATCRAEAVRLAKRIRALDSELIDNRKSLEALVKTNAPELTAAVGVGAVVAATVLIAWSHAGRVRSEAAFASLAGTCPVPASSGNTVRYRLNRGGDRRLNRALTTIIRREDAG

SEQ ID NO: 287504 - protein, 354 aa, unidentified
MNITTVGVDLAKEVITVCTMDRSGRILQVRNLRAADFSAWLIQLPAGTLLGMEACSSAHHWARKMQGMGLEPKLMAGAFVQPFRKSASAKNDYNDAEAIAIAVRQPQMRFVAIKTEAQQARLAWHRLREGWKEERTALINRTRGLLLEFGYPLARSSKAFTVGLQAALLHPALPAGFRTLLNQVQQQLQQLDKQLAECDRTIAQSAKQDEHSQRLQAQPGIGPISSDAFAATVGNARDFKNGRQFAAWIGLTPRQYSSGGKTKLGRISRRGDAYLRTLLIQGAKSTLQSAIKKAPDLLSRMQQWILKLYGRVGYHKTLVAIANKHARQVWAMLAKGEEYDPKAWEKYAKGVAAQ

SEQ ID NO: 287505 - protein, 340 aa, unidentified
MTVKVIGIDIAKRWFQIHGVDDAGAVVLRRKLSRDGFLKLIGALPPCVVGMEAGSGAHHWARQMSQFGHQVRLMPPQFVRPYVKTNKNDAADAEACCEAVQRPGTRFVPTKTIEQQAAVALHRVRDHLVRQRTGTINALRGHLAEYGVVAAQMRTGLKQLFNLVLDDDDCSLSAELKPVLKMLVEEIQAVDERIAELDRRMKDAARANEACRRLVEVPGIGPLIATAVVAAVPDDHRFSSGRHFAAWVGLTPRQHSSGGKERLLGISKRGDAYLRRQLVNGARSLVRIASGRTGHLWDWINALMKRRSFNVVTVAVANKLARIAWAIQARGTRWQVTEAT

SEQ ID NO: 287506 - protein, 480 aa, unidentified
MNVKARRTKKQVNVENQAINLLSKEELNKKIEVVEKELRSYTWRELETNGKFAKNDKLSFITDDMLIVGCDIGSENHYIRAIDVRGRELSRGAFEFSNTSEGFENAKAWVMALAAKHDKKQIVLGLEPTGHYWFALAAWMISNGISVVRVNPYAVKQSKEIEDNSQLKDDRKDPQLIANLVKDGNYGMPYFPEKVYADMRRLSMFRDQLTEDRIRNINRLHRELKIYFPEHMDAFGKIDGAFTLEVLKVSAIPSDITALGAEGIKNIWHNEKLRGRGYSRANEIVSYAEKSVGLTDGTDAGREAVKWYAEQILKLDEQLAVVESTLHEKCREIPCAENILEIKGVGENILAGILAEMGDISRFDDVKEIQKLSGMGLVACSSGKHKGQTKISHRGRKRLRYWLFQAAKSAVSHADEFKQLHEYYTTRTNNPLKKMQSLVVIACKILRVIYTILKTGTTYDPQKLLEDIKRPTASHAPMAA

SEQ ID NO: 287507 - protein, 369 aa, unidentified
MGEYSEAFVAFDVAKRKHAVAIAEGGRSGEVRFVGEIDNSPATIERVIKKLAARYDGLHVCFEAGPTGYELHRQVRELGHDCMVIAPALIPKRAGERVKTNRRDAITLARLHRAGELTAVWVPDAVHEAVRDLARGREAAADDLRRKRQQLLSFLLRRGRIYSGGGHWTLAHRRWLAGQAFEHVSQQIVFQEGIDAIEDAAQRLHRLEQQLAVIAPSWSMAPVVAAYQAMRGVSFLVAVTFAAEIGDVRRFDTPRQLMSFLGLVPAESSTGDTVRRKGLTLAGNRRARRALVEAAWTYRYPARVSETLRTRIEGLPKPVRDIAWKAQLRLCARYRRLSAAGKKLPVVIAAIAREMAAFLWAIGREIAPV

SEQ ID NO: 287508 - protein, 422 aa, unidentified
MLGVGIDWAEEFHDIALGTPETGVIEQFRIDHGPDGVARLVARCLSLEPDPAEVRVVLETRHGLLVEALIDAGFAVVPVNPDLVARRRGPAKKKDDAEDARICCLLALYRHAGLKQLVPHGELGGELRAIARDDERAARDQRRLLNRLRADLQTTYPAALTLADGDLGAPTLLRLLQRWPTQAELASASREELTAFARASKHGWPDRFADRTADALAAPSLPTRDYLVRAKAAGIRLAAVQLLALHEARRGWAQRMTELLLGGRRTGRDHTVKDPDPGNAFPGGAIYLSFPGLGDVLAARVAGEIGEHIEQFDTPNGLQCYAGQAPVTRRSGKSDFVVARRFAHNRYLGAAVHQWAFCSLTRSGWAREFYDEKIKAGKGHHAALRALGNRWLELLWHCLTKGIPYDETVHVANRNRALGRAA

SEQ ID NO: 287509 - protein, 407 aa, unidentified
MIFVGDDWAEAHHDVYLCDEGGTRLAARRLPEGIEGVTALHDLIAAYATDPAEVSVGIETDRGLWVQSLVEAGYAVYAINPKAASRYRDRHTLSGAKSDPGDAKMLAELVRLDRHNHRQVAGDSALAEGVKVLARAHQNLIWERTRHTNRLRSALREYFPAALDTFSELADRDTLAVLGRAPTPTEARKLTPGRVRTLLQAGGRTRNVDTRAQAIVEGLRVDALAAPDSVVAAFGATTRAQVAILVALNEQIAVLDSELAAHFEQHPDADIYLSLPGIGVILGARVLAEFGDDPNRYANTKSRKNYAGTSPITRASGTRSVAVARFVRPARLADAADQWAFCSLRPSPGARAYYDHRRTEGDSHHKALRALANRLVGILHGCLTHHTTYDEHTAWGHRNDQPANIAA

SEQ ID NO: 287510 - protein, 323 aa, unidentified
MSMNPTEPQFNHIVAFEVSKTALVVHTLPADRQQTIDNSPAAVRRLLRVEQRANHKLGIGPLLVVCEATGGYQRHVLAEAAALGLRTHRAHGSRTRLFARFNGKTAKTDAIDARLIARYGLTPDLPLYDPPSPGQDALRQLRRRRDEIQQMLRMEANRTEHASLKRLRTSIRRHRAWLKDELEAIEAEIQQLIANTPELDRKATLLRSLKGVGPHTAAAILAYLPEIGTLSKATVAAIAGLAPIANDSGQHNGRRRIAGGRATLRSSLYMAALVARHRNPTIRAFAINLKARGKPNKLILTAVMRKLIVILNAVVASGQPART

SEQ ID NO: 287511 - protein, 292 aa, unidentified
MRPMYYIGLDVHKQKISYCVKDSSGCIHSDGWIPATRHDLDCWMKNLPRPWSAAMEATMFTSWIYDHLKPHATALKVAHPLMLRAIAAAKKKNDRIDANKICDCLRCDFLPESYMAPTAIRERRRTLRYRNLLVRQMVQMKIKISTLLMEAGVSYNKQKLHKAGYFRELLASNPDINESLRSLLRQCREMVVRLSKMEAALIQSLQQDRLLVERVERLMSIPAIGPITALTWALEIGEVRRFSSIKKAISYCGLCGAEKSSGDTVRRTPLSKQRNKHLQTTLIEAANMAPRL

SEQ ID NO: 287512 - protein, 363 aa, unidentified
MKIVCGLDVHKDSVFCCILCANGEKIQHKFGVLTEELVTLRDLMVSEGVEECAMESTSIYWIPIWRVLEGSVKLHLVNPYFIKQLPGKKSDVNDAEWIATCLSKELIASSFVPDDKIQRLRQYDRRIFDLNASISRNLVKLDQCIQRCNIRISNYISTTDSKGYRSIVKLISQGVTDAEVLVKELHGRTINRHGRETLVKALTGVVSETDIDIIKQLVEEIELQQRHKDEAQQKMTALCMEWFPQEVENLQTIPGVKERSATSIIAEIGTDMTHFQTPKKLVSWVGLRPRNEESAGKIKARGITHGNRFVRKTMIECSWGAARMKDSFFAEFSYRQCIERRKNKMKVQVAIARKNTCCSMVCT

SEQ ID NO: 287513 - protein, 333 aa, unidentified
MLYAGLDLSRKRLDFCLLDQRGEKVEVGAAPPDADGLRGLAARIGRFGEPVVAAIESMNGARFVHDQLEQAGWDVEIADAIKVKGLAPLACKTDRIDAWVLAELARRDLVPAIWLPDPEIRAERERARFRLHLVRHRTALKQRVHAVLLAHGKPCPVSDLFGVAGRDLLERLQLPEPWTSTLGASLQLVDELDRQIGDCERDLQRLGVEHRYVPLLVTVPGIGWVLAYTIAAEIGDISRFATATKLTGYTGLCPRVYQSGQSDRRGALAKNGPRYLRWALIEATMHASRHPPAPKSPKSTSPAASPKRSGRCSPATNPSPRQAPRTPWPPDGP

SEQ ID NO: 287514 - protein, 364 aa, unidentified
MQYINDTELSSHEETRCQFNGGRCAIKLGIDVHQDFYVVVEQVGGSNPKPPQRFQKDAFLHWAAKLQEKSGAEMHAVYEACGFGFGLQRKLSALGIECEVVCPQKLDEQNRRIKTDGLDAKALCLKLDRFVQGNRAALALVRVPTEKEEQLRSIHRQREQLVKARKRLEAQGRSLMVNHGMEPVKNWWKPRTFLGLRVPEWMRELLSNSQPILVALQQRIGALTLQLQSAATLNQPRGLGALSSVLIDREIGDWRRFNNRRQVASYTGLCPGEYSSGNTRVQSCVTKHGNPRLRAALVELAWRLVRFQPKYKPIVKWRAILAKGALATGAARKKAIVAVARQLAVDLWRIRTGRVCAETLGLIN

SEQ ID NO: 287515 - protein, 412 aa, unidentified
MLFVGDDWAEDHHDVEIVAEDGRRLARRRLAEGLGGMSQLHALIAGYLPEEWADLPPGEAAGRVKIGIETERGPWVQALVAAGYEVFPVNPMPVARYRERHSTSGAESDAADAHLLAEIIRLDRAHHRPVAGDSPQAEAIKLTARAHQSLIWDRSRHVLRLRAALREFFPAALAAFTDLDAPETLELLTRAPDPDRAAALSRSKIAAALTRAGRRNTEAKAQQIQDALRAPQLRQPPAVQGAYAAIVSGQIHLITALNTQIGELGEVVAAHFGRHLDADIYASQPGLGVILSARVLAEFGDDPHRFADAKGRKNYAGTSPITRASGTRKVVLARYARNRRLADALQQWAFCAMRGSPGARAYYQALRARGIGHQGALRQLGNRLVGILHGCLKTHTPYDETTAWAHHTSAAA

SEQ ID NO: 287516 - protein, 320 aa, unidentified
MSAFSVVVGIDVAKAHVDVSVLGAKLDAQRYDNLAEAHSNLAAALKPLGVALVVMEATGGYEAALACALQAAGLPVAVVNPRQARDFAKSMGRLAKTDAVDARMLAELAAVLVRRDDLTRYLRPLADEQQQWLAALVTRRRQLLTMLLSERQRLQITPKGLHPSIEAIVAAIKAQLDEIEAQMVSHVREHFGELDRLLQSASGIGPVASATLIAELPELGRLNRREIAALVGIAPMANDSGSSKGRRRIQGGRFDVRRVLYMAALTASRRNPAIKAFYERLLAAGKLPKVALVACMRKLLSTLNAMVRNNKPWVNSPHGA

SEQ ID NO: 287517 - protein, 385 aa, unidentified
MQSVTTAVATTARANSITLFASLELSKSKWVVTINSPGSDKFSRHVVEGGDGACLLDLLSRSRAKAEQRYGAQVTAIVIQEAGLDGFWIHRLLIANGIESHIVDAASIAVDRRHRRAKTDAIDGETLLRTLMAWARGERRVCSMVRAPRPEEEDRRRLTRERGTLLKERIQHTNRIKGLLSGQGVGDYNPLRRDRFERLEELRTGDGRELPPMLKGEIRRELDRIVLVTTQLAAVERARDTLIRAEAEERTNPAALLLKLKGMGPEFASLLWLESLFRSFGNRRQVAAYGGLAPSPWQSGGVERDQGISKSGNRRLRKTMIELAWFWLRHQPDSALSRWFQARVGSAKGRIRRIAIVALARKLLVALWRYVTQGVVPEGAVFKAA

SEQ ID NO: 287518 - protein, 316 aa, unidentified
MTAANVFIGIDVSKAHLDVAVRPTGDAFRVANDPEGLAELSARLAPLGPALVVLEATGGLEHPAAAALAAAGHHVAVVNPRQAHDFAKAIGRLAKTDRLDADTLALFAERVRPEPRPLPDAAARAFEALLGRRRQLVEMRAAEQNRLGSTTAASVRKSLQAHIDWLSRQLDKVEKELGQAIEASPVWRAKDELLQSIKGIGQTVARTLLAELPELGTLTRQQIAALAGLAPLNRDSGQRKGQRTIRGGRAEVRSLLYMAALSAARYNPALRAFSDRLKQAGKAVKVRLVAVARKLLTIANAVLRDGRPWEAGVAPR

SEQ ID NO: 287519 - protein, 379 aa, unidentified
MMENITHVALDDHKKRHQVAVLLPGMDREEATTWRIENTRAGIRKMVRKVLKMAPGDVRFCYEAGPNGYVLLRQISEFDRVSCVVVAPSKTPRRSGDRVKTDRRDAKKLVSLFRAGELKSIVPPLEEEEAVRDLCRCRRAAQRRVTASRHQVDKFLMRNGYVYRNGKNWTRRYREWLRSLKFDDWRRERTFQAYLFGIEQDEDRVKRLDLEILRAAEEEPYRTLVGLVRCFRGLDTLSAMILTSELYAIGRFTTAPSLMGFVGMVPSEDTTSWDPHRGPITKAGNEHVRRILVEAAKHYRHPARVSKALTQRRKGQPDWVIAIADKAQTRLHQKYWRLVMGKGKHPNVAAIAVARELVGFIWAILIQAATTANIEELVA

SEQ ID NO: 287520 - protein, 374 aa, unidentified
MNGSLTSFMLNPITALTEQVIDNKAQGTKKAKRIVLGIDVHLRGYQVASKEDNQAIGAVHNFGNQSEVWLWIEKLKRRVEPIEVVYEAGPLGYSLYRELSAQGISCRVCAPDSSVQKRRRRKTNAIDARELAGRLFNYLNGNQQALQLVRIPSIEQERRRLKSRQHDQLVKERKRLAAQGNSILLSQGWGSMKNWWRPRIFERLSQVVVPEITELLEVWLELLHRLDEKIQQAKAQQKRSQKGPRPKGLGAGSLEQLESELLDWKRFSNARKIACIAGMVPSEWSTGEGQRLGSITKVGLPAVRRILVEAVWRMKRLQPDYEPFKKWRAALEGKNAASKKKAVVAIARQLIVDLWRLKTGRVSAQELKLVMVGG

SEQ ID NO: 287521 - protein, 571 aa, unidentified
MLNASKLGGQQPGLMNRSVPCACNCMARSRRQGRTPLRPASPPNTIHQVIHHRPKAASKAGHREAVNNLAAATELIPGDSAAGSRFAAASIRSASTHPARVGSREPATLSARVQKSERTSPREGHRIRSTMNRVIPTSAAATKRKESKPMKTWQDITHFAGFDWAKDHHDVLVLDGAGKIVVEIRFDHTAAGWAICQEKLAQFPQVAIAVEAGHSAAIERLVALGHCVYPVHPRSSKSYRTRKLPSGTKTDHADCWALADALRLEGEGWRALTAPEPTVQQLRLLCRDEVALIEQRTALVNQLQQALYEYYPAALEAFDDWCAPSAWAFVEMFPTPQTLVQAGKRRWEKFLHTHKLFHPEWNKKRMEIFARADQFCGAAAMIAAKSELAVALAKVLRALEAQLTRYRSCIAECFKQHSDHALFASLPGAGPKLAPRMLAELIALRPLAENPQALQCLAGMAPVSYQSGKVSVVYLRHQCNRFLRHTIHLWVDLSRHYSDWARIYYEAHRKKGQSHACALRCLGMRWLKIIAAMMRNQTPYDAAIHTRNQLQHGSWVLKLQPVAIAKGKAGD

SEQ ID NO: 287522 - protein, 370 aa, unidentified
MSQSSTLYVGMDVHKESIAVAYVAKAHNAEVTFLGTIGTRQVDIDQLVRQLQSKAQHLVLVYEAGPWGYWLYRDLTKQGHLCSVVAPSLMPQKPGDRVKTDRRDAVQLARLRRSGELTPVYVPTVEDEAIRDRSRAREEALRDRKAAKCRLKAFLLRQDIRYTGAATWGPAHLRWLAEVVCPTPAQQIVFQAYVRAVTEHTERLGRLAQELQEQVTAWRLHPVVEALQALRGVQFTVAVTTVAELGDLTRFDNPRQLMSFLGRIPSEYSSGERRRQGSLTKAGNTHARRALVAGAWAYRYPAKVSRHIQLRLEEQPKAIQAISWKAQVRLCKRFRRLMACGKNANQVVVAIARELVGCRWAIAKQVPVTR

SEQ ID NO: 287523 - protein, 392 aa, unidentified
MVVSVGIDVSKDKHDCFILNSEGEILSDVFTIPNSLDGFTILLQRIRDCSSSQDNIKVGLEATGHYSYNILGFLLDNGLPTYVLNPLRTNLYRKSLSLRKTKTDRVDARTIAAMLLSDAGLKPYTDTVYHNEELKSLTRYRFDKVKERAKLKSSVSRLVCILFPELEKLTPTLHMPSVYALLDEFPGAKQIAEANLTHLKAILHNASKGRYNRDKAIEIRESARASIGAVMSAKSLELRHTIRLIRELDAEIEDIEAAIQSIMNEMHSPITTIPGIGTRMGAMILAEVGDFSRFDSPDKLLAYAGMSPSTYQSGQLKNCYPHMEKRGSRYLRYALYNATKYVCLWAPTFAAYLAKKRAEGKHYNIALSHAAKKLVRLIFAMEKSRQPYCSAT

SEQ ID NO: 287524 - protein, 320 aa, unidentified
MQSPSAVLNIGADVAKDAIMVACSEGSFPVREVANQRPAVLAFLKGLPAGSRIGVESTGTHHELFADAAHQLGFLVFLLNPKDTHHYAKAVGLRGKTDRVDAELIARMIAHEHTQLHVWNPPTPQQREIDRLIKRRATLISLREAVEMSLHGLGGFADELKALRTHFNQLIARIDLRTKALVEASPDRKQNFTRVCTITGVGPVIGTALVNTLERVPVKSADAFVAFTGLDPRPDDSGQHRGKRRLSKRGPGELRRLLFLAAMSAAKTKTWRPLYEHYRAKGLSGTAALVVLARRIARTAWSIYTHKTEFDPARLMKPLT

SEQ ID NO: 287525 - protein, 423 aa, unidentified
MRFIGLDVHRDFCEVAIAEGGEVRLAGRVQTGPAALALFAQSLGVDDQVALEATGNALGIARIIEPHVGRVVLANPKAVKGITRAGAKTDKIDARTLAKLLAGGFLPAVWLPDEQTRVLRRRISARAQLVRQRTRAKNQVHATLVRNLKGKPPVSDLFGVRGRRWLAAQELPVDEQETVAACLRQIEFLDRELALVERALAKQVLASTEMRRLLTLPGVNFVTAAALLAAIGEIGRFPSARQLVSYLGLDPRVSQSGSEPARHGRISKQGPGETRHELVEAAWHASRAPGPLHAFHQRVAARRGGNIATVAVARKLAVIAWHMLSHSEDYAFARPSLTREKIRKLELATGAERQKGKRIGVWVTREQHQLDKELAAQAELAYRRLVQDWQPAIKSTGAAPGRASHRPSSGQAARQETAPPPAL

SEQ ID NO: 287526 - protein, 391 aa, unidentified
MVCVGIDVAKDKHDCCILDSDGMVRADCFTIPNNMDGFKQLLQTIRNCTKKSDKIKVGLEATGHYSYNILGFLLDNDLAVYVMNPLHTNLYRKSLSLRKTKTDRVDARTIATMLLSDVDLKSYTDIAYHNEELKSLTRYRFDKVQECAKLKQSVSRLATILFPELEGLVSSIHGTSIYALLSEYPGAKQISEVHLTKLTNLLTTASKGRYGKEKAIQIREAARASIGSVMPAKSLELKHTIKLIQELASEINEIEDSIQKIIDELNPPILSIPGMGVNSAAVILAEIGDFSNFSSPDKILAYAGCSPSTYQSGKLTNCYAHMEKRGSRYLRHALYNATKYVCYWNPVFAEYLAKKRAEGKHYNVALSHAMKKLVRLIYALQKSGKTYLTAA

SEQ ID NO: 287527 - protein, 358 aa, unidentified
MNRNTGMSAGQIIGTVNGMQVIGLDIAKHVFQLHTVDMGTGEIVNVQIKRAKVLEHFANKQPCLIAIEACGGAHHWARELSAQGHSVRLLHAKIVRPFVSGNKTDATDARAIWLAVQQPGVKFVGIKTAAQQATLTLHRQRELLMKMRTMQTNALRGLLYEFGVTFVQGQKALFKDIEQTLEELAVQLPQMLRDSLREQVARIKAMSEDMLAIEKRLGLQLKADPQMQRIAQIPGVGLLTATAAIATMGEASAFKSGREFCAWLGLVPKQTGTGGKVRLGGISKRGDTYMRTLLIHGARSVLAHAKERGPWLEQIKARRPASVVIVAQAAKMARTIWAVTAKDQDYQRGFKSVRPLAA

SEQ ID NO: 287528 - protein, 344 aa, unidentified
MTYYTGIDVSLRSVSICVIDDKGEVRLEAKVAADVDAIVDRLRRFSADVTTVGFEAGTLTQYLTYGLQAAGFEVICLEARQVSLSLAAMRNKTDRNDARGLAQILRTGWYRRVHVKSLHSHQVRALLASRKAILKKFVDLENELRGLLKVFGIRLPSRVGHGSFDAELRETVSSDEMLACALVPLLDARTVLYKTYLKLDNAVKALVRVDPICQRLMSIPGIGPVTALTFKAAVDDPSRFKSSRTVAAHFGLTPRRFQSGELDNPGHISRAGDADVRSTLYIAAHSLLTRNAQWSTLKAWGVRLAKTRGHRRAVIAVARKLAVILHRMWVDGSEFRWGAAETPA

SEQ ID NO: 287529 - protein, 296 aa, unidentified
MMIIGCDLHTRYQQIAMLDTETGELVERRLEHGSGEARAFYAALVGGVRVGIEATGHTHWFEAMLAELGHELWMGDAAKIRAAVVRKQKTDARDAAHLLELLCSERFPKIWRPSWAERDLRQLVWHRQKLVWMRGAVKNQMHALAMGEGVCRKKKLFTAKGRQELEALALGPWASYRRQELLRLFDELQASVARLDQAVEQAAKSQALTARLMTHPGVGPVTSLAFVLIIGPVERFAGSRKVVSYLGLNPQEHSSGGKQRLGSISKQGNPMMRSLLVEAGPPRRVSIRSCGGYIND

SEQ ID NO: 287530 - protein, 388 aa, unidentified
MHVVAAQSEAAIAIRTDLCATFVSLELSRSTWLLTSLSPGAGEKMSKHSVSAGDTAGLFSRFVELQQKARTRTGRTFPIITIQEAGLDGFWIHRLLQGEGIESWVVDPASVLTSRRRRRAKTDKIDGETLVRTLLAYKRGEPRVCAMVKAPTPEEEDRRRICRERKTLTAERVRHVNRIKGLLFAQGVGDYEPLRRNRRGRLEELATGDGRPLPEHLKAQISRELDRLEVILAQLKAVGSERDAMLEPAKEGPPTPASLLAQLKGIGPEFAAVLWSEGLFRSFNNRRQVAAYAGLAPTPWQSGSVAHEQGVSKAGNPRLRTTMIQLAWLWLRHQPGSALSIWFRERVQRNGGRSKKTAIVAMARKLLVALWKYAVHGILIDGTTAKAA

SEQ ID NO: 287531 - protein, 351 aa, unidentified
MSNPKNRCRFVGIDLHKESMTICVYEPIAQEVSYRKIACRHREQIVEFFRSLPRPYMAAIETVGFYRWLWELLEPMVGKEYLRLADAMAVRALAGRRLKTDREDAFHVAELLAHGRLPMAYAPPAEVQELRDWTRRRNHLARQHARVLHWVRAVMHLNNRPGPRRLRSTGLIRYLRAHEAELPARHVRQLGDCVEQLALIERQMEAAEREIQRLVGQPRFQRTAQILASFPGVGMVTIATVLAEVGDFSRFGQAKAIARYAGLDPRVFASGGKQRQGHISKTGPSDLRWILQQAAWTAIRVDPAVRGLWQKIARRCGRKAAAVAIARKMLVWMWSAVCRGRPYRPLGQKTS

SEQ ID NO: 287532 - protein, 397 aa, unidentified
MIAVGIDVSKGKSTVAIISSYGEIIMKPTDFHHNNPSMQQLTSTLLNFDDEVRVVMEATGHYHQPILKALLEANLFVSVVNPYIIKKYADNDIRKGKTDKKDAMRIAWYALEKQHTLTSYSITEERYDTLKFLSRQYKQCVSMRVKGRVQLHNLLDEIMPGIQNIITSQTENPDNNFFYKFVMKYGSYDKIKAMSEGRFINSYVKLAYKSKARCPEAKALKVYEAAKRSITTRPFDTSTQIVLTEYISLLKQTEISCNTLMKQMQSIAYTMPEYRILLAMDGVGFRIAPILIAEIGDVRRFKNAKALNAYAGNDAPPYQSGQYESQNRHISKRGSSELRKACYEVMQSLKLHQKVDNPIYQYMLKKEAEGKPKDVAKMAGVNKFLRIYYARVMELYK

SEQ ID NO: 287533 - protein, 348 aa, unidentified
MSKNGQYVGLDVSLNETSICVIDDAGKTVWRGKTDSTPRAIATAVTQHAPRAVRVGLESGQLSNWLFHELKHMGLPVICVDARHAKAALSLKVNKTDANDALGLAQIMRVGWYREVMVKGLDCQALRALLVARAQIVSQITTLKNCVRGILKTFGRVLPKGLRSQFAERVRMAIDGHPVLGAIIEPTLKVLEAMRVQLLVYDRAITRRARDDETARQLMSAPGVGTVVAIAYMTAIEDPARFRRSSSVAAYLGMTPRRYQSGEIDHGGRISKCGDGMVRSLLFEAAKVLLSRSARPSVLKTWGKTIGKRIGAKKATMAVARKLAVILHRMWTTGTTFKWDAQVPPRHA

SEQ ID NO: 287534 - protein, 351 aa, unidentified
MVVVIGADVHKATHTLVAVDEVGKVLGQGVFAARREGHLQALGWARRSFNDAELVWAVEDCRHLTGLLERDLLAAGQQVVRVSPKLMGTARRAGREHGKSDPIDATAVARAAQAHPDLPIARHDEASRELKLLVDRREDLVGERTRMINRLRWHLHEIDPDLAPPVGSLDRAVVVARLREQLVVLDGLVAQIAVEVLDDIAIRSAQIRALERRITIAVQRTAPVLLELVGCGPLTAAKIVGETAGIDRFTSEAAYAMFTGTAPIPVWSGATAGRVRLNRAGNRQLNAALHRIAITQVRLGGPGREYYDKKRAAGKTSTETYRCLRRQLARTVYNTLNHGQATHQGALPAAA

SEQ ID NO: 287535 - protein, 344 aa, unidentified
MDNHTQYLGFAGVDLAKKVMQIHFVTEDGEITDKSAKRAEFLDFFRNRGKCLIGMEACGSSQDWARKLEAMGHEVHLMSPKAVKPFVSGQKNDHNDAIGIYKAMFNGVRRVPVKSTEIRDLQTLRRIRSQVTKNKVKEINHVRGLLAEYGIVMGKSLNAFNKDISSALEILTERGDVSPLVAEELRTTVEAIKAKIERQKKLDQEIEQLARGCKNYENFLKTPGVGPFTAAMLCVLLCDPSIFANGRQFAAYIGLAPRSRGSGGKNYVTGIPSKFNCDSESRAVLVECAQAIARCKNKSLWVEEILRRKPKKVALIAIANKLARQVWAMANKGESFKQMVVLTA

SEQ ID NO: 287536 - protein, 339 aa, unidentified
MKLYCGIDLHSNNSVISIIDESDRLIAERRLGNDLGLIVGFLGPFQDALVGVVVESTYNWYWLVDGLMDAGYPLHLANPAAVVQYSGLKHTDDRWDARWLANLLRLGILAEGYIYPKASRGVRDLLRKRAQLVSQRTANLLSVQNQVTRETGRHISANEIKKLLHERARQWPSDTPFGLAVAANLEVLRSLDEQVERLERAVLAKARLDRRYTHLLSVPGIGKVLGLTIMLETGEIARFDKPGNFASYCRCVDARRISNAKRKGANNAKNGNRYLAWAFVEAANFAVRYDPRIKRFYTRKRATRNGSVAIKAVAHKLARAAFYIMRDGVDYDPHKAFAS

SEQ ID NO: 287537 - protein, 357 aa, unidentified
MLADELDYVIGVDPHRDAHAFAVIDVPSGGVVFEATAVADGEGYASVLGLADQHAPGRRVFAVEGTGSFGAGLARFLVSQEERVLEVGRLRRERQSGKSDALDAIRAARSVLGQTQPAGPRAGGEREALRALTAAREGAVTARRAGLCQLRGLLVSAPEPLRAELRSLSRARLLRRLAAVRPERCQDPELRGMLLALRALARRVKALTVEERELAREIETLTRKLAPQLLDQPGVGPLAAAQVLISWSHRGRIRSEAAFARLAGCAPIPASSGQTIRYRLDRSGDRRLNRALHMILVTRRRAHAPTIAYIDRRIQEGKSRREANPLPQALPRPQPLPATRTRTATGDLTDIEASLGH

SEQ ID NO: 287538 - protein, 419 aa, unidentified
MAFKIFRFNCCGLDVHKTWIFACIGITDANGRTEYKQKRFSSFSRGLRELAAWLASYNCADVCMESTGKYWIPVFNILEKTCHVILAHPKYTKPQKGNKTDRKDAKWICDLFMCEMIKPSFIPPARIRHLRDLVRYRLKLVNMLTGEKNRAQNCLTVSNLKLDDVFSDAFGKSSRSITEYILAHPGETFDVSPFVDSRCKSPIEEIQAAVDGAISSEQAVKLRQCLNHIDELENHKEKMEREILRFSDPYLDTLNLIRTVPGLGKNPFTAIQILSEIGDNMSVFPTDQHLVSWAGCCPRNDQSSFKIKSTRISRSGSYLKPVLVQVANALIKSKKHPEITERYRRIKSRRGHKKAIIAICRMLLTAIWHILTDSKPYTAEGYLSPRPVKIEKILTASQALNLLKLRGYVIKDDLPVTAS

SEQ ID NO: 287539 - protein, 341 aa, unidentified
MSIITVGIDLAKNVFAVHGVDDNGKPALVKPKVSREHLLPLIAQLPPCVIGMEACSGAHYWARQFRQHGHTVRLMAPKFVTPYRMSGKRGKNDAADAAAICEAVTRPHMRFVPIKEEHQQIILCLHRTRNGFVEERTATYNRLRGLISGIRHRPVRRRSPTCDALMEHLEDLPGYVNPCVGDLLAHADSLDARIAEYDRVIAKAAKEDARSKRLMQPAGHRPDHGQRHAGQHWRRPRLQNGRQVAAWMGLAPGQYSSGGTARLGRITKAGDSYLRSLLVMGARAILSGLGDKQDRFSRWARSLVERRGYWKAVVAIAAKNARLAWAVLRFGEDFRLQPVAA

SEQ ID NO: 287540 - protein, 326 aa, unidentified
MNKIIGIDVSKQTFDVSFREEQKVVHKVYANSEKGFKAFKLQIGHLKETRAIMEASGPYYVSLASYLHAHEIGVSVVNPLKIKRFAQMKFYRAKTDKKDSTMIMEYGEAELESLAIWRPEGKGVQFLKQMRAAVELLQKQLVQSKNQLGAFKSSGLMDKDVEKGLKKVIIATEKAIKDIETRMLGVCETHYGETLELLTSIPSIGNKTAMMLIATTDNFSKFEHYKQLIAYVGLAPRVYQSGTSVNGKGHICKMGKALMRKLLYMCSWTAKQYNKTCREMYERLKAKGKPERVIKVAIANKLLKQAFAVVTSKQKYIENYQPNICF

SEQ ID NO: 287541 - protein, 334 aa, unidentified
MTHDSSQLVSPLFAGIDVAKDTLDLARSDSGELLTFPNDAHGIGRIVALLAAARPARIVVESSGGLERPLLEALLDVALPVALVNPGRVRHFAIGIGCGGRSPVRILAKTDAIDASVLMEFARLAEPRLAQKRSENQAELDALITCRRQLTAARTEQANCRLSTRSASAQKSIDAVLKTLDKQIELLDEKIRKLIDSDDDFKHLDGLLRSAPGVGPVLSSTLLGELHELGDTDRRQIGALVGVAPFNHDSGTLRGKRSIRGGRTQVRCVLYMATLAAIRFNPVLRNFAQRLGRTGKASKTIIVACMRKLLTLLNAMVRDNLTWPELRVVKALDL

SEQ ID NO: 287542 - protein, 353 aa, unidentified
MSEKYVGMDVHQSSLVIEVMNDKGACQMQTIIPARAEAVREFFSGLKGKVRVVFEEGTMAEWLYGLLRPLVAEVVVCNPRRNKLLTTGNHGDKIDAHNLAELLRLGSVKPVYHEHQGLQVLKELVHNYDALTRDRTRVMNRIKALYRGRGIPCAGNDVYYKRNRELWLSKLVEEGRRQRAGFFYQQLDHLTELCREARRAMLVEARRHAACKILRQISVLGPVRTAQIMAAVVTPHRFRTKRQFWPYVGLGVVTHTSSEYEFTDGRVQRRKKVVGTRGLNDNYSHRLKYVFKSAAIDGMRREPFQGYYATLLDKGMRPEMARLTLARKIAAITLAIWKTGQRFDAARLSAAAG

SEQ ID NO: 287543 - protein, 413 aa, unidentified
MPVPEALFYVGIDWATETHAICVLTAAGRIKAQFMIDHTASGFADLLRRLGRLTGNPGDVPIGIERPDGRLVDALLEAGFPVVPVSPNAIKTWRDGEVLSGAKSDAGDATVIAEYLRLRAHHLRPATPYSGQTKALRTVVRTRDDVVDMRVAATNQLSALLDAHWPGAKAIFADVESAISLAFLTRYPTYPSAEHLGEKRLRAFCVKHGYSGRRSAAELLTRLRAAPAGSTDEALTDAVRDAVLAQVAVLTALTAAEKNLDRSVVAHLGEHPDAAIFTSLPRSGQINAAQVLAEWGDSRAAYDHPDAVAALAGVSPVTKASGKYRAVHFRWACNKRLRKAITCFADNSRHASPWAAKVYADAIARGHDHPHAVRVLARAWIRVIYRCWNDGVPYDPNNHGNASKLLEIAAAAA

SEQ ID NO: 287544 - protein, 321 aa, unidentified
MKVWVGIDVSKASLDAAVLKGTQREHACFSNDTDGYIKLQRWLKKQGRSLQVCLEATGSYGEGVAEFLFEAGYTVSVVNPARIKGYADSQMSRNKTDKLDAYLIADFCRTQQPEPWSPPAPELRELTALVRHLEDLQQTRSQIVNRLSVARTTTIKSQLQAQLVLLDEQIKQTKRAINDHINHYPDLKQQRDLLASIPGIGDLTAGKLLAEWRSIAQFKRPAQLVAFAGLNPRQHTSGTSVHKATHISKCGRASLRAALYLPAVVAKQHNPILARFASRLQLRGLSGKSLIVAIMRKLLHLVYGVLKSGKPFDPNFALPSS

SEQ ID NO: 287545 - protein, 322 aa, unidentified
MEALAKCCAGLDVHKALVVCTLLKECPTGEIVKETREYSTFRIELERLAKWLKDAEVELVVMESTGIYWKTVYETLEDSEVKTFVVNARHVKNVPGRKTAVPTGRQDVGDSEWLAELARCGLLRASFIPPRDFRQLRLLTRYRRKLSGYLAGEKNRINKVLDDGGVRLGCVVSDIDGVSARNMIKALIEGQEMPKEIAELAVGRLKAKKPEIMMALEGRLSDRHRFLLSRIQSHIVWLEKQIKEIDGQVVAAMKPYRKELGLLQTIPGIDKNSAAMLLAEIGVDMSRFGNKDRLSSWAGMCPGNNESAGKKRVVAPVKGMCM

SEQ ID NO: 287546 - protein, 353 aa, unidentified
MQHFIGCDIHTRNQVVAWIEEETGEIKKRRLQHEGEEVKAFYAQFPSGTVVGIEATFPTYWFERLMGDLGHELWVGDAARIRASEVRYQKTDRRDAGDILDLLRTGRFPRIWVPSLEDRDLRQLLVHRMKVVRARTQVKNQLHALAISQGVCRGRKLWSAKGRKELESLTLMPWAARRRKDLLESLDRRDEQVRELDRAVEEAGRARPEVALLRTHPGVGMVVALAFVLTVGPVERFPHSRQLVSYLGLNPREDSTGGRQRLGSISKQGNTMMRWLLIEAAQTAARFDPQLRRLYQRLKRQRNNSGVAKVAVARRLVVRLFWMLRTRNNYAQLVPMSGSPSSAVVPPPSGPTV

SEQ ID NO: 287547 - protein, 347 aa, unidentified
MNSVGIDLHRNRSHVAVIDGQGELSLSRRIVNSRETFLELLGELEGESRIAVEATYGWEWLAELLEDAGYEIHLAHPLRTRAIAAARVKTDAVDAKTLAHLLRADLLPEAYVAPRELRDLRELLRHRIALTGMRSALKNRVHAILAKHGITRQHSDLFGPGGRRFLSEVRLREAPRRRLDSLLALIDDFDREIEATTKEIEQRAKADDRVDVLTQIRGVGRYTAMLIIAEVGEIERFPDARHLCAWAGLTPTVRSSDGKARLGRISRQGSPALRWALVEAAQKCTTGGGPLRESFERISKRRGRKIAKVAVARQILTLSYYRLRDGEIRCLARRSRASAKEKLAVAR

SEQ ID NO: 287548 - protein, 344 aa, unidentified
MDTIGLDLHKRESQLCTGHDDGAVEERRIATTRERFTEVLGGRPRARILLEASTESEWVARHLASLGHEVIVADPNFAPMYATRSRRTKTDRRDARTLMEACRLGAYRVAHRLSDARRHVRAELAVREALVRTRTRYIALAKALVRRDGLRVPPSESHLVAQRITALELSASLAGELLPLFELLAPLNEQIAAADRRIAMLTNDDAAVGLLTTAPSIGPITAAAIVATIDDVTRFRSAHQFEAFLGVVPGERSSGEKRRVGRITKAGNARARYLLVEAGWRILRAKDTETAALRAWALGIAARRGKRVAVVALARRLAGILYAMWRDQRPYDAAQLRLPRSRAA

SEQ ID NO: 287549 - protein, 438 aa, unidentified
MSNKVIFNLDELFISVGIDVGADFSWMSIALPNQQFVGKPYKILHNSIDSLTTAVSKIKEAEELYSLESRIFLESTGIYHYPLFCYLRDKGFNCSVINPIITKNSTNINIRKVHNDRFDSKKAALVGLKPDLKVSLMPSDLALNCRNLCREYFDLMDNRSAYVNKLQGELRMAFPQYLGIFSKVTINTSLTLLETYTSPSAFLKADKQEIIDIIRSTARFGLTYAQNKYNAIIQAATDANQFGYIIDSNIKRIRLYISFIRKYDEEINSILELLHELVDANEDADFVKQIHLIETFKGAGFLSAVSIMGEIGDFSAFSKPKQLFAYFGLDPAVKQSGKFEGTKVQMSKRGSAIARRVIHTLTLQSISISRNGEAKNSVLREYYLKKCDSKPKLVAMGAVSHKVCNMIFAILRDNKPFKIIAPQEHIKQYNAAKCDIAA

SEQ ID NO: 287550 - protein, 485 aa, unidentified
MGTTVEFEAVHIPSCGLDVHKDKIDAWRRARMGTTVEFEAVHIPSCGLDVHKDKIDACIIDEGGEKHQRAFDTMRESLYALRDWIVSLECFHVLMESTSVYWMPIYEVLEEVPRMDVGVGNARQMKNVPGRPKTDKADSNWIARLCMVGFILKSFVVGRKFRELREYTRYHKKLVQERARQVNRIEKLLQMNGFKLSSVLSDITGASGLRLMKKLCNTGCVTLADVTDSLDRRVKKRPEEIERAINGRMKLTSRHLLRKMLSKLVRCEKETEEIYEMMVKLSKEHKPQIMLIDSIPGLGELSAMYIIAEISTDLSSFKTANHITAWAGLAPKDKESAGKLKYSKTQKANIYIKSVLVECAWAAIKKRNTRLSNWYWSNVKRLGEKKAIIAVARKLLVYIYAMLKSGELYDDSLDVADTTKRKAEKLDSARKIVEHQSCKLNTQEHPVDVTKESTTDRHNPANEMPDVVGKLDSPKKRQITQNGKY

SEQ ID NO: 287551 - protein, 344 aa, unidentified
MDYYAGLDVSLRSCALCIVDAKGTVLLERELPCEVSDIAVCLASFPQPIERVGFEAGTMSQHLFHGLKAEGFDVVCMEARQVNAALSAMRNKTDRTDARGIAQVLRTGWFSPVHMKSREAHGVRALLSTRKALLKKTMDLANEVRGLLKIFGIRLPMTVKHGSFDGLVRPLIEMDDVLAHALVPLLDARVVLYQHFLELDRRVKRAASHDEVCMRMMTVPGVGPIASLTFKAAVDDPTRFKRSRTVGAHFGLTPRRYQSGEHDNPGRISKAGDRDVRATLYAAANALLMRTMAGSQIKSWGMRLIRTKGRRRAVVAVARKLAVLLHRMWTDGTEFRQDQVGGTV

SEQ ID NO: 287552 - protein, 373 aa, unidentified
MGEDRTVCVGLDTHKAKIAVAVAEPGRSGEVRFHGEIANQPDAVRRLIERLADKHGQLRVCYEAGPCGYGLQRQVTALGHDCTVVAPSLVPRKPGDRVKTNRRDAVTLARLHRAGELTAVWVPDPTHEAMRDLVRARTAAMETVRRARQQLQGFLLRHDRVFTGRKAWSPAHRRWLAGLRFAHPAQQIVLQEQIDAIEEAERRRDRLGQQIRELVPDWSLAPVVTALQAMRGIAFLSAVVLAAEVGDFRRFATPRQLMAWLGLVPSEHSSGSKVERGGITKAGNGRARRVLVEGAWSYRFPARVTSLIEARLDGVSDAVRAIAWKAQVRLCARFRRLVAKGKNVNLVTTAVAREMAAFAWAIACQVQPKGAAA

SEQ ID NO: 287553 - protein, 345 aa, unidentified
MSKVTTVGIDLAKNTFVLFGLGPKGYSGWKRKVRRKQLLEQLVRLEPCVVALEACGSSHYWARQIRALGHQVELLPPQHVKGYLRGQKNDYNDAQAIAEASEHGRIRPVPIKDIEQQDDQMLHKLRQGVSKDRIRISNQLRGLLAEYGVIIPQGVAALRRELPRALEDADNELSERARQLLHRQYQRFLEVEQELAWYDRQVKQMSEQDETCRRLRAVPGIGEVVASLLKGWMGDGRQFRRGRDAAAALGLIPRQNSTGGKDVLLGISKRGDPYVRAQLVHGARAVVARADGKTDRLSRWIQRLKAERGFNKATVALANKLVRIAWVIIARGEHYQPSEQRLVYE

SEQ ID NO: 287554 - protein, 407 aa, unidentified
MDKVNPRCAGLDIHKDSVWAAARIDGRQTIEKFGTSSRELLRLSDWLAEQGVTIVAMESTGVYWKPVWNLLEDRFKVMLVNAQHIKQVPGRKTDVADCAWIGQLLEHGLLKASFVPERPLRELRDLTRQRTQLLGDRARVINRVEKTLEDANIKLASVATKIMGKSGRAILDALVEGKLSPEAMAELVHPRMNAKKPAMREALAGRMGDHHRFMLGQLLGQIDELARRIESFDARIEAVMSPLELDAVKRLDAVPGFDKRTAQNVIAEIGTDMSRFATPHHLASWAGICPGNHESAGKRKSGRTRKANHWLKGALTQAAWGAGRTKRSYFSAQHARLTVRSGAKRATIAVAHSLLVTVHCLLSRSTEYTDLRADYFERQKQSAEVQAQKMVEKLKRLGYNVELQRAA

SEQ ID NO: 287555 - protein, 310 aa, unidentified
MDMIMQNYVGCDISKQWLDFFDETSGHCQRIDNQADAIAAYVAGLEPGRDFVVMEATGVHDRLLRHALAKAGVAFSRHNPAHTHHYAKSTRRRAKTDRLDARMLSGYGRRYHPEAEPAPREQGEHLQSLARHRDQLVDIRAKLKKLRTEAFDEIVIAELEELIATFNTRIKGIEGQIAEAIHQTENTARDNALMISVPGVSKVTAFSLLAHLPELGLRSPKSIAALAGLAPFDNKSGKLNRRSQIQGGRSRVRRALYMAALGAIRACERFRAFYSAIAARSGSKKLAIIAVARKLLVVLNAIIRDKKAFA

SEQ ID NO: 287556 - protein, 426 aa, unidentified
MNRQEAIVAWVGIDWADESHQVCEYEVGTGNKQIYAVEQNAESLQEWINQLRIRHGGGKRIAVVLEQARGGLIYALMSTDFIEIYPVNPQSLAKFRKALYPSGAKSDPVDAELLEEMVRQNPGRFRAWVPGDAQTRSLQLLTEGRRKFVDDMTALTNQLTSALKTYYPQALDWAGVLSREQACAFLEKWPTLSDLQKTRAFRIREFYQKYSRPEREALDQRVRQIEKAQPLTQAPAVVMAGVMMVRTLVGQIEPLRAAVEKYDVEIARIFQQHPDRAVFESFPGAGKVLAPRLTAAFGADRDRFEAALEIQEFSGIAPVTERSGKTIWVHRRWACPKFVLQTFHEFADQARKFCAWSKLYYQQQRAHGKEHHAAVRALAYKWIRIMFRCWKDHKPYDDSRYMKSLVQRGSPLAAGWSQQPVRSVEI

SEQ ID NO: 287557 - protein, 389 aa, unidentified
MKPNSQMTLDRYFRQCVGIDVSKDKFTACLQMYDKASDEGCHTMSIDFDNTKSGFNQFVKWSRKEAIKGFPLTYIMEPTGVYYERLAYHLYKIGQTVYVVLPNKARKFCEAEGIKTKTDAMDARCLALMGCVSRKLKPWSPPAAIYRELRQMTRFHADLCEIRTGVSNRMEALEHMEGVNKSVVGNCRKLIDKIDKLMEDNGKAMMQKVAEDKNLETRVKRIATVKGIGEPTIVCVIAETQGFHLIENRKQLVSYSGLDVKARQSGNDDPRHVISKKGNAHIRAALYMPALTAVRHNPQIKAAYGRICQKHPSEKMIGVTAAMRRLLLLIYTLWKNGEVYDPTRDKTHTHQKRKKEENMELEYGPEECIGTNREPIDWNASNEDGNPPF

SEQ ID NO: 287558 - protein, 394 aa, unidentified
MKTKLFAGIDVGKDKHRIVVKDENYKITESFEFKTDYKGFGKLERRIPVAAVIGLEATNEYDKPLVSFLRAKGYEVYVFNPRKTKNFAKINHIATKTDKVDAKMLADFMVMGLHKTQMQAVNKYPEIKQLTRARLKLLNDQNKYKQRVLNRLYVIFPEYEHLFSENFGVTFTRLLEKYTYPENFSSLDAEKLGKEMIKISKGILREDRAEKIIAAAKKSIGIRNEVDGYIEEIRINLKYIQELEKDVKRLDRKIRERMMDVDQKLTTIKGINVSLAATIISEIGDIEKFKNRRALFNFTGMVPGIKQTGKYERNRNHMSKHGSKYLRTAIWQAAISCINHNKVFRMYFIKKHSIDKKQKMTAVGAVCRKLTYQIYRIMKYDEGFDMEKAVQVSI

SEQ ID NO: 287559 - protein, 400 aa, unidentified
MLDTGDIDVFLGLDVGKGEHHATAVTPAGKKAFDKRLPNTEPRLRELFAKLQAKHGTVLVVVDQPASIGALPLAVARDMGCPVAYLPGLTMRRIADLYPGEAKTDARDAFVIADAARAMPHTLRAIDGEDETIAELEMIVGFDDDLAGEATRVTNRLHGLLTQIHPSLERVLGPRLQHPAVLTLLERFGSPAQIRKAGRRRLVTLLRPKAPRMAERLVEEIFTALDEQTVTVPGTEAAALMVPSLAASLTAVLDQRKLLAGRIEELLEDHPLSKVLTSMPGVGVRTGARILIEVGDGRTFPTAGHLAAYAGLAPATRSSGSSIRGEQPSRRGNKQLKRAFFLSAFAALGDPASRVYYDKKIAQGKHHTQALLCLARRRADVLFAMLRDGTFYELRPAAAR

SEQ ID NO: 287560 - protein, 323 aa, unidentified
MTALDSTGRSVKAGPVDNRPAALRTWFQGFSEPVQVAVEACSFWPAFQEAIEHQVGQIHLVHPQRVKAIASAKLKNDRVDSATLAHLLRCNLLPPAWMADRQTRERRQRVRLRISLGQHRAGLKNQVHAILHQHGRRCESSDVFGKKGRAWLEQVELPPAARAALDTYCALIDEVSGHITEQQREIGLLAKADARAQWLATIPGIGVYSAMILLSEIGEVQRFSNAKALFSYAGLVPWVRESAGKKTRGGISRCGSPRLRWVMVEAAHTAVRCSPAAKSYFEKLRQRKHPHVARVALARKLLGAVYALLRDGVAFDESIFAAV

SEQ ID NO: 287561 - protein, 323 aa, unidentified
MDNHTQYLGFAGVDLAKKVMQIHFVTEDGEITDKSAKRAEFLDFFRNRGKCLIGMEACGSSQDWARKLEAMGHEVHLMSPKAVKPFVSGQKNDHNDAIGIYKAMFNGVRRVPVKSTEIRDLQTLRRIRSQVTKDKVKEINHVRGLLAEYGIVMGKSLNAFNKDISSALEILTERGDVSPLVAEELRTTVEAIKAKIERQKKLDQEIEQLARGCKNYENFLKTPGVGPFTAAMLCVLLCDPSIFANGRQFAAYIGLAPRSRGSGGKNYVTGIPSKFNCDSESRAVLVECAQAIARCKNKSLWVEEILRRKPKEPLHKRWVICYN

SEQ ID NO: 287562 - protein, 362 aa, unidentified
MTSMTDERLVNTGGGCVGGVDTHGLTHHAAVVDGVGRHLADRQFPATARGYRALVAWMRCQAGARGVTVVGVEGTGAYGAQLTRALTAAGITVVEVDRPDRKTRRLRGKSDPVDAYAAAAAVLSGRARGVPKERDGVVEAIRVLRVARRSAIKARTQVINQMRALLVTAPAVLRERLTGLGRGVLVDKLARSRPGSELSDPVVATRWALRRLARHHQVLDIEVVELDAQLGVLVARAAPAVVELNGVGTDTAGQLLVTAGGNPDRMRSEAAFAHLVGAAPIPASSGRVHRHRLNRGGDRQANNALYVITLSRMRHDPRTQTYVQRRTHEGLSKREIIRCLKRYIAREIYRALTNPPPPTAIT

SEQ ID NO: 287563 - protein, 428 aa, unidentified
MVRWFAGIDWGDTAHHIVIIDAAAQITATFRVAHTADGIHQLLTRLTQVLGDQDPATLACMVETSYGLLVTALVDRGFYVYPVNPKTVDRQRPASGLKTDQVDAYLLAKYGRSEFLDLRRLTPENPLIRELRLLTRDQDSLIQEQTRVVNHLTACLKSYFPVALTLFTHLQQRSTLAFLTAYPTLEHAQAATIPEIVATLKDAGSRRAVQFAPRIHRRLHAAQLLADAATIRAKSQLTVALVAQLGMLMTQIAHYDAVITRLFDSHGDHTIFQSLPGAKKRIAPRLLAEIGDDRQRYAHAGGLQAIAGTAPVLIQSGNSAKVRTRTACVKPLRNAMYQFAWLASMQDPWSAAYYQRKRREGKSHTMAVRALANTWLRIIFALWQQHARYDPAIFEAAQQQHAKRTIPSPAPARGVKAPSELAAPVILT

SEQ ID NO: 287564 - protein, 332 aa, unidentified
MSHGSVLASSPSAIIVGVDTHKYVHVAVAIDLLGTRLAHCSVSADRVGYAELVAWARTLGAIEAFGIEGTGSYGVGLASFVRRQALRVVEVSHCDRRKRRNNGKSDTMDAETAARSVLAGIATAVPKAADGAAEMVRQIKVARDTAVKARSAAIITLKALIVNAPGELREALEPLTDRKLIDRCARLLPGVIDDTTASTKHALRALATRWLTLSTEIAVHDAALDAITQVAAPTLRAAFGIGADSAAEMMIVAGDNPTRVRSEAAFAKLCGSCPIPASSGLTNRHRLFRGGHRQANAALYRIVTVRMRWHQPTIDYVTRRTAEGLSKRDIIR

SEQ ID NO: 287565 - protein, 320 aa, unidentified
MSNIVQICTVGIDVSKDSLDLAVRPSGEHWSIKHDPLEFPALVEKLTQLAPSRIVMEATGGLETLVATHLATAGLPVCIINPRQARDFAKATGQLAKTDLVDAHLLAHFGEALQPQLRELPSSEAQLFEALLTRRRQLVQMRTAEMNRLATSGHLRKIAKGLEAHITWLNKQISKCDDELKTALQASPVWRTNDQLLRSVPGIGQVVSRTLLAELPELGRLSSKKIAALVGVAPFAYDSGGFHGKRHIRGGRTSVRSALYMATLSAIRSNYRIRAYYERLLATGKPKKVALTACMRKLLVILNAIIKQQATWRTFTLLNA

SEQ ID NO: 287566 - protein, 323 aa, unidentified
MNKYIGVDISKKDFYACFEESKEPVLFGNNKAGIKTFEKYLNSHDFKKDETIIGVESTGVYHLPMTFNMSKAGFCVNVINPLIVKKQNQISLRRVKNDKKDAGLIRYCTANKVGYKFIDTAETLTIKSLVRQRDSLAMMKNTLNRKQDSVSYKETNLGISISESNKRLIDAVSLEIKQLEKELKEFRKDEQKLLQSIIGVGPITAISFISEINDVSRFSHPKKMVAYIGLDSRVHLSGTSIHGKGYISKRGNKILRTRLYNACSVAVLHDNVFREFFQKKRSEGKAYKVALCATMNKMAHVIYAVWKSGVPFEDKRKNTSIVG

SEQ ID NO: 287567 - protein, 330 aa, unidentified
MFTERTSVGLDVHARSVAAAAIDGVTGRVVQSRLTPSFEHIRSWLAERAGPVAVAYEAGPTGFGLYRQLTAAGIRCEVAAPSKLQRPAGDRVKTDARDAVLLARLLRLDDIVSVAVPTPEQEAARDLVRAREDCRGDLMRARHRLSKLLLRHGIVYYGGAAWTGKHDTWLRHEALAQLTGRATQLAFDCDYEAVQFVKARRDRLDTAIEQMAAGSAFTACVRRLGCLRGIGTLTGFALAVEIGDWTRFTGAGIGSFVGLTPAEYSSGSSRTLGPITKTGNSHVRRLLVEAAWHHRARYRPGKPCTTGGLWLRSPRKPAATRATGDCISAG

SEQ ID NO: 287568 - protein, 321 aa, unidentified
MTYVGIDVSKATFVVAYSSAKSNETKTFKNTTKGIREFIRTISPKENHCVLEATGNYSMLLVYLLSKAGVTVSMENPLKIKNFARVMLSVVKTDVIDARLIALYGERMQPAPFKLRSDSILLLKQKRTVLRQLKKQLTANRNLECSLKVLPFIDSKCKKVLEKTIKFLEKQIEEMEEELTSLAEIEYKKQMDLLTSIKGIGATLAAALIIATGGFTYFDNAKQLTRYLGLSPTYQQSGTSVNVKGHINRNGDAYLRSQLYIGAMASLRCNTECKACFDRLRSNGKPGKVAIVAVANKLIRQAFAVVTYEKKYIDGYKSVKP

SEQ ID NO: 287569 - protein, 403 aa, unidentified
MGSCAGIDWATEENALCVVDEGGGRLAGEIHANDEAGIRELIARMRTLDVERVAIERPDGLLVERLLGAGFCVLPVHPNMLKATRSRYEASGGKSDGFDAFVLAELARTDAHRLRRLRPLSDETKALRALTRTREDLVGARVRLANELRAQLEAFWPGAARIFAEVDSQIALAFLERYPSPADARGLGEKRLAGFLARHGYCGRRSAAELLDRLRSAPEGRAGALEAEARRAAVLGLVAALRPIVTQIAELTSQIAHAVRAHPDGAIFLPLFRDPKSVVTAARLVAEIGDDRSRYPTAEALAADAGMAPVARESGKRKVAVFRWACDKRLRDAIACLANSTRHHHPWARGVYLSARARGLEHPHAIRVLGRAWLRVLWRCWRDGVPYEPLKHGNLRRLELARG

SEQ ID NO: 287570 - protein, 354 aa, unidentified
MKRTTKYVALDVHQASTVASVRDHGGRVIARGVLPTEETALVEFFQGMRGSVHVAFEEGTQAQWLHGLLQPLVHRVVVCDRRGEPRGGNKGDQVDADRLSRLLRSGELRSVYHGGTERMTLKELTRTYVNVVEDSIRVMLRLKALFRARAIRTPGKPLYNPANRAEWLAKLSDRGARFRAEMLYAELDVLRELRPKAKAAMVAEARKDPAWATLRTIPFMGPVRVALLLATMQTPWRFRTKRNLWAYAGLAVVTRSSSDHEFVAGSPVRRRRAPLTRGLNRNHNRVLKDVFKGAALGALVRPGPLQDFYHGMLTRGMRPELARVTLARKLAGLTLRLWKTGESYDPAQLTQQAT

SEQ ID NO: 287571 - protein, 393 aa, unidentified
MFNPLKVRLMRAVCGLDVHKDSVYLCILTGEGELIEKVFGVLTFRLQQMRDLLLAHNVDEVSMESTSVYWIPIWRVLAPHFHMRLVNPYFIRQLPGHKSDVADAQWIAECTLKNLVSGSFVPPEDIQQLRQYDRRIFDLDEEIVRKLSKLDAVMQRCNFRLSNYVSNVDCKSYKDVVRKISEGVTDPESLIGEIHGRIIKHHGRETILASLAGVISQAEIDVLRQLREELALAEVHKRECLERMLEICQEKYPDELRRLQTIPGVKERTATSLIAEIGTDMSKFETANHLSAWSGLRPRNDESNKKFKSRRITHGNIYLRKNIIQCAWAASRTKGCFFSRFSYHQTQVRKKNKMKVIVAVARKLLVAAWHVIHDKTDYADFQKQDRQAPASNG

SEQ ID NO: 287572 - protein, 420 aa, unidentified
MKAFKTSDFAALIGIDWADQKHDICECPLHNKKISLSVISSQPKSIYSWAIDLKKRYPNQKVAIACELKKGPLIYALEQFDHIVIFPLNPATVAKYRKAFAQSGAKDDPSDAFIQFEMLDRHMDRLRPIEPEGADIRSLRLLSEYRRKLVQDRVDMTNRMSDLLKCYYPQVLDWFKEKDTLIFCNFLAKWPSLVEAKRARKSTFIKFFNENKSRYNAVNERRIAEIKSAFPLTEDPGIIEPSSIMIELLVPQLRSLIESIERMDNEIKTRYKQQNDKNIFDSFPGAGPQLAPRLLVAFGSNRSRYQDASEIQKYAGVAPVLERSGQKSWVHWRHSCPKFLRQTFVEWAGQSVRFSFWAKAYYQQQIEKGKPHNTAIRSLAFKWIRIAFRCWKTYTPYDESKYLETLKERGSPLLAYAVKS

SEQ ID NO: 287573 - protein, 427 aa, unidentified
MKYAPIQVLPDVPASGVFGGIDWAVADHVACVVDMAGRILDRFSAGHDKAGIETLITRLRRSGVTEVAIERSGGVLVDALLAAGLTVVVVSSHQVKNLRARYRSAGGKDDRFDAFVLADTLRTDRARLRPLVPDAPATLALRAAVRARKDLVAHRVAACNQLRAHLAVAFPAAVGLFFDLASPISLRFLASFGSQDAAAALDEQAIAAWLKTIPGRGKTASASVLCARLGAAPDGVTGEDGAAHAVITAALTATAGMLAAQIKVLEAGIGAQLAAHPDGHIFTSLPRAGTLRAARLLAEIGDCRSRYPGPQSLAALAGVVPVTRESGTHTSHAFRWAVNRPLRDAVCDFADGSRHASPWAESVYQAARSRGKDHPHAIRILSRAWILIIWRCWQEGTAYDPAKHTALQRILDQQAAQAAVAGPGDTP

SEQ ID NO: 287574 - protein, 409 aa, unidentified
MQVMHERCAGLDVHKKSVYACAIWPGEKGEKEQEVRSFGTFTADLLKLADWLRGHGVSYVAMEATGVFWRPVWAVLEGEFELLLVNPQHIKAVPGRKTDTRDCEWIADLLQHGLLRGSFVPPCEIQDLRDLTRYRAELTQAQNKVDNRIQKLLEQCNIKLSSVASNTLGVSGQLMLEAIIEGEDDPAQLADLAQRKLREKIPQLRLALAGKVRDHHRFLLKEYLQEWKALRGRIARVEQEIEHRMGPFDQAVALWESMPGVDHITACNLVAEVGVDMTQFPSGQHLASWAGLCPGNNESAGKRMSGTMRDGNKWLRRALCQAAWAVTRKKDCYLSAQFRRLAARRGMKRAVMAVAHSMLIIGYTMLKTGRSYHELGGTYFDQINKDQLQKYFVKRLEKLGLTVSVVTAA

SEQ ID NO: 287575 - protein, 345 aa, unidentified
MKQITTIGLDLAKRIFQVHGAEADGSPVVSQKLRRAEVLVFFKKLSPCLVGMEACGSSHYWAREIAGLGHDVRLIPPSYVKPFVKRGKTDAADAEAICEAVIRKTMRFVPIKSANQQAAAMVLKTRELLVRQRTQAINALRAHLSELGIIAATGAGKVTALIEIVRDDEDIRLPQAARFALTELANQIEGAKDRIDKLERAIVVEAKRDDDMRRLATIPGVGAIIAASIKTLVPDPNGFKSGRHFAAWLGLTPKPHSSGGKERLGRISKMGNSTLRSLLILGATSVLGHVRCSSNASKWLTAILARRPFKVVATALANKMARIIWALLTKGGTYKSGSVIGSASA

SEQ ID NO: 287576 - protein, 377 aa, unidentified
MRRVCGLDVHKDSIYMCILYENGSKIESVFGVLTPELDKLRDLLVSHHVCEVALESTSIYWIPIWNILSVDFSLKLVNPYFIKQLPGRKSDVKDAEWIATVLQKGLIRGSYVPDRMIQCLRQYERRNHELSKNIVHAEQRMDMILQRCNIRISNYVSCISCKGYQKVVNAIISGESNPKVLVTLIHKRTLNKHGRQVVEDSLNGFVSDTDRDILRQYRDERMQMEQHKSENKAKMQAICEAHYCEELELLQTLPGIKEESAANIIAEIGVDMKMFLTAIVGWAGLKPRNDQSAGKIKSRKITHGNKYLRKILVEAAWSAARTKDSRFMKMYQRLLARGKSKQKALIAVARKLLVLIWNMLSKKEAFNPEYKRRIQAA

SEQ ID NO: 287577 - protein, 371 aa, unidentified
MGHHSEAFIGIDTAKLRNAVAIAEAGRRGEVRYLGEVDSSEAATRKLVAKLAAKYERLSFCYEAGPTGYGLYRLITSLGHECQVAAPSLIPKKPGERVKTNRRDAEGLARLLRAGELTAVWVPDDRHEAMRELTRARDAARQDLTRKRQQVSSMLLRLGRHYPGLKTWNARHRSWLANLKLDHREQRFVLEELLQAERQAGERVERLEQAIREALADWSLEPIVPALMAMRGIDLVGAVTILAEIGDLSRFKNPRQLMAYLGLVPSERSTGESVKRGSITKAGNGRARRALVEAAWAYRHPPRVGYEKQPQVAAAPRRAREIAWKAQVRLCKRFRMLSRGGKKSTVVATAIARELAAFVWAIARESHPSRA

SEQ ID NO: 287578 - protein, 396 aa, unidentified
MYYVGIDVSRHHHDATAIDATGQVVIAPFRFLNTRQGVNTLLARLQTLDGRVNIAMEATGHYWLPLYEALVAKGYSVSVFNPFQIKAYRQIGLRKTKTDAVDSLWIADFLRIGRARPMVVPSPAIRQMRELARFRFSLLQRQTNIRRRALTILDRVFPEYRTLFPRPFSPSSRALLRRAVAAETFAAWPPEDLAQTLRQASRGHFGLEQARQLLHLAQNSLGIRSLGAVANQEMQFLLDQLALLDDQITTLDEELDRLLQQTGTYLTTIPGLSTTLAATILGEIGDIHRFTTLKQLVAYAGLDPTVHQSGQFQATHSRLSKRGSVYLRRALWMAASVARQYDPDLKAFYQRKRLQRKHHSVVIGAVCHRLLARIYVVLKEQRPYEIRTPDTNHSTT

SEQ ID NO: 287579 - protein, 422 aa, unidentified
MLAESHDEEQIIARVAALDIGKAELVCCVRVPAQGGRRKRLQEVSTHSTMTRSLTELASRLVELGVQRVVMEATSDYWKPVFYLLEAHGLDPWLVNARDVKHLPGRPKSDVIDAVWLCKLAERQMLRPSFVPPRPIRRLRDLTRYRVDLVAARTAEKNRVEKLLEDACIKVSVVASDIFGVSGRAMMAALIAGERDPHVLAQLARARMRAKIARLEEAFNGHFDDHHRFLLARMLARIDSVEADIVAVDNEIEAHLVPFAAAAARLDEIPGIGAVAAAVIIAEVGVDMSRFPTAAHLCSWAKFSPGLNSSAGKTKGNGSTGHGNRYLAAILGEAAISAGRTNTFLGQRYRRIARRRGKKRALVAVGRSILVIVWHLLANDDARFTDLGADHFTRHVNPDTKKRSHIRQLEALGYTVTLTPAA

SEQ ID NO: 287580 - protein, 350 aa, unidentified
MTMVGGLDVHRHQITFDYVDDDGLVHWGQIRPATRHTLRVWLGEHCPQRDAEFALEGCTGWRYVSDELAAAGVGVHLGDPAEIAALRGPKKRAKTDRADARLLRTLLLEGRFPESWIPPAHVLEIRTLGRLYCTLMDQRRAWQQRIHAQLFHQGCPPIRALLSAAGREALAGAELSAVGRQYVDAALWRIDELSAEIEPLRTQIVNFARRQAGCRALQTHYGIGWLCAAIIWAEIGDARRFTSSDQLVRYAGMDVTVYSSDNKRAPGHLSRQGSPELRWAAFEAAKCAARRGSPDYAYYRRLAAKHERHNGKNPTLAVERKILRRCYHTLRELGAPALALPDTSSQQAAA

SEQ ID NO: 287581 - protein, 404 aa, unidentified
MTMNAVGIDVSKGKSMVAVMRPFGEIVFSPFEVSHTDKDLTDLVRKLKSLPGETRVVMEHTGHYHAPIAAALHEAGIYVSAVNAMLVHDYGNNSLRKAKTDKKDAVKLANYALDRWLSLPQYHPAGDTRLMLKTCCRQYEQFSKISVMQKNSFISLLDNVFPDVNRLFTSPPRSDGSEKWVDFVAQYWHCECVSGMSVKAFTRSYEKWCYKHGYHFSEDKALDIYASACGHICLMPKCEATRQLVQQAVSQIRASSAALATLKQQMQELASTLPEYPIVMQMYGVGKSLGPQLMAEIGDVRRFHSKSALVAFAGIDAPPYQSGTINVRSRSISKRGSPRLRRTLFLVMAAILKSSPPDEPIYQYMNKKRSEGKPYLVYMMASANKFLRRYYATVKAYLDGLDFA

SEQ ID NO: 287582 - protein, 463 aa, unidentified
MAGKHEIESSEGRRRQLQGLPVIRRNVAGIDLGSEQHWLCAPTADGSGREIASFGATTAELIRIAEWLKARQVESVAMESTGVYWIAPHEVLEAQGLQVLLVDTRQLARVPGRDKKTDPTDCEWIQRLHSCGLLQGSFRPEEAVCMLRTLVRDKANLVAERGDWLRRMQKSLDQMNVRVHRAVSDLDGVTGMAILRAIAGGERDAQKLAKLRDPRCSKTEQEIAEQLRGHWREDHLFSLQQALQMYDAVEERIAAYEKEILRKLGDMEREEQRGQKAPPLPNANKAKAIKKRGQEPMRQALYRMSGVDATHIDAIGVETLEVILSEYGPDLSRFPTEKQFVSHVTLAPHGSGGKPLRKRKRNSASTRVAAALRMAALSLRHSQTALGAYYRKMAQRLGGDIAVFATARKLATLIYRLLRWGQPYVDEGANAYETRYRQQRIGRLAATAKQLGYQLAPINASIA

SEQ ID NO: 287583 - protein, 355 aa, unidentified
MDHIGIDVHKRESQICILAEGGELIEQRIRTEPERFAAVLGKRPRARILIEASTDSEWVARCLEGLGHEVIVADPNFAPMYATRTRKVKTDRRDARTLADANVLGAYRPAHRLSDAQRHVRGRLGVREALVRTRTRYISLIRALLRQQGYRVPSGSAEGFVHRVGAMALPGQVRSLIAPLLAVMLPVNRQLAYSDEVIERLAAHDPRVQRLRTVPSIGPVTAAAFVATLDDAQRFRHAHQVEAYLGLVPREFSSGDSQRRGPITKAGPGRARWLLIQAAVSILRRRPPEAEALWTWALRIAARRGKHVAVVALARRLAGILYALLRDGSVFQPRRAAGVPGAAVGARTRRAARAR

SEQ ID NO: 287584 - protein, 365 aa, unidentified
MEHIAIDLGAKESQICVRSADGEILEERRIATRPDKLRRYLAGRPKSRVILETGAEAFWVAEIARECGHDVRVVASMLAPSLGVGRRGLKSDLRDARVLSETSCRVDLPSVHIPRVETRRLQSRLAMREALVRNRTQLVNVVRGYLRTIGERAPMRGAERLITELREKLTYTAEHLQPVLEAIEVLNRSVDKFDEELDKLASRDELAKRLQTVPGVGIVTSLRYMATVDVVNRFANGAAVGSYLGLVPSDHSSGQTQRRGSITKAGSPAMRAVLVQASWAALLSRRHRNDPMISWALEIARRRGKKIAVVALARKLSGILFAIWRDGTEYDAGRAAKAIPTAAPRRLALCQGSRRLPRPESVPAV

SEQ ID NO: 287585 - protein, 369 aa, unidentified
MGKYSEVFVAFDVAKKKHAVAIAEGGRTGEVRFLGDVENSPLPIERTIKRLANRYGRLHVCFEAGPTGYGLCRQIQALGHNCMVVAPALIPKRAGERIKTNRRDAVTLARLHRAGELTGVWTPDEAHEAVRDLVRGREAAADDLRRKRQQLLSFLLRHSRIYSGGGHWTLAHRRWLASQKFEHAAQQIVFQEAIDAIEDALQRLRRLEKQLALIVPEWPMAPVVEAYQAMRGASFLVSVTFAAEIGDVRRFDTPRQLMAFLGLVPAERSTGDTIRRKGLTLAGNRRARRALIEAAWTYRYPARVSETLRARLEGLPKPVRDIAWKAQVRLCARYRRLSATGKKLPVVVAAIAREMAAFLWAIGREVAPA

SEQ ID NO: 287586 - protein, 415 aa, unidentified
MVMKKNYIEFEQVVERGCGMDVHKEIIVVTIQGKGIKTMTKSFHAFTSSLIKLKKWLKKHGVTHIALESTGVYWKPVFNVLGDDFQILLVNARHIKNVPGHKTDKKDSRWLAKLLLSGLLKGSFIPNRAVRELRDLTRYKTKLTNQISAEKNRFQKILEDANIKLSVVLSNVFGSTGKKIIAEILKGDYRPEQLLHLVHGRVKASREDIKEALTGYVTAHHRFMLRTIQNNIARIEQTIAEIDSQIAIMTQEYHDIIELLETIPGVGHDGAIGIIAEIGLDMDKFPSHKHIASWAGMCPGSNESAGKNKSGRITYGNKYLRAFLVEQAWAASRTKNTYLSSKYKSLAGRRGKKRAVIAVGHKILIAAYFIIKNKVAFNELGKDYLNNFRKDKLVEYYKKQLEKLEANIDLDKEVA

SEQ ID NO: 287587 - protein, 360 aa, unidentified
MISERTSVGLDVHARSVVAAAIDERTGELVQRRMGSSTEEIVAWARGLPGPVAATYEAGPTGFGLARALTAAGVRCMVAAPSKLQRPVGDRVKTDARDAVHLARLLRLGEIVEVVVPSVESEAARDLVRAREDARGDLMSARHRVSKLLLRQGIQYTRGKAWTVAHDTWLRSQRFELVGLQAAFDAAYEAMIQAVDRRDRLDAAINRMAADSEFTDVVNRLCCLRGVSTLTGFGLAVEIGDWTRLDGHRIGAYVGLTPSESSSGASRTLGGITKTGNGHARRLLIEAAWHHRPAYRPTSPIMRARWDRASAAARARGHAGNQRLHDRWVGFQARRKRSVVANAAIARELAGWCWSLAVMT

SEQ ID NO: 287588 - protein, 356 aa, unidentified
MDKRTKLNFSGQAIYLGLDVHKKSWSVSIFTKYGEYKTFSQPPEAKVLIQYLQRHFPGAQYHSVYEAGYCGFWIHDQLREKGIENIVANPADIPTRDKERRSKRDRIDCRKLARGLRGGEIEGIYTPPRWKLEDRSLIRTRLSMGRKQVRCKNQIKSMLLFYGVTIPEREEMGHWSRRFIQWIDGIQMERSSGDMALKLHLEELCHLRQILAKLNRSIVALARTEEYRLWISLLKTIPGISTLTAMIVLTELYEITRFHSIDQLCSYVGLVPDTQSSGEKEHVGGMTRRHHSSLRWLLIEASWIAVRKDPAMMEVFNEYCKRMRKTKAIIKIARKLLNRIRYVLKNQAEYVTGVIE

SEQ ID NO: 287589 - protein, 321 aa, unidentified
MGKYSEVLVAFDVAKKTHAVAIAEGGRTGEVRFMGDVENSPLPIERTIKRLAYRYDRLHVCFEAGPTGYGVYRQAQALGHGCIVVAPALIPKRAGERVKTNRRDAVTLARLHQAGELTGVWAPDPAHEAVHDLARAREAAADDLRRKRQQLLSFLLRHSRIYSSGGHWTMAHRRWLAGQKFEHPAQQIVFQEAIDAIGDALQRLRRLEKQLAVIAPEWSMAPVVEAYQAMRGASFLAAVTFAAEIGDVRRFDTPGQLMSFLRLVPAESSTGDAIWRKGLTLAGNRRARRALIEAAWTYRYPARTPSLCRAPDATGRRTRRR

SEQ ID NO: 287590 - protein, 323 aa, unidentified
MNKDIKYFGIDISYLVFDVTDSDGNYYQFKNNVTGFKKFIKLLDINSHCVMEATGYYHYQLAYYLLESGFKVSVENPLSVKRFIQMKLSKIKTDKSDSKLICEYARQVELKLWQGNSKHQIECLQMTRLLSVYTKQSTMLKNKLHGETVLGNPSKLVVGSLKRSLKHVQKEIKTLEEKLLILVKQVHQDVLTRIKSIPGIGNKTALMLVVLTDGLDRFTSASELCSYAGLTPLIRQSGSSVKGRPRISKIGNQKLRNLLFMCSFTACKYNKACRDIYERIVAKGKSKKLALIAVCNKLLKQVFAIAKSGLTYDHTYRSTLVKN

SEQ ID NO: 287591 - protein, 436 aa, unidentified
MRGCRCSMIMGFTKPIEHFNLQRKKVITMNTLYVGIDVSSKSNVVYLMLPNGDKHSNFSVANSHEGSTLLVKKIYSALTSHSLDTVLIGLEATSVYGDNLVYFLREDATLAPFNRKIHVLNPKQVKKFHDTYNDLPKNDYVDSFVIADCLRFGRINKEVYMGEYRYKALQNLTRARFFAVQNLVKEKQRFMNVLFKKYSTMTQEKVFSDAFSTTALAVYDEFESAEALANMDLHELTDFIIEKGKNRFPDPVAVAKAIQKAARSSYRLPKTVNDSVNQVLSISITSMKALESQIKEFDKAIIALMELLPNVLISIPGIGPVYSAGIMAEIGDINRFDNQASLAKYAGLAWKQHQSGGFEAEVTRLIPSGNRFLKYYLCEAAFSLVRCDKEYSDFYHLKYKEVNRCQHKRALALTARKFVRLVFRLLKDNRLYCPAK

SEQ ID NO: 287592 - protein, 344 aa, unidentified
MKITTVGIDLAKNVFQVHGVDERGKAVLRKQLKRKDVVSFFANLEACLIGMEACAGAHYWARKLAEFGHTVRLMAPQFVKPYVKTNKNDRNDAEAICEAVSRPNMRFVPVKTAEMQAVLALHRARQGLVKARTAQSNQIRGLLAEFGIAIRTGMSHLGKRLPEILEDGENGLPGMMRQLLCGLGNQLKELDRQVRELERQITVWHRDNPASRKLQEIPGIGPLSASAFVASLGDAKSFKNARQVPAWLGMVPRHEGTGGKVVLGRISKRGDTYLRTLLIHGARAVIAQCERKPNHSDHWLKDLLSRRNKNIAAVALAAKNARIAWALLTHERSYQPDHVAQLAR

SEQ ID NO: 287593 - protein, 408 aa, unidentified
MNTLYVGIDVSSKSNVVYLMLPNGDKHSNFSVANSHEGSTLLVKKIYSALTSHSLDTVLIGLEATSVYGDNLVYFLREDATLAPFNRKIHVLNPKQVKKFHDTYNDFPKNDYVDSFVIADCLRFGRINKEVYMGDYRYKALQNLTRARFFAVQNLVKEKQRFMNVLFKKYSTMTQEKVFSDAFSTTALAVYDEFESAEALANMDLHELTDFIIEKGKNRFPDPDAVAKAIQKAARSSYRLPKTVNDSVNQVLSISITSMKALESQIKEFDKAIKALMELLPNVLISIPGIGPVYSAGIMAEIGDINRFDNQASLAKYAGLAWKQHQSGGFEAEVTRLIPSGNRFLKYYLCEAAFSLVRCDKEYSDFYHLKYKEVNRCQHKRALALTARKFVRLVFRLLKDNRLYCPAK

SEQ ID NO: 287594 - protein, 363 aa, unidentified
MSTITMGVDLAKDVFSVSALDGAGRVRQRKDLKRDSFVIWLVQLPPGTVVAMEACSGAHHWARRCIEHGLVPRLMAAQFVKPFRKSQRNKNDRNDAEAIATAARQGNMRFVAVKTVDQQPRLSWHRVREGYKAEGLAISNRLRGLMAEFGVVVARSDHALRHALSDQEVRQQLPAMLQQLLDDLQDHWQQVRERVAACDTTIAAHAKSDTRSVRAQRLIGVGPLTADALVATIGDGREFTHGRQLSAWLGLTPTQHSSGGKQRLGEISRRGDSYLRTLLIQGARSSLQRANAVAQEKATAEQIWIRGLTQRLPFGKVLVAIANKHARQLWAMLARDEDYDAEAWLKHPMVQRPATSRKQTVAA

SEQ ID NO: 287595 - protein, 421 aa, unidentified
MPNIEIGVDSMVKENFIYVGIDLHKETHTAVMIDCYNQKLGEITFPNRPADFPKLVTKVKKCNTDAKEVVYGLENAYGYGRPLAVWLIDKGYFVKDVNTAISHRQAKHRGAMYRKSDSDDAEAIALATLNMLDKLPDACPNDAYWSLGQLVHRRDNIMKQRTRLVNQLHEQLCIAYPSYKQFFNDISRPTALYFWEHYPSRKYLKGKSVEDLRAELVPVSHNKCSTKTCEKILDAVASDKVKNNAYQDARDMVTLSIVSDLQHYDSQLAEVDKMLEQMYKMLGCTLTTIPGVNVITAVKILAEIGDIKRFSNANKLAQFAGIAPLHLSSSGKGKDVATKQGNRRLQATIYFLAIQMVQVSSKGTPRNSVVRAYYEKRKAEGKTSQQALICISRRLISIIYGMLKHGTEYRMPVVESAGENR

SEQ ID NO: 287596 - protein, 318 aa, unidentified
MPDSVVTWVGIDVAKASLDVAWGSGDDAHHSTAENSASGRTTLVRQLPPTAESRIVVEATGGYERALVTTLVEAGYRVAVVNPRQVRDFAKALGILAKTDRIDALVLARFGQQVQPRILEEDPTERVELAQLVARRRQLIDLRTMELNRSQQTSARVAQKSIQHVLKLLAKEIEQLEAEIARLLQSDDDWRAKIELLSTTPGVAKVTSATLVAELPELGRLNRQAIAALVGIAPFNDDSGRHRGSRRVAGGRASVRHVLYMATLSARRCNPVIRAFSERLAAQGKKPKVIITACMRKLLVILNTMLKNNTPWKDLHVC

SEQ ID NO: 287597 - protein, 370 aa, unidentified
MKYVGIDLHTNRFTCCYLCDNSREKQTETFDLDTHGLKSFYSTIDKDTYILVEATINTFAFASLFRDLVREVIVANTYQLKSVGIPGKKTDKLDAAKLAEKLKAQVVSGVQQIVPVTIPPKEIRDLRALFATYRTLRKEIGRTKNRIHSLLKENLFPFTREYIFGKKARAEIRKISSDYLLSFQINLLMDTLERLEDAFETLVVQIKSAGAMFMPQIEILTSMPGISVVTAIAVIADIIDVSRFRNSKHFASYLRSTPRVESSNDKTVIKSTTKAGRKLSITLLSQSLNHFRDGNRNLSRWIEKISDHKKKGVVRMALCRKVITVIYQMLKKQEFHYFYNPVLHEKKLTDYRKSLWCANNLFLQQSHFPA

SEQ ID NO: 287598 - protein, 328 aa, unidentified
MPSTQVGIDVAAKTLEVRLQEPGGEEEALEIPNEPKGHRMLIRRLTRRRGHARVVLEASGIYHLELALALHRANRVEVMVVNPRAARDFARASMQRSKTDTLDAAVLLEFVRRMPFQAWMPPSPEELELRTQARRLTSLTKTRTQEKNRRHATEYVGSQVVCHDIDLHVRYLDRRIIALEAKALDLIWRSPRLRKQLAHLTSVRGIGRSSAIRILGEICVLPKDMTPRQWVALAGLDPRILQSGVSLNAPARISRMGNRALRAALFLPALVATRYEPNVKAYYEKLLGRQKARLQAIVAVMRKLLHAIYGMLRTGTDFDGEKFYALGR

SEQ ID NO: 287599 - protein, 388 aa, unidentified
MQDVADQSAAPTTIGADLCAIFVSLELSRSTWLATSLSPGRGEKMSKHSMSAGDIAALLARFSELRRKACARTGKSFPIVVIQEAGLDGFWIHRVLLSEGIESHVVDAASVATSRRRRRAKTDRIDGETLLRALLAHKRGEPRVCSMVRAPTPEDEDRRRICRERKVLIMERVQHVNRIKGLLFSQGASGYEPLRRDRRARLDALQTGDGRGLPQHLKAQVCRELDRLELLLEQIKAVEAERDALLNAEQTKVSAPPPMLLGVHGVGPEFASVLWSEGLSRHFDNRRQVAAYAGLAPTPWQSGSVNREQGISQSGNSRLRTTMIQLAWLWLRHQPGSALTLWFKDRMERNGGRRRKTTIVALARKLLVALWKYVSAGVVIEGAMIRAA

SEQ ID NO: 287600 - protein, 367 aa, unidentified
MSVYVGIDVHRKRSQVAVVTGDGTVQLNRNVVNGTEPMLKLIGGLPAGTPVAFEAAFGWGWLVELLEDYGFDPHLVHPLRCKAIASARLKNDKVDAATLAQLLRADLLPEAWIAPPQVRQLRALLRHRASLVRLGTGLRNRIHAVAADHGYDRNASYWTGPGRGWLAELDLPPASREVITDCLAAIDQLTPVIERLDGEVHRHARTDPRVKLLATLPGVGEFTALMMLAEIGDITRFPSARKLAAWAGLTPTVRGSDVKVRHGHISKQGSAWLRWVLNQAAQTAKRSPQFAPTYAAIAKRRGKKIATIAIARKLLTRAYHLLATAAPAPAVTAAHATTAGKPGGSPSSGHARPRGMSRPAGRARSFD

SEQ ID NO: 287601 - protein, 354 aa, unidentified
MKRTTKYVALDVHQATTSASVREESGRLIARSVLPTDGAAITEFVRGMRGAVHVALEEGTQAQWLHDLLAPLVDRVVVCDRRGAPRQGNKADQVDADQLSEQLRRGGLRAVYHGSVDRTTLKELTRTYRNLVEDATRVMLRLKALFRARGIPASGKRVYHPRARAQWLAQLQNPGARLRAEALYAELDVLRTLRPRAKAAMVTEARRDPAWPVLRTIPFFGSVRVALLLATMQTPWRFRTKRNLWAYAGLAVVTRSSADYALVAGQAVRRQRPPLTRGLNRNHNRVLKDVFKGAATAATARPGPLQDFYHSVIARGTREELARLTLTRKLAALTLRLWKKGERYDPTKLTTPAR

SEQ ID NO: 287602 - protein, 478 aa, unidentified
MTPPKDYCLEAPCPPTPLLPPLPVLSDALQVCNPHAAGIDIGEAEHWVAVPPGRDPQPVRRFGTFTVDLDALADWLIDCGVITVAMESTGVYWIPLFELLEARGLQVFLIDPRQTKRAPGRPKTDRLDCQWLQRLHAYGLLAAAFRPADQICVLRSYLRHRQMLLTYGAHHIQHMHKALQQMNLKLSQVVSDLTGATGLAILKAIIAGQRDPLTLAKLRNPHCQHSEDDIAKALQGTWRAEHLFALQQAVELYQFSHQQLTVCDQHIQTHLGTFADKSHGRPLPPKARRHKKANEPRFDARTPLYRLAGVDLTTIEGIEEGTALVILSEIGTDMSRWPSVKHFCSWLGLSPPHKISGGKVLSRRVRPGAQRVALALRLAARTLHKAHTALGAFFRRLRSRLGAPKAITATAHKLARLVYSLVKHGSASVQQGLAAYESQYRERKVKAMARQAKALGYTLVALGTPEGASLNAVTAPIP

SEQ ID NO: 287603 - protein, 308 aa, unidentified
MDGKRVIGVDIGKRWLDVAREDAAKVERHVNEAAAIAALMGTLDPTCDIVVFERCGGYERELEAALAAANVPWAVVHSARVKAFRQVQGIKAKTDAIDARLLRAFGRDHLNGGKLRLGRSEDVVLDALMARHRQLKAALHAEHCRREIAAIAPVRASIERVIARLEAELVAIAAELSAHEANDPQLAFKEAVMCERTGVAQATARALLAELPELGRLDRREIATLGGLAPRVHRSGRRQLRRGLVPGRTCVKVILFNPARTAMRWDPEIKAFCDRLRGRGKPGKVILVAVMRKLLVRLNAAVRDAQAR

SEQ ID NO: 287604 - protein, 406 aa, unidentified
MRVYLGIDWSQLKHDYCLLDEQGRAIQHGTIPHRPEGFETLDQARSRIVSSPDECWVGLETAHNIVIDWLWARGYSQVYVIPPGSVNRARGRYRQTNAHNDQSDAYVIADMVRTDQARLVPWHPDSALTRQLRAKVGLLGYLTREIVRTGSRLEAVLARYYPAALQVFKNPRVPLNLQFIQAFPTPTAAEQLNREEFKAFLRARQYRQPEQTLLAAYARLHAPYPEADPATIAAYRDEAVLLAGILLAQLKHKQTILQSLAVPFAQHPDQVIFASLPGTGPYLGPALLAKFGDDRARFPTAASVQALAGTCPVTEASGKRRQVKFRHACDHEFRQIVVQWAKASLGQSVWAASYWEQLWPRCHSTSHAYRCLANRWLAVAWKCWQARTPYDERYHLQRHAQRAPTR

SEQ ID NO: 287605 - protein, 388 aa, unidentified
MPQQRKPNDLGRSLISLAMDTTLIAVVELSLSSWLVAGIVPGVERQPLKKLKTDENALLALLNRWRDEAVRSGHKISRIAVAFEAGRDGFWLARWLKARDIEAHVIHASSIAVSREHRRAKTDRLDTELMKRAFVGWLRGERDHCKTASVPSLWEEDAKRPSRERESLVGEQSRLINRMKATLIRLGIRGFNPKLRHAEQRLETLRTPEGEPIPPNTLAELKRDMQRRRFICDQIQSIEQDRLERLERTPHTEPHAMVRLLARITGIGVETADLLVHELLLRNMRDRRAVARYGGLTGSPDRSGGTNREKGMARSGNARVRRGMIQLAWRFLLFQKNSALAQWYRRRTEHAPKARKTMIVALARKLLIALWRLVREGVVPEGVAMRPA

SEQ ID NO: 287606 - protein, 351 aa, unidentified
MDRYVGIDAHSTSCTLAVVGSSGKRLRSLVVETNGRALVDAVRSIPGRVHVCLEEGTQSGWLHEILEPHVEEVIVMMASETKGPKSDARDAWTRAEQLRVGGIQTRVFKAPPHFAFLRNAVRAHLMAVADLTRVKNRLRAVFRSRGVPVDQHVYDAKARAKWVKQLPTAHQPLAEWLGQEHDALVPLRDRAEQWLLEEAKTHPIMRKLRTAPGMGPIRAAQVLAIVADPHRFRTRQQFWSYCGLGIMTRSSSDWVQDKSGRWLRAQTPQTRGLSRKRHPLLKAVFKGAATTVIAMPTHPLHEEYQRRLRAGTKPNLAKLTLARRIAAIVLSMWKHQEVYDPKRQNGVADEP

SEQ ID NO: 287607 - protein, 418 aa, unidentified
MHIVYPVCCGVDVHKSFLVATIIKTEGATAKYSKKRFSTFNKDILLFKKWLLENGCFDVCMESTGKYWVPVYNLLEDEIRVVVASPKWVKAVAGNKDDEKDSKWIGDLFRLGIVKSSYIPEKPIRILREYTRYRYKLVSCKSSEKNRFQNSFTVCNVALDSVVSDMFGVSASSITDYLINADEFDSEHCKTLLKTSLKKKGDTVVESIQGYNIEPAQKERMVMIRDHLEYVQEAISKLDSKLDDLIKPYESFISLLCTIPGIDRQSAITIVSEIGVNIDQFSNSKRLCNWAGLTPGNNKSAGKKKSVHITRAGVYLKPALVQVAHAAVKSTASPYYKNKYERISKRRGKKRAIIAIARMILTAIYNMLKNGEVWNPSDLFKVDMPANLIEKQKQKAIRNAFKLLVSQGLIDPSLVAAV

SEQ ID NO: 287608 - protein, 351 aa, unidentified
MKTVVKQVAGIDVAQKELVVSLGKMDQQWTPKIVGHKTFTNNSKGFNELRAWVSKQCEDQVEVRYVMESTGVYHEALAYYLSGEGCAVSIVLPNKISNYFRTLKVRTITDKSASEAICLFGLERKLDDWKRPAPLYKTLRQLTRERDQLQQELNQLRNQKHAELAEAEPNEGTLIRLDKRIKLLKDQAAEIWEEIREMLAKNQKVSATVKQLTSIPGVGALTAVTVLAETNGFDLIRNQKQLTAYAGLDVKEKQSGTSVRGKAQISKRGNRHLRKAMHFPALTAIRHDVHFKAVYLRIVEKQGIKMKAAVAVQRKILALMYTLYRSGKEYDKDYLQKIQIEKNEAERRQTA

SEQ ID NO: 287609 - protein, 305 aa, unidentified
MISVGCDVGKKNFHVFLKGKNYEFENEKKGIGEFVRLCKKHTIARVVLEPTGGYERKLLNKLYECDIPVSVVNPKYVRNFAGIEKDLAKTDKIDAKALSEYGETVKPKLYEPKDPYRCELETLTNRRANLVQMKREEKQRLEKKPSKRVLQSINKHLKHLEKQIAELDSEIEQLIAENASEVAEVLQSEKGIGPQTAAVLIASLPELGHIDNRQIAKLVGTAPMAKDSGTKSGKRAIRGGRERVRTALYMASISAIRSNDKVKDFYKRLRAKGLPVKAALLAVDRKLLVILNSKMRLFYEGKDYF

SEQ ID NO: 287610 - protein, 377 aa, unidentified
MLRIIKIGMDVHSKTYSLCALEPKIGEEDHLLASTEVQADPKYILLFIESLKIKLGSDNDYDIVCGYEAGCLGYSLYNRLTAAGVKCVILAPTTMLTPQGKRVKTDARDARMIAQCLGNGVYRAVYIPTDEDDAVKEYIRMRDDQQDNLTRTKQQINAFCLRHGHHYPDGKWTIKHISWLRKLDLPGVLREVLDEYMSAYDELTAKIERQDKRICEFAEQPKYNEKAKRLVCFLGIKTHTALSLIVETGDFTRFAKGNTYGAFLGLAPGENSSGEKVHRTGISKAGNSHLRCLLVEAAHGICKGRVGQKSKALRARQEGNPAEVIAYADKANARMRSKYYRLTRNGKKHSVATAAIARELACYVWGMMTDNITLTTV

SEQ ID NO: 287611 - protein, 339 aa, unidentified
MNRTAVGVDIAKNVFQLHYIDPATGEIVNKPIKRAKFLEFFANREPCLIGMEACGGAHHWARQLTKMGHEVKLMPGKFAKAFNIGNKKDAADARAIWLAVQQPSKPVAVKTEMQQAMLALHRMREQLVKFRTMQINGLRGLLTEYGEVMGKGRAALDKAIPQVLGRVAERLPAVVIDTLREQWSGLTKLDEQVASIERRMREWKKEDPQVQAISQIPGVGLLTSTAAVATMGDAKAFRSGREFAACIGIVPKQSGTGGKVSLLGISKRGDTYLRSLLIHGARSVLSNSKNPGEWVEQIMKRRPKNVVIVALANKMARTIWAMLAHDRPYQKDYVSVKPA

SEQ ID NO: 287612 - protein, 447 aa, unidentified
MDTESATQYAAYIGIDWADKDHAYALRATEDKKVEQGKVEAKPEAIEEFVARLRQRFGGKAIAVALEQSRGSLLFTLSKYDHLVLYPVHSSTLDSYRKACHPSGAKSDPDDAALILDLLQKHPEWLQPFAPDTVPTRTLQFLTEERRDAVNDKTRYLNQLTAALKTYFPQMLEWLDVDSKVMCEMLQRWPTLEQLQQQKPSVVEEFLREHRYPVVRVKPLQEAMEKAIPATTDQAVIEAKKFTVQRTIAQLEALRENIAELDRRIEQITRLHEDYRVFASLPCAGKVMVPRLIAAMGTQRDRFQTASELQCQTGIAPVKEASGQREWIHWRWACPKFLRQTFVEWAWLSTRKSQWAREFYDRQRAKDKSHHAAVRALAFKWQRIIFRCWKDRCPYDEARYLATREQRARTAKASTDGSPQLKSSQAGGVEITWKNVSGFSRPDSISC

SEQ ID NO: 287613 - protein, 346 aa, unidentified
MMIIGCDYHPSWQQISWVDTATGETGERKLDHASGEAERFYRQLPGPALIGMESTGNCQWFVEMATTAGHEVWIGDAAKIRASEVRQQKHDRRDAALILKLLLEGRFPRIWTPSGEEKDLRQLLIHRHKLVRIRVQVKNELQHLAMNQGVTKKGKLWSKGGEKVLRELPLKPWASRRREDLFKVREMLNGQIDLLDQAVVEVAQKNEKARLLMTQPGVGPITSMAFVLTMGDVSRFPRGKQVASYLGLIPREYSSGGKQRLGSISKQGNGFMRMLLVEAAQAAVRCDPQMRQEYLHRCHRKAKGVAKVAAARKLAIRLYWMLRTNRGYPEVVRVESSSRVPLVSAS

SEQ ID NO: 287614 - protein, 355 aa, unidentified
MDKIKFIGLDVHRDTISAAVLNESGRLLQQSVLMTRTVAILDFIGGVRGSLHVTFEEGTHSAWLYDLLSRRVDKLVVCNPRKNALLKSGNKGDAIDARKLADLLRAGLLSPVYHGETSALEVQQLARSYLMLTEDTTRAMGRLKAVFRGQAISCTGRKLYGPKHRGEYLAALGGCALRRRAERLYQQLDALQQLRRDARHDLIVECRKHVEAKWLQTVPFLGPLRAAVLIGRVQTPHRFRTKRQFWTYCGLALETRDSAEYRVIDGQLERKRRPAQVRGLNWNYNHELKNVFKGAANAASTGQGVFREFYLGLLTKGMRPEMARLTLARKIAAIALKIWKKGESFDAEHLKSKAA

SEQ ID NO: 287615 - protein, 418 aa, unidentified
MEKRSPFLYQATVGIDWADRKHDIFVRFANGSSYRRKIGSRPEAIQAWLLELRSACAEGKIAIALEQRRGALFYQLCTHLNWIDLYPINPHSLFSFRQTFFSSRAKDDPIDGQLLEELVRTHWDRLRPYQAGVTTERQLYLYCRQRRSLLDLATKIELKLISTLKQYFPVAVDLFEAIGMKSDIALNFLSRWPTLHELSRAKPHTVRSFFYAHNSRSQSLIERRLQQIDEAHEVTDDLALIEPMVLMTKCLVGQLRQFNQTINEFNQKIKEIFKSHPDHLLFESLPGAGEKLAPRLLSLFGSDRSRWPEAADIQRYSGIAPVVERSGKSLWVHRRLARPIFICQSFHEFAQQSTRFSSWADQFYKLQREKGKSHHSAIRSLAFKWIRVIFACWKANRPYNESFYVRALAKRNPFLSST

SEQ ID NO: 287616 - protein, 409 aa, unidentified
MLFVGDDWAEDHHDVEVQDATGRRLATARLMEGVEGVAKLHALLARHGGEDLEPEEVVVGIETDRGPWVQSLLAVGYRVYAVNPRQAARFKERYATSGAKSDRGDTHALADMVRIDRAQLRPIAGDSEQAQAVKVVARAHQTLIWERTRAFQRLRTTLREYFPGALAAYAGLELTSTDALELLVKAPTPETGRKLTKQQTTAVLARHRRRNRDQKTAAIQKELREPQLDVAAPVAAAYAAAATAHARLLLALNEQIDALEIEVKAHFLAHPDAEIYLSMPGIGEIVGARVLAEFGDDPTRYASAKARKNYAGTSPITRASGKVHTVQARYVRNNRLADALQRQAFCALQNSPGARRYYDKQRARDLDYNPALRQVGNRLVGILHGCLKTRTHYDEATAWAHHGQLPTAA

SEQ ID NO: 287617 - protein, 392 aa, unidentified
MEVLYSRCAGLDVHKKTVVVCRLGVDVKGNKLKEVQTFGTTTADLLRLSDWLTAGTCTHVAMESTGEFWKPIWNLLEGNFELLLVNAQHIKRVPGRKTDVQDSEWLADLLQHGLLKASFIPPVEQRDRRDLTRQRTQLVRDRASVLNRIQKVLEGANIKDHLNPAQLDALVHGRLRDKLPELEQALTGRVRAHHRFLLAQHLAHLDFLDEQIAAYSREIERSTAPFDELVALLDTIPGVARTTAELILAEVGADLSRFPTADHLASWAGLVPGNNESAGKRLSGKMRQGSQWLRAGLTQAAHAAARQKNNYLAAHYHRLAGRRGKKRATMAVAHSILVIAYHIIQHRQPYQDLGSNYFDERQKVSTANRLTRRLEKLGYHVTITPPSTPVAA

SEQ ID NO: 287618 - protein, 373 aa, unidentified
MPKYSTAFGMDVHLRSTTVCALDADTGEAVARRFPGNPWGEIAAWMDGFPGPSLAAYESGYLGFAPQRELAGLGVECVVAAVSKIPRSAADSASKNDRNDAARMAKAILAHDISPVWVPSPEVEGIRDLAGAYDGATARLATAKQRLLAFLAKRGFAYGGTTPAGNPRKYWTYDFLRWLDKVRPEDDGGVRTLAALRNEVEAAAEARADLLSEYRAAVDASPIAAEVAALQSIKGCAFALAAAFSAEVGDFTRFRSGRQVTAYFGLAPSQRSSGDSVRLGGISGAGNALVRKLAVEGSWCYAAARHQPKLMPRDTGVPLEIRMHGRKGSERLLRRREEMLARGMPQAKANAATAAELVRWLWALGMMCREGAE

SEQ ID NO: 287619 - protein, 359 aa, unidentified
MDIRDPAKRHVVGGVDTHKDLHVAAVVDERDRVLGSRSFTTTRQGYRQMLAWMGSFGEVQRIGIESTGSYGAGLLRFVQTVGIEVLEVTTPDRHDRRRRGKNDDLDAQNAAHAAFAGQRTVTPRSRDGMVESLRVLSACRKTAVAARRVALQLIQNTIVCAPDGLRDDLRSMTRMQLIRTLAAWRPDLTAYRDVEAAYRITFKSLARRYLELHDEIADLDVMIGAIVDELAPDLVARNSIGHVGAAQLLLAAGDNPDRLRSEASFAALCGTSPVPASSGKTIRHRLNRGGDRHANSALHIIAIGRLRTDPKTKIYVAKRVAEGHSKLEAIRALKRYIAREVFTLIMRRHKTINQTQIAA

SEQ ID NO: 287620 - protein, 347 aa, unidentified
MFIIGCDLHTRFQQIAMLDTETGEIVEKRLEHENGEAKRFYQSLERPALVGIESTGYTLWFAEMLNELGHELAVGDAAKIRASETRKQKHDRRDAWHILELLTEGKFPRLWLPSVEEREVRVLLEHRHQLVQLRTRAKNGLQAVALNRGLRRRGQLWTAAGLKRLEGLPLGEGTKRRRHDLLCLLHQLDAWVEELDERLRAETARRPAAQRLMTHPGVGPLTALATVLILGPVERFAEARQVTSYVGLIPAEESSGGRQRFGHLTKQGSRLLRFLLVEAGQSATRMDPGLRRTYKRLTFRKGRSIAKVAIARKLVIRLYIMLRDKIDYEEFCRRGSHAGMLGEVALA

SEQ ID NO: 287621 - protein, 331 aa, unidentified
MTDAASRDQTMPAPLDFVGVDMAKQAFVWNLHNVRGTHSAGNDMAGFQALLAALKGRRIGLITIEATGGLERELASFLLQHGLPVAVVNPRAAREFARSMGHLAKTDAIDAIALAHYAQTLAAKASQAGVQFAPPNAQVQALQAMVARRVQLLGMRTAEKNRLGGAIRVLKKSIEVVIKTLDKEVARLDKDIDAHLQQHFKEQTKRFEAIKGVGVTTCAMMLAFMPELGHVDSGRAAKLAGLAPLNQDSGRARGKRHVWGGRSVVRSTLYMATLSAVRFNPAIKTFYDRLLAAGKPKKVALTACSHKMLRILNAMARTGQPWTDEFHAITP

SEQ ID NO: 287622 - protein, 391 aa, unidentified
MEHSMQKLNDFSRSRIALEPDGTLIAVIEMSLSSWLVAGIVPGVERQPLKKLAVDESALLKLLHRWREEAEKAGRRIGRIAVAFEAGRDGFWLARWLKARSIEAYVIHAASVAVSREHRRAKTDRLDTELLKRAFLGWLRGERDHCKMVAIPSIKNEDAKRPNRERENLVSEQSRIINRMKAALIRLGIRGFNPKLKRAAGRLEDLRTPEGEPIPPNTLAELRRDMERRRLVRDQIRQIEEARLQRLDHAPYDGPHAMVRLLARVIGVGIETADMLVYEVLSRNMRDRRAVARYAGLTGSPDESGRKRREKGLARSGNGRVRRGMIQLAWRFLLHQKDSALVQWFRARTENARGTRKPMIVALARKLLIALWRLARQGVVPDGVVLRPATQ

SEQ ID NO: 287623 - protein, 374 aa, unidentified
MGTPSAQTLVGMASEMFQELEEVPMTIVGGLDVHRQQITFDYVDNQGLVHWGQIRPATRKTLRGWLAEHCPDGDGEFALEGCTGWRYVTEELAAAGVVAHLGDPAEVAALRGPKKRAKTDRADARLLRTLLLEGRFPESWIPLAHVLEIRTLGRLYCALMEERRGWQQRIHAQLFHQGCPPITALLSQPGRDELARAELSAAGRQYADTALRRIDELTAEIDPLRTQLTSFARRQPGCQALQRHYGIGWLCAAIIWAEIGDARRFASSDQLVRFAGLDVTVYSSDSKRSPGHLSRQGSPELRWAAFEAAKCAARRGSPDYAYYHKLAAKHDGNNGKNPTLAVERKILRRSYHTLRELGDAALALPVPQPQQVAA

SEQ ID NO: 287624 - protein, 424 aa, unidentified
MNARSLGPFTAYIGIDWADAKHDVCIQPGESDEREFGRISHQVETIDQWARSMYTRFGSPIAVAVELTKGPIVYALQKYDFFVLFPVNPTMLSKYREAFKPSGAKDDPTDAEFALDLLMHHPGRFQALRPQSAEMRELLHLVEKRRLLVDDKTRFTNRLGNALKQYYPQALEWFEHLDTLMFCDFISRWPTLKQVKRARKSTLERFFKEHRMGRTHVIERRCQGIKTATPLTEDTAVVNAHKLQALAVVEQLRTTLEVIKGFDAAIAALAPKLPDYALFSPLPGAGPNLCPRLLVAFGEQRERFGSAAEVQKLSGIAPVTERSGNKSWVHWRWQCPTFLRQTFVEWAGQTINKSFWAGAYYRQQRDKGCDHHTAVRALAFKWIRILYRCWQTRTPYDESKYLNALKRRGSPLLQALQAPRPTQT

SEQ ID NO: 287625 - protein, 322 aa, unidentified
MPDNSLWVGVDVSKRRFDIHVRPTTQSFQEPNTQKGITAVVQRLAEIKPALVVLEATAGMEAMLAAALAAQQVPVAVVNPRQVRSFARATGKLAKTDSIDASILAHFAEAVQPQVRPLPDAQARDFNALVSRRRQLVEMIVAEKARLAGFCGVSLADIRTHIAWLERRLKRLDGELQSAVASSPIWQAKSELFKSVPGVGDVLSLTLIAALPELGTLSGKQIANLVGVAPINRDSGSMRGRQSIWGGRAQVRSVLYMASLVGVRHNPIIKAFYERLRERGKMPKVALTACMHKLLVILNAIAKSGKPWCYQSHAMSTSAGPA

SEQ ID NO: 287626 - protein, 344 aa, unidentified
MDHFAGLDVSVKETSVCIVDDTGRIVKEVKVASEPEALLKVLGNPIYRFKRIGLEAGPLSQWLFSGLAEAGLPVVCVETRHMQAVLKAQINKTDRNDARGIAQMMRVGLYRSVHVKTLRSQKLRMLLTHRKLLQSKAIDIENDLRGTLRNFGLKVGMVGIVRFEARIHELVENQPDLAVLVEPLLIVRRALREQIVILHRRLLAIVRDDEVCRRLMTIPGVGPVVSLTYRATVDVPARFRKSKSVGAVFGLTCSRYQSGEVDWSGRISRCGDEMMRVMLYEAAQSMMHSKKWSWLKAWAMQIARRRGMKKAIVALARRLAVIMHRIWVDGTEFRWTREQAAAAA

SEQ ID NO: 287627 - protein, 377 aa, unidentified
MREKLRFLGLDVHAETIAVAVAEPDGEVRSLGTIANREESIRKLIRKLGPVEHLRACYEAGPTGFVLYWQLSQLGVECAVVAPSLVPKKPGDRVKTDRRDALKLARSHRSGDLTAVWVPDEDSEALRDLVRQREAAKQDQLRARHRLTKFLLRTGRRPPLGLKAWTERYMRWLAQVRYTQPAQEVTRLDCMNEVEHMSARVKRLEEAILEVVKLAPEPMQELIRGLQALRGVAHISAVTIASELGNISSRFQSARKLMGYCGVFPSEDSSGKRIRRGGITKAGNAHLRRIVVESAWSYRHLPRVGEKLRKRHQGIPAEITEIAWKAQHRLHKRYMTMMNAGKDQRKVMTAIGRELLGFIWAIGIKAEAAASKQQLAA

SEQ ID NO: 287628 - protein, 427 aa, unidentified
MNNVTYQPTLCVGADVHLDEIVLRAVDKALGHEVVDRFRVTNNLPGAQLAAATIAAAATELGYLRIEIACEATGMLWIPFHRYLSTAPPLQPFELELVCFNPKLVAKFKDGLVLRSPKDDDRDAFDIAARLRFGELPISYVPSDFWQGLRRLTRYRYRLSKAMSREKMRFQSHAFLKCSDWKRVKAFSDIFGATSVALLTEFTVAELQEMTHDQLVDLITHRGHGRFADPTATARAVREALRTSYPIDPRMDEMVTATLAAGWDHIRYLKRSMKRLDQLIARYIDLIPNPIITIKGLGAVITAGILAEVVDVLRFPQEKQLAQYMGLTWRKSSSGGFVSQNTRLTKVGNVYLRYYFILGANLLRQHNLEYKAYYWRKYQEVSKYQHKRALVLTARKLVRLVHALLTKNEPYVRPRTTRQDQEDDRLQ

SEQ ID NO: 287629 - protein, 416 aa, unidentified
MSGTLFVGIDVSGAANAVCGMTQEGTERMRFAACNNHPGADELVQRVVEILASLNLDQVVFGLEATGLLAWHLRRHLTENPSLQPYQSTVHMLNPKVVAGFKDAYNSLPKTDAVDAWVIADRLRFGRLPKPHAVDERYEALQRLTRARHRLVEDLVREKQRFLDVLFLKFNTFTQEQPVTSSFGATALALTTGELSPERIAAMPLEELAAFINKAGKGRFRDPQKVAEAVQKAARSAYRLPKAMADAVNIVLATHVTVIRALEGQIKVLEQQIAQLVGTFQHTLCSVKGIGPVYAAGILAEIGDIRRFPNEAALAKFAGLTWTRHQSGKFESQETSLTRSGNAFLRYYLVEAAFSVMVHNAEYRSYYERKKAESKTHAHKRALALTARKLVRLVYVLLRHGRLYDPYRRGVKAVSR

SEQ ID NO: 287630 - protein, 393 aa, unidentified
MAQVDDLSLSLVALDQDSTLIAVIEMGLNAWLVAGLVPGVRRQPLKKIEPEPAALLRVLRRWREEAVKAGGAIRRIAVAFEAGRDGFWLARLLRREGVEAHVIHPTSVAVSREHRRAKTDRLDTQHLMRAFLGWLRGEPKHCQMAALPSLEEEDARLPGRERETLVKERTRIVNRIKSVLIRFGLRSFKPLLRNAEARLAALRLPEGGPLPANTLCLLKRELERLRLTQGQIRTIEAQRAAEVAAAKAAAARGERSRREAAMLYLLIRIVGLAVETAQTLTHEIFARRLRDRRAVARYAGLSGAPDESGKRRREKGLARAGNLRVRKCMIQLAWRFTRLQKQSALAQWFFARAAAAKTLRKTLIIALARKLLIALWRYVELGVLPEGVALRAA

SEQ ID NO: 287631 - protein, 464 aa, unidentified
MPLRLGIDIACRAAHQVSLADEQGRFVWTGRRFRTTAHDLARLWAMLPEGTDPAEVLVVMEPTRNAWVPLAAWFRRHGASVVLVPPERSADLRRYYAKHTKSDRLDSQLLARLPMLHPDGLYPEQGIGPGDALKRAAKLHSTLTHRRNQSLARLDALLELLGPAWYAAIGADLANRTPLKFLAAGYADPQVVKRLGRARLARFCYRHSRGAWGEPHADALLAAANQTLELWSGGELDYPDLAEDIAIEARLALQLTEELKDLDERTALLLKQADPTRILTSAPGVATITATAILGRLGDPNRFTSLAGARAFTGLVPILDASGLNGRHGGPTKRGDAVLREALFMAAGQARRIDPTLAAKYHRLMTEAGKHHNSALCHIATTLLTRIIACWRAGQPYLLRDVDGTTVTIDQARAIIAERYLIPKDLRARRRTTTATGTDRRSKESPSAPSTGPPNHNATTPDAA

SEQ ID NO: 287632 - protein, 420 aa, unidentified
MKELSLDQFSVIVGIDWADQKHDICEFVTDKQTMSLSVISSKPDSVHEWATDLQKRFPDQKVAVACELKKGPLVYALMKHAHIVIMPIHPATLARYRKAFRPSGAKSDVTDAKLLVELLQTHFDKLSPIVPDTPEVRALAQLVEYRRKLVQDRVDLTNSITWHLKNYYPQELDWFKEKDSHLFADFVLRWPTLDSLKRARRATLTSFMHQHNVRSQHLIEGRINTIKGAVALTDGEGVILPNSMMVESLAPQLNNLLTAIERMDKEIKQRYHAMDDRHIFDSLPGAGPQMAPRLLVAFGSDRTRYKDASEIQRYSGVAPVIESSGTKSWTHWRYSCPRFLRQTFVEWAGQTVRYSFWAKAYYEQQKHKGKPHNTIIRSLAFKWIRIIFRCWQEHEVYDEVKYLQASRNRRAPLLEFAAQG

SEQ ID NO: 287633 - protein, 344 aa, unidentified
MNDLTTYGLDLAKQVFQVHWVDLHSSEIHRKTLRRTQVSAFFARAPRGVVAMEACGSAHHWGRLLSSFGHEVKLIAAQFVRPFVKTNKTDAADAQAIWEAAQRPDMRFVSVKSEQQQTVLSLHRLRAQWVSIRTQQANQIRSLLYEFGVVVPLGWRSLLKAVPQLTDEAPTLLRTELLEQLAALRTATARIDALEKQLASWQRSESECQRLMAIPGVGPLTATAVVASVADARQFRSARQFAAYLGLVPRQSGTGGRVKLLGISKRGDPYLRTLLVQGARSVLLSQSRHGRSGDPWLAELLERRPNNVVVVALANKMARTLSALLAHQRTFDAHWHRRVTQAAA

SEQ ID NO: 287634 - protein, 349 aa, unidentified
MAEQRISYTGERIDVGIDVHKETYTVTCLWQRQMVKTATVPADPVRLAESLPRWFPGARIFSAYEAGFSGFVLHRALTTAGITNIVVNPASVAVAANDKVKTDRRDAKRLARDLADGRLRGIYVPTEAEELARLLPRTRAQLVAHRATITRQIKAKLHQFGLITPASRRLMSSRYLREIAAWELPLELRVSLTLLADQWRFATRQLLEVRRLLREQAKAQVALETVYRSVPGVGEVVARTLATALGDMTRFANERALLSYTGLTPSEYSSGTAIRRGHISRQGVSRLRHVLVETAWRALPCDPILQAMFDRIAATRGKQRAIVAIARRLIGRIRACFRHGTTYAVGTVG

SEQ ID NO: 287635 - protein, 340 aa, unidentified
MNEWTVAIGVDTHKRTHTAAALDRFGNQLGLLEIEASELGYRRLWEWASGLGGCAFAIEGAGSYGAGLARFLVARQAAVFECERPRRGDRRRDKNDQRDAVLAAGRLLAPAEGLSLLRGDGVRETLRVLLLERRSADEARTAALNQLHSLAVTAAPACCERLRALKGMPLARAAAALGADANETAAPVIEVLRRLGRRVLALTEELRTAERQIERLLAEHAAPLLAECGVGPITAAQLLVSSGDPKRMRSEASFAALAGTSPVEASSGPIKRHRLNRGGDRQLNRALHMISLNRCRYHAETAAYFQRKLAQGKTKREARRCVKRMLARRFYQQLRALPTT

SEQ ID NO: 287636 - protein, 351 aa, unidentified
MREYIALDSHKRYSWVEREEVETGRVRQCRLLHTRGSISEFLGGCLPGTPVAIEATANWYWIIDEIEQARCVPRLVHPRKAKLMMGQINKTDKLDTHGMNILQRNGTLPTVWIPPGPLRELRELTRTRVVLVAQRTRWKNRITATLAKWGLPPSEYSDPYGKSAREELGKRLEGLPEQTRWATRQMLAQLDSLSEQVREFEKRLEELVEVTPEMQRLETLPGVGVILAATIALEIGEIRRFASAERLASYSGTTPRVHSSGDRTRYGRTRPDVNRYLKWAFAEAANSVAVNYRRCPERHVSQLYARLRARKGHAKAVGAVARHLAEAAFHVWSRQQAYRDPTVATGRTSEV

SEQ ID NO: 287637 - protein, 319 aa, unidentified
MAQNDLVVAGIDVAKDKVDVCIRSLSLRRTFASTAEGRRELASWLRRQKVGKAVMEASGGYEREWGKALRNSKIEVRIVDPKRVRSFARSAGRLAKNDTIDAEMIAWFAETFDEARGQAYDAAREQLQQMVNARQALKDMQAKLASQGEHAVPAAVRRIHARISKTIAAELVKIEAEISALIQATPHFAELAEIIESVPGLARTTSAALIATMPELGQANNKIVAALLGAAPYDDDSGRRRGERHIRGGRRRTRNIFYMACLGAATRHNPVLKAFYDRLVARGKEKKVALVACMRKLISILNIMIERRQKWDASRYALS

SEQ ID NO: 287638 - protein, 391 aa, unidentified
MSMYFVGIDISKYKHDCCIISAADQKVVSKFTFKNDKAGFEELLTVLNSLSNTEDIKIGFESTAHYALNLELFLENAHHSFMEVNPVLIKEYKKSTTLRRTKTDSVDCESIARWLMAVEYKPHSKGFYHSYSLKSLTRLRDRLIRQRSFYLVKITNVLDHTFPEFKPFFNERLSKTALYLLENYGSAAKMARMTSASYDKLRCISRGKFSIQQFLRLKELAANTVGVNNSIFDIELNSLLTLYKSLVKEIDTLESEIHKLIEEVHPHYLTIPGIGPISAAVIYAEYGDISNFSNPGQMLAFAGIEPGINDSGTESHGGRMVKHGSSQLRYVLLNACLPLIRFDLTFATYYAKKRAEGKKHRVAITHVAKKLIRVIYALERQDIDFNTQKLR

SEQ ID NO: 287639 - protein, 343 aa, unidentified
MNVTTIGLDIAKNVFQVHGVDGHGKVVLRKKLSRGKVLEWFANLPPCLIGIEACPGAHYWARELLKLGHSVKLMPAQYVKAYVKGNKNDGNDAEAICEAVSRPGMRFVAINTEAQQEIQMLHRIRSRVIAERTALLNQIRGLLGEYGIVFGPGPSQVRRGIAVLLTGEDPRLSAMARELVLGFQAELRELDERIGHYDARVKATCAGDARSVKVAALPGIGPLTATALVAAVNDGKQFQNGRQMAANLGLTPREHSSGGKQRLLGITKRGNTYLRTLLIHGARTVLRHATGKTDRFSRWALAIQARRGANVAAVALANKLARIAWAVLARDRIYRADWAKQSV

SEQ ID NO: 287640 - protein, 339 aa, unidentified
MRLYGAIDLHSNNNVLVLLDEEDRVIVEKRLANELSHVMIELATHKKDIEAIAVESTFNWYWLVDGLMKAGYKVKLVNTAAVKVYEGLKYTADEHDARHLAHLMRLGVLPTGYIYPREERAVRDLLRKRGQLVRCRTTQILSVQNMASRNSGHGISKAEIRDLNEETITEICGGNKNRALAIESNIAVMRELDDQIAKLEHAIIEQAKLKPEFAQLMTINGVGKILAMTIMYEVGTITRFEKVGQFASYARCVSSSRWSNGKKKGEGNRKNGNKYLAWAFVEAAIYAVRFNEQIRKFHQRKKAKVNGIVAIKAVAHKLARACYHVLKKQESFDVTRAFA

SEQ ID NO: 287641 - protein, 398 aa, unidentified
MLAVVITDFAHDASPSQRRKFGAFDSDLRALGERLREQKVQEAVMESTAQYWKPVWRQLEGQCRLFLAQPHSNRAPRGRKRDFEDAERLLRRHVAGELILSFVPDPEQRLWRAISRAKHQLTRDRVRLYGQVEALLEDSRIKLSSCVSDLFGVSARRMLQALAKGNHHPAALAAMAEPELQATPAQLTDALQAAATLSPLHRQILGLFLERLQLIDVQIATLQQSLAAALHEHQQAVLRLAATPGYGIDSAQQVIAEIGPQAATFSSPGELASWVGVCPGREESAEVSTSNRSPKGNRLMRRVLTQVAHASIKTKDCYFQVVYRRLLPRLGHNKALWAVAHRLCRLTWKILHQGVNYIEYATGQASHHAKNHIARIVRQLRSLGYQVVAPAPSPSPQP

SEQ ID NO: 287642 - protein, 351 aa, unidentified
MSSVKYPKLLQDIQDKYSSYDYYIALDWSTTVVSIAHMRSSGRTPKVTTMPSDIPQLVKHLKSLRGRKILTFEETTGSQLLYVELRDFVDRIVICDPYRNSLLSDGPKTDEIDAQKLCLLLRAGLLHEVYHTSEEDYWMRKLVRSYLGMVKAGVRTLNQKSALYRALGMQYKKEPFTTDNPMLQFIADHLDQSIEQYRYQKVEYEKKFRQITRKNKVITELSRISGIGAITAVIVYALVLDARRFKKKYHFWGYCGLVSHEKVSGGRSYGKRRGRYVSTLKYVFRSATIAALRGNNDIKNYYDHLLSLGYSTQKAQHAVSRYIATSCYAVMKHKVPYQPYQWRKAMNKAAA

SEQ ID NO: 287643 - protein, 461 aa, unidentified
MSRKKPTGKQKGSVQNRVDWKALEIVHPDAAGIDVGGSEHWVAVSPDRDPEPVRRFGCFTADLREMGQWLVEKGVRSVAMQSTGVYWMPVFEVLEQHGLEVYLVNARHTKNVPGRKSDVQECQWLLKLHAFGMLNNSFQPTDEIRIARTLWRQRGNLVGEASSVIQRMQKALTEMNVQLSNVLSDLSGMSGMRIIGAILEGERDPWKLAALVEPEVKATLQDIAKSLEGNWREELLFVLRQHVELYRIYQQKIIDCDLQLRKHLESLGSKRDLKTQPIGPRPKGKKSSRNAPAFDLRTELYRITGIDWAQINGIDVLTAQTVIAEAGADLSAFPSEKQFASWLGLCPTNEQSGGKILNRRTRKVVNRATVAFRNAALTLLRSQSYLGAQYRRLRTRLGAPKAITAMARKLACLFYRLIKHGQRYVDKGTEYYEARYREQQIRSLAKRAQKLGLQLVIPKTA

SEQ ID NO: 287644 - protein, 406 aa, unidentified
MDYFAGLDISMDETHVCVLDREGEVVYECQTASTAQAIADELAKAPSCRRIVFETGRMAPILFHGLSHLGLPVVCIESRQAYQALKSLATHKTDRNDARGLAHLARTGFFKPVHVKSLSAHALSSLIIARKKLVGQRVTLENQIRGLAVVFGIRLPRALAAAFINQALKASEGVAGLSAAIRGLIAARTAVMTAVAAIDADIRRMTRASAACRRLMTIPGVGQLTALAFVAAIDDPSRIRRSRDVGAYLGLVPRRYQSGEVDYVGGISKCGDRRVRTLLYEAANVMLTRSKGQLKLKDWAFAITRRSTMRKARIALARLMLAPENIQAMLIGSLDTLKTIQRIFAAAAALRRAGSSGTPAESKPIRPSSFWSGRPLPAPCRALQDARFPSPRQRAVQIGQVDLGHE

SEQ ID NO: 287645 - protein, 399 aa, unidentified
MFVGIDWAQQAHEVCAVDASGTIRHRATVEHSQDGLDQLVRHLGRWATEGELLVGIERPEGRLVDRILEAGYPILLVPTFAMKDLRRRYAVGGAKSDRGDSYVLADVARTDGHRRRRLEPLSEHTRAPRAVVRTRDDLVDQRRALANQLRATLAASWPGAGAIVADVDSEICLAFLERSPTSESAARLTETRLTSFLTKAGYSGRRPAAQLLARLTAAPAGVVGIEAEARADTVRAMVRVLQALLVSIKNLDRSVIAYLGEHPDAEGFTSLPRSGQINAAQILAEWGDCRQAYPQADSAAMLGGLCPVTHASGTHRDVSFRWAGNKRLRQAMTTFANNSRRASPWAAEVYRQAIARGCDHPHAVRILARAWTRVIWRCWQDHRAYAPALHRAARRLKAA

SEQ ID NO: 287646 - protein, 320 aa, unidentified
MIAAKVLIGIDVSRDWLDGFLLPDGQRFRLPNSAEGHAHLIEILKSSPSAPRVGFEATGGQEWTLWKALVGAGINAVQLPPAQIKAFARSHGIRAKTDRIDAKLIARFMAFRPEAGRALPTEKLQILRTLTTRRAQLVGMRKRLVLQISARTRQAIPAHVDSMDEELKALLDAQILELESRIEHVITQEKTLADKAMRLRSIPGIGPVSAAMLIAEMPELGKMTSGEAAAMTGLAPVPYDSGTMRGKRMIAGGRRALRHVLYQAALAAAYHNPVLKSVAQRLKERGKPHKLVIVAVARRLVTIANAILKSGASWSQQSQT

SEQ ID NO: 287647 - protein, 319 aa, unidentified
MNTIAKNYSQNNMRNVGIDVGKSNLDVFIYELDLHWRVANTEQEVRRLLTTLNRYKLARIVVEATGGYERLLVEACAEKEMPLVVAQPMQVRQFAKAQGVLAKTDKLDSHLIAQFGAVMQPQPRPIPSKNVRDVRDLLARKRQLNELRTQELNRQHKAVKALQASHTRLVKICDKEIAQINLKLEKAVASISEWMRTYEILSSVPGIGDGVAYTLLGELPELGQLTHRQIAALCGLAPFNRDSGNLKGKRRICGGRAPIRTVLYMAMLCGIQHNPVMKSFYTRLVAQGKHKKVAITACMRKMVTILNAMVRDNLEWRMM

SEQ ID NO: 287648 - protein, 316 aa, unidentified
MLVGIDVAKGELVVAVRPSGARWTVTNDERGVEALVAQLRREAPDLIVLEATGGYELLCVAALAAATLPVVVANPRQVRDFAKATGQLAKTDRIDAEILALFAERVRPAVRALPDVEAQELDALLARRRQLLEMLQAERNRLGQVFGRGKQPVKKSLKTHIAFLERELTRADTDLSEIIQQSPAWREKDDLLQSVPGVGRVLSFTLLADLPELGRLSRREIAKLVGVAPLSRDSGTMRGRRFVQGGRASVRAVLYMAALVATKRNPVIAAFYQRLVAAGKPKKLALVACMRKLLTILNTMVRTGERWSADYALAIA

SEQ ID NO: 287649 - protein, 362 aa, unidentified
MSKTEERKRLCVGVDLHKTQFTVSALTEDGEVVLQEEYRTTPDGYSEFIEEMHRYEEEDGCSIELAVETTGNARFFKNQMEKEFFDVTVVNTNKFKVITYSTKKTDANDALTLAMYLQKEMLPEAHLCSQTSEEIRRMLKTRRILVQSVVKIKNQIHGMLLGYGIETNAAQFQSKRKRQELMNDLANHYYSDFTASSLEVMLNILDVLAEQIKDVEAQIENMVEDNEDVELLKTIPGVGKIGAATIASYTEDLERFDGDFKRFAAYIGIVPSVHNSNETVHLGRITKHGPQELRTAFVQVALGMIRASKQTSNWRLIEDYRRKKTDKGSGRAIIAMTRKIARIVFVMLENREPFNPELMLSK

SEQ ID NO: 287650 - protein, 346 aa, unidentified
MEHYVGLDVSLKQTSICVVNQTGSVVREGVVDSDPEAIAAFVRSNVPGVVRIGLETGPTSTWLWTELRRLSLPAICIDARHAKAVLKMQINKSDRNDAAGIARIMQTGWFKEVCVKHLDSHAIKALLVSRALLVKIKRDIENQVRGLLKNLGLVIGRAKMNVFAMRAAELADARPELAAAVEPLLKAREAVGEQIADLDRKVMQLARNDAQVRRFMTAPGVGPITALCFLATIDDPTRFKKSRSVGAYVGLTTRRYASGEVDWTGLISKCGDKMLRSYLYEAANVLLTRVAKWSALKAWGVRLAKRSGLRKAKVAVARKLAVILHRMWIEGSEFKWSSKQAASQSA

SEQ ID NO: 287651 - protein, 347 aa, unidentified
MTIVEAARGITGGVDTHRDVHVAAALDPLGGLLGTESFSTDPAGYKALVRWLEGFGDVTKIGVEGTGSYGAGLARHLRRVGVEVIEVDRPNRQKRRASGKSDPLDAVEAARAALGGRASGHPKSRDGAVEAIRVLVVAKRSARQARVKALIQMRHLGYSAPEQLRCRLKGLSVPALVAEGSKLRPTRSPDPVTAPTKASLSSLAHRIEALDRERAELDERIEALLVVTVPDLLGLFGVGPDTAAALVMAAGDNPERLHSEAAWAHLCGVAPVPDGSGRTSGRVKAHDGGDRQANSALWRIVMVRIAHDPETRTYFERRVKEGKTKAEVIRILKRYIAREVYRYLPRG

SEQ ID NO: 287652 - protein, 453 aa, unidentified
MAQAKPQVIDDEEHERVYDRVAAVDVAKDSGMVCTRTPHRSRPGARQSTVWTVKARMTAIRALGRQLKRDGIEMVTLESTSDYWRIWFFVLEAAGLAVQLVNAAQARNLPGRPKTDKLDAMWLARLTEMGLLRPSFVPPAAIRALRDYTRARTRLVQERTRCFQRLEKLLEGALIKLSSVASKLTTESAKDMIKAMIAGERDPRTLAALARTRMKAKHDDLVEALAGMFDDHHGELAQMLLDQIAFCDARIAQLTTRITAAVAAMPAAWGADADGTTGPDAGTGPDAAALPAVARLAEIPGLSPDLARSIIAEIGLDMTRFPTAAHLVSWAGLCPRARQSGPRTRNGKKNQGDGWLRGALGQAATGASRTATFLGERYTRIARRRGKAKAQVAVARSILVIIWHLLADPEARYTDLGYGYYQARTDKDRRVRNHIRQIEALLGHPITITPRAA

SEQ ID NO: 287653 - protein, 355 aa, unidentified
MQSNKISFKGQNIYVGIDVHLKTWHVTTLTESGYKYSFAQHADAKELFDRLNKKFPEAHYKSAYETGFCGFSVHYALTELGFENIVVNPADIPTTGKEKAMKTDAVDSEKIAWSLKRGELTGIYIKDKHYMDDTNLIRLRQRFIRDLSRQKNRTKHLLYTQGVVYPERFSKKGTHWSRNFMKWLREDVELLSEEKRTLMLLCNQVEHIRQDILAITREIRRLSTTDRYKENFSLLSSVPGFGLITSMSMLTELDNNPIRFPNERKFVAILGLIPTCHDSGEKKSNGAKTFRGNKQIGPLIVEASWVAIHRDYQLGCYYTNCCQSMNPQKAIVKVTRKLACKAYAVMKTKKAYVLS

SEQ ID NO: 287654 - protein, 402 aa, unidentified
MNCVGIDVSKGKSMIAVMRPFGEVVVSPFEVRHTANELSELARLLKSLDGETRVVMESTGNYHVPVAWLLHDAGLYVSVVNAMLVHDYGNNSLRRAKTDKKDAIKLANYGLDHWLTLPRYVPEEDTRLMLKACYRQYQQYSKVQTMLKNNLISLLDTTFPDANRLFTSPPRDDGREKWIDFVATFWHRECVCDLSEKAFAAKYQKWCKKYGYNFSEGKALDIYAAARGHFGVMPKTDTAKLLVEQAISQLRATSSALAALKQEMQSLAASLPEYPVVMEMFGVGPALGPQLMAEIGDVRRFHSKKALVAFAGIDAPPYQSGQMDVRSRSISKRGSASLRRTLFLVMGVILQCSPTDEPVYQFMNKKRSEGKPYRVYMMASANKFLRIYYASVKAYLDSLEHN

SEQ ID NO: 287655 - protein, 344 aa, unidentified
MQSMYYIGLDVHKRTISYCVKDGSGHIHAEGSLPATRFDLDRWMKTLPQPWTAAMEATVFTGWIYDHLQPHAAALKVAHPLMLRAIAAAKKKNDRIDANKICDCLRCDFLPECYMASTAIRERRRTLRYRNLLVRQMVQMKNKISGLLMEAGVNYNKQRLHKAGYFRELLATNPDIDEGLCSLLRLCRETVVRLGRTESALVRSLERDSLLLERVERLMTIPAVGPITALTWALEVGDVQRFSSIKKAVSYCGLCGAEKSSANTVQRTPLSKQRNKHLQTTLIEAAKMAPRNSPELAMLYDQEKQKGNANRATLAVARKLVAYLLAVDRGQRNFQVVETNCIAA

SEQ ID NO: 287656 - protein, 353 aa, unidentified
MLIIGCDYHPSFQQIAFVDRETGECGERKLTHKEEAESFYRDLNGRSVRVGMEATGQARWFERLLAEQNFELWIGDPAEIRAKRVRKQKNDRQDAEHLLQLLVEDRFPQIWVPSPENRDLRQLLWHRHRLVQMRTRVKNQVQAIALNEGIRRKKGLWSKLGRVQLESLSLAPWSARRRQDLLELLDRLNPKIDELSTAIQQAAEQRPEVQRLMTHPGVGPITALAFVLILGVPERFQCGKQVGSYLGLIPCEESTGGRQRLGHISKQGNTLLRFLLIESAHAVVRYDPDWRRRFLHLAMRRGRPIAKVAMARRLAVRLYWMWRKAWDYQQTLKFGSQGRKLSSHNVVTTGSTR

SEQ ID NO: 287657 - protein, 421 aa, unidentified
MKNSAARKLKQVPAGYLIVGIDPHKKKHAAVAITEDLVVRAKFKFMNSRNGFEEALQKARAEMVKTSCRGVMFAIETGGHFWRNFAYFLEERGIPFRLISQFTLKRMRDGRDLNRRKNDFRDAEMAAGVLRTGDFTETKLPQGVYADLRSTHSAYFRLVKERTRIINLMKGLLDGLFPEFTLVFKDPCGRTALVVLSTCPSPIAIASMNEDDFVDVIRSGRQGRLMRKKLRALHQAAQTSIGIKPGADAVATEVSLLVSRYYLIEQQVDRLVKSLIRLVDRTDEGKYLLSIPGINYLSTAALLAELGPLKSYHNAKQVIKMAGTNPIESESGGKRLGQTPMSKKGRPRLRYSAWSAVIPLFRHNPDFRAWAKRLRERPAHANPLNGKEVVGAALNRLLRLIYALVRKQEFYRSPQLALVAN

SEQ ID NO: 287658 - protein, 421 aa, unidentified
MANATEWEKIYGICCGIDVHKKLLVACLNRGNEQEVKEFGASTREILELVDWLMKNDCEIVAMESTGSYWKPLYNILEAHKLPAIVVNAQHMKAVPGRKTDVNDAQWIAKLLQHGLLRASFIPDKAQRELRELVGYRKSLVEDMTRELNRLQKMLEGANIKLSGTVSDIAGKSAMNLLEEVLNGTAMDKAAIARMRKEKKVSSRLKATDEQLADDLTGFLTPLQTMMIREVLSHIKELAEHIRRLEDEIDRHMDDGQKQAAKKIEAVTGIGENSAKAIISVIGTDMSRFPTDAHISSWAGLCPGNNESAKKRRTGKTRKGNKLLRTTLVVCAHAAIKNKASYFAAQYQRICAHRGGKRAIVAVAHSMLIAIYHILRDGVPFRDLGADYFNQFNRERKINSLLKKLKELGWEEPFATAAQSA

SEQ ID NO: 287659 - protein, 319 aa, unidentified
MAQNDLVVVGIDVAKDKVDACIRALALRQTFPSTAQGHRKLIAWLRKHKVTGAVMEASGGYERDWARVLRQAGIEVRIVDPKRVRSFALSAGRLAKNDTIDAEMIAWFAETFREAPSQTHDAAHEELVALVKARIGLVDLKTRLQSQNEHAAPGQVRKAHARILKSLAAEIAKLEAAISAKINATPDFAERAEIIESVPGFAKTTSANLVAGMPELGQVSDEIAAALIGVAPYDDDSGKRRGERHIKGGRRWVRNAIYMPCLGAATQNNPVLKAFYDRLIAKGKEPKLALVACMRKLIVILNTLIARRQKWDPSRYALS

SEQ ID NO: 287660 - protein, 392 aa, unidentified
MYIVGIDIGKNHHEASIVSPEGKQIGRSLRFATTHKGADSLMSFIFKNIGNSPCVFGMEATGHYWYPIYSFLKAKGYTIYVINPIQSDSLRKMYIRQTKNDSIDSFLIAEVIRFGQFGTTSMADENILAMRQLCRYRDSVISSRTEIKLRIGTIMEQIFPEYEKQFSSLWVSTSMGILEKYLTPENIENAPIDELFEIIKDKSHNRLTRAKAISIKEAAADTFGIKIAQDAFSFQLKQLIDRMNFLDKQIEALDCQILEYYEKFDCYLHTIPGIGMIAAATILAEIGDINRFNSSSALVAFAGIDPTVRQSGEFSSTHNHMSKRGSPYLRHAIFLAATTCSFHNSPLNAYYKKKRDQGKHHLTATGAVARKLTSVIYAVLRDSKPYEPKSFC

SEQ ID NO: 287661 - protein, 466 aa, unidentified
MTPRRTQTFRMRPQPAEPLRVQNPHAAGIDVHSAQHWVAVPAEAAPPPPADHPPQLPAHVRRFGACTADLEALADWLGACGVTTVALESTGVYWVPLFELLERRGFQVFLVDPRQTRQVSGRPKTDVLDCQWIQRLHSYGLLAASFRPEDQVVVLRSYLRQRQMLIRYAGQHVQHLQKALEQMNVKLTEVVSDVTGVTGLAIIQAIVRGQRDPLELAKLRHERCHRSEAEIARALYGNWRDEHLFALRQALELYETYRAKLRACDDCIERHLQTFTDHSGGRPLEYKARRRSRQRYEPAFDVRAALFRWGGVDLTVIEGIDRTTALTILGEIGRDMSKWPTVKHFVSWLGLCPQHQGSAGKIKSRHTRRGANPAARALRLAAQGCHHAKNALGAFYRRIQARCGGPKAVVATARKIAERVYRLLKYGQAYVRQEMAAAEEAYRARVLKGLARKATELGYQLVPTGP

SEQ ID NO: 287662 - protein, 420 aa, unidentified
MAPLSNQQFKAFVGIDWADTKHDICLQQAGDDRREFDCIPHQVTRIDEWAKALHQRFGGPIAIALELARGPIVSVLQKHAFFTLFPINPLMLAKYREAFKPSRAKDDPTDAELALDLLLRHPERFSPLRPQSAGMRSLLSLIEQRRELVGDKTRFTNRLTNALKQYYPQALEWFDDIDTVLFCDFLTRWPTLPAVRRASRKTLETFFHAHNCRRAKLIEGRLESIRCAASLTDDPGIVAPHRLLALMLVTQLRTALAAIDVFDKEIATVARTLPDFDLFDSLPGAGPHLTPRLLAAFGEQRDRFKGADELQKYSGIAPVTERSGKKCWVHWRWQCPTFLRQTFVEWAGQTINKSFWAGAYYRQQRAKGSSYQAAVRALAFKWIRILYRCWQTGTRYDESVYLNALRKRGSSLLRNLALPG

SEQ ID NO: 287663 - protein, 344 aa, unidentified
MEYFAGIDVSLEESSVCVVDGAGRIVRETKVASEPEALVRFFRGLGIRVIRIGLEAGPLSQWLHAGLVAAGFEGVLLETRHVKAAVSAMVNKTDRKDARGIAQLLRMGWFRPVHAKSPGAQEVRALLVARKLLQTKLLDVESSIRGILRGFRLKMGTVSKGRFVARVRELATGHPVLERITEPMLRAREALRTEYARLHGEMLAIAKPDPVCRRLMTAPGVGALVALTFKSAVDDPGRFTRSRALGAYFGLTPKKYQSGEKDVTGAISRVGDPMVRVTLYEAANIMLSRVTRFSSLKRWALDVAKRRGLKRAKVALARKLATVLHRIWIDGTTFHWGKQADAAV

SEQ ID NO: 287664 - protein, 350 aa, unidentified
MKRPIEKLIAGIDLHSNNLVIGVMNQDGKRIAHRKLDCELDQVLAFLQPMKPRLQSMAVESTFNWYWLVDGLHAHGYPIDLANPAQIEQYSGIKNADDKHDAFHLAELQRLDILPKAHIYDAELRPVRDLFRRRTNLVHQRTALFLSFKSLYTRTTGQPMPLAQLKSMEPKEAKTLYEHPANQLIAQVQLEHIEALDQSIVRIEKAVLGCAREIPLYQKLLTLPGIGKILGMTITMEVGDIARFRTDGDFASYCRLVDSRRLSNGKQKGENNAKCGNKYLCWAFVEAANFAKRSDENCRRWYDRKKAKTSTVLATKALACKLAKAAWHVMARQTDYDPSRMFPELAQKKK

SEQ ID NO: 287665 - protein, 411 aa, unidentified
MDIVHDRAAGIDISKRDAKVCVRVPADRPGRFTTTVTTWPSTTNGILALRDHLMRHQVTIVILEATSDYWKPFYYLLEETLPVMLVNAKAARNMPGRKTDVADAVWLAELAAHGLLRASFVPPEPIRELRDLTRTRAIVVRDRTREIHRLEKFLESTGIKLSSVATDLTGVSARAMLEALIAGERDPEVLAELAQGRMRAKKPELVEALIGRFGEHHAFMTRSHLTQIDMFTDRITELDARIEASMAPFRPLRDALTTIPGVSIVVADVIIAETGGDMSVFPTAGHLASWAGVCPSSNESAGRIKSAHILPGNKYLKAALGNAAIAAARTKNTYLAAQYRRISARRGRLKAIVALEHTILTATWNMLTTGEVYTDPGADFYTQLAPERTKNRALTQLRKLGYDVTLTPAAA

SEQ ID NO: 287666 - protein, 447 aa, unidentified
MATSKARVARVGRSKLEVMHPDAAGIDVGGSMHCVAVPNHAADETVRQFGCYTVELNALADWLSECGVKIVAMESTGVYWIPLYELLERRGFEVMLVDARHVKGVHGRKSDVLDCQWLQQLLSYGLLRAAFRPHDQFCALRELNRIRGRTLRDQGRSVQHMQKAMTLMNIQLGQAISDVAGVTGQKIVRAIVAGERDPQELAAYRDRRIKASEEEIAASLEGTWRAEHLFALKQALATFDFCAAQLQDCEGEIEQVMQQLHKYSGEPAKGKRRGRAKNAPKFDVREQLFKMCGVDVTQVDGIDVSTALSIISETGTDMSRFASDKHFTSWLGLCPGTRISGGKVLGSGTKHSVNRATQAFKQAAAALRTSQSALGAYFRRLCARMDKAKAVTAAAHKLARLFYALLTKGQEYVDQGQLYYEERYRQRVIHNLQRKASKLGMSLVPSA

SEQ ID NO: 287667 - protein, 405 aa, unidentified
MYNAVGIDISKGKSTVAVLQPGGIVVKKPYDISHTASDLKDLTDYIRSLDGETKVVMESTGRYHEPILRTLSGAGLFVSAVNPHLIKNYGNNSLRKNKSDPIDSKKIARYTLDNWTELREYSSMDTTREQLKTLNTQMSFFTNQKVAAKTNLISLLDMTYPGVNDLFDSPTRDDGSEKWVDYAASFWHVDCVRKISLNAFTERYRAFCKRHGYCFQPSKPEELFNASKELVPVFPKEKEYKEMIQMCIKQLNVISANVERTRQKMNQLASTLPEYSTVMGMCGVGPTFGPQLIAEIGDISRFNHREALTAFAGVDPGVNESGKFKSKSNKASKCGSARLRKTLFLIMSCLLQTQPVDDPVYCFLDKKRSEGKPYHVYMTAGSNKFLRIYYGKVKECLRAQAETDN

SEQ ID NO: 287668 - protein, 347 aa, unidentified
MFYTGIDWHKAFCYLSTVNAEGKLVQQRKVRNTAADFASYYESFDTDLHTSVVESCGGWYWLSRLFDRLSLPLVVAHAHYVKAIAYAKVKTDKVDSMTLAHLLRMDYIPTSYQLPPHLRGMRDLMRARLRLVQKQVSFSNMTSRLYEKFNVTCPDHLPADYALQHQLYMHQHDLLEIKIKEIEASLKDRLLPTPEIQRLLWIPGIGMINAYSIFLEIGEISRFADIKHFYSYCRLAPGASNSGSRNRHKSGHKSGNRYLKLAFTDAAVHAIRYYPVIFRYFRRMSRRKARPIARNLVAKNLAKSAYHVLKDECDFNHTFKGMALEKKKSRTWPRLASPDLPLEPRLP

SEQ ID NO: 287669 - protein, 343 aa, unidentified
MSIVGGLDIHRKQITFDYVDTETGEARRGQVCPADREHLAKWLARFAGQDAHFALEGCTGWRYVAEEIAAAGLTAHLADPAETAHLRGPKRRAKTDRADARHQRVLLEQGRLPECWIPPSHVLECRALLETYLDLREQRTGWVQRIHAVLFHHGAPHIAGQRLGTAEGAAALQAAAARCSPAGQLQLAIAVQMLSVYDERLHQVRRQLLDQARHLRGAAELTARLYGVGPITGLALTCWLGGAGRFSSSRKAVRFAGLDITVYSSDGKRAPGRLSRQGPPALRWCLYEAGKTHAHKGAPDHAYYAQVKERIDGKRAAISEARKITRQAAHILTELGDAALAAC

SEQ ID NO: 287670 - protein, 436 aa, unidentified
MRGCRCSMIMGFTKPIEHSNLITKEGDLMNPLYVGIDVSSKSNVVYFMLPNGDKHSNFSVANSHDGSTQLVKRICSALTSQSLDTVSIGLEATSVYGDNLVYFLREDASLASFNRKIHVLNPKQVNKFKESYNDLPKNDWIDSFVIADCLRFGRINKEVYIGDYHYKALQNLTRARYFAVCNLTKEKQRFMNVLFKKYSTMTQEKVFSDTFSTTALAVYDEFESAEALAYMDLQELTAFIIEKGKNRFPDPDAVAKAIQKAARSSYRLPKTVNDSVNQVLSISITSMKALESQIKEFDKAIAAQMKLLPNVLISIPGIGPVYSAGIMAEIGDINRFDNQAALAKYAGLAWTQHQSGNFEAQNTRLIHSGNRFFKYYLCEAAFSLVRCDKEYSNFYHLKYKEVNKYQHKRALALTARKFVRLVFTLLKDNRLYRPAE

SEQ ID NO: 287671 - protein, 338 aa, unidentified
MNIITIGFDIAKGVIQVHGVDGLGVVGLRKRMSRAGALSFFAQLEPCLVGMEACGGAHHWARELAAFGHTVRLISPLYVKPYVKRSKTDAADAAAICEAVGRPHMRFVPVKSREDQALAQAYKTRGLLVAQRTALVNALRAHLTEFGIVAPLGPAGAARLIARVRANQEPLPDLAHATLVELADMIEATHARIAAFDARLKQLARADEASRRLMQVPGVGPVAAGTIRALAGDVTRFPTGRDFAAWLGLTPRQNSSGTKVRMGAISKAGNRELRSLLVLGQMAVMRHARTKPQHASPWTIAIMKRRPPLVAAVAMAAKTARIIWAMLARGEIYRPRVA

SEQ ID NO: 287672 - protein, 355 aa, unidentified
MDSKKYIGMDVHKEAISIAVLNASGKLVMESIIATKAITIVEFMQGLRGELHVTLEEGTWSAWLYDLLKPHVQKTVVCDPRRNALLKDGSKSDRIDARKLAQLLYTNMLRPVYHGESGVRTLKELARSYLTISKDQVRVMTRLKALYRSWAIPGSGKQVYAVRHRSEWLDKIREVGVGRRAEFYYQQLDALRCLRREVRRDLLTESAKHRASKRLRQIPSIGPIRAALLIAIRQTPHRFRTKRQLWTYSGFGIETHDRGEHRYVDGELRRSKKKVSVRGLNRNYNHDLKNLFKSAATNAAAKPGPLQEFYTALLVKGIRPDMARLTLARKIAAITLTIWKKGKSFDAQHLKHPTA

SEQ ID NO: 287673 - protein, 429 aa, unidentified
MNNNLPPIAGIDVGKKFSQMAVLSPSNTIVAKAKIFHNASDSIHNAVDILKRIEKDFAAKPIVVMEATGHYHKTLFYSLNEAGFEVYIINPLQSNSIKNLNIRKVKNDKIDAVNIALLFRFQQLRPTNIPNEDLDSLRSLCRSYFNLVDELTAYKNRLLAIVDQLMLNFSDVFDNVCSKTALAVLENYPTPKHILHAKPEVLIELIRSTSRKNLQWATKKYELLISKAKDFEPLSISTQTNIIMLATYISIIKTLNLSLEKVLLEIKELLNADALKDTPVLSPLISLLCTIPGIGLITAATILAEIRDITAFSKPNKLVAFCGLDPSVKESGQFKGSKNSMSKRGHKLLRKVLFIVALANIRKTSNGNKCNPVLYDYYHKKCASKPKMVALGAVMRKLVLIIYAVLRDKRPFELRNPEEHAKSLDKSAA

SEQ ID NO: 287674 - protein, 324 aa, unidentified
MAAEKKEIKYEQVISVGCGIDVHKEIIVATIRSSNKDYITKEYSSFTSSLTELRDWCKQQGVTHIAMESTGIYWKPVFNVLEDESFEIILVNARHVKNIPGHKTDKKDSAWLSKLLLSGLLKGSFIPPVDIRELRDLVRYKKKKTQVVAAEKNRMIKILEDCNVKLSSVVSDVQGVSATKMINAITNGETDVEKLIQFAHGRIHADKATIKKALEGKVTAHHCFMLQMARESIELNETLIAKLDVQIEKASEQYKVELDLLQTIDGVGKDSAIAIISEIGADMKQFPNEHHLASWSGVSPGNNESGGKKKAQEPSTETNTYNQP

SEQ ID NO: 287675 - protein, 350 aa, unidentified
MKRPKEKLIAGLDLHSNNVMIGVTNQDGQRIAHRKLECDLKQVTQFLKPLKPQLQSMAVESTFNWYWLVDGLRGQGYSIDLANPAKIEQYHGMKHVDDKDDAFHLADLQRLNILPKAHVYDPELRPVRDLFRRRTNLVHQRTALLLSFKSLYARTTGQTLDLGDVKKMGPKEAPKLYEHPANQLIAQVQAEHIQALEKSIQRIEKAVLASAREIPLYEKLLTIPGIGRVLGMTITMEVGDIKRFKTDGDFASYCRLVDARRLSNGKLKADNNQKCGNKYLSWAFVEAANFSRRYDEPCRRWYDRKAAKTSKVLATKALACKLAKAAWHVMAGACNYDEERMFPELAMKAK

SEQ ID NO: 287676 - protein, 316 aa, unidentified
MANHVTKITLGIDVAKDQHVIYNWQTGQTTKLRNEISDIKTWLKTFHGPVRIAIESTSNYHLTLVDEALALGYEVYLINPRQLAHYREAVNVRNKTDPLDAWLLARYLEHEVDQLRPFQPRDLRAQRVWRLVLRRATVVKSRQQLQQSFAEVQMSIRGVLSQLQSLLVRIERRILTLIRELGWWPDYQHCLSIPGIGSSNASALVVAYHRGAFSGSDAFISYLGLDVRIRDSGCFKGRRKLTKRGEPELRRLLFCASHPARHYHRFAEYYQRQLDKGLCKIAARVALSRKLARIAFTLMRNEETFKKEEKNYCVGS

SEQ ID NO: 287677 - protein, 371 aa, unidentified
MIKRFHGIDRHKNFSTISVLDLEGKEIDFKSICLNLRSYIDGLGPEDAVIMEASTGTFYWADLVEVKGALCFVLNPYRFKIIKDSWNKTDKQDAQDARNMGKALWVYMVTEEFGIPTVYKPDVVIRELRKLFCQYELLNKQIRMLKNNIQAILADNGIALPQVEKNHLLSKKYGQAVLEKLEVSPASRISVKVSLELLWKEEEAKGEINKAIILIGEPLQGDVNLLITIKGITPLTALAFLSDVADINRFKTLRKMNAYLGLVPRSKNSGGKSRPGHINRASRKLTRTLLTQSVIHIADSSWYLRNYYSELTKRRGVGRARIALIRKICGVMRRMLLNGEEYRSINIDNFERKSKKYAKELEKIKEERKSA

SEQ ID NO: 287678 - protein, 368 aa, unidentified
MGGKSSKLYIGMDVHKASIDIAVAEEGGEVRHQGQIPGDMNALWRAVRKLESSGRELIFVYEAGPCGFGIYRGLIARGHGCWVVAPSNIPRRVRDRIKTDRRDSVKLAGLARAGELTPIYVPETADEAMRDLVRAREDAVVMQRQARQRLMALLLRNDVRYSGKTPWTVAHRRWIADVRLPQPAQRLAFEAYVQAVEEATQRVAMLGHCIEQEITHWRWLPVVNALQACRGIQLIHAVRIVAEVGDLSRFGHPRQLMSYLGLIPSENSSGERRRQGSITKAGNSSARRALVEAAWAYQFTAKVSGLIARRQAKVPKAVLDIAWKAQVRLCTRFRRLTARGVSRHKIVVAIARELAGFVWAIAQRVGPT

SEQ ID NO: 287679 - protein, 419 aa, unidentified
MNKEQRRRETVNPKTMIITVDIAKNSHWVYFRSGSGFESKVFEIKNDYEGFEKLMIKIKQFKNQYNLSKLIFGYESTGPFAEPLIHFLTDKDIKLIQVNPRHVKRTKDISDNSPLKTDKKDPKIIADLIQLGNYLQVINPQKEIANLRRLSGTRERLVNMRTRLYNILHSQVYLIFPELTCAADLKRKSIQWLLKEYSFPSSISKLNFDDFEQNLKKISRGTLKKEKIQSIYQISKTSIGIKEGREAIYLEIKMLIKQIEETNINIQEVESQMKNELEKVSYSKYLLSLPGIAHVSAAILIGEVGGFTNYKNAKQVEKLAGLNLFENSSGRRRGMHFISKRGRSILRKTYYYIALNSIRKNCIFHNDYKKYTAKGKPHYKAIIAIARKLVKLTFALAKKETWFDEDLFFANKKQRSMAA

SEQ ID NO: 287680 - protein, 337 aa, unidentified
MKYCGIDLHSNNSVVSVIDEADHLVAERRLPNELVKIVTFVAGWKEELAGVVVESTYNWYWLVDGLQAAGFTVHLAHTTAIKKYEGLKHSGDETDARYLAHLLRLGILPTGTILPPEARNLRDLARKRMQLVRSRTTHILAVENITARQFGRRITSNQVGRLHEAAVSQMGLPDDVVFAVQANVATITTLSAQIAIIEKRLQERVAKNPDHALLVTVPGIGQTLATVILLEVGFIERFASPGNFASYARCVDSKHTSNGKKKGEGNTRNGNQYLSWAFVEAANFAQRYCAEARHFYERKKARTNSTVARKALAHKLARACFHILKERQPFDVTRCFA

SEQ ID NO: 287681 - protein, 325 aa, unidentified
METNKLCCGIDVSLNTLDVCYQNNLGELFHLQVGNNNKGFEKILEHTGTHYQFVMEATGVYYIRLAFFLHQHGCTLSVVNALSIKRYIQMHLERNKSDKKDARWICLYAIEQKPATWQMPDHAYFEGKQVYNTIREYSEQIKRFNNQLHSLRLLPVQSQEAIKSLEKIKGQLQKEMKSLEEKLEVLLQTWQPSQFKNVSSIKGLGKRATAMLIIFTQGFKNTRNHRQLISFAGLSPTEYSSGTSILGKSSICKRGGKQLRDVLYMCAMNAIKTNAACKALYERLRLKGKTGKQGLIAVCNKLLKQAFAVVKNNTLYQPTYRSAKP

SEQ ID NO: 287682 - protein, 501 aa, unidentified
MSINHFPQEKLATFHAMNQSAIGIDMHSNLIVGVYQSSRFNSTRASIDGDTWNGDSTKKGLEDFAKWCKERKPEVLLMESTGVYWQSLYESLENEGFSNKDIVVVNARDVKNRRGNKTDLSDAIHLAEIARNGDYRASFVPKKEVRQLRCLWRSFHTLKNTRKRLLNVLHKQLCQVGCRASSVFSDIRGKIATQVIELLIGGKSGDELKEAIASVIKRSRGRLKATPDMVYEALRADMDSKVWYSIRQHLEHIKFIDKQLEAAFANLTIQSAPYEKTIQLLQTIPGIKYLTALGIVCELGDDLSAFKSVRKFSKWIGHAPGNNESAGKRYSGRTTPGNKYLKILLVECAAGIGLMKKGFLHEIHQRFKERIGTKRANVALAHKLCRIIYSILKNRTPYQERYKPILKEHRLGKAIKAVDGLRNVGLSCDDIEVTDTETGNSTIIYGANKYRRKLMKNKWYTEGKQSEMCFSHLLNSIRPVSAGNRLRLTLNLLRYLCYLTY

SEQ ID NO: 287683 - protein, 338 aa, unidentified
MTSFVGVDLHRNNFTYCIRENGEEKKIGKCEISELKCFASMLGKNTAMAVEATGNTFLFCRFLKAHVGRLVVVNPSQFKVISMSTKKTDKHDAKVLAEFLEKDMLPEVRMKDDLQAKISSLTQTREKLVQLRTVLKNKVNNLLAANFIVLKREELSTETGLRKALSFHFDPITDTEMFVVVEQIRSLNQSIEKLDKAIEDHGSKMDGFKNLKSIKGIGSKGAATLLSTIGNIHDFRSSKQLAAYIGIVPRVSNSNDTVCHGRITKNGSKIARTTLVQCALVAKRYSPYLHAFHESVKSRRGGAKANIALARKFLDIVYRTLKNNWMFEDFTQFKLVKN

SEQ ID NO: 287684 - protein, 386 aa, unidentified
MKKELYLGLDVHKDCIATAVAEGGRRGEVRDTGVISNDLHALERLIGRWRKAHGPEALLRACYEAGPCGFGIARRLKQLGVGCEVVAPSMIPKRAGERVKTDRRDARKLARLLRAGELTPVYIPEPADEAIRDLCRARTDAVDDRRRSRHRLKGFLLRHGYRYQGKSAWSAAHERYLRELVLPHPAMKVILEEYLLAIAAATERIERCEAAMRDLLEKWRLAPAVKALMALKGFQLVAAMILVSELGEVHRFAHPRRVMAYLGLVPSENTSSDKRRQGAITKCGNAHARWLLVECAQHYATPPKVSKELSRRQDGQSREVRAISWRAQNRLHRRYTRLLARRLQRNKAMVAIARELCGFIWELLGRQRCYQAQPDLAEAGQFEGNS

SEQ ID NO: 287685 - protein, 347 aa, unidentified
MKFYTQTHQHYCGIDLHARCLYVCILDQQGNILVHKNINANPQALMKLVTPYLDDLVIGVECMFSWYWVADLCRERQINFILGHALYMKAIHGGKAKNDKIDSHKIAVLMRGGMFPQAYVYPREMRGTRDLMRRRMRLIRQRAELFAHIHNTNSQYNLPPINKDLHHVCHRDGIAERFSDPSVQKSIELDLNLMGFYDQQLSKVEWYIQKHARNCDQHSLILLRTVPGIGKILSLVVLYEIHTIERFPTVQDFASYCRLIKCKKESAGKSYGTSGKKIGNAYLKAAFSEAAVLFLWANPAAPAWLEKTANKHNKARALTILAHKLGRAVYFMLQRKTVFDQERFLNS

SEQ ID NO: 287686 - protein, 415 aa, unidentified
MRKSNFIEFEQIVERGCGMDVHKETVVATIRGKGIKTVTKSYSTFTSSLKKLKEWLKKHGITHVAMESTGVYWKPIFNVLGDDFEILLVNARHVKNVPGHKTDKRDSRWLAKLLLSGLLKGSFIPDRPFRELRDLARYKKKLTNQVVADKNRFLKILEDANIKLSMVLSDVFGVSGTKMINHILAFDDYRPEDLMQYVHGRVKANREDIKEALTGYVTPHHRFIMNTILGNIAKTQSTIAEIDVHLDKVLAPYKLEKELLETIPGVGPDVSIGIIAEISTNMEHFPDHRHLASWAGMSHGSNESAGKNKSGRTTFGNRSLRGFLTEGGWAASKTKNTYFSSKYKSLVGRRGKKKAIVALGHKILIASYFIIRDKVEFKELGEDYLDNFRRDKLIAYYKKQIERLDPEIESEEVAA

SEQ ID NO: 287687 - protein, 414 aa, unidentified
MEVIHSRCAGLDVSKRDAKVCVRIVAAGRARANSTVTTWGAVTNQILALRDHLIAEEVTLVVMEATGDYWKPFYYLLDDGPFEVMLVNARHAKNLPGRKTDVSDAAWLAQLGAHGLVRGSFVPPEPIRQLRDLTRTRTTIARERGREIQRLEKLLEDAGIKLSSVASDISGVSGRAMLEALIDGQRDPVVLAELAKRRLRSKIPELIEALTGRFSEHHAFLARVHLDLIDNRSRALEEITGRIEVVIAPFRHVRDLLVTIPGISTIVADVVIAETGADMSRFPTAGHLASWAGTCPGSNESAGRVKSTRTRPGNPYLKGALGTAALSASRSKDTYLAAKYRRIASRRGPIKAIVALEHAMLIAIWNMISNADEYRDPGGDFYTRLNPDKAKNRAVDQLRRMGYDVRLEPLGATG

SEQ ID NO: 287688 - protein, 458 aa, unidentified
MSTGEKHLHGDRPAYLSACYRLTRFRPPAQLKESTKMDKNANLMPRVIGLDCHPDTFTAALLQGPTPAAAVTEKVFNQVPMAQLAGWAKKQTTAQDLFVLEASGNSFQVVRTLAALNRKALILESCQMGKLKEAHANNDKISAVRIGKAYLAGTAKTVWVPDVKTQERRDWFHAHRKAVKRSTQMRNRLLSYLSDNGVRLKKATPLAKGKAAEEQLRKTRSWSPRQWQVIEGMLMELRHADEQRSHWRSLIAQEVLSDPQLLSIVRLCGVREMVAFALGALIGDIHRFANPKKLVKYIGLNPAFDDSGEGKWSGGIAGHGRKDLRSLLVEAAQAILRCSKNPLAQWGKKLLRRKSSVNLTVGAMARKLAVAVWYLMMGRWTPLEEIDERLALKVGKMISQVGPAGLETLGKTRRTFREEVHDLLKTGRVYFLAKTVYTRDGNGLLRPGLTPASAATPV

SEQ ID NO: 287689 - protein, 413 aa, unidentified
MRNLLDVCCGIDVHKEILVACMLKGGIEEEPEPIIKEFSTLLSGLDEFKSWLIEHKCHDVAMESTGVYWFPIYNVLESIFYEDGHMNIIVANPHHMKNVPGKKTDIKDSHWIATLLRAGLLAPSYIPPKEIRELRDWTRYRDVLIKELVGHKNRIEKHLQQCGFKLSTILSDIFGMSGYELIRKLCEKGKLTALEVEGCLHGTLRAKSGEVQQAVAGRLSAHDRLFLTNLVQVMEHCRKEIEEAECHITVYAQQYEPTLQLLETIPALQRRASTIIVSELGIDFSMFPTAGHLCKWAGLCPGDNESAKKKKTMRITKGNPRIKSVMVQCAWAATRCKNFFLRDWFYRLRARRGTKKALIAVARKLLAMVWYILTTGENYEETRYEQTKKNQEDRRKQRLKTEAAKLGFKLVPA

SEQ ID NO: 287690 - protein, 400 aa, unidentified
MGQPLWAGVDAGKSDHYCVVIDADGKRLLSRRVANDEAALLELINAITALAGGGELTWAIDLNAGGAALLIALLIGAEQRLLYISGRTVHHASGGYRGEGKTDAKDAAVIADQARMRRDLQPLRAGDDIAVELRILTSRRTDLVADRTRAINRLRAQLLEYFPALERAFDYSASKAALILLTGYQTPDGLRRAGAARLAAWLRKRKARNADAVAAAAIEAAKSQHTVVPGQQLAAAMVARLAEEVMTLDTEIGDTDAMIEERFRRHRHAEIILSMPGFGVILGAEFLAATGGDIAAFGNTDRFAAVAGLAPVPRDSGRISGNLKRPRRYNRRLLRACYLASHIAIRTDTASRIYYDRKRAQGKRHTQAVLALARRRLNVMWAMLRDHKTYQPTAPNAAVA

SEQ ID NO: 287691 - protein, 382 aa, unidentified
MTTQQECIAAAVSLEGEILIEPFQFSNDYDGFYLLLSKLAPLDQHSIIIGLESTAHYGDNLVRFLICKDFKVCVLNPIMTSSMRKNNVRKMKTDKVDTLVIAKTLMMQDSLRFSTLEDLDYIELKELGRFRQKTMKQRTRLKIQLTSYMDQVFPELQYFFKSGLHQKAVYALLKEAPMPKDIASLHLTHLSNLLVKSSHGHFTKDMARELRGLAQRSVGLHDSSISIQITQTIAQIELLDSQLFETELELANLVTCLHSVIMTIPGIGVVNGGIILGEIGDIYRFSEPKKLLAFAGLDPSVHQSGNFQAQRTRMSKRGSRVLRYALMNAAHNVVKNNATFKAYYDTKRAEGRTHYSALGHCAGKLVRVIWKMLTDALEFYLE

SEQ ID NO: 287692 - protein, 329 aa, unidentified
MNEVGIDVSARSFVAEVKRQGRIEQGTFANQPGGHRKFIAWATRRGQPARVCLESTGVYSLGLALALHRARRVEVMVANPKAVRHFAEASQVRAKTDGVDAGVVRRYLAAMAFVAWQPPSEEVLQLQGLSRRIGQLKKEQTREKNRLHAVEHQGPALKLVAHDIGVQIRHLERRIEQLSRHARRLIEGDAALRKPFELITSIPGFAHTATVQVLGELATLPAELNAPQWVAHSGLDPRPFESGTSVQRPRRISKCGNARIRAGLYMPALVAIRRDPNVKAFYEKQLARGQAPLQAITAVMRKLLHALWGMLRNQQPWDGNKFYAITTKA

SEQ ID NO: 287693 - protein, 311 aa, unidentified
MAYLQQAPQRCLGFDIACDTITVSDGDGLVTIANRRAPIRRFLQKCRAQLCVCEPTGGHERILLEECLRLSIPVHRADTRRLKAFIRSHGRLGKSDAIDARLMARYGRERWQDLALWQAPDPDRERLRCLVTRRADLLAMKVAEQNRAKAPGAAGLAASCRDMLAAITRQIRLLEAEIRKLVRKAGMRARHAILTAMTGIGDITAAALLALMPELGTLHRRQAAALAGLAPHPNESGTRVGYRRMRGGRPQLRTILFLPALHAARGRGELADFYNRLITNGKKPIVAIAATMRKIITILNARLKTIQYQQS

SEQ ID NO: 287694 - protein, 380 aa, unidentified
MPEAVIGLDVGKSSHWACVATRDGEVLLSTPVANREDDLDSLFGRFPDALVVVDQSRNIGALALARARAAGMSAAYLPGLAAHGAARLFAGDAKTDERDAMVIAKTALGIPDALLPVGDPGPTIAAARALAAQRNFLTCENTRNKNRLRSILLESCPAFETLVDLSDGPQLRLMASLGGAWSVADAGPRRAAALTRGAARGKIEALVRSTTSSTRPDASVVAAEDRAVKLLARRISENSAEIEAITAEISALLEGDDTYRCLLTVPGIGPKTASELAISIDIEDFPSHDRLASYCGLAPRNRQSGTSISSVTASRQGNKRLKNLLIFSCNCLTRTEGRWGDYYTRCRERGMSHGKALKALARKRLKVIYAVMRDRVPYAA

SEQ ID NO: 287695 - protein, 286 aa, unidentified
MGNASTLHVGLDVHKESIAVAYATEDGATAPVPFGTIGTRQCDIDALVRKLQSKSGRLVFVYEAGPCGYWLYRYLTKKALTCVVVAPSLIPRKPGDRVKTDKRDALTLARLARSGDLTPVYVPAVPDEAVRDLARAREDALKDLNAARFRLKALLLRNDIRDTGRANWSTEHCRWLARLVLPTAAQQIVFQEYVRTVTERTDLLRRLVQFTVAITTIAELGDLTRFDTPRQLMSYLGLIPSEYSSGERRRLGGITKAGNGHARRVLIEAAKAYRHRAKVSEQIQAR

SEQ ID NO: 287696 - protein, 295 aa, unidentified
MFYAALDVSLRSLAVCIIDDDGKVRLERSVPSDVPDLVRCLNEFGEPIHQVGLEAGTLTQHLTYGLREAGFDVVCMEARQVNAALSAMRNKTDRHDARGIAQILRSGWYSRVHVKSVESHHLRALLTCRKVMQRKCIDLENEIRGLLKVFGVKLPMRLSRGAFDVAVRDTIESDPALSRALLPMLHARQMLFETFMELDRRVRKAAHEDEVCTRFMGIPGVGEITALSFKAAVDDPARFKSSRTVGAHFGLTPRRFQSGEKDNPGASPTPATPAYALPSTRQPTPCSCARSRGRA

SEQ ID NO: 287697 - protein, 340 aa, unidentified
MGQVVTIGLDIAKSVFQVHGVDAEGGVVIRQKLTRARLLKFFGKLAPCLVGIEACGTSHHWARELIELGHDVRLMPPSYVKPYVKRQKNDMADAEAICEAVTRPTMRFVPVKSPEQQSVMVLHRTRSILIRQRIQISNAIRSHMAEFGMAAAVGRQGLQALIAIVEDSSDVRVPGEARGCLGMLAAQLRLVNDQILDTDRLIRTNARSTEVGRRLMEIPGVGPLLASALVGTITDPKAFKTGRNLAAWIGLVPRQNSSGGKERLGGITKQGDRYLRQMLVVGALAVVRYAVRNGTRRPWLVQLLARRTPKVAAVALANKTARMVWAIMTSGERYREPLAA

SEQ ID NO: 287698 - protein, 334 aa, unidentified
MDTHADMHVAAALDPVGGLLGVREFPATAAGYARLLGWLSGFGTVALVGIEGTGSYGAGLARHITAAGGRVVEVDRSDRQDRRRQGKSDPLDAVSAARAAQSGRARGAPKGRDGAVEAIRALMVAKRSAAGERTRTINQARALILTGPDDLRARFATHTAAALVAGIASLRPRPGDVPGYATRVALRELGRRAVFLGSQLERLNELIVPLVTARAPRLLALYGIGPNTAALLLIAAGDHPGRLRSEAAWAHLCAAAPIPASSGKVTRHRLNPGGDRQANHALWRIAFTRMGSHPATRAYVERRTKEGKSKAEIIRCLKRYVAREVYPHLRPAAD

SEQ ID NO: 287699 - protein, 336 aa, unidentified
MGEYSGAFVGFDTSKTKHAVAIAEGGRGGEVRFLGEIASSPVRVERLVGKLASRYDKLHFCYEAGPTGYGLYRQIRELGHDCAVVAPSLIPKRPGERIKTNRRDAVTLARLLRAGELTAVWVPDAVHEAVRDLVRARAAAAQDLRGKRQQLLSFLLRHGRIFSGRQHWTLAHRRWLAEQSFAHPAQQVVFQDAVEAIAEALARLQRLEQQLVAIVPSWSMAPVVEAYQAMRGASFLVAVTFAAEIGDVRRFDNPRQLMAFLGLVPGERSTGETIRRAGLTLAGNRHARRVLVEAAWSYRHPARVSPTLRARLEGLPSQFAIPPGRRRSGSAPAIAD

SEQ ID NO: 287700 - protein, 394 aa, unidentified
MILVGIDIGKNKHTFSIINKSSGEILLSPSDFSNNLEGFLFLIQKLNNYTKSELLIGMEDTGHYHFALLKYLLDRRYTVALINPTTTDLTRKLQGGITKNDPLDSLTICDVISSNHRNKPYRVTKLNRFDLYEQKQLTRHHHNLKEELNTYKNRLQKCIDIVFPEFNSLFHSKYGIVYMNILKIFSSAKAIANADIRSIRKCFELKGQGKRISLSAEQLKLTAKSSIGIPSVAEEIQIRHLVSQIELLKKQISEIDKRIEEFSLKNNSPILTIPGISHFSGTSIISELGEICNYTKASQIIKFAGVAPYHYESSQFTAQHTAITKKGSKYLRKTLYQIILPVISNNEVFHAYYTKKLNEGKGHRCAQGHCIRKLLRVIYHILSTGQPFNPELLV

SEQ ID NO: 287701 - protein, 440 aa, unidentified
MNSTTNSMSKSTLLVQQNQNITDAGRIVNVGFDVGSDSLYWAMELSGKSIRGQCENNSSDIRTTLEEIRNEVQQHGDYQIRVLCESTGIYHRRLLQLADELGMRTALVHGEAVAKFRTIQFADHGKTDQRDPKAVLTVAKVGKLIQDRKLDKHYAQLRELHRLVLRCEARIKVAKCELHADLRSLFADLRLDKSVLYGPTGRALIEQFAGNPHAILAVGEEAFYGRMKACSKHTKKATLKKLWRAANDTASTQKDDLAATLAEIRATAVQQLYTEITTFLQQQRQIESQMQELYLTLQSSDPRLPAPRKGVVTLRMLSRLVAEMGPPDDFRTVSQLMRYAGLNLCERQSGKWRGRTTISRRGRSELRYVLNLMAIPLVGRGKLFGDYYWKKKEADKMPGQKANVCVMRKILKMFYGWYKSGEPFDPGRVFAMASEHAKAA

SEQ ID NO: 287702 - protein, 427 aa, unidentified
MKLSYKIDDVKSKNLLNIAVDVSKNDLYLYTEYGTGNINCIQDHFSNTVAQIERKLKEYKTMARENNYENIQVICEPTGNYEKKLMTLARQHGCYTSYVNGESVHKYKVIENNDSSKTDIKDARVILLVSKYGKLIKHRILPEEYNLLRHYNRMHEQENEQRLNYKNQLSSEVKNLFCDLSYKNSFLYMSSGRVLVERFHCNPYRIVKMGYNRFSKTMKKYVKYIKNETLRRIYSDAQMSVRLIMSDSLIELLEQRIKELWQNYLRHEQSIRQIKEHMSGLYQNLLDAGESLPGAEAGFVSQVNLARIIGETGPLKDFDHYLQIIRFSGLSLRQKQSGKFKGKNKISKKGRSRLRMILNQSIFHLIKKDRVFGELYHRKKKEGMPGSKAMTVVSRKLVSILFALSRPGTIYDAQRLFKCESQYKKVA

SEQ ID NO: 287703 - protein, 352 aa, unidentified
MTLYIGVDFHPHQQTLCWCDTRTGETDTVDLKHDLGVVREFYSSLPGPAIVGIEASARAEWFKDMLTDTGHKLLVGNPVLIRKRATSRHKNDRRDAELILELLIRGEFPAIWQRPRESDQVVEIVALRHKLVRQRIQVYNRLQSLALNAGLPKGKAKTQKFRKLIGQTEMNEAGRLARSQYFALLGSLDERIAELEQWLRLKSADDKVQLLMSQKGVGYLTSLITVHSLGDVSRFKRVSKEVASYAGLDPLERSSAGRVRFGSISKAGSPVLRHHLGQAIMTATRYDPRLKAFYKRLAKKKPKAVAKTASARKLLVKLAIMLRDNINADEFDRRGRTAAMPEEIAGSAMTAA

SEQ ID NO: 287704 - protein, 320 aa, unidentified
MKQAIYMGVDVSKKQLDVAIRPLGQVFGVSNDRRGIAQLVKRLKKMQPVCIAIDATGGLEKELAYALAAENLPVAVVNPRQVSNFAKSTGQRAKTDAIDAAVLAHFAEVMKPEVRPLPDAASRELSALVTRHRQLVEMMTAESNRRDLASKAVRKLINSLLRSLKDQLAVVDREIRKAISASETWRRKAELLRSVPGVGKVTTATLLAGLPELGELDRRQIAVLVGVAPFNRESGTWKGKRMIAGGRGWIRSVLYMSTVVAVRRNPILKEFYERLRARGKPAKQALTACMRKLLVILNAMLRRQTHWSAPNPLLSLRVAG

SEQ ID NO: 287705 - protein, 316 aa, unidentified
MQTFLNIGVDVAKDAVVVACAAQSFPAHSVANQRAPLLVWLKSLPAGSRIGLESTSSYHELLADLAHAQGYTVFLLNPLDTKHYARAMGNRAKTDRVDAELIARLVAQEHNRLRPYTPPTANQRKLDRLIRRRAKIVCIKSSLQLTMRNLSGFSTELKAVLLKLDALITRIDSAMTALASCSPQHVDTQQRLQTIVGVGPVVGMALTNTLERVPFRRADAFVAFIGYDPRANDSGNKIGRRRLSKRGPAELRRLLFNAAMAAIKSKVWKPIYEHYRTQGWSTTAALVIIARKIARTAWSIHHYKSVFNPERITKNA

SEQ ID NO: 287706 - protein, 445 aa, unidentified
MKHARKRYVGLDVHKDVVEYCILDAAGKKLDGGRIICEQSVLELFAMKTLSPKDYVALEATANTWSVVDIIEPHIAKIVVGNAMKTKAIAEAKVKTDKIDAKILAQLLRCDFLPTVWIPDAQTRVLRRLSSFRKSLVQDSTAAKNRIKGILNHLLIKHAVVWSKDGLDELKKLDIPLHERVIMECEIAMLEHLRTQIEKVEAEIKKLAYEEANVRLLMTLPGVDYNTATAVVAAFGDISRFKDADHAASYLGLVPRTKQSANTCRQGAITKAGSSLARSLLCEAAQCLSRNDGPLGVFVRRLLQKKTWNKAIVAGARKLATIAYHMLKNKEPYRYAPVARTRKKLGWLRKSVTGKRLEPPQYRFDKKLTEHIENRSDVSVRFVPPLSEVYEKEGLPAARSLDELSVGEKRAIEEMGITEQIRKTETVQVIVKPKKTSAKSCTKVE

SEQ ID NO: 287707 - protein, 349 aa, unidentified
MTVYCGVDFHARVQTLSWLDTRDGEIHQKELNHRTDNVRGFYLQFAGEVIVGIESSGYSSWFEDMLEGIGHQVWVGDAGEIRRLARRRQKNDKRDADHILDLMVKGEFPCVHRVCRESREVLGQLRYRHRLVKMRTMAANCLKAIAIGAGLSEKTRLATRKGRSKLDAAGLSAVLNEQSNKWLELIDDLTKKIEAVERWLEERAKADQRVERLRTHPGIGLLTGLALVHTLEPVERFASTRKVAAYVGLDPMEDSSAERKRYGGVSKAGSTLVRFLLVEAGQTAAKRDPQLRSFYQRLRDKRKTAKAKVAVARKLAVRGFIMLRDQIDYSEFLRRGVEARSSRRAAAND

SEQ ID NO: 287708 - protein, 335 aa, unidentified
METVYFLGIDIAKKKFDGALTVDGKAFHQVESGNTCKEIKALFKDLKKKFSISYSQLVVCMEHTGIYCRPLLEFLTENHIKVCVESSIQIKRSQGMVRGKTDKIDAQRISSYAYRNRENLRFWTPQRLIIQKLKAMLVTRERLIRVKTELYVPINECEEFIEESIHQMMNKACQNTINRIERDLDNIEKMIDDLVTEDAQLNHQYQLATSVTGIGKITALHMIVSTGEFTRIQEAKKFACYSGVAPFEHSSGSSIRGKTRVSKMANMTIKKLLHLGAMSAARYDHELQAYYQRKVLEGKNKMSVINAVRNKLISRVFACIKNNRKYQKIYKHALA

SEQ ID NO: 287709 - protein, 343 aa, unidentified
MQLISTIGLDIAKSVFQVHGVDAAGQAVLRRQLRRRHVLAFFQKLSPCLVGIEACASSHHWSRELQALGHTVRLMPPAYVKPYVKRQKNDTTDAEAICEAVTRPNMRFVPTKTVEQQSCLMLHRARHLFIRQQTAVINSIRAHLAEFGIVAPVGRRGVEQLLEVVADTADRRLPEVARACLAALGSQLRALKAQILEFDRRIMVWHRSNATSKRLDAIPGVGPALATALVASIAEPGAFRSGRDFSAWVGLVPKQNSSGGKDKLGNISKQGDRYLRSLFTAGALAVIRYAKIHGTRHRPWLTGLLARRPTKVAAIALANKLARMAWAMMVRNERYRQPAALAA

SEQ ID NO: 287710 - protein, 340 aa, unidentified
MSIVCGFDVHREQITFDLVDQVSGEVRSGRITPVTRAALSAWLAALESARLRVALEATTGWRFVVEELERAGAQAVLAEPAETRALRGPKRRAKTDRADARHLRELLERETVPRSWVPPAHLQELRTLVRLRHSLAAERRVWLQRVQAQLFHQGAPPARGRLLGPGGAAASAELSPAGRELVACAERVCTALESEIAQLDGRLAVWARRHPACRALQTLYGVGPTIAVTLYAEIGDARRLRSSRKLVRLAGLDVTVSESADKRSPGRLSRQGAPILRWAAYEAALSASRRGSPDQGDYRLLRERIGHGRATLTIARKLLRRAHHVLVAVGDDLLVPLSHP

SEQ ID NO: 287711 - protein, 338 aa, unidentified
MTHIAMDVHQKRSAVAYATPAMSEPKVVRCLSTPEDFARVLQDLPRPWIIAVECSRQSPAVTRWLRELGADEVHLVDARALHQFVQGKPKSDVRDAKEMLSLLQMGRLPECYLASDREQQLRALTRTRSLVAKFNTAVRNSIRTLLNQWGLGVCCSDLTGDAAQEQLDVLAARLGPVVQIALQQLVVLLAMIQQCLSVLNAAIEAQVAQEPLAQALDELPGIGPILALGLVAEIGRIERFADPAHLISYAGLAPRANDSDSFHGPRQLPQRCNKRLRHLAVQAAQCAWNSKKDSQAHRTYARVAQRRPNYVAKLSAARTVLQEVFWRWRQATATAAAA

SEQ ID NO: 287712 - protein, 355 aa, unidentified
MTTAQKQSCMFVGIDVHKDTHTAVGISPYGEKLFEITVGNYQNDFETLTLKVKEHSGILSPYIGLEDVRGYGERLAGYLYEKYPIYHVPSILVDRARQNATHPEKSDSLDALGVAKVMIQSIDTLLPYTISKESEKAKQLKEISIDREDLVLERTRLKNQVHTLLYRIYNTNYAKIYKDPFALKALRFWRNAKPKCDSFLLKTMKRKVRRLLDIHVEVVDLEKDMEQLLDDNYTIQTASGCGVVLASTIIGEIGDINRFTSPGALSKYAGCSPRERSSGKKIRHVKSRGGNRRLNCAFHRMALSQISRMGNEKARQYFKRKISEGKSKSQALVCLRRQMVNIVWMMLKHKTTYRY

SEQ ID NO: 287713 - protein, 338 aa, unidentified
MTIVMGLDQHRAQITAEWMNTETGEVTRSRISPAHRAGVRQFCERFHGQELEVALEATTGWRFVADEFQRVGASVHLAEPAETAAMRGNKRRAKTDRADARHIRELLTGGRLPESWIPPEHILDLRARVRLRHTLSHQRGEWQQRIQAVLYHHGCPQRGNLITSEGRSWLAAQPLSAGAREQVRIALSVIDALDAQIVPVEKELRSFARRQAGCKALMGQFGVGELTAVTILAELGDARRFSSSRDAVRFAGLDITVHQSDQRRAAGHLSRQGPPALRWALFEASMCAARACSPDYEYYSQAAERLGSNRARLSVARKILKRSFHLLRELGEEALAPA

SEQ ID NO: 287714 - protein, 325 aa, unidentified
MTIAVSARGFGQLLKWARELGPERVWALEDCRHVAGSLERFLISRGERVLRVPTKLMADSRRTARTRGKSDSIDSIAVARAALREGLDVLPAAHLEGPELDLRLLVDHRERLVCQRVALNNTLQWHLHDLWPELTLPGGALFSAKWSTRIGRRLARTEQTMRVRIARDELRRLRELTASIRALEAEIADLVGRLAPGLVAEPGCGPLTAAKLVGEIAGAGRFATDAKLARAAGIAPIPVCSGKTNRHRLDRGGNRQINAAIHRIAITRARCHPETRDYIARKTSEGKTGREAIRCLKRHLARRIWHLLQPPALIPGQTITPTSLT

SEQ ID NO: 287715 - protein, 342 aa, unidentified
MKITTIGIDLAKNVFQVHGVDAHGKTVLKKQLKRDQVASFFIQLEPCLIGMEACASAHHWGRKLQAMGHTVRLMAPQFVKPYVKTNKNDVADAEAICEAVTRPNMRFVAIKTVDQQSVLALHRARQGFVRARTAQANQIRGLLAEFGLVLPQGIHHVAKRVPQLMEEASDELTGAFRLLIERLLDQLKVLDKHVHELEAQITAWHRANPMSRRLEKIPGIGPITASALVASMGDARNFHNGRQVAAWLGLVPRQQSSGGKPLLLGISKRGDAYLRSLLIHGARAVVAHAQRTLSGDGWLNALRQRRHTNVAVVALANKNARVAWALLAHEREFRTDYAPSAA

SEQ ID NO: 287716 - protein, 329 aa, unidentified
MFPFYLGIDLHLKRTYLVLMNAEGEVIDKRRLKNTEMASYISKNIPKETYAVMEATRNWPFFYDLLEKHVDRVELAHAKGVRMIAAAAVKTDQIDASVLAHLARLNFLPIAYAAPKEIRDLRQHLRYREWLIDERRRAKNRIHAVLAGYNLASPVTDLFGRAGREWLQEVVEEELRLSSKKVVFETLEMINQLDIQIKELAKDIPLPEELEPKAELLMSMPGIGKLNSAVILAEIGDISRFNSPKALCNWAGLTPRVHKSDEVVRHGRISKQGSRYLRTAMVSAAMTACRISPRWYGVYEHLARRIGRRGAKVAVGRRLLTVIYFHEKA

SEQ ID NO: 287717 - protein, 342 aa, unidentified
MNHYAGIDVSLECSSLCVVEANGNISREAKVASEPAALIAWFRSSGFELERIGLEAGPLSQWLFAAMRQAGLSVELLETRHVRKAFEAMPVKSDRNDARGIAQLMRLGWFRPVHCKSMSAQEARSLLTARKLVQSKLRDVENSLRGILRGFGLKVGKTTELKFAGRIEELVANHPHLQVITKALLSVRAVLRTEFAAFEKQTRKMAQSDARTRLLMSTPAVGPIVALTYASAIDDPARFKSSKQAGAHFGLTPKKYQSGETDYTGRISKIGDSSVRTALYEAAHIMLTKPLKGCTQLKSWAMRIARRAGMSKAKVALARRLAVIMHRMLADRTPFNPDAAVT

SEQ ID NO: 287718 - protein, 412 aa, unidentified
MEVPHARCCGIDLHKRSITVCVLIRESGRKEQKHLREFATTTSEILNCADWLRSLGVTHVAMESTGVYWRPVWNLLEGQFDLLLANATHMRNVPGRKTDIKDSEWIAQQLQHGLLKPSFVPDTVLRDLRELSRDRTSLVAERSRLKNRIQKILEEANIKLGSVASDVLGKSGRAMLAAMIDGKENPQQLADLALGQLRLKIPQLVEALRGRVRAVHRFRLKQQLARVDFIEAQIAQLEAEMEKQNEPFEEAVSLLAEIPGFDRTTAWSVIAEIGINMDQFPSADHLASWAGVCPGNNESGGKRLSGKTRKGSRWLRQKLCQSAWCASRCKNSYFTAFFQRIAAHRGRKRAIVAVSHSLLVVCDYLLKRRCHFHDLGVSYFDQHNHEKLTRYFVKRLTRLGHRVNIEPCSASA

SEQ ID NO: 287719 - protein, 369 aa, unidentified
MGLDVHRDIIVACLVKGAVDAEPEAETRTFSTLIPEMQKLRDWVIESECRNIAMESTGIYWQPIYEMLESCFDGEISILVVNARHMKNVPGRKTDMKDAQWIATLLRAGLLKGSFIPDKAFRELRHLTRYRKSVVHDITAQKNRIDKFLQSSGFRFTAFLSDTFGASGRNIIRHLIEHGSIDREALDKCLKTKTRNRIDEILVALNGSLSEHQCRFLNMVFRHLEDLEAHKHTVEDEITEEVLKHTDTLNLLCSIPGIDVTAAAAIIAEIGTDMSSFPDSQHICSWAGLSPGNNESAGKRKSVHINKGNPYLKSMLCEVAWIMASHRKLYLSGWYWKVKQRKGAKAGNDCVGPGRSFHHLHHAENRNSL

SEQ ID NO: 287720 - protein, 320 aa, unidentified
MMAQNDLVVVGIDVAKDKVDACIRRFTLRQTFPNTAQGHRKLVAWLRKYQVGKAVMEASGGYERQWRNVLHNAGIEVRIVDPRRVRSFAQSAGRLAKNDPIDAEMIAWFAETFSQAPGQIPDAAREELATLAKARKALVDVKIRLQAQDEHAAPEPARKAYARVLKSLAAEIDKLEAAISAKVKATPEFAERAEIIESVPGLAQATSAILIAGMPELGQVSDEVAAALIGVAPYDDDSGKRRGERYIKGGRRWVRNAIYMPCLGAATQYNPVLKAFYQRLLAKGKEPKVALVACMRKLIIILNTMLARRQKWNPGRHAMA

SEQ ID NO: 287721 - protein, 354 aa, unidentified
MSQTSNTAIAVIGIDIGKNSFHVVGHDARGAILLRQKWSRGQVEARLANVPPCLIGMEACVGAHNLSRNLASLGHDARLMPAKYVRPYSKGQKNDFNDAEAIAEAVQRPTMKFVATKTAEQLDLQALHRVRERLVSQRTGITNQIRAFMLERGIAVRQGIGFLRMELPTILATRTDALSPRMLRVIEELAGDWRWLDQRIDGLSGEIEALARLDQACLRLMTVPGIGPIISSAMVAAIGTGDVFSKGRDFGAWLGLVPKQISTGDRTILGKISRRGNRYLRVLFVQAARVVLARIKHLERYGLKSWIEAAKKRLHPNVLAIALANKLARIAWAVLAKGRAFELTRTDDAGVRPA

SEQ ID NO: 287722 - protein, 420 aa, unidentified
MKSAQTILHVGLDVHKESIAVALAGSDGSLRRYGTIAGHLQAMDKLIHKLQKPGQELRFCYEAGPFGFVLCRHLRRQGYLCEVVAPSLIPKRAGDRIKTDYRDAEQLARLFRAGELTPVRVPDESDEAVRDLLRGRLSAVFDQRRARQRLKGFLLRLGFRYPGKTSWTPAHMNYLSKLKMPHPAQQIVLEEFIQAVQSATERLERLSTQVQGQLSGWRWEPVVRALMCLRGIGVINAMTLVAEIGDIDRFDNPRQLMSFLGLVPSEHSSGAKRHQGAITKAGNGACRRALIEAAHHYWIAPRVSPSLRVRQHGQAEAVRQIAWKAQQRLYARQRALSARKKKSVVVVTAVARELCGFVWAICRALKPHAPASNPMLVDGRRIYLLKPPLKFKRGAGRSRLGSSAAAPAARASKEPTSLAS

SEQ ID NO: 287723 - protein, 385 aa, unidentified
MSAHPIQAEAAAQLQANTLFASLELSKARWLVTVSAPGSDKLSRHDVPGGDGQALLELLWRLQAAAAQRTGASVTIVVIQEAGLDGFWIHRLLVQNGITSHVVDPASIAVNRRHRRAKTDRIDGVKLLRTLMAWMRGERQVCTMVQPPSPEDEDRRRLARERARLLKERVQHTNRIKGLLSGQGIPDYDPLHRDRRGRLAALTTGDGRPLPKRLETEIGRELDRLELVASQLAAVERERDALMAQTAEADARAAPAALIRLRGIGPELAALLWLEALFRRFENRRQIAAYAGLTPSPWKSGGIDREQGIAKSGNPRLRRAMIELAWFWVRHQPGSALSRWFVERVGAARGRVRRIAIVALARKLLVALWRYVTQGVVPEGAVLKG

SEQ ID NO: 287724 - protein, 364 aa, unidentified
MKRKVYVGMDVHKETIQIAILPSNTKALVKEQQIKHEEGQIKKFIQKLKSEGTEIHCCYEAGVTGYPLYRYLKTLGVNCRIVAPGKIPRQSSDKIKTDKRDAIKLAKLLRSGELESIHVPSEEDEAVRDYLRSRDSLRLDLGRNRQRLMKFLLRKGIKYSTTKYWTASHYKWLNNLHFENEILQATFNDYYSRVRVQEENLKAMDQKIREIAESEPYREKVGILRCFRGVDYLTAMFLLSEVNDFKRFKTAGSFMSFLGLVPGEYSSGPKRKQTSITKTGSPRLRRILVEAAWQHRFPGTGSKVVAARRVGQSALVVSLAEKASLRLHKKFKSMQLRGKTPQVMITAVSRELSGFLWAAMNLVA

SEQ ID NO: 287725 - protein, 425 aa, unidentified
MDFKQNQKINQVTENTLVIGIDIAKRTHYACFVDDRGRVLQKSFSVSQLENGFELFYQRILASMKENAKTEVIVGIEPTGHYWLNLAYFLEERGIPLAMVNPMHVKRSKELDDNLPTKNDRKDALVIARLVKDGRFSYPRILKGMEAELRVGSSFKGKLTEELGAVKNRMIRWLDRYFPEFVQVFPSFGKMALAALQCTPFPSDLHQKQPDEVLSLYRNAEGLKSPQKPKAVRLIEVAASSIGVTEGHQMARIEIATLVRRYHQLEQDIESITRHLDTLVKTSVEYEWLSTVPGLGDATIVDLLAEIGSFSHYEDPRQIIKLAGLTLRENSSGEHKGKKRISKRGRRKLRALLFRVMMPMIRHNEAFRKLHEYYTNRKVNPLRKKQSIVVLCGKLLKVLHGISTKHRAFDTQRMMRDIPSLEEAA

SEQ ID NO: 287726 - protein, 447 aa, unidentified
MRQPNHGISLECIESNAAGIDVGATEVYVAVPPERDSQPVRCFKTFTEDLRQMAGWLCQCGITTVAMESTGVYWLPPYEILEEAGIRVCLVNSKHVKHVPGRKSDVRDCQWLQYLHSVGLLHASFRPDEKICAIRSLSRHRASLIEIASVHVQHMHKALTQMNLQIHHVLSDITGLSGMAIVEAIVAGERSPVKLAALCQKGVRSDRETVIKSLVGNYRPEHLFTLKQSLAAYRHYQELMAECDQQIEQLTRQLDGKIDPHQKPPHANSGMQKRRKNQFHCDMSRELNRVLGVDLTTIPGISALTAHTLLAEIGADLTRFPNAAAFASWLALCPANKKSGGKVLSSKTRQTNSRASRALRIAAQTLARSRSHLGNFYRRMRARLGAPQAITATAHKLARIVYHLITTAQAYDESVFLLEDQKQAQRNEKRLRKQAKTLGFQLVPSAA

SEQ ID NO: 287727 - protein, 357 aa, unidentified
MSKSRPAVGNQSTKQTRVFCGVDVSAATLNAAMPREHGAGFEQRQFANSAGGHSQLMAWLRKRQCPVRVTLEATGVYSLDVALALEGAEGFEVEVLNPKKASDFAKSLGRSKTDKTDAVALAEYSQRMKFVAWRRPSRNVLELRALGRHMATLTEEHTRLRNRLHAVEASRTAPRCVRQDLKRTLAAIDKRLLGLRREARRMIDTEPETKRKLLLLIAMPGIAEISAVQILAELAGLDEEMTVRQWVAHSGLDPAHETSGTSVHKPSRISRQGNRYLRKALYMPALSAARFDPHLKTFYLELLARHKTKLQALTAVARKMLHAIYGSFKTDTPYDGAKLFPGHRHLFSQTPTPIPTY

SEQ ID NO: 287728 - protein, 414 aa, unidentified
MFAVGVDVSNGRSTVAVLQSKSTVTLKPFEVSHTPEALGKLVEKLNSLGGETKVIMEHTGRYYEPIAMFLDSSGFFVSALNPILLNRYQENPSLHNVKTDKADAVKIAKFGLDNWEQLRQYEPMDTIRYQLKTMHRQFQLASKSETAFTNNLIALLEQTYPGIRKHLSSPARPDGSQKWVDYVGTFWHADCVRKLSPKAFSERYQRFCERHKYYFSEEKAAELYRHAQNVVTLVPKSDVTKMMVKEAVSQLNAISRTVETYRAEMNRLASQLPEYETVMGMYGAGPSTGPQLMAEIGDIRRFPKKNSIIAYAGIDPRKNDSGDVTRKSNKSSKRGSPYLRKTLFVIMDVLIQRKPVDDPVYQFIDKKRSEGKPYYVYMTAGGTKFLRHYYGKVRDCLKEKGLWDNSIGDSQDSE

SEQ ID NO: 287729 - protein, 342 aa, unidentified
MYYIGLDVHKKTISYCVKDASGQVHQEGQIGATRWELDGWMKTLPQPWTVAMEATIFTGWIYDHLLPHAQQVKVAHPLMLRAIAAAKKKNDRIDAGKIADCLRCDFLPECHMASTAIRDRRRTLRYRHLLVRQMVQMKNRISGLLMETGVSHNKRRLHKVGYFRELLSSNAEVNESIRPLLRVSRDSIVRLQKTEYALVSSLQRDPLLAERIKRLRTVPGVGPITALTWALEMGEVSRFPSIREAISYCGLCGDEKSSADKVMRTPLSKQRNKHIQRVLVEAAKLAPRQNHDLALVYEREKQKGNANRATLAVARKMVAYLLAVDRGQRDFVPFADPWSVAA

SEQ ID NO: 287730 - protein, 366 aa, unidentified
MTWGCQAGVETANLTTVMKHYKITNTETYESIKLGIDAHAKWYYVARQLDGATPQPVQKMDFEGLLHFVARQKRLAREVHTCYEAGAFGYHLHHQLAALGVTNYVVQPQDWDERGKGVKNDRIDAQALCQRLDRYVRGNHKAFSVVRVPTAEEERERAISRQRQQLVRERQRLQAMGRSLLAMHGIHVSGKWWQGKTWSEIRSEAPEWVIERLEVFSRLIAPLEAESAKLTSQIEAAAADQKIPKGVGPLTFEVLRREVGDWSRFTNRRQVSSYTGLCPREHSSGGKQVYLGISKRGNRYIRTMLIHGARAVLKNCTNKTDKLSLWLKSLIERRGFNKAAVALANKNARILWALANKNEDYEVKAA

SEQ ID NO: 287731 - protein, 330 aa, unidentified
MDGTSVGIDVSKETFVIAVAPTGDQWTSETTPAAVDILVARLVQLQPAIIVVEATGGYERAVVAHCAAASLPIAVVNPRQVRAFAQAVGRSAKTDGIDAAVLAEFGARIHPPTRGIADAETRALAALVVRRRQLIEMIVMERQRLAQAPPTGKITRDLRNHIRWLERRVEDVDEEIGTAIQASPVWRVHEDLLRSVPGIGPTTARTLLAELPELGRLERRTIAALVGVAPFNCDSGQHRGQRHIWGGRASVRATLYMAALSAIRCNPILAAFYQRLRAAGKPGKVALVATMRKLLTILNTMMKHQRPWNPKAASTPASPSRSARAAAVLA

SEQ ID NO: 287732 - protein, 490 aa, unidentified
MLAMFDAKTHLGSRGSVRPELVRHHNARRCDGRFQEPPHEPLRSATVSSTLDQDVKNEAVLIDGPPKPVWLSGDRDDDFIQMPFVAPRRSSLAELIGEGFTELLPPPAHRLIGHANSARRKHLLDHAKAKRKSEIMGWTVPAPRGRIDVPTGSGAMTITTIGLDTSKSWFQVHCIDADGRTVLRRKLARSKVLSFFANIPSCLVGLEACGGSHFWARELAKLGHDARLMPARYVRAYVKTNKHDAADAEACCEAVQRPGMRFVPVKTEEQQSMLMIHRARDLLVRQRTAAVNALRGHLAEFGIVAARGTAKAHELMRLAGDDERLPAMAQEALRYIVAQIHDIEIRLKSFEQRILSLAKENEVCKRLMTVQSIGPYIATAIAATVGDPRNFASGRHFAAWLGLTPKQHSTGGKEKLGGISKRGDSYIRRLLIHGARATVARVRSGQTKNAWLSGLLGRRHFNVATVALANKTARVAWAVMSTEQTYRRAA

SEQ ID NO: 287733 - protein, 341 aa, unidentified
MQITTIGLDIAKNVFQVHGIDASEKVVVRKQLRRSQVLAFFKALPPCLIGMEACATAHHWARELTKLGHTVRLMPARDVKAYVKRNKNDAADAEAICEAVRRPTMRFVQVKSTEQQSQLMLHRVRDLLMRQRTQVINALRAHLAELGITAAQGIAGLKELLKIIAGEGERLPVDAQASLVVLAAELQAMQTLIGSLEKRLMAQHRKSEASKRVATIPGIAVIGATAITATVTDPKAFRSGRDFAAWIGLVPRQDSTGGKQKLGPISKQGDRYLRRILVVGAHAVLKLAKQKPEKYPWLTQLLARKPFKVVAVALANKMARTAWALLAHGGTYRRPALVAAQ

SEQ ID NO: 287734 - protein, 414 aa, unidentified
MKLFVGIDVSSKELETCFMNADGDNLETLTVKNNLEGASYLRDRIVALVDKHSISEIHIGLESTSVYSWHPAMYLHQDASLKERNAKVFTINPKLVSKFRDAYPDLDKTDRLDAWVIADRLRFGRLTTTIVMQEQYVALQRLTRMRFHLIHNLTREKQYFLQNLFYKCNAFTTEVESSVFGHAILEMLSEKYSLDDIATMEVGDLADYLRDKGRNRFPDPDNVARCIQKAARASYRLSKVVEDSIDLVLGTSIQAIRSIQAQLKDLDKAIERILESIPGSLCLRSVPGIDRVYAAGILAEIGDIDRFSDQAAVAKYAGLTWRRSQSGSFEAEDTKRIKSGNRFLRYYLVEAANSVKNRDEEFGDYYRKKFNEVPKHQHKRALVLTARKLVRLVDVLLRNGQLYTPRRKVISAKE

SEQ ID NO: 287735 - protein, 439 aa, unidentified
MTVALGARLPLSTFYRLRQDWDPTPACGRRCEVELMYPRCAGLDVHLRTVVACIRIAEGRTLRQEVRTFATTTSGLLALSDWLSAEGVTHVVMESTGVYWQPVWHVLEGTFELTLANARHVRNVPGRKTDVNDSMWLADLLAHGLVQGSFVPPAPIQEARDLTRTRTQLTREIAKHTQRIQKTLEKANIKLETVLTHVLGVTGRAIIRAIIEGQTDPDALLALRRGKIKATVDEMREALRGRPTESHRLLLRIHLHQIEEIEKSIDLIEHRLEEVLRPFRREFELLLTIPGVSTTIASIILAEIGADMSRFPSSAHLVSWAGLCPGNDESAGKKRSTRLRKGDTWLKTALVQGAWAATRKKNSTLRAQYYRLKPRRGGKKAAVALAASMLTSAFHMLTRAVPYAEAAPITDPRRQKETAKRLVFRLKHLGFDVQIRPAA

SEQ ID NO: 287736 - protein, 343 aa, unidentified
MKDTIYDQYIAIDWSIENMAIARMTKKSNKITAIDVPSDIVDLQAYLKNLKGTKILAIEETTTSQWLYAELKDYVDTIFICDPNRNKLLNEGPKTDKIDAAKLVQLLKAGLMKEVYHSGDKFLYLRRVTSGYEDLVKAGVRLKNQRYALLRACGKAGNEKKDINLGSQGEQFVLDCLDRQIEVYEREKQCYENEFERLARKNPAIKHQKSLPGIGIINAVKIVTRVVTPHRFPDKGHYLSYTGLIKLDKISGGRSYGKKNPRFSRQLKSVYKSGILAAIGGTNPINDYYEHLIQEKGYPEHNARHKACRRLAILSLGVFKSGKKYQPYRRDHVKGGKENTSGL

SEQ ID NO: 287737 - protein, 404 aa, unidentified
MQANDIGVWLGLDVGKESHHACALDRNGDKVHDKPLGQDETEIRDLLSRLSERGRVLLVVDQPNTIGSLPLAVARDMGVAVAYLPGGAMRKAAQLLPGDAKTDERDAYVIAFTALHMPSTLRDCGSDDETLAGLKVLSGYDEDLAWETTRHVNRLRSLLLQIHPAFERALKSDRITSGTVLALLERYGGPAGMRRTGIARVSEWARSRKLRNSAAIVASLFDAIGRQTVTVAGTEAAETVIPAIARQLMELKRQRREVAGRVERLLENHPLLTVLTSMPGIAAKTGSQILLAIDGDITRFENSARLAAYAGIAPVTRRSGTSIRGEHPSRGGNKRLKNALWQSAFIAAFHDPESNAYYRRKRAEGKRHNAAIICLARRRCDVLYSMLKNGTLYQPKQTDLAKAA

SEQ ID NO: 287738 - protein, 482 aa, unidentified
MSTRTSQKTVTDPPKKPARPRGAKRLRVTNSRAAGIDIHSDVHWVAVPPDAAPAPPSDHPPHLPANVRSFGSCTADLRRLADWLAACGVKTVAMESTGVYWVPLFELLEARGFEVYLVDPRQSRHAPGRPKSDVLDCQWLQRLHSYGLLSASFRPTEQVIVLRGYLRQRQMLLRYAGQHVQHMQKALEQMNVKLAEVVSDVTGLTGMGIIRAILAGQRDPQRLAALRSVRCKRTREEIARALEGSWRAEHLFALKQAVALYEFYHQKVRECDAELEAHLRTFADRAEGRPLQPRPKGHGPTRGPNAPTFGGAREALYRMSGVDLTVLEGINETTALVILAEVGPDVSRFPSAKHFASWLGLSPLHRVSAGKIQSRHVRRGAHRVARALRVAVQSCHHAKNALGAFYRRIQARAGAPKAIVATARKLAERVYRVLRYGEEYVRQDVKAYEAAYRARVVKGLARRAGELGYRLEATTPTGAEAK

SEQ ID NO: 287739 - protein, 309 aa, unidentified
MYEQIINSDQSVKSFLKKLSDQKIALQDCLFCLEHTGIYNAHFLKVMEEKKLSVCLESSVHIKQSGGLLRGKNDKVDSYRIALYAFKNKEFLTLWQPERTVIRHLRRLSGIRERLLNARKQITNAIKEDKKFISKESSAQMIKCCKQSIKALQGDIKKTEEEIKKVIDCDEKLKELFSIIESVPGVGKITATEIVINTNEFRKINDPRKYACYSGVAPFEHSSGTSVRGKTRTSKKANMKAKSLLHMTALSAARFSEDIREYYQRKVAEGKNKMNVLNADKNKIIHRIFACVNQKRLYDKNYKICLVES

SEQ ID NO: 287740 - protein, 445 aa, unidentified
MFIQSQDDSHYCYSFFTKVVILMMKLKYSICCGLDVHKNVIVATIVITNKDGISEYRQKSFSTINSDIQRFHSWPIGNNCYHVCMESTGKYWIPIFNYLENDIDVCLTHPKYVKAIKGKKTDKKDSKWIADLYKFDLVRCSFIPPKDFRQLREIARYRFKLVCMKSSEKNRIQNCMTVSNVGIASVLSDPFGKTATEIMAYLLEHTSDSIDEKAVRKLIKKGAKAKSNEIIEAIRGYNIETDQAKKLELARGHLEYLDDMITQTEVELYIRMKPYYEFVEFVSTMPGMTELSSTIALAETGVNMDIFDDAKHLCSWCGLSPANNESAGKKKSVRIAKAGDYLKPMMVQCALAAIKSKKQPYFAIKYGRIKKRRGHKKAIIAIARMMMVCIYHMVSEKKPFTPTDYEELMEPQNHVERVILNEDNVFAYLESLGYDSSKLVKRNDN

SEQ ID NO: 287741 - protein, 371 aa, unidentified
MKSILSVGMDVHKNSFSLCAYDGYTGEIVSESTFASDVKLVIKFIETLKSRYENDVEIKCGYEAGCLGYSLYKSLTARGVDCVILAPTTMQVSAKNKMVKNDRMDALNIAKNLASGSYKAVYVPDEEDVEIKEYIRMIHDFKKELKRVKQEICAFVLRHGYQYDGKSKWTIRYMNWIRELEMSEIQRETLNEYIAEMENLNDKIDRFMNRIDEMYQSDRYHEKVSKLRCFKGIDTFAAMTIQVETADFERFPSAKAYASYTGLTTGEHSSGDKNNRIGITKQGNTVIRKTLVECAQSLVKGNVYAKKSQRLKSRQKGMDVNIIAYADKATERLKKKYQKLIERNVPRNKAIVAVARELACFIWGMETGNIH

SEQ ID NO: 287742 - protein, 314 aa, unidentified
MTHHIGIDVSKARVDIAVHESGETFHCRNEAAALAELIERLRGMAPTLIVLEASGGYEQEALFALLAAGLPAALVNPRQTHNFAKAGGYLAKTDRIDARVLAHFAAAVRPKITQAPTAVQLALTELVNRRQALVEMLVAEKNRLRLTRTEPARGHIERHIQWLAAQLDDMDKELRYLIGRSETWRELDRLLGSVPGIGTIAIASLLALLPELGRLNRREIAALVGVAPFNRDSGLHRGTRRIAGGRSAVRTVLYMCAVAGLRCNPVLQAFYARLKAQGKPSKVALTACLRKLLVILNAIARDHQPWNATRYAMA

SEQ ID NO: 287743 - protein, 387 aa, unidentified
MQQPNDLSRSLAALDQDSTLIAVIEMSRSTWLVAGIVPGINRQPLKKLAADETALLQLLYRWRDEATKAGRTINRIAVAYEAGRDGFWLARWLRGRGIEAYVIHPTSVAVSREHRRAKTDRLDTELLKRAFLGWLRGEPRHCSMAKIPTPEEEDAKRPNRERENLVGERTRIVNRMKSTLARLGLRGFKPTLRKAAERLDRLRTAEGVPLPPNTLAELRRDMARLRFVMDQIREIEAARLIRLEQHPELASHAMVRLLARVIGVGIATADMLVHEILSRNLRDRKAVARYAGLTGSPDESGARRREKGLARAGNARVRRGMIQLAWRFLMFQKNSALAQWYRMQTTDHRGTTRKTMIVALARKLLVALWQLVTTGEVPEGVVLRPAV

SEQ ID NO: 287744 - protein, 435 aa, unidentified
MEEVTDEPLYRDRVCGIDIGKAELYATIRVPSDTSPQRRMSETRSFATTRRGVLALADWLRSWQVPAVVMEATSTYWMGPFFRLEAEGFDCVLADARQVKNLPGRPKRDPSDSSWLAQCFERGAVRPCFVATKEFRVLRLHTRYRRDLINERTREKNRAEKLLETAAIKLSSVITDLHGVTGRDIMDHLIAGERDPKVLAQLARTRARAKITELQHALEGAEFFTGHHARLLKTMLERIDQIDARVCDLTEVIEELLAPYEEQLAQAESMPGWGRRSAQDAVAETGVDMTRFPTGGHLVSWAGRAPLDKQSGKRKGQARHKKGNTYLGGVLGETAVCAGRTQTREGARYRKLARSRGKNKACVAVGNTQLKVYHKLLSSPGMRYADLGPDYYQRRAQNRRTIDYHVRELETLGLEVTLCRIPEPEPGQAATTPAA

SEQ ID NO: 287745 - protein, 356 aa, unidentified
MGQKWLMYYSQCKAKIMKKQTFFFLGIDVSKQWFDISLMAVLNFQKQPMITERFLNTNEGLALLKKWLIAQNVKFDADTLLVIENTGIYHRLLWKFFSDNNIPIHIGNAAHIKKSFGIARGKNDKIDSQRLCSYAYKNDDELKATPVLNSVFLSLKDLITSKTRLKAQLGANKAYLKELKSINDQATQKMMEKAYKMAICGLKKSIAEIEKQIALTIKSDESIKTNYNLLLSVPGIGPVTATYILCCTNNFAGKISGKQLACYAGVAPFSDTSGTSLKGRNKVHKMANKELKSLLHMCALSTLKNYKEFRNYYDRKVNDGKHPNSVLNAICNKIVLRVVAVVNNQKIYVENYKKAA

SEQ ID NO: 287746 - protein, 330 aa, unidentified
MRKGTEAGIDVSKDTLDVAVRREDGSLETARFDNEPAGHRTLVRWLTKRRRAVRVVLESTGTYSLDVALALHQARGVAVMVANPRAIKQFAGALMQRSKTDLTAAAALREYAARMPFVEWQPPAGEVLTLRGIARRIAALVVERTRERNRLHALQATGERVAVVVNDIEVNMRHLDRRIELLTAEAVTLIREHAELHRAFELLTSVPGIATHSAVQLLPELLVLPDDMTVRQWVAHAGLDPRAFQSGTSVDKPARISKVGNAHIRRVLFMPALVAVQHDLHVKAFFDKLVARGKKPIQAYVAVMRKLLHAIYGMFATQTTFVPEKFHAAA

SEQ ID NO: 287747 - protein, 324 aa, unidentified
MTEAILGIDIAKLKFNVCLIKPGGKLKHKVFPNTAAGFEQLLAWLIPQGATKVHACLEATGTDGEALALFLHQAGHTVSVVNPAAIKAFAASRLSRTKTDRVDAELIARFTQAQVPPAWTPSPPEVRELQALVRRLEALQEMRVMEENRLTSGITVEVVRQSVAEHLSYLNDEIKRTEGLIRYHINNHPGLKQQSQLLDSIPGIAEATAAMLLSEITDIKQYRSARQVAADAGLAPRERQSGSSVRGRTRLSKIGNARLRRALYFPAITAIRCSPFFQAWVKGLQERGKSKMSVICAVMRKLVHVAYGVLKSGRPFDPQWAKSA

SEQ ID NO: 287748 - protein, 314 aa, unidentified
MKAIRTRVAGVDVHKEILAITVLIGDAESEPVAHQFECSTFTDDLMKCGLKLREYGVKEVVMESTGVYWKPLYNVWEPMGFEITVAQAAHVKNVPGRKTDMNDSHWLAQLHRFGLVRPSFIPEGVFQRMRLLSRHRTNLTGDLATVKNRVQKVLEDGNIKWGSIVSDVFGKSGLEILDLIADGTTNAKVLASKVTTKIKRKEEAEKALTNTLTTDHIFVIKQLMDQFHYLEQKIKEVESELAEKAMPYADLIEKLDEIPGVDKVLAMGILAEATNQMDKFKDERSFAAWAGVASGNNESAGKKKDQNADKATRT

SEQ ID NO: 287749 - protein, 350 aa, unidentified
MTISHYIGFDVHKKSVSYCVKTADGRIVEEGKLRATREALRQWAGKRREPWHGAMEATLFSGWIYDTLRPFAAELQMGHPALMKAIAASKKKNDKLDARKIADMVRCNLLPACYVAPPEIRELRRMLRYRNLVVGQATRMKNKMSGMLMEVGAEYNKRQLHGKQYFTNLLDTLEEVPESVKDLLRLSRGAMEMFETTQQQLLARLGKDPLLAQRVMLLKSIRGVGPVTALTWALEVGDPHRFPSVAHAVSYCGLTSALVSSADKQQRGPISKQRNAHLQTVLVEAAKLAPQWNPQLAAVHAREVARGNRNRATLAVARKLVAYLLAVDKSGQRFAVYHPPAVETEAPKVA

SEQ ID NO: 287750 - protein, 423 aa, unidentified
MMKLKYSICCGLDVHKNVIVATIVTTNSDGISEYNQKSFSTINSDIQSFHSWLIENHCYHVCMESTGKYWIPIFNYLENDIDVCLTHPKYVKAIKGKKTDKKDSKWIADLYKFDLVRCSFIPPKDFRQLREIARYRFKLVCMKSSEKNRIQNCMTVSNVGIASVLSDPFGKTATEIMFYLLEHTADSIDEKAVRKLIKKGAKAKSNEIIEAIKGYNIESDQAKKLKLARGHLEYLDDMITQTEVELYVRINPYYEFVEFVSTMPGMTELSSTIILAETGVNMNIFDDAKHLCSWCGLSPANNESAGKKKSVRIAKAGDYLKPMMVQCALAAIKSKKEPYFAIKYGRIKKRRGHKKAIIAIARMMMVCIYHMVSEKKPFTPTDYEELMDPQNHVERVVLNENNVFAYLESLGYDSSKLVKRNDN

SEQ ID NO: 287751 - protein, 424 aa, unidentified
MEVMHERVAGLDVHKETVVACVRVMVGGRRPKRECRTFATTTEGLLSLLAWLTANRCSHVAMEATGVYWTPVWKILSDGDFELIVSNAAHIKQVPGRKTDMNDAMWIADLLACGLIRASFVPEEEIQELRSLTRTRKQLVREQTRHVQRLQKTLEEANIKLDSVVSDIMGVSGRRMIEAMIGGERNPQRLAALADRGLKASPKQLYDALHGRLREHHRFLLKLHLTQWDALDATIRDIDRQVDGQIERMDETTEDQQPPFRQLILRLCSIPGVSHLSATSILAEIGRDMRRFATAGHLVAWAGLCPGQNQSAGKSKSSRLRKGAPWLKTMLVQCAWAAKRRKDSYYMAQFQRLKARRGPQKAICAVAASILTAIYHMLRANAPHRDLGADYFDRRSPDAKAQRLVRQLTKLGFAVNLQPLDAAA

SEQ ID NO: 287752 - protein, 405 aa, unidentified
MNAVGIDVSKGKSTVAVLRPYGEVVASPFDVAHTGSDLRALADLIKKLPGETKVIMEATGNYFEPIARYLHEQDIFVSVVNPVLISDFGGNTLRKPKTDKKDSVKIASYALTYWLDLKKYTLQEDLRKSLKLLNRQYQQSIKLKTMMNNNLISLLDLTFPGINKLFTSSSRESDGHEKWVDFVLKFPHCDMISKLTIKTFARKYKKWCSNNSYHFTEASCEKIYAFAKECVSSVSSDKAIVFSVVQAAKMLVSATENCHVIQSEMNRVASQLPEYDTVMNMYGVGKAVGPQLMAEIGDPRRFHSRKAITAYFGYDSENNDSGQKTTRSNPMTKKGSGALRRTLFIIMQVLLQTKPQDNPVYDFLIKKQSEGKHYYSYMNAAANKFLRIYYAKVKEVLHTTELSLT

SEQ ID NO: 287753 - protein, 389 aa, unidentified
MKIYVGIDIAKLNHFAAAISSNGEIILEPFKFTNDADGFQLLVSKLESFDKNSIIIGLESTAHYGDNLVRYLVAEFYQVCVLNPIKTCQMRKNNVRKTKTDKVDTFVIAKTLMMQDDLRFITFFDLDMMDLKALGRFRQKTIKQRTRLKIQLTTYVDQVFPEIQYFFKSGLHQNAVYALLKEAPSPKEIASMHMTHLANLLKVNSHGHFTKEQAKELRVLAQKSVGANDSAISIQITQTIQQIELLDSQLEKIEVEMTDIMKFNDSVIMTIPGIGYINGGMILGEIGDIHRFSNPNKLLAFAGLDPSVYQSGNFQAKTTRMSKRGSRVLRYALVNAAWNVVRNNATFKAYYDAKRAEGRSHYNALGHCAGKLVRVIWKMLTDEVEFNLE

SEQ ID NO: 287754 - protein, 332 aa, unidentified
MTYIGIDVSKDTFVVAYSPEKTSRTRTFKNTTKGIHEFIQTVSKDKHHCVMEATGNYSALLVYLLSEAGITTSLENPLKVKNFARVMLSTVKTDDVDARLIALYGEKMNPAPYVMRSDAILTLKQKRTVIRQLKKQLIATKNLKGSMEVLPFFDSKCRKSIEQTIAFLEKQIKHLEENLSDLANSEYKKQMDLLTSIKGIGVTLAAAFIMATGGFTYFDNARQLTRYLGLSPTYQQSGTSVNFKGHINRNGDSSLRSQLYVAAFASLRCNTDCRACYDRLRSNGKPRKVAVIAVANKLIRQAFAVVTQEKPYVDGHVSTLRLAPAYSETGER

SEQ ID NO: 287755 - protein, 416 aa, unidentified
MTDEVRWFVGFDWAMEHHRACLLDAEGKRVAERDVTHDGAGLQGLCSWLLERTGARAEEIAVAIEAPRGPVVEMLLERGFQVFAINPKQLDRFRDRFSMSGAKDDSRDAEVLGHSLRTDRRAFRRLAIDDPQVIELREWSRIYEELKQEQSRLANRVRDQLWRYYPQAGELGDPAANWFLDLWEKVPTPAKAARVSEQTVARILKNHRIRRFDAAEVLRILRQQPLTVAPGTVEAATAHIRTVAARLRLVNQQIKEAERRLDELCAAIEAASETAPGQICEQRDMAILRSMPGLGRITIATLLAEACEPLRLRDYHVLRVLSGQAPVTRRSGKSCIVLRRYACNRRLQNALHHWGRIAIQHDPISKQRYAELRRRGHGHARTLRTIGDRLLYVLCTLLERQTLFDPNHKTMQSAAA

SEQ ID NO: 287756 - protein, 338 aa, unidentified
MRYFVGIDLHSDNNYTGVIDKEDSRIFGKKLPNDLGVILEELEPFKKEIEGIVVESTYNWYWLVDGLQEAKYKVHLANPAEMQQYSGMKYTDDKWDSYWLAHMLRLGILPEGYIYPKEIRPVRDLLRKRTMLVRHRTAHILSLQNMVNRNTGRKLKVNDAKRLSEEEISKQLADKHHKMAVQSDKAVIDFFNEQIDRIEKVVLKEVKLRYPYKELVTVPGIGEILGITIMLETGDINRFPTVSDYSSYCRCVSSKKVSNGKKKGEGNKKNGNKYLAWAYVEAANFMRRHSEPARSWHQRKASKTNQIVAIKALSNKIARACYFIVKDQKPFDPRKLFQ

SEQ ID NO: 287757 - protein, 346 aa, unidentified
MLYAGLDLCRKRLDFHLLDGEGATLEVGAAPPDAGGLDGLSERLARYGAPIRAAIESMNGARFVHDRLELAGWHVEIADAQKVKGLAPLACKTDRIDAWVLAELARRELVPAIWLPDPRVRAERERARWRLHLVRHRSSLKQRVHAVLLTHGKPCPVSDLFGVRGRQLLARLELPEPWQGTIEASLRLIDELDREIGDCERELRRLGADHRYVPLLCTVPGISWVLAYTIAAELGDIDRFPSPRKLVGYSGLCPRVYQSGQRDLRGPLAKQGPRYLRWALVEAATHACTHPTYRQRYTDTKARIGKQRGAKVAQIDLARRLAEAIWHMLSREQPFAPKGATDPLAA

SEQ ID NO: 287758 - protein, 326 aa, unidentified
MKKQVIGIDISKDKLDFCVIDKQSVQMLAKGEVQNNEKAIKKWLGQFEQSTCTFALEHTGHYGAVLCKSLANQNFIFYLVNPLELKKSLGIQRGKSDAKDAYRIAEYGITNKHKLKPYQFPEESLSRLKALITARERYVKMSVQVQNSLKSNEILNKSIDVEMLIKEEKKQYQSIKKSIKAIENEMQKIIESDQKLKDNYRKTTSVVGVGPIIALKCIVETENFSKFSEPRKFCCHCGLAPFPYQSGSSIRGKTKTHFLRDKSLKAILIKGAITAIQHDPQIKTYYNRKIEEGKHHMSVINAVANKLVLRIFAVAKRETPFVKLVA

SEQ ID NO: 287759 - protein, 400 aa, unidentified
MYDIDDVGVFLGLDVGKSAHHGHGLTPAGKKVFDKQLPNSEPKLRAVFDKLAAKFGTVLVIVDQHASIGALPLTVARDAGCKVAYLPGLAMRRIADLYPGEAKTDAKDAAVIADAARTMPHTLRSLQLTDEITAELTVLVGFDQDLAAEATRTSNRIRGLLTQFHPSLERVLGPRLDHQAVTWLLERYGSTAALRKAGRRKLVEVVRPKAPRMAQRLIDEVFDALDEQTVVVPGTGTLDIVIPSLARSLGAVHEQRRALEAQIETLLEDHPLSKVLTSIPGVAVRTAATLLVTVGDGTSFPTAAHLASYAGLAPTTKSSGTSIHGEHAPRGGNRQLKRAMFLSAFAALHDPTSRTYYDKCRARGKTHTPALLRLARQRINVLFAMLRDGTFYEPRTPRLA

SEQ ID NO: 287760 - protein, 417 aa, unidentified
MDVVVERCAGLDVHSRQVTACALWHTAGGRLGEAKAEFATTAAGLSRLVAWLREHGVSAVGMEATGVYWMPVYAALEAAEGFDLTLANAHQVKGLPGRKTDMNDAAWLARLIRHGLVRKSLVPPKPIRELRDLTRYRRSLVEAQASERRRLIKLLDAADLKLAAVLSDVFGVSGRAILRAIVEGGHSAAAMAKLARGAARRKRPQLIDALEAEVAPHRRQLIALQLARVEAAEVDIESLDRQIAAKLEPYAAQMALLVSIPGIDWVVGATIIAELGVDMTAFPSAGHAAAWAGVCPGSNQSAGKRKPTGARKGNSHLKTALCNAAIAATRKRGCGLKAKYHAIKARRGGGRAAMAIGHKLLILVYHVLATGQPYREPDAAQQHKRNAERDAKRHVRRLQRLGFHVTLAPAQEPAHAL

SEQ ID NO: 287761 - protein, 394 aa, unidentified
MRFVGIDIGGERHAVAVVNDDGALLVRSTLFGEEAAGYQRLRELLGDPNDCLVAMEATGHYWRNLFAFLVGHGFKVALLNPLRTRRFAEEELERTKTDSVDALGIARFAAQKRPAPTPVSDEVTGELRELVRLRTRYVDELSDRMRQLHRAVDLGFPEFTRHVRIKTLLATAILARYPTARSFARVSIRKLARLAYDGRHHVGEALARALIEGAKVSVGNHHSEPYQLQVKYTCADIELLRGRVKQLEQDIERKLEDHEVGKLLTTIDGIGARTAACLIAELGDPSRFRDAAALASYVGVVPRLRQSGKRAFSGARGLPLGNARLRHRLWMPTLVAVRRNPWLRAHYDRLLAAGKRPKVALVACMRKLLCAVYSVARTRRPFVPVLATGSSTLK

SEQ ID NO: 287762 - protein, 433 aa, unidentified
MRVLYERVAGIDVHKDMIKVAIRSPGEKPWTRTTEILEFRTFYGVLQEVGRLLRRRGVTHVVMEASGVYTEPVYHALREQDFTEVAVINPAHARALKGHKTDAADCARSAELFECGLLRGSYIPSAEQKEVRDLTRYRMKTVQARTSEIQRLGKALESAGIKLGSVASDITGDSATAMIKALIDGERRGPVLADLAIGRMRTAGKLADLSMALSGRFGEHHALLCRLHQDRIAGYDAAVAGLDEQIAGKVTRWAREGRLLASVPGFGDVITSAWLAEIGPAPHRWFPSCGKLASWVTLCPGNNISARKRKHGRTGDAGTYIKPMLIQAAWNAIRTKGRLQARYRRLVRRFGGEKNAAAKKKAITAIAHTLLKIAYQVLKSGQPYTDLGADFYTRRQSPQQRQAYLERQLQKLHPGHVITITIGPPEAALPPGA

SEQ ID NO: 287763 - protein, 422 aa, unidentified
MDSGAREVEYAAFIGLDWGSEKHSVAVQAAGCKEIEMYTLKQTPEEMHGWLFKLQDRFGGRPVAVAIEQTRGAVIHVLLGYDFVHVFRINPKSLADYRKAFSTGGAKDDPTDAQYLLEWVLLHRDRIQPWIPDDAETRALQKLVEFRRDVVNQRVALTNRLTQVLREYFPQALDWAGEIDCVMASDFLSKWPTLEKIKKARLDTIRTFYRQHGCRNSERIEERLQAICTAQPLTEDPAVIETSVCVVQRIVAFLRPTIESIDRLDQEIEKRFHAHPDMAIFHSLPGAGPVLAPRLLAAMGSDRNRFESASEIQKYCGIAPVTERSGKHAWVHRRFACPKFLRQTFHEFAAQSRNWSAWARGYYEMQRHNGKGHHTAVRALAFKWIRIIFRCWKERVTYNEETYVLSLRKKGAEVLEFIAKAA

SEQ ID NO: 287764 - protein, 488 aa, unidentified
MKMLYDRCAGLDVHKKSVSACIRISKGKETSQETRTFGTFTADLEDLRDWLLKHKVTHVAMESTGVFWIPVWNVLEQCEANFVLTLINPQHVHALPGRKTDRKDGERIAELMQYGLLKGSFIPPPAIRELRDLSRRRTHLQGERNRVINRIRRLLETANIKLGSVVSDITGKTARMILGEICRGNCTPEELAKLAQASLKNKRAELIGSLKGFYSEHFRWLLTEAVQDLAYLDRKLEPLDQQLAKRLLPHGDLIRRLCTIPGVDFTTAAVIIAEIGLDMSRFPDAAHLVSWAGVCPGNNESAGKRFSGRVRKGNRYLRRVLTQSAWSITHKKECFLTSLFWRVAARGGRTKAAIAVAHRVLAIAWHIIKNEGEVYREVGGSHQDRLRPQRSARRLVHRLEQLGFEVNLKAKAREAAPAPESVTLPASPVNRRSHRSLSSTPASHQKPEAVPADPSICRRCARWGIACIHLRNANRRPSVVVSPDESIT

SEQ ID NO: 287765 - protein, 343 aa, unidentified
MDHFAGLDVSVKETSVCIVDDTGRIVREVKVASEPAALLQALENRAYHFKRIGLEAGPLSQWLFSALAEAGLPVICVETRHMRAVLKAQINKTDRNDARGIAQMIRAGLYRPVHVKTLRSQKLRMLLTHRKLLLSKAIAVENDLRGTLRNFGLKVGMVGTVKFEARIRELVEDLPDLATLVEPLLTVRRVLREQLGILHRRLLAIVRDDDVCRRLMTVPGVGPVVALTYRATVDVPARFKNSKAVGAVFGLTPSKYQSGEIDRAGAISKCGDEMMRIMLYEAAQVMLTRTKKWSWLKAWAMKIARHRGMKKAIVALARRLAVIMHRIWVDGTEFRWTREVAAA

SEQ ID NO: 287766 - protein, 365 aa, unidentified
MKKIAYVGVDYHLNSLSIAVVVEGKKVPFDAVRLKNDDKMIRKYMTKLSEKFEIKACYEASSSGYCFQRKMAAWGYSCEVIAPSLIPRKPGDHRKNDFRDARDLSQNYAHGTLSIVHPPTEEEEAVRSLVRCRFAFKEAAKKVKQQINSFLLGQDQHWNHSKWTSQHRKWLWEMRMPNAYLQEVLDEHLAHLDYLETRLQHLDDQIEQIATSPVYAPSVKKLAAMKGIKTLTAMLLIVEITDFRRFPNPRALMAFLGLIPSENSSGDNRKDGPITHAGNKRCRSALIESVQHYPRSPHVSAQMKSDLSQLDAHSAGIAVKCVKRLHKRYWALTLKGKLRPVAITAIARELVGFIWAMMQPQSAIA

SEQ ID NO: 287767 - protein, 356 aa, unidentified
MTNAIPTDVIIGVDTHKDVHAAAAISGAGVHLATTTIPASSKGYGALEAWAKSMGAIQAFGIEGTGSYGAGLSRFLRERGHTVVEVNRPNRQLRYQQGKSDAVDAESAARAVLAGQAVGQPKSGTGTVEMIRHLKIARDTAVKARTQAMQTLKAIIVCSPDALREQIEQISGKMTLLRRLAALRPGPLTSTLASAKTSLRAIARRWLLLDAEIKQHDAHLEILTVARAPELLEAHGMASGTAAEMLLLVGDNPERIHSEAAFAKLCGACPIPASTGKTIRYRLNRGGNRQANAALYRVVITRMRGHQPTLDYVRRRTAEGKSRSEIIRCLKRYVAREIFGYLCTKPAPAEVAAISS

SEQ ID NO: 287768 - protein, 435 aa, unidentified
MHEVTDEPLYRDRVCGIDIGKAELYATIRVPSDKNPARRAAETRRFATTRRGVLALADWLRCWQVPAVVMEATSTYWMGPFFRLEAEGFECVLADAKQVKNLPGRPKRDPSDSGWLAQCFERGAVRPCFIAAAQFRVIRLHTRYRRDLIEDRTREKNRAEKLLESAAIKLSSVVTDLHGVTGRDIMNQLIGGHRDPKALAQLARGRARRKISELEHALEGAEFFTDNHARLLKTMLERIDRIDAEITRLSEVIETLLTPYEEQLQQAESMPGWGRRSAEDAVAETGPDMSRFPTPAHLASWAGRTPLDHQSGKRAGRARHKKGNRYLGAITGETAVAAGKTATREGARYRKLARSRGKNKACVAVGNTQLRVYHKLLSSPGIRYADLGPDYYQRRAQNRRNIDYHVRELEALGLEVTLCRLPEPEPGQAVTTPSA

SEQ ID NO: 287769 - protein, 337 aa, unidentified
MDYFAGLDISMDETHVCVLDREGVVVRESKTESTAQAIAGELAKAPSCHRIVFETGRMAPILFHGLNQLGLPVVCVESRQAYQALRSLATHKTDRNDARGLAHLARTGFFKPVHVKSLQAHALRSLIIARKKLVGQRVTLENQIRGLAVVFGIRLPRALAAAFIDQALKASEGIAGLSAAMRGLITARTAVMTAVAAIDADMRRMTRASAACRRLMTIPGVGQLTALAFVAAIDDPSRIRRSRDIGAYLGLVPRRHQSGEVDYTGGISKCGDRGVRTLLYEAANVMLTRYKGQLKLKDWAFAIARRSTMRKARVALARRLGIIMHAMLRDETEFVLA

SEQ ID NO: 287770 - protein, 347 aa, unidentified
MNYIGVDCHISSLDFAVVNEKGTTTKRAEVNTGVKEFMEFVKSIPKPRKIFIEEGELANWLLETSLKYGENLVITDPKINKWIGKAGKKNDTIDAEKLAQLARGKYIKEIYHCINNRRRFKELVFAYHDAVKSQTRIKNKIKAAFRREGIRCSGATVYSEKYRKEWQKKLPGNKVVHLMVNELWAQLDQIQKAQERLKRNIRIYGKQYPEIKRFRNVPGIGLIHASTISAIIETPHRFANKKKLWMYAGIGLAERKSGEKVYSRRLTREYNRLLKNTVKKASEAAIYAKDNQFRRQYLRLTIEKGIPSYKAKLTVARSLLAALYGMWKKGEAYDPEIDIKRGKGNKK

SEQ ID NO: 287771 - protein, 332 aa, unidentified
MQQYEEDKYYVGFDIHESSFYGTIMDARGEIITEGYVKNSKEGIQNFLGFVPSTKFKIAIEACGLSRGVYNLLTELGYDVVVANPVKTNRIAGKKKTDKVDSKALADLLRTGYLPLVYVPSDEILKLRDIARHRIKLVRMRADNKVRIKSYLSRDRKKFPGGWSKDTLARLREMDPLIENLVDIIEILNEQIKNIDKKIKSIARNNFRISLIQTIPGIGDISALLIYEEIGDIKRFDNPKSLVSYAGLCPGVYQSGDTNYTVMNNANNKYLKWILMECAGRAPIWDDRYMKHFTKIKSRKGWKTARKSLARKMITDVWHIMKNEEPYRKSES

SEQ ID NO: 287772 - protein, 345 aa, unidentified
MTSVATIGVDIAKSVFQVHGVDTAGQVVVRRRLTRGRVLAFFEKLAPCVVGIEACSSSHYWARELAARGHEVRLMPAQYVKPYVKRGKNDAADAEAICEAVTRPTMRFVPVKTPEQQSVMMLHRVRLMLNRQRTQLSNSIRAHLSEFGIVAPIGRRGLDQLLGVVADEKDTHVPADARLCLQMLAAQLAVVKDQILENDRRVLASARATGLGRRLMEIPGVGPLLASALPATISDPAAFKTGRDLAAWIGLVPKQNSSGGKERLGSISKAGNRYLRQMLVVGAMAVIRYAERHGTRRPWLIQLMQRRSTKVAAVALANKTARIIWALMTNGERYREPTVAGALAA

SEQ ID NO: 287773 - protein, 315 aa, unidentified
MHKREAFVGIDVAKKELEVAVFPGADTKTWPNTEEGIGRLVDYLKPLSPTLIVLEATGGLEMPCVGALAAGGFPVVVMNPRQIRDFAKATGRLAKTDPIDAKVIARFAEAVRPEVRELKTEEMQALTALGLRRRQIIQMVTSEKNRLASASKWTREDIKEHISWLEKRLDDVNNELNKAIRNSPVWREKDDLLQSVPGVGPVLSATLLSQLPELGYLNRKQIAALVGVAPLNRDSGQFRKRCVWGGRASIRSALYMATLVATRFNPTIAVFYHRLRTAGKEHKVALTACMRKLLTILNAMARDHTHWSPVCLGES

SEQ ID NO: 287774 - protein, 361 aa, unidentified
MITVGIDAHEDSYTLVAVDDVGKRIGCLTVQARQTGHERLLDWLTEYGTVEIAVEDCRHLTRSLEAALLIAGHRVVRVHTRLMADARRSACERGKSDPIDAEAVARVALREEGLPTATLAGPERDLKLYSDHRKRLVEHRTALQSKLRWFLHELVPDLAVPSRGIKRATVFALVSDAISTIPGAVAEIARDLLDDIIQLTSRINSLEKQLAAIVKIEYPTLLTIPGLGTLGAATIVGETANITRFTSNDAYARFNGTAPSPVWSSNHVRVRLSRGGNRTINAALHMAAVTQLRLHGEGANYLAKQLERGKTKKEALRLLRRRLSDRVYKAMRQDHATTCTPRAAEPIPLQNQPDHDLVIAA

SEQ ID NO: 287775 - protein, 320 aa, unidentified
MSKKKSTSFIGIDVSKRLLEVAAHQSDYQFRCANKASAFGELIVELIALRPARIVLEATGGLEIPVVAALHAAGLPVVVINARQVRDFAKALGQLAKTDRLDARVLAHFAAAIKPPLRPIKSKDELELDALAGRRGQLIEMLTAEKNRRVSAATETVRKEIKEHIDWLEDRIAELDEQLQTLLKSSQLWRVKDEVLQSVPGIGPVVSFSMIADLPELGTLNRQQISKLVGVAPLNRDSGQQRGTRHIYGGRARVRSMLYMAALTATRCNPVIKEFYERLLANKKLFKVAITACMRKLLAIINVMVRDCTRWKTKDDPVST

SEQ ID NO: 287776 - protein, 314 aa, unidentified
MSPLIFVGIDVSQAHLDIAVRPGASFSIAHHESAIATLVEQLRPLSPTLILLEATGGMEIPLTSALATAGLPVVVVNPRQVRDFAKASGRLAKTDALDAQMLAQFAEVMHPQPRPLPDAEARALTALVARRRQLVEMLTAEKNRLLSASSPIRKRVRAHIAWLERELEHTNTELSEAIRHSPVWREKDDLLQSVPGVGPVLTSTLLASLPELGTLTHKQIAALVGVAPLNRDSGTLRGRRTVWGGRAQVRAVLYMGAIVAARFNPVIRVFYQRLQRAGKAKKVTLTACMRKLLTILNAMLKHRTPWRVVEAHHA

SEQ ID NO: 287777 - protein, 345 aa, unidentified
MPEEATSYRLFVGVDIAAATAMVAWQVGRGKVSRPVQIAQSLAGHAALQDKLSASGVPAGETLVVMEATGSYWITLATTLSQWGYAVSVINPSQAHDFAKALLKRAKTDAIDAQTLAQLAALLQPKRWTPPPAIYSELQQRLAQRDSLLDLRQQVRNQLHALEQGPVVIAAVRQRMEALLETLTAQIKEVEKEITPVLQQDEAWAKAAALLQTITGVGLITAAWLVTSTLNFSVCPSPEAATAYAGLVPYVRESGTSVRGKQAISRSGNKRLRRTLYLATLAATRWNPQIKAFYTRLRAAGKPAKVARCAAARKLLHLAWAVVTKERAYDPAYHQGSTAPPASAA

SEQ ID NO: 287778 - protein, 382 aa, unidentified
MEVVYRCCCGIDVHKKVIVACLVNGGEQELREFGTTTSEIKTLANWLTESGCEMIAMESTGVFWKPLYNLFELMDLDAMIVNAAHMKALPGRKTDVKDAEWIADLLRHGLLKASYIPNREQRELREITRYRKSLTEERCREVNRLQKILEGANIKLDSVVKDITGKSARKLLQRIIDDDIPDSDEVSKLVHGRMRPKLDQIVASIEGITTLLQRKLLAQIIDHIDDLNRRIGELDKLVQEYMAEYEAAIKAIDEIPGIARRSAEVILAEIGLDMGRFPSAAHLCSWAGVCPGNYQSAGRRKHGKTTKGNKALKTILTQCAKSAKTVKSSYFFAQYQRISARRGKNRATLAVAHSMLIAIYHILKNKTAFYDLGAEYYDNDPR

SEQ ID NO: 287779 - protein, 423 aa, unidentified
MKSMAHRARGSQVVPDGERGIVVGVDVSQETLDYGAFRPDSRGAVAAAGQDEAGFAKLGELVAEFEGQGREVWVAFEPTGPYSTCLARWLRGHGARVVQVNPYHVKRTKEVRDNSPHKSDGKDPGVIADLVWQGCYQQVMASEGVYAELRVATREWASLVKKRTAIRNELHAHLTVWFPELRTVFKDSLCQSVRGMVRRFGSPQEAARKGVRSVRAALRQASSGRTTKRAGAVWQAATATVAPPQGQQARRRSILASLTLLELVEARQEQLGGELEALLARLPEAQSLVSVAGVGTITAAGLLGECGDLGAYDTYAQVEKHLGLNLYSISSGKRQGRCHISKRGCSWGRYLMCHIGLMQTRRGGRYHEFAQRQKQQGKSTGQIRVAAGRKLLRLLYALARDRALYDPGRSLTGAGARDGQVIH

SEQ ID NO: 287780 - protein, 341 aa, unidentified
MTAKSTFIYTIGVDIAQAECVWAAYHHPTQTFLARGTVARTQEALGAWAAELQRQWPQALVVLEATGGLERAVRRALQEVGLAVAIANPKRVQRMREAGGKAKTDRLDAETLALWGALYGRPQPPVSLAEERMRDLLLRREQVQAMVHQERMRLRQAQDAFVRAQIQAVIQLLEKQKAELEAEIRRQWQRWQEEVPQVADDVALLMSLPGVGFQTALELRVWMPELGTLRAKEVGALSGTAPQARDSGKRRGRRRIRDGRRRVRGALYMTVLTVLRRKEGPLWAFYQRLRQRGKPFYVAATALIRKILVIANAMLRDRRPWNPPQAQTRFRFHPVSPLTTS

SEQ ID NO: 287781 - protein, 344 aa, unidentified
MHIASIGIDLGKTTFHLIALGERNKVLLRKKFSRPQLLAYTANLPASLVGLEACAGAHFLGTALREQGHQVRLIPAQFVKPYRKSNKNDFLDAEAIAEAVTKQNMRFAQLKTQEQLDWQAMHRVRDRLVRRRTALINEIRGFLLERGITFAAQPIHLRKNLPTVIEDAEQNLSPRLRWLVDRMWQEWKQTETEIQAITEEIERISNEDARCRQLRQIPGFGPLVSTATVAAIGNGSAFRRGRDFAAWVGVVPRQYSTGGKQKLYGISKRGNIYLRRMLIHGARAVLFRVKYDTGGFGQWVHRLAQRAPSNKVVVAIANKLARIAWAVLSSGKEYRHQPLQLAAA

SEQ ID NO: 287782 - protein, 439 aa, unidentified
MFSRSEERSLNKKGKQTPMKAAQTILHVGLDVHKDSIAVALAAQDGSLRRYGEIPGHIEAVDKLLKRLDRADQQIRLCYEAGPFGFVLCRHLRRKGYVCEVVAPSLIPKRAGDRVKTDARDAEQLARLFRAGELTAVRVPDEADEALRDLIRGRLSAVFEQHRARHRLKGFLLRLGFRYPGKTSWTPAHMNYLSKLKMSHPAQQIVLEEYIQAVQSATERLDRLTTQVQAQLPGWKWEPVVRALMCLRGVSVINGMTLVAEIGDIDRFESPRQLMSFLGLTPSEHTSGDKRHQGAITKAGNGACRRALVEASHHYRIPPRISPTLRQRQHGQPEQVRQIAWKAQQRLYSRQRTLSLRRKKSVVVVTAVARELCGFVWAICRALKHPHPKAPTRTSEGSARVYVLKPDLKFKSGAGRSRLASSAAAPPARARKGPTSLAS

SEQ ID NO: 287783 - protein, 408 aa, unidentified
MRGRGLPVPVAPESCSGCQKQPRWWEATVKKSYAVQRQFVGVDLARRRSVITRMDAGGEVVDCVQIDNSERDLVAEVAKAGSGAPVAVEATFGWYWAVDVLQAAGFEVHLAHPKGNASMHNRRVKTDARDATELARLLRMGDLAESWIAPPVVRARRELVRHRHKLVKTRASLKASVHAVLGKCGIVLPLDDIFGPVGLAALAAVELAEPYASRVASQCRLIEAVTTEVTLVEAAIAAAFADDPGYRALLTIKGIGPVFASVFVAEIGDVHRFATPQALACWAGLTPKHYESDNKARRGHVSKQGSRLLRWAATEACQRIREPYLADKRALITARRGRSAANISKVAAGRRLLHVVYYTLRDGHARCLDGPARAAATGDVTTVTRPTRVTANGMTHQPPRGAVVVDPM

SEQ ID NO: 287784 - protein, 340 aa, unidentified
MESFAGADLHKRVTQLAVLREGQPPSQFRFPNDSKTVDGVLKKLPRGTKIAVEATGSWWWFVEKAREMGHEVSLSHPKQTKAIAHARLKTDKVDAVMLARLLKADFLPTVWIPGERERYVRELLAHRARLGRTRTAVINELHAVYAKRNIEVPGMIWHRIRPVAWRAEELSGYAPRIVSENAELLKLINQQIQNLDKELAKAGQEDPQAKRLMTIPGVGVATGVAVSCWIGDIRRFPNAKKLVSYFGIAPKVRQSANRETHGHISKEGSGMVRWLILQAALVGIRMSKGPGRGQYLGVSRRRGKKIARIAVARKLLGTIFHMMKEEIDYEEFLRRGSNAQ

SEQ ID NO: 287785 - protein, 341 aa, unidentified
MQVATIGLDLAKHVFQIHGIDAAENVVVRKQLRRSQVMGFFEALPPCLIGMEACATAHYWARELTKLGHEVRLMPAKDVKAYVKRNKNDAADAEAICEAVRRPTMRFVGVKSAEQQGQLMQHRTRDLLMRQRTQVINALRAHMAELGIVAAQGREGTKSLLAIIADDGDERLPVDARASLIVLAAQLQALQTLIGSIEKRIIAQHRASEASKRLATVPGIGILGASAITTMVTDPKAFRSGRDFAAWVGLVPRQDSTGGKHKLGPISKQGDRYLRRILVVGAHAVLRRARQHPEKYPWLTRLLARRPFKVVAVALANKMARIAWALLAKGGSYRVPRLAAA

SEQ ID NO: 287786 - protein, 372 aa, unidentified
MENIIYIGMDVHKESFSLCALHGTTGEIVREARCASNVSLVKKFVEKLKTKYGEGIKIKAGYEAGCLGYSLHNLLEQNGIDCDILAPTTMYSSSKNKMVKNDRFDAKMIALNLANGTYKEVYVPEEADVAVKEYIRMLSDFKTSLKKIKQQIKAFLLRHGYIYEGKSSWTIAYMKWVKNLDLHGLFKETLDEYLLQYDVLVDKIERFSLRLEELSHSERYEEPVAKLRCLKGIDTTSAMTVHVEIADFTRFPTAKAFMAYVGLTPSESSSGEKISRSSITKQGNSTVRSTLVECANALVKGTIGLKSKRVKARQKGQRSDVISYADQAIERLQRKYHRMIYQGKSRNVAVTAIARELGCFIWGLETGKIHRK

SEQ ID NO: 287787 - protein, 329 aa, unidentified
MDTTYSKVAGLDVHQKSIQSAVRCIQETGKLVKQARSFGTMTRDLRALADYLEALGVTHVALEATGVLWKPVWNILEGRFTLLLVNPRHLKKVPGRKTDVSDAEWIAQLLQCGLLRGSFVPPRPIRDLRDLTRHRTQLGGEHTRVANRIHKLLEDAHLKLSAVATNILGKSGRAMLAELLEGNDDPGQLAELALGRLRAKLPQLRLALEGHCTEHHRFQLRQLWEHLDHLEQPHECLSRRIGELLDAVLPAQHQEHLDAIPGVNRTTIENVVAEIGVDMAVFPDADHLSSWTGICPGNEESAGKRRRSRIRKGNPWLRSTLYNGSGLGG

SEQ ID NO: 287788 - protein, 398 aa, unidentified
MKVSGLDVHKDSIFCAVYDGNDYSKVMEYETTIPKIRQMGEYLRSDGVTKVAMESTSTYWVPVWDVLLEMGFELMLVNPYLIKQMPGRKSDVKDAQWIACLLHKGMLRGSMIPSPTIQQLRTYSRKYTKLQEQKTRSLQKLDRIMVKCGFRIGSCMSNLATKSVMNIVTALIKGENRPDELCKLVYGNTENKKSGKLVEALTGNLKEHYRQQLAWEKEEYDLFEKQTEQCLVQMRRICNEHYKKEVELIKTIPGVSDISAMIIIAETGGDMSVFENSGKITGWAGLRPRNDESSDKIKSTAITKGNKYLRSVLVQISWAASRIKNGWYKEKFNRLAIRKSRKKALIAIARKLLTVTWNVLYYKTPYNPQLAHVYDPVKVEAKINYYQREMERMQKLLK

SEQ ID NO: 287789 - protein, 486 aa, unidentified
MAKRKKSTYERLRDGEKLRQWERKEVERQFRAEEPGWEVVHRDVAGIDVGNESHFAAVDPKLTQQSVREFGSWTVGLQAMADWFKNCGVKRVVMQTTGVYWIAVQEVLEGNGFQVAVVDARGTKNLPGRKSDVQECQWLRKLDIFGLLRESFQPPEAIRGIRTTWRLRQRWVSDAGRSIQQMQKALTTMNVQLANTISDVSGVTGLAIIRAIVGGERDPWKLAKLRERNIRASEEEIARSLEGNWREDVLFELGEVLEAYDFQQKRIVKCDEQLKKYMGTQPTREVGGGVEVAGEEVAEGPKKRGRKKKGPRKPRKNQPAFNLEAELKRVMGVDLTRIDGVKVMTAQTIYAEVGADLSDFRTEKHFASWLMLAPKRDVSGGKVIKHLTFKGSNRVANSLKMAAESLKDSDSYLGARYRSLRGRLGGVRAVKAMARYLSCLIYRMLTKGEAYVDRGAAYFEKKRQDRDLVYLRLKAATLGLKLVAAV

SEQ ID NO: 287790 - protein, 421 aa, unidentified
MTPTSHDTFAAFVGIDWADAKHDGCLQAAGSAKRECFQLEHTPEAIDAWVTTLRTRFHGQPVALCLELTKGPLVCALRKYDFLILFPINPLTLARYREAFTPSRAKDDPTDAELQLELLLTHRDKLQALNPQSPTMRALEQLVEHRRRVVGDKVRMTNRLTSTLKNYFPQVLQWFQDKDTPIFCDFLSRWPTLKAAQHARRATLETFFRAHHVRSADVIAQRLHAIKAAMPLTTDEGVIAPNALLVQALVAQLRVTLQAIAEFDTAIAQRAQTHPDFPLFQALPGAGPVFAPRLLVAFGEQRARYASAAELQKYAGIAPVTERSGKKSWVHWRLQCPKFLRQTFVEWAAESIRHSFWAQVYYQQQRDKGTTHQAAVRALAFKWIRILYRCWQERTPYDESVYLQALKCRGSSLLQQLAKVS

SEQ ID NO: 287791 - protein, 371 aa, unidentified
MKQQTKSSNITVGLDLGDRRHRFCALDERGEVVEQDSICNDRVSLKKLAGRYHGALGVMEAGAHSPWISRFLEALGWRVVVSNPRKVRAIYQHERKSDQRDALMLARIGRMDLALLYPVRHGTAEGQQDLLRIKLRDSLVRARVAVINSVRFTLKSLGYTVRNSSSARFHKVVMEEVPESVREMITPSVQALAELTARIKMLELEINTLAQMKYPQSAQLQQIPGVGPITALYFVLKIEDPNRFAHVRDVGAYAGLCPRRDQSGESDPQLRISKRGDAYLRRLLVSAAHYILGPFGPQSALRAYGLMLAADGTARAKKRATVAVARKLAVLLLSLWKSQQPYQPFPAACLNGEQEDRRSGTIALHRMEATD

SEQ ID NO: 287792 - protein, 431 aa, unidentified
MKVMYERVAGIDVHKDMIKVGVRSPGDKAWTRKTEILEYRTFYGVLQLMAADLRKRAVTHVVMEASGVYTEPVYYALCEQDFERVEVINPAHAKALKGHKTDAKDCARLAELYECGLLRGSYIPAAELKELRDLTRYRVKTVQARTSEIQRLGKALESGGIKIGSVVSDITGKSAIAMIEALIDGERRGTVLADLAIGRMRTAGKLADLSMALAGRFTGHHAMLCRLHLDRLAVFDTAVSGLDERITARAVPWRREQDLLMSVPGFGDIVSQVWLAEIGPAPHQWFSTHEKLASWVTLSPGNNISAGKRKHGRTGDAGTYIKPMLVQAAWSAIRTPGRLQARYGRLVRRFGGAKNPAAKKKAIIAIAHTLLKIAYQVLKSGTPYQDLGADFYTQRESPQQRQAYLLRQLEKLNPGCTITISLPEAALTPGA

SEQ ID NO: 287793 - protein, 348 aa, unidentified
MRFYTNTHQYYCGIDLHTRVMYLCIISSGGEIVLHRNMKADPESLLKAIEPYRPDIVIGVECIFTWYWIADVCAEEKIPFTLGHALYMKAIHGGKAKNDKIDSGKIAAMLRGGMFPTAYVYPAKMRALRDLLRRRNYMVRRRADFLSHIQNTNSQYNQPGFGRCHIARKCHREEVLSHFKDPDVLASIKTDYALIDQFTVQIRALEQAVLDGAKQHDPQALLLIRTIYGIGKILSLTILYEIGDISRFPRVQDFASYCRLVKCSRESAGKRYGTSGSKIGNVHLKWAFSEASVLFLRCNPEGLKYKKRLERKHGKAKSLSILAHRLGRATYYMLKRGKAFDMKKFLSA

SEQ ID NO: 287794 - protein, 350 aa, unidentified
MRIIGCDYHPGLQQIAFVDTETGELQERRLQHPQEAEKFYRELAAEGLKARVGLEASGHARWFERLLAELHFELWIGDAAEIRTKRVRKQKTDRQDAQLILRLMLKDDFPQIWVPDWENRDLRQLLWHRHRMVQARTRVMNPLQAVALNEGLRCKKRLWREAGREQLEAFPLAPWASRRRRDLLELLDRLSPTIAELTQTIEQEAEKCPAARRLRTHPGVGSRTALAFVLIIGKAERFQCGKQIASYLGLVPSEDSSGDRRRLGHISKQGNRLLRFLLVEAAQVTVRSLPEWRSKYFHLAMRRGRKIATVAMARKLALHLYGMMRKEWDYEQVKRFGPHAGQPENRRGVQ

SEQ ID NO: 287795 - protein, 418 aa, unidentified
MFKILKNNCCGLDVHKTWIYACIGITDSNKRTEYKQARFSSFTKGLNELCDWLAKYNCNDVCMESTGKYWIPVFNILEKNNIWVTLSHPKYTKPQKGNKTDRKDAKWICDLYMCGMVKPSFIPPADIRELRDLVRYRFKLTCMITGEKNRAHNSLTVSNLKLDDVFSDVFGKSSRSITEQILQHPGETFDVAPFVDGRCKTPIEEIQAAVDGAISTEQAVKLKQCLNHIDELEMHKAEIEREIFRLSDKYESVLNLIRTVPGFDKNPLTAIQVLSEIGGDMSVFPTAKNLVSWAGCCPRNDQSNHKIKSTRISRAGSYYKPVLVQVANALIKSRKHPEFTTRYRRIKARRGHKKAIIAICRMILTAIWHILTDLKPYTPEGFLESRPVNKSKVLTTSQALNLMKQRGYIIKDDVVSVT

SEQ ID NO: 287796 - protein, 337 aa, unidentified
MKNYLFIGIDISKATLDVCVVFFSATMEIHYHQVSNNSKGFIQLLKWLKQKSEEIAVEDWRVCMENTGIYSLALNCFFHEKSIWQSMENALQIKRSMGVVRGKTDKADCKTIALYAYRFYDKLKRYILPGETLLRLRALFSQRERLVSIHSQLLVANQSMKGYARELVKDIQSQNETLLKNLAEQIKTIDKSLKDCLQQDEQLQRKARLIQSVPGIGQQTASYLLIVSRGMQSFATVREFACYSGCAPFAHTSGTSIRGKTKVHFIANRKMKMLLHMAAMNAITFNEELKVYYQRKVAEGKNPMSVLNAVRFKLICRIFSVIKRNEEYQKEYRKNAA

SEQ ID NO: 287797 - protein, 345 aa, unidentified
MKKSDYFIGIDVSSQTFSSSVGMHPWRILGGTCTSYENSAQGFEEFLTWLGKQGYTPDKSIVCMEATGVYGQALAYFLVAHNYSVAVEPPLKVKRAFPTHGHKNDITDSQHLAEYAYRFFDELHMWQPPDNVLKQARTLLKTREQLTKNLSSYQRTLKILKREVVRTPMAEQMYEDLIKELKSLVKEIDKQIVSLMEQHPFFRHKIKLLLSIPGVGLQLAAYILVITQGGRRELRPRELAAYLGICPYEYTSGTSVYRRPHSRKNGPGSIRKLLYLAALSLRTHQDCFHEYFMRKVAQGKPKRLVINNISNKLLRIICAVMRSGKPYIPGYVSLHPESLRIKKCA

SEQ ID NO: 287798 - protein, 453 aa, unidentified
MVLLLHRHLSSRKSGKTTYNKLMREENRAVTFPGGVSEMEKVYDICCGIDVHKKLTVACLRNGGKREIRQTGATTRELLELADWLKSEGCQMVAMESTGSYWKPLYNILEMSGLAAMVVNARHMKAVPGRKTDVSDAEWIADLAQHGLLRASYIPDKEQRELRELVRYRKSLVEDRTRELNRLQKMLEGANIKLSGTVRDINGMSARNILNYIVTGNRLDEATFDEMRKQGKISKSLKASKSQILDALNGVLSPLQRRVMKELLSHLDELNEHIRNLNDEIDRFMKPEERDAAEGIQDVPGIGPTSAQTIISVIGTDMSRFPTDKHISSWAGLCPGNNESAGKRRSGKTRKGNALLRSTLLVCAHSAIKVKSSYFYAQYTRICAHRGSKRAYLAVAHSMLIAIYHILKDNVPFHDLGADYYNQFNKDSKIRAYLKKLHALGWSEQTATVVAPV

SEQ ID NO: 287799 - protein, 404 aa, unidentified
MSRQQSVLRNTVGYMLNNIDNQTTDGEEKSKPEVIKLGLDLHARQVTECRQLDGSTPKPAQQWNPWKLLDKVEEWVKAGIKVYSCYEAGPCGYWYHRELTKRGAVNYVVAPQLLENQRTKRQKTDRLDARSLLGNLESYLRGNRDAMSIIAVPSPLQEQQRSVVRYREQLMRNRRRAEARGRALALTQGILAPVGWWRPAAWKQFKSQLPEWMSFQLENWQEEALALNAKERKIRQELEQMVTEILPVGVGALSWITLQLEIRGWGRFHNRRQVASYTGLCPGIHNSNGRGREGRINRCGNTIVRYTLIEMVWRLIRWQPDYPPIKKLRNALLSKRGKRRLIVLQLGVWRSTCGAWPPVGLPLKNLVCNSPIQRLKNRPLKYWNKHRFGNGACTSSQLGAKIAR

SEQ ID NO: 287800 - protein, 344 aa, unidentified
MDITVLGVDLGKNVCSVVGLDLSGAVVMRRKVRRETLVKLAEKLPPCVVGMEACCGAHHLGRLFAAHGHDIRLMSPEYVRPYVKAQKNDDRDAEGIAEAAARPTMRFVELKSQDQLDMQTLHRSRDRLVGERTALINQLRAILLERGHIAPQGKRKLQQFLAVLMDEQGGAGLSPRMILLVTDARRQWAELDRRIEAFDAEFVRWARENEDARRLVTIPGVGAIVASALVAAVGRAQAFDRSRDLSAWLGIVPRQFTTGGKQKLLGITKRGNKYLRKQLIHGARAALPHIAERDTALGRWAKGLMSRTHRNIAVVAFANKLARIAWAVLRRGERFAVIGMAAAT

SEQ ID NO: 287801 - protein, 315 aa, unidentified
MVDVPCFVGIDVAKAQLDVAVRPSGERWAVPNDAGGVVTLVERLQALHPTLIVLEATGGLERAATAALATAGLPVVVVNPRQARDFARATGQLAKTDALDARALAHFADVIRPTPRPLPDTRTQELRALLGRRQQLVGMRTAEQNRLAGTSGRLQTDIEAHIAWLNERLATLDDDIETLLRASPLWRENDDLLQSAPGIGPVCARTLVLELPELGTLNRQQIAALVGVAPLNCDSGTLRGRRTIWGGRAHVRTVLYMGTLVATRYNPRIKTFYERLLAAGKVKKVALTACMHKFLTILNAMLKHRTPWQAQAVQG

SEQ ID NO: 287802 - protein, 350 aa, unidentified
MEYIAFDAHKHYTVASVERPTGEVLRETRLTHHRGVIRDFLQQWTPGSPVAVETVGNSYWLVDEIEEAGMVPRLVHARKAKLMSGMINKTDKLDVRGLNRLQRTGTLPTVWIPHAEIRDQRDLPRTRMVLVRARTRLKNRIHATLAKYALTVTDVSDLFGKQGRIILSDKLTQLPPHSRFSTEHLLEQLKALDAHIAEFEVRIRKVFKKTPALEWVMSLPGVGLILGIVILLEVGDIHRFPDAEHLAAYAGTTPRVSGTGGKIRFGRLRTDVNHYLKWAYTEAAEVICQHRADWSHRHVSQLYTRVRHRKNHQKAIGAVARHLAEATYWILTKRECYQEPKRRSDASTKA

SEQ ID NO: 287803 - protein, 366 aa, unidentified
MTESSDYESVQVFIGVDVGKDTHHAVAVNRSGNRLFDKALPNDENKLRSLISDLKQHGQILLVVDQPATIGALPVAIARSEGILVGYLPGLAMRRIADLHAGEAKTDARDAAIIAEAARTLPHALRTLKLADEQIAELSMLCGFDDDLAAQTTQASNRIRGLLTQIHPALERVLGPRLDHPAVLDLLQQYPSPEKLASLGEKKLATQLCKLAPRLGKRLAADITQALTEQTVVVPGTNAAVVVLPRLALQLITLRKQRDEVALEVEQRGPAHPLYPVLTSMPGVGVRTAARLLTEVACRAFASAAHLAAYAGLAPVTRRSGSSIRGEHPSRRGNKTLKRALFLSAFAALRDPISRAYYTRKMSQGK

SEQ ID NO: 287804 - protein, 425 aa, unidentified
MKNNILSTLYVGIDVSSKTNVLCALDFEGNKLLNLKALNNQPGAESILDSIIRCLDSNSLKYVVIALESTSFYSTHIANFLASNEILLAYKPLVYCLNPKTVANYRKTFVDMDKTDPLDAYVIADFARCGKITSKPWRGSQFLALQRLTRHRLHLIEGITREKAYMVSNIYLKFSELTVLDKEERPFSNTYGVTSSAILTEYLSLDDITYSSVEDLVAFIRDKGKNRFNDPNRTAQVLQKAARDSYRLDKILYEPLNVAIASSFNVVKALEDEVKTIDKAIERNIKGINPTEYQSLISIPGVGPVLASGILSEIGTITSFDSHNSLAKYAGLTWRVNQSGNYSSDETRMTKTGNKYLRYYLIEAANSVKNHVPEYKEYYYKKYGEVTTHQHKRALALTSRKFVRLVFGLLTKNQIYSNDKVGEIN

SEQ ID NO: 287805 - protein, 355 aa, unidentified
MSQEKYIGMDVHQATISVAVMDASGKLIMECLLETKAATMVEFIQGLHGTLSLTFEEGTSAAWLHDLLKPHVSRLVVCDPRKAALLKDGNKSNRIDARKLAEMLRTNQLKPVYHGEHGIRTLKELGRSYLTITKDVTRSMNRIKALYRSWAVPCGGTSVYAPRHRAEWLAKIVEPGVRIRAERLYQQLDGLQPVRLQARRELLRESHQHAAVQLLRQIPSIGPIRSALLVALLQTPHRFRSKRQLWAYSGFAVETHDSGEYRSVRGKLQRNRERITVRGLNDNHNKDLKNLFKSAAISASTRPGPLQDFYVALVAKGIRPTMARLTLARKIAAISLTMWKKGVSFDPKQLHRQAA

SEQ ID NO: 287806 - protein, 310 aa, unidentified
MITVGIDIAKLHFDLHLLPEGTCARYDNNAQGIQDCRLFLAQAKPERILLEATGGYETALVVELQAAAMPVIVINPRRVRDYARAANQLAKTDRIDARILAEFAATSLVVVRELPDAKARQRKALVARRDQLVALHVAESNRLEHADEAFIRKSVRAIRTAIEKQIAQVDRHLDRLIAADPTLQRKAEILDSAPGIAATTARMLVTELPELGNVNRHQIAALVGIAPMNRDSGQFRGKRMTGGGRVKIRTALYMPLLAALRCNAKIRTFYNRLVQSGKPKMTALVAAMRKLLTILNTLIKNNQTWNPNLS

SEQ ID NO: 287807 - protein, 351 aa, unidentified
MPRATSSTNVIATIGIDIGKNAFHIIGLDDKGAIILRHKLSRGQVYARLANIPPCLIGMEACVGAHHLGRQLSALGHDTRLMPARYVRPYSKGQKNDFRDAEAIAEAVQRPTMKFVAIKTVEQLDLQGLHRIRERLVCQRTSVINQIRAFLLERGIAIRQGLRTLRTEMPIVLARTDKLSQRMIHMIEDLCTDWRHLDRRIEAVSKEIETLSEQDDGAKRLMTVPGIGPIISTATVAAIGTGEVFSKGRDFGAWLGLVPKQMSTGGRTILGPISKRGNRYLRMLFVQAARAVLLRPQSWEKHGLKLWIEAAARRLNRFKLAIALANKIARIAWGVLHGGRNFEVRPMNQVA

SEQ ID NO: 287808 - protein, 529 aa, unidentified
MAGNVSTKGRQRRKSNWKSKQRNRLSLQKPTGVIGPRVKRVGGEKFAIVCVDPAKHRSEWMMADYFGNLLIERQTLEHQAAFFKEAVSQIREVQEKHDIQDTIVVVERTGNYYLAPKRAFAKAGFEIRIVHPFATKQYRVPADPGIKTDGTDLCAQHRAAVAGFGLREVDLESPYRELQLRARHRRGLIEKAVALTCQIREHLHLAMPGYATLFDHVLDNKSAMALARRCTSPGAALELGRSGLSQHLRENMVRCQLRTVDKVLAWAQQAASDVIQDGPLHHAIWTDLEELYQHFRRRIRVLERELAGDLVQTPYVRLLAIPGINVASAAELAGEMGPISRYANANAITGRCGLYPSRHQSDQTDNDHGPIIRQANRRLRCALMRVSDNLVCHCAYYRGLADVDRARRVDERAIRVKVSKKFSRLAFACVASDEPMKHPAFQKPDSILEKLRQFHQVHETPLDRVLADLKTAVEQLPYNTCNREAEVVAEVLSERASRRGVVQIGAVLPAVLARLQIKMTEDNEHKDRS

SEQ ID NO: 287809 - protein, 353 aa, unidentified
MKKIVIGIDISKEKIDATAIDVRSGQLGVVKLDYQVFENKPMGYRRMLVWARNLIDGARLEDVLFCCETTGGYDRRLCDYIYAKGQSIWRESALQIKRSMGVRKGKDDKADSLMIAEYAMRHMDKAVIYESPNETVQELKALLLYRHKLIQERTEKKVRMAQLGTTAAKSKSLSFILRDARKSIKSIDKSIQECEQQIIELLKTNETLKKNYDHIVSVNGIGIVNATAFIAYSNNFKSITTANKLASYWGVASFREKSGTSVDKKACVSCYSCSHLKSYLTQAAECTVRNHGIYYNYFLRMKAQGKPYRVIINNVRNKIIHLVFSLVTNDTDYEKDHEFLRTQRKISRTFEMN

SEQ ID NO: 287810 - protein, 345 aa, unidentified
MNIASIGIDLGKTTFHLVALGEHNKVLLRKKFSRPQLLAYTANLPSSLIGLEACAGSHFLGGVLRGQGHQVRLIPAQFVKPYRKSNKNDFIDAEAIAEAVTKQNMRFAQLKTQEQLDWQAMHRVRDRLVQRRTALINEIRGFLLERGITFAAQPIHLRKNLPTIIEDAEQNLSPRLRWLLDRLWQEWKQIESDVQAITDEIERISNEDARCRQLRQIPGFGPLVSTATVAAIGNGAAFRRGRDFAAWVGVVPRQYSTGGKQKLYGISKRGNVYLRRMLIHGARAVLFRVKYDTGGFGQWVHRLARRAPHNKVVVAIANKLARIAWAVLSSGQDYRHQPLLQLAAA

SEQ ID NO: 287811 - protein, 400 aa, unidentified
MDRAWVGMDVGKEFHWVHVLDTSGRELLSRKLENDEIEISKLMDEVLSVAEEVVWAVDQPGGSAALLLALLWERDQRVLYIPGLTVNRASDTYRGESKTDARDARVIADQARMRSDLSELEPGEEEVDELRILLGRRRDLVVDQNRTITRLGEALVSLSPALERALDLNRKGPLTLLTHYQSPAQLRRAGHKRIAAYLRKRGVKGFDSLAGKALAAAKSQGITLPGESIAARIVAELAAEILALKDHIKLMDEEIEQRFFDRPEAEILASLPGMGPLLGAEFLVAVGNLSAFDSADHLAAYAGLVPAANDSGKRVGNNRRMRGGNKNLKRVFYQAAFASLRSSPESRAFYDRKRAEGKRHVQALIALARRRVNVIWAMLRDGVPPSRPNPQLDIFIEILL

SEQ ID NO: 287812 - protein, 370 aa, unidentified
MKEHSIFVGMDVHKNSIDIAIAEKGREGQLRHFGTIEGSLAALDKVVRKLVSNGQRPCFAYEAGPCGYSIYRHLTAKGFDCAVAAPSLVPRASGNRIKNDRRDSLMLARLHRAGELTAVCVPHDEDEALRDLTRAREDAKIDERKAKQRLLAFLLRSGHRYSGRAPWSQAHRRWLADLKMPHHCQQIVLQEYIEALNHCSLRLQRLTDQIRQMVPRWRLFPVVQALQSLRGVSLIVSATTVAEIGDFKRFQNPQQLMSYLGLVPSEHSSGEKTRRGSITKAGNTHVRRMLVEAAWAYRFRARVSRALLQRHEDLPQSIRDIAWRAQVRLCARYRRLWARGKIKAVVTTAIARELCGFIWAVATAVEGTTA

SEQ ID NO: 287813 - protein, 309 aa, unidentified
MLTAEADKRKTKVVVNTAAGVQALLAWCAKHGAQPAQLHAILEPTGLYHEQAATALPQVRVSLVNPAQARDFAKALALRSKNDALDSYVLARYGQTLSPALWHLAPLHARQLRALLTRREALSKDLLRELNRKEKSQFSPSAPLVDGSIDKAIAFLREQIKQIERAIDQHIDNHPDLKQDCELLNSIPAIGPQAGNAILAVMHNRHIDSAQSLAAYLGVVPVQRQSGSSLNSCARLSKAGPSQVRATLYMAALVGTRHNPHIRALYQRLLKAGKSKKAALGAAMRKLVHLCFGVLKNRIPYQPNYAMNG

SEQ ID NO: 287814 - protein, 318 aa, unidentified
MNENATSPRVLGCDVGKDSVVVFDSLTATTQTVKNTVAALTRALDHLERDTVLVCEATGGYETALLTTAVTLGLPVHRGDPRKISAFLRSLRGHGKTDTLDARGLARYGRERHDELPRWQPPAKAQQALRQLVRLRTDLVADRASYARRLKAPAASVDKRHIESLIKSFDRRIKAVEADIAEHIATDDRLHRTVHEIQKIPGCGPITAVTLAALMPELGQLSRRQAASLAGLAPHPKDSGKSKGYRTVKGGRQDLRAVLFMAAMAARRYNPDLRAFHLKLIQDGKKPIVAIIAVARKLITIINAKLRDAFFQPDQQLS

SEQ ID NO: 287815 - protein, 344 aa, unidentified
MGEVITIGLDIAKSVFQVHGVDGLGVVVIRKRVSRAKMLEFFAGLPRYLIGIEACPAAHHWARELQAIGHTVRLMPPSYVKAYLKRSKNDANDAAAICEAVTRPSMRFVAVKTKEQQAALMLHRARQLLVRQRTMLSNAIRGHLSELGIVSAKGRNGTDELLEIIGKDADSRIPLAARSVLKVLASQYVAIGVEIASISKSILAWHRACEPSRRLEEIPGIGPIVATALVAEISDWMAFSSGRGLAAWIGLVPKQHTTGGKDKLGSITKQGNRYLRWLLVVGAMAVIRYARKHGTQKRPWLGRLMERRPTKVAAVALANKIARMAWAIMVRGERYKEPKLLLAA

SEQ ID NO: 287816 - protein, 344 aa, unidentified
MKFFTGIDVSLRSVSICVVDEAGEVRYEAKVAAEVEVIVATLRRFSAEIRQVGFEAGTLTQYLTYGLSAAGYEVVCMEARQVAASLAAMRNKTDRNDARGLAQILRTGWFRTVHVKSVESHQVRTLLSSRKMILIKCIDIENELRGLLKVFGVRLPARVGHGGFDDLVRPRVVALPDVAKCLLPLLDARSMLYRTYLQLDTAVRGLARQDPVCQRLMTVPGVGPVTSLTFKAAVDEPHRFRSSRNVAAHFGLTPRRYQSGETDNPGRISKAGDPGVRLALYGAAHALMTRSDAWSVLKAWGLRLAKVRGHRRAVIAVARKLAVILHRMWIDGTYFRAARLEVAA

SEQ ID NO: 287817 - protein, 395 aa, unidentified
MDNHELTRLQQFRQFKKEIRGSERYLIVGLDIAKDQHHAFFGTATGQTLWKRWLFDNSQEGFQKLLLQTEALQVEHGLPQVVFGLEPTANYHKPLGEYLIRGKHQVVLVSGVAVKRNRELLDGRWDKHDTKDSANVADLISQGKCLYYEHPDARIRDLRLLLSLRKRLKRQEQGIRVRIRNGLIAQYCPELDPSFSRLIASGKESHLLLAMQKASSIGCAAHPEVAFAAKVMIQELQQARESLKTIQERIQKLCSQFAEHAYLLSIPGFGPQVSSQVLAAIGDPFRFQNGKQVLKMAGLDLSADRSGKASDRAHPILSKKGKADLRYALYQAAFIASTRNAAFLAYWTPRLKARSQEPGIQAKRRVKLAAKLLIIAWTLMKRKEAFDPQRLTSQT

SEQ ID NO: 287818 - protein, 343 aa, unidentified
MDYFAGLDVSVNNTSVCIVDGAGKVVREVKVASEPDALLQVLRNPAYCFKRIGLEAGPLSQWLFSALGEANLPVICVETRHMRAVLKAQINKTDRNDARGIAQMMRVGLYRPVHVKTLRSQKLRMLLTHRKLLQSKAIAIENDLRGTLRNFGLKVGIAGWTKFEARIEELVEDVPDLAVLVESLLVVRRVLREQIAVLHRRLLTIVRDDEVCRRLMTIPGVGPVVALTYRATVDVPARFRKSKSVSAVFGLTCSRDQSGERDRPGAISRCGDEMMRAMLYEAAQAMLLRSAKWSWLKAWAMQIARRRGMKRAIVALARRLAVIMHRMWIDGAEFRWTKEAAAA

SEQ ID NO: 287819 - protein, 403 aa, unidentified
MEAIVACCAGLDVHQAGVVACLNRGGKEIRSFGTTRGELAEMCAWLRAGGCTLVAMESTGVYWHPVYFALEGQFELIVGNAQHIKNVPGRKTDVKDCDWISDLARHGLIAKSFVPPKPIRELRELTRYRRKLVQVQAAERNRLIKLLESADIKLAGLIADVFGVSGRAILHALIEGEETPDEMAQHARGRMRRKIKALARALDGRLEEHHRFLMRLQFARIEAAECDLERLDERLSEKLAPYAEPLHRLMRIPGVDWIIAATIIAEIGIDMSAFGSAARLASWTAICPGNHQSGGKQRRGKIRKGNVHLKAALVTAAIAAAKTRGGYLAEKSRRLRARRGEMRAHVAIAHKILIAAYHVLAGAEYQELGADYLDGLNKKRTVSHLTRRLQAMGYDVQITPKAA

SEQ ID NO: 287820 - protein, 400 aa, unidentified
MAVMIGIDPHKGSHTAVAVGAAEEPLGRLRVRACPDQAGKLVAWAQAWPERTWAVEGARGLGRLLAQQLIAAGERVLDVQPKLAARVRLLEAGDTNKTDPNDARSVAVAALRSKGRQEVTADGHAVVLKVWAKRHRDLSRTRNQVVCRLHAMLCELIPGGVPDEITAGQAARILERVAPAGAVAQARCELAAELLADIRHLDAQRREVKKKLAAAVTASGTSLTEVFGVGPVIAATVIGDVITVARFPSRDHFAACNGTAPVEVSSGQRKIHRLSLRGNRRLNHAIHMAAITQIRHEHSDGHAYYQRKLAEGKTHKEALRCLKRRISDAIYAQLRADARKAGPGGQPGNDTGSSVTGSHPGHRLFGQATSGPEPSLRAPATFTQAKPAPETSAKKIQRAT

SEQ ID NO: 287821 - protein, 340 aa, unidentified
MSIVMGLDQHRAQISAEWLETTTGEVSRARLAPGDRDAVRAFLGQFAGVGLEVALEATTGWRFVVEELERVGAEAHLAEPAEAAALKGKKKRAKTDWADARHLRELLLIGRLPESWIPPAHILDLRARVRTRHLLSHQRTEWQQRIHAVLYHHGFPQQRNVLTAQRREWLAGLTLPAAGREQLTVALSVIDALETQLVEFDRTLRLYARKQPGCRTLIDAIYGVGELTAVTILAELGDVRRFQNSRDVVRYAGLDITVYQSDEHRAPGHLSRQGPPALRWALYEAAQRARFPASPDRPYYEQLAARIGGNRACLALARKLLKRSYHLLKNLGDQALAPVA

SEQ ID NO: 287822 - protein, 438 aa, unidentified
MSNKVIFNLDDLFISVGIDVGADFSWMSIALPNQQFVGKPYKILHNSIDSLTTAVSKIKEAEELYSLESRIFLESTGIYHYPLFCYLRDKGFNCSVINPIITKNSTNINIRKVHNDRFDSKKAALVGLKPDLKVSLMPSDLALNCRNLCREYYDLMDNRSAYVNKLQGELRMAFPQYLGIFSKVTINTSLTLLETYTSPSAFLEADKQEIIDIIKSTARFGLTYAQNKYNAIIQAATDANQFGYIIDSNIKRIRLYISFIRKYDEEINSILESLHELVDANEDSDFVKQIHLIETFKGAGFLSAVSIMGEIGDFSAFSKPKQLFAYFGLDPAVKQSGKFEGTKVQMSKRGSAIARRVIHTLTLQSISISRNGEAKNPVLREYYLKKCDSKPKLVAMGAVSHKVCNMIFAILRDNKPFEIITPQEHIKQYNASKCDMAA

SEQ ID NO: 287823 - protein, 377 aa, unidentified
MNRIIKIGMDVHSSNYTLCAMEPVIGAEDRVFANIQVTPDYKNILMFIENLKLKLGSKDIYDIECGYEAGCLGYSLYNQLTSAGVKCVILAPTTMLTQQGQRIKTDSRDALMIAQCLSYGGYHAVYIPTEEDDSVKEYLRMRDDHKQALKKVKQQINAFCLRHGYQYDGTKWTIAHIKWLKKLELSSMYQETLNEYMASYDEQTAKIERFDARIEEIASQSRYTEKVKKLGCLLGIQTHTALSLIVETGDFNRFAKGNIYAAYLGLAPGEFSSADKINRLGITKAGNGHLRKLLVEASGGICKGAIGHKSKVLRQRQQGNSAETIAYADKANTRLRSKYYRLIRHGKKRNVAVAAIARELACFVWGMMTDNIDVTVA

SEQ ID NO: 287824 - protein, 428 aa, unidentified
MNAPLNNDNRQNDYAAFIAIDWADRQHVFSLQVAGQSTKETGTLEQKPEVIGPWVAKLRERFGGRLVAIAVEQSRGALIHALLGYDFIVIYPLHPSTVAKFREAFKSSGAKNDPLDTDQILQILTKHRDLLKALNPDTEETRLLARLVEDRRQAVDLRTGHIQALSAALKEYFPQLLELLNGNLASRLACDFLIKWPTFEAFQQAKPSTIKRFYYGHNIRSPRLIEKVLGLASTAQALTTDGAIVESGRRLSQMYAQLIQTLNPVIEAYDQRIEEVFHDHPEAHLFNQLPGAGAALAPRLLSFFGTDRSRYEAAGNVQSFCGIAPVTKSSGQTRVVYFRHACPKFARQTFHEFARLSVAKCQWARNYVDYYRGKGKKFHTIIRGLAFKWIRILFRCWKNQTPYNDTNYMEVLKKRGSIFATLHLEQNA

SEQ ID NO: 287825 - protein, 371 aa, unidentified
MEEINTIYVGMDVHKASIEVALAVGGRDGEVRHYGRIDNTPAAVAKLLGKLSKPGVRLEVCYEAGCCGYGLYRQVLALGHGCTVIAPSLTPKKTGDQVKTDRRDGLSLARLHRAGELTAIWVPDPAHEAMRDLVRARNASMISLRRARQQLQGFLLRHGRIYEGRSPWTRAHRVWLAAQRFEHPAQHLALEDLKSTIDAAGERLKGLEAEILTLAPDWSMAPVAGAYQALRGVSVVAAIVLAAELGDLRRFPHPRQLMGYLGLTSSEHSSGGRRRQGGITKAGNAEARRVLVEGAHSYRLPARKARAKQTVLDTQPKTVQDIAWKAQVRLCARTRSLMAKGRCHNVATVAIAREMAAYLWAIGQIVPPKAV

SEQ ID NO: 287826 - protein, 337 aa, unidentified
MNQLYCGVDIAKETAVFCLLVDNGKALERATTFNNNAQGFKAGLKWLRKLAKPFKPFQIHLVMEATGVYYLSLAKFFSGQAGIIVSVVNPAQVKSYAQAELVRTKTDQVDAAVIARFAMALRPRPWSPPAPHEEEMLGILRHVEAIKEMIQAEKNRLHALEATGPSTVNVQRAVKKHIRFLEKQIDDLTGRLRQIAKEHPDLDENLKLLCSIPGVGEITAHTLLAEIGDISRFSGVKQLVAFAGIAPAERQSGTSVRGKVMINKRGSRRLRKALYMPAVVAARHNSNVKELYQRLLSAGKKPICAIVACMRKLLHIAYGVLKSKKCFEPNWTNANLA

SEQ ID NO: 287827 - protein, 312 aa, unidentified
MERIFVGIDIAKDQVDVHVHPTDERFQLSRDDAGLAGLVARLQPLGPRLVVLEATGGYEIPVAAVLASAGVPVAVVNPRQIRDYARATGQLAKTDALDARLMALFAEAVQPEVRPLPTPEAQALGALVTRRRQLVDMLGAERNRHQQARDLRLQRRIATHIRWLTKALAEIEADLATRIRSSPIWRERDNLLHSVPGVGDITAYTLIADLPELGHLDRRKIAALVGLAPFNRESGHWRGRRMIAGGRPAVRSVLYMATLTAVRFNPAIAHFYQRLTAAGRPKKVALTAAMRKLLTILNAMLRDQRPWQPESA

SEQ ID NO: 287828 - protein, 367 aa, unidentified
MKNTIVHHEGATSLKVAVKRIKLSGSMIKIGLDVHARLYVAVAQYDHLLPKPARRVAPMEFLPWVEQLLRAGHTVHVVYEACGFGFGLYRELKALGAHCYVIAPRKLDEQCTRVKTDPRDATTLCQRLSRYVEGNTRELAVIRVPSEAEEQARHLSRQREQLVRHRQKLEAQGRSLLINHTLPAPAHWWKSQTWSRLSKLLPAWICLRLEVHRPALLTLEQQISVLSAELEAAAPADVPAGVGKLTTVVMTREICSWERFTNRRAISSYTGLCPGEHSSGTKRVPGSVTKHGNPRLRAALVECAWRMVRFQPQYPPVKKRLAVLAKGSRAIGAVRKKAIVAVARRLAVDLWRLHTGRCTAEQLGLKF

SEQ ID NO: 287829 - protein, 391 aa, unidentified
MIYVGIDVAKDKHDSFITNSDGEVLFKSFTIANNREGFETLFQRIQSVSDDLTKVKVGLEATGHYSYNLLGFLLDNGLPTFVINPLHTNLYRKSLSLRKTKTDKVDSHTIASMIMSDVNLKSYSDTSYHNEKLKSLTRYRFDKVKERAKLKSSVSRLVCILFPELEKLVPQLHIASVYALLSEFPSAHAVASAHLTRLTHLLSESSKGRYGKDMAIIFREAARNSIGSNMPAKSLELKHTIKLIRELTSEIDEIETEIKSIMDEINSPILTIPGISYRMGAMIIAEIGDFNRFNSADKILAYAGMSPSTYQSGQLDNCYSHMEKRGSRYLRYALYNATKYVCHWDPTFAEYLAKKRAEGKHYNVAISHAVKKLVRVIYAMEKSGQVYNKAS

SEQ ID NO: 287830 - protein, 338 aa, unidentified
MSLYAGIDLHASNSYLAVIDETDELVVARRYRNELRLICKGLEPYREELVGIAVESTFNWYWLVDGLQESDYRVHLVNTLAAQQYQGLKYTDDKTDARWLAHMLRLGILPTGWIYPKKERAVRDLLRKRSKLVRQRTASRLGLRNVLERTTARRLSTNALKQVTQDDLFGWIEDPNVRLSIAASLAMIEAASEQIERIETTILEQAVLQDSYRILITIPGVGPVIASTIQYETGDLSRFAAVGNYVSYCRLVKAERSSNQRIKGQGLRKNGNPYLSWAFHEAAHFAVRFQPKARRWYEKKRAKTCALVAIRALAHKLARAAYFMMRDQVAYEPARLFG

SEQ ID NO: 287831 - protein, 386 aa, unidentified
MQASTVVTPTAGHCGTIFIAIELSQRSWLVTLHSPDKGKLSRHKLEGGDHGGLLALIDRERTRVTRTLGAVPAMASCYEAGYDGFWLHRLLLAAGITNYVFDPASIAADQRARRVKTDRIDGEKMLRTLMAYLRGEPRVVRIVRVPCAEQEDTRRASRERGRLIKEQTAHTSRIKALLRLLGMAVGNPRRRDWLSWLAAQRDWQGEAVPAQMLSAIRHEHARLMLVREQLDALAQASAQADPAPAAVQMTERSELLLRLKCLGPAFATTLTSEVFYKDFRNRREVGSYFGLTPSPWRSGGIDRDQGISKAGNPRARCAAIELAWLWLRHQPDSKLTLEYRKRTLNAGKRIKRVAIVALARKLMVALWRYLTTGLVPEGAMLKAVKV

SEQ ID NO: 287832 - protein, 424 aa, unidentified
MIKDKCGRPPITAKGKETVFIMISIGIDVSKLKSTFCILNEYGEVLQTAREISHTETDLNELIRQVKSFGGKDDVRVIMEATGAYSKPVLYSLIEEGIFVAEINPLAMKKYRSNINFRGVKNDPIDALAIASYGIDKWHRLKEYQKADKEYAAMKALSRQYLSYMKPHVSLTQNLDHLIDQVMPGIKDEFDGYDPATGKDRLTDFLEEFVHYDCIRSLGPKRFDERFKRWAKKKGYRPRQGKSGKIYSLAKEGIPTLAYDPISRLLVKQAAEALRSMNHVLNEILSQLRSLAKQRPEYPIIRAMSGVGDVLAPLLIAEVGDPRRYHSGSALIACVGIDVPPYESGQFKASERGITRKGSKQLRKLGYLMVKNLRKIKPVKDTSVYDYYLKKKSESKKDKQAIVAAMNKFFRIYYARAMEVYQTE

SEQ ID NO: 287833 - protein, 345 aa, unidentified
MDKISVIGLDLAKNVFQVHGIDYDGEVVVRKQLTRSQLRRLFAKLAPCLIGMEACGGSHYWSRELTRLGHTVRMMAPVFVKAYLKSNKNDRNDAETICEAVQRPSMRFVQPKTPEQQAVLHLHHGRRLLVRQRIALSNHMRGVLSEYGIVLPQGAKAISQRLPELLEDADNAQPMLARHLLAELKEGHDQLIERIERIEVWIKAWYANNSVSQRLASIPGIGVLTATALAATVGEGQDFRNGRQLAAYLGLVPRQISSGGKERLLGISKRGDSYLRGLLIHGARAVIYHIQRRLKASQPGGNPWVEQLLLRCHPNEVAVALANKMARIAWVLMARNETWRAVHPV

SEQ ID NO: 287834 - protein, 339 aa, unidentified
MSTIDTLGIDIAKNVFQLHGVDPKGRAVLKRRVMRDQLLPVLAAMEPCTIAIEACTGAFCWARKFEEIGHKVKVISPQYVKPFVRRQKNDNNDAEAICTAARQPHIPLVPKKSIEQQDIQALHRARQRMVNHRTAVVSQIRGLLLDRGIAFGKSITRARRMIPEILADRANELTEMARETIGELWDLLCDLDRRIESFDAKIAAVFKESAVCQRLARIKGVGPKTATAIVAAVGDGAEFKNGRHMSAWLGLVPRQHSSGDRQVMMGISKRGSQHLRSLLVHGARAVVRTCAGKKDTLNLWVNQLQERRGFNRATVAVANKNARIIWAVLRTGEPYRAAA

SEQ ID NO: 287835 - protein, 467 aa, unidentified
MAKNTKKHPKTQSISTSNCKLAPMNPCVAGIDIGASSVFICIGFADGHQEIREYLTFTEDLKNMLIWIQQNGIQSVAMESTGVYWIPVYDILAQAGIDVILVNAYYLKTVPGRKTDVKDCQWIQQLHAYGLLRGSFRPSDEGVMLRGYVRQRSRLFELASQQVQLMHKALVQMNLQLNHVVSDITGATGMNIIRAIVSGERSPTVLAKYRDYRCKKDEKEIAKALDGNYRQEHLLALKHALMAHNFFHQQALECEEAIEQMLAEWEKQAEITPARNPCPPERSNKNGRGIQKKTKYNLSPYHFEAESSLEKILHVNLTDIPGLDVNGIMKILAEIGLDMSKWLSAKHFVSWLGLCPGNKISGGKVLSSKTKPSANRAAQALRLAANTLYSSKTALGAYFRRMRARLGAPKAITAAAHKLAKILYTMLKERKSFTEVGQAAYEQAYKERQLLSLQKRARELGYGLVAC

SEQ ID NO: 287836 - protein, 352 aa, unidentified
MMIIGCDYHPSWQQICWLDTLTGETGEKKLEHASAEAERFYRQLPAPALIGMESTGNCQWFVEMAAALGHDVWIGDAAKIRAAEVRQQKHDRRDAALILKLLLEGRFPRIWTPSREEKDLRQLLIHRYKLVRIRAQVKTELQHLAMNQGVTKKRKLWSKAGEKVLRELPLKHWASRRREDLFRIREMLHGQIDLLDQAVVEAAEKNEKARLLMTQPGVGPITSLAFVLTMGEVSRFQRGKQVASYLGLIPREYSSGGHRRYGSISKQGNRFMRMLLVEAAQGAVRCDPGMRSEYLHRCHRKAKGVAKVAAARKLAIRLYWMLRTNTGYPEVVRVESSSRVALVVRQADRPQD

SEQ ID NO: 287837 - protein, 324 aa, unidentified
MIDGILGIDVSKNTLDASVSSCRKVRARCFANSPDGWRHLLDWLIIQKIRRVHACLESTGRYSLGIACALYEAGHVVSIVNPAQIRDFARTKLGRNKTDGVDASHIREYCELFKPQPWAPPSEAHRRLGELQTIRAGIIAGLTEWKNRKNSGMVDVVAQSLADVTISHFNNQLEAVDEAIAQTIDNDSGLRGKRDLLLSISGVGEILAGVVLAELPGPDVLRSSAAVVAYAGLNPRQHQSGTSIDRVTRISKIGNAVLRAALYMPAMSAMRFNPAIVALVTRLKSRGRLNPKQIVVAAMRKLLVLCFGVLKTGKPFDPAIAMGC

SEQ ID NO: 287838 - protein, 330 aa, unidentified
MPERKLVSARKGRGDARERMVTNFIGIDVSKDFLDVCLRPSGEMLRVSNDEVGISALVERLCAGRPMLVVVEATGGYESPLSAALALAGIAVAVVNPRQVRDFAKAVGRLAKTDAIDAAVLAQFAEVVKPEPRSLPDEQARVLEALVARRRQLVEMLTAERLRLSRSVPAVRPNIQASVNWLRRQLGDIDRDLGNEIKKSPLWRAKDDLLQSVPGIGPVVSRTLLADLPELGTLNRKQIAALVGVAPLNCDSGTMRGQRRIWGGRAQVRTALYMAALVGTKCNPILKAMYFRLVGRGKKPKVALIACAHKLLSILNAMMRESSAWREVLA

SEQ ID NO: 287839 - protein, 367 aa, unidentified
MKKVSTAAAKQMRNFSEQKLTIGLDLGDRSSWYCVLDETGEVRLEQKLGTTPKAMKEMFGALPRSRIALETGMHSPWVSRALSELGHEVIVAHARHVRLIGESRKKDDRVDAQTLARLARIDPQLLSPVKHRSAKAQADLTVIRARAGLVRARTALVNTARGLAKSYGERLRGCNVRNMNPEKAEGLSPELQTALEPLLAAIESLSERIRECNQRIDGLAQESYPQVALLKQVKGVGTLIALTFLLTLEDAHRFRKSRDVGCYLGLQPGRRNSGQSEPQMHISKEGDPYLRTLLVQGAHHILGPFGADSDLRRWGLKLAERGGRNGKKRAIIATARKLAVLLHRLWVSAEVYEPLRNNSRATMPAAA

SEQ ID NO: 287840 - protein, 347 aa, unidentified
MNFYTKQHKFYCGIDLHTQNMFICILDASGNVRVHQNIHTNQEAFLRIVAPFREDIVVAVECMFTWYWIADLCIQENISFVLGHALYMKAIHGGKAKNDKIDSLKIATLLRGGMLPQAYVYPARMRATRDLLRRRNHLMRKRAELFAHIQNTRSQYNLPDPLGCIAKPQNREGIVQRFDDPSVQKSMAVDLEMIEAYDHILTQLERDIIACAKEHDLRSYALLQTIPGVGRILGLVLLYEIESIGRFPRVQDFVSYCRLVKCIKESNGKKYGSSGKKIGNAHLKWAFSEAAVLFLKGNEPGKKYLQRLAHKHGKAKALSILAHKLGRAVYFMLKNKEAFNQKKFLGL

SEQ ID NO: 287841 - protein, 350 aa, unidentified
MLIVGCDYHPGFQQIAFVDMETGELQERRLAHPEEAEKFYRELAASGVKVRVGMEASGHARWFERLLAELQFELWMGDAATIRAKRVRKQRTDRHDAQHMLNLLLEGRFPRIWVVSWENRDLRQLLWHRHRMVTMRTRIMNQLRAVAINEGLRCKKRLWRERGRKQLEAFPLARWASRRRRDLLELLDRLNPTITELTQAIEQEVEKYPEAQRLMTHPGVGALTALAFVLIIGEVERFRCGKQVASYVGLVPTEESSGDRRRLGHISKQGSSLLRFFMVEAAQATVRSDPEWRSKFFHLAMRRGRKIAKVAMARRLAVRLYWMWRQQWDYEQWKAFGPHAGQPETGIGVQ

SEQ ID NO: 287842 - protein, 463 aa, unidentified
MSQFFLGIDISKGYADFVMIDAVKSNVGTSFQLDDTFQGHVCLFNYLSEFKEQHAGCTIFAGLESTGGYENNWYQMLLNCQELLPVRVARLNPAGVFAYKKANLNRINTDPISARAVAEYLITHSDKVSYHEAVNSNNPSCSMRSLRKHWGFIQMLTKQKTQLLNQLEMLLYEANPDLLHFCKNHTPQWVLTLLLHYPTAKRLARAHADSLAKIPYISKKRAASLIEQAKNSVASSSDAYTEQLIISTVKEIMHLKTQIRNETNVLARHCSFADVELITTFPGISVLSAVGLFIHIQSVARFATTKQIASFFGLNPVFSASGDSLKGSRMSKKGNKQVRQILFMIALSAIQSNPVIRNTYARQRSKGMSNMAAIGACMHKILRIVYGMLKNRQAFDPNIDRYNRLNQRKTVATENADNRRLQEYDETAPVSQRQIKKRWERKQTQNGFAIESGFRSPSPPHIV

SEQ ID NO: 287843 - protein, 367 aa, unidentified
MVAVVEMSKTSWLVAGMIPGVARHPLKKLVPDEKVLFELLQRWRDEAVKAGKIITRITVAYEAGRDGFWLARWLRARGFEVYVVHSSSVAVTREHRRAKTDRLDCEMLKRVFIGWLRGERDHCRMVAIATQTQEDAKRPNRERENLVGECTRIVGRLKAGLARLGIRSFNPKLRNAAERLESLRTPEDVPVPANTLCELRRDMARLRFVKDQIKQIERARVRQLEQAPEQGPQQMVRLLARVLGIGIETADMLLHEILSRNLRDRRAVARYAGLTGSPDESGQKRREKGLSRAGNARVRRGMIQLAWRFLMFQKTSALAQWYRVRTKDAGGAVRKTLIVALARKLLISLWRFVTTGEVPVGVTLRVA

SEQ ID NO: 287844 - protein, 392 aa, unidentified
MRRVIGIDVHRTFGEVVVWEDGILRHLGRVDMTRTALEGLGKSLRSTDEVVIEATGNSMAVSRVLTPFVARVIIANPLQVKAIAQAHVKTDKIDAGTLASLHAAGYLPQIWTPDAITERKRRLSARRYQVVRHRTADLFNGRGRSWLARQPLPDDERAAVDRHVRELDRLAEDLTVLDCEIAQAAMDDPEVRRLITITGVNLTVATGIVAAIGDVRRFKSPQKLVSYFGLNPRVRQSGLGVAHHGRISKIGRSHARAMLVEAAWAAAKAPGPLHAFFVRVRARRGHQIAAVAVARKLTVLCWHLLTKGEDYLWVRPALVANKTRAMELQAGHPQQKGSHRGPAYAYNVKALRNQETLVAAQAERSYERFVAHWEPRRPKDAARGRLKSAGRE

SEQ ID NO: 287845 - protein, 343 aa, unidentified
MQVVRIGLDLAKYVFEVHGVDGQGNVVIRKTLRRGSVSTFFANLPPCLVGMEASNGAHYWARVLTELGHKVRLISPQFVAPYVKTNKNDRNDAEAICEAVGRPTMRFVPPKSPEQLAVQALHRIRQRLVRSRTKLVNQIRGILAEHGIVIARDIWRLRRALAEITENSTDSLNTLVRVLIIEGQAELLDLDRRIASCDRRIRELYRTSELCQRLGEIEGIGPVTATALVAAVGDRSCFKNGRQFAAWLGLVPKQRSSGGRNRLFGISKRGDRYLRTLMIHGARASLGKARGKQDPRSRWLASLRQRRHPNVAAVALANKNARIVWAMLVGNVSYEPARSVQAA

SEQ ID NO: 287846 - protein, 457 aa, unidentified
MRKRGRRTKGVEEAHPFEAMSRINPNAAGVDIGAEEIVVCVEGNEQTQIVRAFGNYTVDLENIGRWLKEHEVKSVAMESTGVYWIPLFEELERQGFECLLISSRSLRRVPGRKSDIQDAQWIQTLHSYGLLESSFRPQADLVALRTLLRHRNQLVEHRSPHIQHMQKALLQMNVQLSQALSDVTGETGLAIIRAIAGGERNPMVLAAFRDPGCKKSEEEIAKALTGTWREEHLFVLKQALELYDFYTGQIEACDREIERLYSQTRADQEGGELPPVPKKKLHTHSKNMPGNAHEVRVHLKRISGVDLSLVDGMGVSLAQTIIMEVGTDMTKFPTEKHFCSWLGLAPKHEISGAKVLKNNTLKTRNRAGQAFRMAAQAVKKADCIFGSIYRRLRTRLDKKQATVATAHAIARVVYRMLKDKLEYESLSVDEYEQKYKEQQIKYMRKKAAKMGFELIPV

SEQ ID NO: 287847 - protein, 356 aa, unidentified
MSMLAERVDGVIGVDTHRDTLAAAVVTHLGGVLAKTSVNADAAGYQQLLDFARAHLPGRRCWAIEGAGSFGAGMAGFAAQHGEQVVEVGRPKRPARRTGAKSDALDAVRAAREALGQDRLASPRRRGEREALRVLLTTRRCATLARVAAIGQLKALIVGAPEELRTELRGRSTRSQILYCASLRERPARSLEHRMTVRALQATAQRIGCPQAEADQLQAELTALVGAVAPWLLEVPGVGPLSAAQVLVSWSHAGRFRSEAAFAALAGTSPIPASSGQVTRYRLNRGGDRQLNRALHTILLVRLRIDPDTRAYIARRAAEGKSRRDAKRCLRRVIARQLFRLLERYDRPGVEILRAT

SEQ ID NO: 287848 - protein, 356 aa, unidentified
MKKVAYLAMDVHAGHCVLGHMDFDGTFIGNRRFPTSEQDIIQALKAVKAKEKYLALEESNLAYWAAQVARPYVSEVISSDPKENALIYRSPNKRDKVDTHKLCRLLRLGELKRVYHPENDERAIFKAAVQHYIDLRDQQVVLKNKIKAMYRHWGVIDVAGPAVYGTTRDDYLKRVKHLHIRNQLHRLYCLMDKTESMQKKALKAMKQLGRKYPEIKQFEKMPGIGEILSHTFDAFIQTPHRFADKRKLWRYCRLGITDRSSDGKPLGFKRLDKSGVSELKAVSYRAWLSAMRSDNEVRRFYSRSLRLTVNHVHARLNTQRKIIAVMYGMWKRGEAYRPQLFLDSPQMSVVQVRQHH

SEQ ID NO: 287849 - protein, 426 aa, unidentified
MNYKQNERILQVTEKTLVVGVDIAKETQFCRAFNYRGLELGKVYSFSNDRLGFDSFKEWSEQLMKQNGLDNLIIGMEPTGHYWFNLGEYCRDNTMKIVLVNPFHVKRCKELDDNSPTKNDRKDPKTIAKLVIDGRYVETYMPTGIYAELRRAFRMYDHVTGCKSVVVNKILQWLDNYFPEFTEVFGSWDCKSGMITLREFPLPSMIVDFGEAKVLEIWKKEIKQGVGKKRAQKLVETAKTSVGSNEALKMGVKELQYLFSEYDVYVKQLDGIKIEMENLLEQVPGAKEALKIKGMGIVTVAGIIAEIGDISRFQDARQIQKYAGLNLVETSSGKHKGDTTISKRGRKGLRMMLFRVMMPMVANNAEFKELHKYYTSRKENPLKKKQSLILLCCKLIRILYAILTKGVEYDGSKLMKDIRRPQEQAA

SEQ ID NO: 287850 - protein, 317 aa, unidentified
MAMQAGRLIVGADVAKAELVIHHDSSDEVIKLKNSKADIKRWLKQQPLNTAIAVEATNVYHLDLVELAHGLGFSVYVVDGFQLSNYRKSVGGRVKTDPSDARLLSRFLRNEGEDLRPWSPPPAVYGKLQSLLRRRAALVSARTAMTQSWANETLLKAAFEAFVTSIDRLDLLMQKKMKEVLREAGLHEQVARCQAVEGIGFLTATALVMAFVRGEFKSSDSYIAFLGMDLRVSDSGQKAGRRRLTKRGCSEIRRLLHNAAMAASKSKAWKGIYEQHRNSGKATTQALVILARKLARVAFALMKNQDEYVTKASKPAC

SEQ ID NO: 287851 - protein, 381 aa, unidentified
MTAPQAFTTASRGANGMDPALPARVTIARQLHRGRVAMQIARIGLDLAKYVFEIHGVDAHGKAVLRKTLRRHAVPAFFANLPPCLVGMEASNGAHFWAKALSELGHDVRLISPQFVAPYVKSNKNDRNDAEAICEAVSRPSMRFVPVKSAEQLAVQAVHRIRSRLVADRVRLVNQVRGLLGEHGIVVAKDIGNLRRALARIAGDDEDCALNPLVRSLMRELREELTELDARIAGYDRKIRELYRNSEICQRLGKVEGIGPVTATALVAAVGDRSSFKSGRQFAAWLGLVPKQRSSGGRARLFGISKRGDRYLRTLLIHGARAALGRVRDKQDPRSLWLGRMRQRRHPNIVAVALANKNARIAWSLLTNDTVYDPSLSVCAA

SEQ ID NO: 287852 - protein, 402 aa, unidentified
MNCVGIDVSKGKSMIAVMRPFGEVVVSPFEVRHTANELSELAGLLKSLDGETRVVMESTGNYHAPVAWLLHDAGLYVSVVNAMLVHDYGNNSLRRAKTDKKDAVKLANYGLDHWLTLPRYIPEEDTRLMLKICYRQYQQYSKVQTMLKNNLISLLDTTFPDANRLFTSPPRADGSEKWVDFVATFWHCECVCGRSEKAFTTQYQKWCRKHGYNFSEDKALDIYASACRHFGVIPKTDTAKLLVEQAISQLQTTSSALAALKQEMQSLAASLPEYPVVMEMFGVGPTLGPQLLAEIGDVRRFHSKKALVAFAGIDAPPYQSGQIDVRSRSISKRGSASLRRTLFLVMSVILQCAPIDEPVYQFMDKKRSEGKPYRVYMMASANKFLRIYYASVKAYLESLEHD

SEQ ID NO: 287853 - protein, 452 aa, unidentified
MGRKKKMEMDIINLNAAGIDIGSRSHFVAVGQALEDVKKFGVYAEDITEICLWLKSYGITSVAMESTGDYWQNLYTELIKYDFEVTLANGKFTKNAKGKKTDVKDCRWIQKLHALGLLSSSFLPDETTEQLRTYCRQRSNWIELASSTTNKMQKYLKFLNFRLDVVVKDVCGLTGLTIIEEICNGNLDPEKLAEHRHYNCKKPKEEIAKALHGNNRVDYLFGLKQEFESYQFFQKKIKACDKQIDIFLRKELKKDPSKKKLQTTNKPYKRINKNAPQIKNLNQVSFKYFEGVDLFAIEGVSHAIVLSIMSEIGPEGFRKFKTAKQFASWLRLAPNNKISGGKILSNRIPKGSNRLKIALRQAANAIGNLKDTHLSDFFKRVAYRKGRQSAVSATARKLAVIIWTMITKKVPYQPPKEYLFLDQKRKLGIVKRIQKQITKFELESKSFNFETN

SEQ ID NO: 287854 - protein, 339 aa, unidentified
MQVTTVVLDLAKNIFQVHGVTENGEVAFNQALRRAQLFAFFEKLPPCLVGMEACGSSHYWARQLSKLGHDVRLIPAMYVKPYVKRGKSDAVDAAAICEAVTRPIMRFVAIKSEEQQCLLILHRARDLIVRQRTQLSNMLRGLLGEFGIVIVQGIGSAIKFAKGVLDGDKPGIPEVAIDVLDNLSNQLVDLHLRVRRYEMRIRLQAKQDLRVTLLRSIPGVGPVTASAIVATAGDASQFKNGREFAAWLGLTPLNRSSGGKEKLGRITKMGDRYIRRLLVTGITSRLRQMKTHPERVDPWSRALLDRKPARLATVAMANKTARIIWAVLSKNEYYRPHTI

SEQ ID NO: 287855 - protein, 341 aa, unidentified
MEPVVTIGLDIAKSVFQIHGVGATGDVVVQRRLSRSKVLRFFASIPACLVGLEACGAAHYWGRELRKLGHDARLMPPSYVKPYVKRQKNDAADAEAICEAVTRPTMRFVEIKSAEQQSAMVLHRVRLTLMRQRTQLSNAIRGHMAEYGLVAPVGRNGLAQLITVIGNRADDRIPDLARGCLAMLVSQLQMLNEQILETDRHVRASARATEVGRRLMEVPGVGPVLASALVAAIPDPRSFKSGRNLAAWIGLVPRQNSSGGKERLRGITKQGDRYLRQLLVVGALAVIRYAQRHGTKRPWLVRLLARRATKIAVVALANKMARMTWAIMVSGERYREPQITA

SEQ ID NO: 287856 - protein, 342 aa, unidentified
MDIVIVGIDLGKNVCSIVGLDEAGRVVVRRRMRREGVIKFAAGLRPCVMAMEACCGAHHLGRLLAGQGHEVRLMSPEYVRPYVKAQKNDDRDAEAIAEAATRPTMRFVGLKNQDQLDIQSLHRVRDRLVGERTALINQLRAILLERGLIAAQGRRKLERRLEEWLCEEDLPISPRIRALIADMRLEWAALDRRIEAFDNEFASLARADDAARRLATIPGIGVLNATALAAAVGDAHAFARGRDLAAWLGLVPRQATTGGKPRLLGISKRGNKYLRKLLIHGARAVMPSLSKSATPLGAWLRNLLQRAHPNAAVVALANKLARIAWAVLSRGEVYRARALATA

SEQ ID NO: 287857 - protein, 409 aa, unidentified
MRLFVGLDVSSFDMKVCFLNGEGEKLDSFSVSNDLPGAQVLKERLLQCTTNQKVETLKIGLESTSVYSFHPSMFLHHDEDLKRFGTKVFLLNPKQIANFKKSYSDMNKTDEIDAFVIADYLRFGRNQMSIVKESQYVALQQLTRSRYQLVRMLTKEKQHFLQHLSYKCNTFSQEVDSSIFGNAMMELFLEKFSLEELADMPLEELAEFLQKKSKNRFGDPKCVASTIQKAVRTSYRLDRVVEDSIDILLGTSIEIIRTYQKQIKELEKSIKRIMAGLTQTLESIPGIGPIYAAGIIAEIGQIERFDDETKIAKYAGLYWRTYQSGRFIAENTSLSRNGNHYLRYYLVEAANSVRKHVLEYQEYYTKKYNEVPKHQHKRALVLTARKFVRLVDALLRNHQLFTPERCVKV

SEQ ID NO: 287858 - protein, 387 aa, unidentified
MNPEQLRVLSEWLIEQQVEEVVMESTAQYWKPVWEALERFWKAMCQSREGARRMAGTLHLAQALSNRGRRGRKTDFRDSERLVKRLVSQELVLSFVPDAEQRLWRTLTRTRYQRTRDKVRLQNQLEALLEEAHIKLSSLVSDLLGASARRMLKALADGETDPAALAALADQRLRATPAQLHDALGACTELNPVYRRLVKLTIEDLQFVEQQISQLDQEIASLLQRHQDAVERLAVVPGLGVDSAQQIIAEVGAKAATFPSAKKLSSWVGACPGKEESAGVNRSRHSPKGNRQMRRILNQAANAAVKRKGSIFEIVYRRLVPRLGHNKTIGVIAHRLCHLIWIILHNDVRYEERGPAVSKQSQQRHTARMIRKLRMLGYRVEPIGGPA

SEQ ID NO: 287859 - protein, 332 aa, unidentified
MFVGMDVHRNRTQVCVLDRKGNEVRNRNVANDRQALRKELAGLRRGTPVAFEAAYGTGWIAELLGDLGFEAHLAHPAGCRAIADAKLKNDRVDARTLANLLRTGYLAEAWLAPKEVREQRLLLRERARLVRIRTSAKNRIRAQIADEGVAAPGHGLWTKQGAVFLESLDLSPMHRWVVTDCQVLIEVLECRISLLEAEIRRQAKPDKRVDALMAIPGIGLLSAMTLVSEIGDITRFATARKLCAWAGIIPSMRNSDRTLHHGHITRAGPAAVRHVLAEAAQTAIRKEPYHSDFLATKRRRGTGIALIRVSRKLLTESFYALHALEDEQRQCS

SEQ ID NO: 287860 - protein, 322 aa, unidentified
MAMLSFGGIDVSKDRLDIMVLPDEQCSWVSNDAAGWAELVEQLRGSSITAIGVEASGGYERGVVRALLAAGMSVRQINPFKLRQFAKASGTLAKNDRLDARMIASFVAIMPTRPAQRQAPMIEQLAAMLTVRRQLSDHKVATENASRLLEGAMLQRLSRRRIAGLTADIDLLDQRLVEIVTADPALAHRFRLLTSMPGVGAVLACTLIALLPELGQMSRKQVAALVGLAPYDFDSGKLKGRRCIWGGRARVRHVLYMAALSASNWNPALKAFHDRLAATGKKPKVVIVAVMRKMITTLNAMLRDGTAWVDRYSGRRSASTAR

SEQ ID NO: 287861 - protein, 415 aa, unidentified
MKKHNYRAKKVNDINWPQLREQFAGQALVFAVDVAKEQQFALLSNTELSESVLIQWNQLQQTAGLINELKQLNALITVVMESTSTYGDAMRYQFRQAGFTIHQASAKRVHDAKEIYDGVPSLHDAKAAWLIAHLYQDGLTKPWHELGDKERELNAYRREYELHESQHKRNQNRLEAFLSRHWPEVLPLLALDSVTLESLLIDYGSPEQIAAGAEQAAKDMRRWGKHCLSTEKIDAVIHSAATTLGQPCIEAERRYLQALAEELRHSRTQAKNAKLALEAVVKAEPELKEMGMTVGMVTTAILIGLHLDPRHFGCARSYLKALGLNLKEKSSGQDHGKLKLTKRGSALARKYLYFAALRLINSDPVISAWYQNKVDPRAKLKTVIALMRKLAKALWHVARGQRFDARKLVMTAEVN

SEQ ID NO: 287862 - protein, 310 aa, unidentified
MDRIIVGIDVSKDRLDVAVRPSGEAFAVSRNAAGIEQLVARLRKLSPHIVALEATGGFETVVVAALGAAGLPGAVVNPAQVRAFAKALGQRAKTDPIDAGVIAHFAEATNLEPRPLPDEQTRLLADLVARRRQIVAMIGAERQRQQRLTAPRLSKSIARLIKALEKELASLDADIGDAVQGSPAWRAKEELVTSVPGIGPVISRTLVADLPELGQIGHKQITALVGYAPFTRQSGKWRGKSFIGGGRTAVRAAIFMGAMVAKKHNPVLKAFFDRLVAAGKPKLVALIAVARKLLIILNAIVRDNRPWQTA

SEQ ID NO: 287863 - protein, 336 aa, unidentified
MLHYCGIDLHSNNHLVVVIDEEDKRVYEKRLNNDLSLTLDALSPFQASLQGVAVESTFNWYWLVDGLQEQGYDLRLVNTAAVKQYDGLKYCGDRHDAFHLAHLMRLGILPTGYIYPKEQRAIRDLLRRRLFLVRTASAQLISVQSQIWRTTGLRMASANLRKPDVVVPPVDIYTHQAVQAGLAVYQTIQREIDGLEKTAHQAVKLTGEFKLLQTVTGIGKILGLTIMLETGTIERFAGPGNFASYCRCVDSKRVSNGKKKGEGNAKAGNKYLSWAFSEAAHFAVRYEPLAQRFYERKKARTNGIIAIRAVARKLSRATWMMLKHEVPYDARLMFPG

SEQ ID NO: 287864 - protein, 320 aa, unidentified
MSFILGIDVAKAKLDLALRRPDGRFRSKVVHNTPDGFQALSSWLTRQGVDQLHVCMEATGTYWEAVAEYLADAGFTVSVVNPAQIKAYAGASAVRTKTDKVDARLIAAFCAAQHPEPWQAPPAALRELRALVARRESLVAMRTQELNRLSVAREAVRPDIQAHLSYLDKAIAEIEAAIRQKIDDDPDLKAQRDLLDTIPGLGEKTIPTLLSYYGGPQRFTRAKAAAAFAGLDPPQHESGTSVRGKTRLSKFGHAALRKALYMPAMVTTTRTAWGRRFRDRLAAAGKPPMVILGAMMRKLVHVAFGVLKSGQPFNPSLHGA

SEQ ID NO: 287865 - protein, 360 aa, unidentified
MKIVGVDLHAKQQSIAMLDTETGELTEKVIRHEGNVVREFYVGLEGPVVVGLEATGSMQWFLELLDELGIQYRVGHPAKIRAAEPRKQKHDRRDARLVLDLLEPDHFPDIWMPSTEQRDLRTLLRDRHQWVKMRARLQHTLQSIALNHALRKGTSLWTAGGQDSLQRLPLPPYTSQRRNQLLSLYAELQRRIQELDRQVEEQAGQRPQARRLLTHPGVGPVTALATEVFLGDPSRFTTAKQVASYIGMIPREYSSGQRQRLGNMTKQGNSLLRYLWTEAAMHAVRNDPELKRFYRRKLIQKGMGKARIAAARKLGIRLWIMLRDQIEYEEFCRRGKLRQNGEAHAGMPDFNSGPATTVTG

SEQ ID NO: 287866 - protein, 369 aa, unidentified
MGEYSEAFVAFDVAKIKHAVAVAEGGRTGEVGFLGEIENREGPIERTVKKLAGRYGRLHFCFEAGPTGYGLYRQLQALGHDCMVVAPALIPKRRGERVKTNRRDAVTLARLHRAGELTGVWVPDAVHEAVRDLVRAREAAADDLRRKRQQLLSFLLRHSRIYSGSGHWTLAHRRWLANQAFEHAAQQIVFQDGIDAIEDAIARLRRLEEQLVTIVPSWSMAPVVEAYQAMRGASFLVAVTFAAEIGDVRRFDNPRQLMSFLGLVPAESSTGDTVRRKGLTLAGNRRARRALVEAAWTYRYPARVSETLRARLEGLPKAVRDIAWKAQIRLCARYRRLRATGKKLPVVVAAIAREMAAFLWAIGREVAPG

SEQ ID NO: 287867 - protein, 261 aa, unidentified
MQNVTLIGIDLGKHSFHVHCQDKSGKALLRKKFTRTKLMQFLAECPSSVVVMEACAGAHFMARRITDLGHETKLISPQFVRPFVKSNKNDFVDAEAICEAASRPSMRFVQPRTEAQQAMRVLHRVRESLVRDKVKTTNQMHAFLLEFGISMPTGTAVIKRLSTVLAENELPPYLTQLLMRLHAHYLYLIEQIAELETALEQELSRDETGQRLQTIPGVGPITASVLSSQLGDGKQYGCSRDFAASTGLVLRQYTTGGKIRF

SEQ ID NO: 287868 - protein, 357 aa, unidentified
MGKSIRNLSTVTRVGLDLAKRVFQVHAVDAKGEIVVARKLTRGQLIPFFAELPPCVVAMEACSSAHHWGRALIELEHEVRLIPPAHVKPYVRRNKNDQVDAAAIYEAMSRPGQRFVPVRSIDNQAELMRHRARELLAGQRTAALNALRGHLAEIGLIAPQGAQHAYGLKRLAGDGFDENGEIVVPDCVRVALRPLISQIDALDEAIGALDREIVASVRSNATAKRLMTIPGVGPVTASAIVATIQDAGAFASGREFAAFLGLTPRQNSTGGKTRLGRITKMGDRYLRKLLVVGACATLRHRRGHSDALRVWASGMLERKTVKYKFNLTAVALANKVARIVFVLMTRGGQYDGRPVAA

SEQ ID NO: 287869 - protein, 380 aa, unidentified
MTRISVGVDVSKNRSTVCIMDQDGKVIMRPFLVWHSTEELDFLADTLKRLNGEVRVIMESTSVYQYPIALQLKERGIFISIVNAYKVKEFANTDFIGGKTDKKDSRTIASYGISYWDKLVEWQIPKDTYFNLDLLNRTYMNAKKHRQIILQELQHYIDCAMPGMDKELHSLNLNTKKDFMLDFVEKFWHRDEIVNMTEAEFTEVFTAWAKEKGYRPGKGKAAKIYAIAKSCIPYYPANPTVKTILQCIVDKLSGVNRTLVTIVTQMIEEAKKLPEYQIVREMPGVGDPLAARFFGSAGDIRRFKNSKALVAYAGIDSPPDESGDFSSTHRHITKKGSKVFRDTGYEIMMALRAQKRTWEKVRKNAEVYDYMLRKEAEGKP

SEQ ID NO: 287870 - protein, 313 aa, unidentified
MSLAQSTMGIDVSGRRLDVHLHPAGHRRSFPNDPAGVAALLFWAQEQAAFVVLEATAPWDQLLIRALEAAGLPFHRANPKRARDFARSAGLLAKTDAVDARMLALYGAALPLAPTAPIAPERLQLQGLNTRRDQLVEMRKAERIRLKGVCDPVLVSSIEAVIAMLDQQIGALERGIAAIVAQAPALARDAAILRSASGVGPVCASVLLAALPELGRVNRRAVAALAGLAPMARDSGLMRGQRHVQGGRKRVRDALYMAGLTAIRSGRWKQDYEHLTKSGKAPKAAIVAVARKLLVALNAAIRDQKPIINTASA

SEQ ID NO: 287871 - protein, 455 aa, unidentified
MKHEPEEIPDAEHELVIERVAAVDVAKASGKVCVRVPGKAGRRVSRVWDVAATTAAVTELAEDLVELGVERVTVESTSDYWRIWYYLLEAAGLEVQLVNARDVKNVPGRAKTDKLDAVWLAKLTEKGMLRPSFVPPTEIRRLRDYTRLRADLTHDRSRQVQRLEKLLEDALVKLSTVATDIMGVSGRAMIEALIAGQRDAKVLAGLARGRMKTKRAALIEALSGRFDDHHAELARMLLDQIDALTAQIDTLTARIEQLLAAMPEAQPVDPRRDGPTSGHPVGVTADTLAECARLTTVERLDEIAGIGEHNAQVIIAEIGLDMSRFPTPAHLVSWAKLCPRTIQSGPVTRGGRTGKGNPYLKGALGDAAAAAAKTNTFLGQRYRRIVKRRGKLKALVAVARSILVIVWNLLNDPTARFHDLGPDYHTNRIATERRMRNHIAQLTAMGYRVTLEPAA

SEQ ID NO: 287872 - protein, 326 aa, unidentified
MNSILGIDVSKESLDVVLLNEGWPMHKVFNNNPAGHTHLGHWLAAHRPGQLHACLESTGQYGEEIAEFLFQRGFQVSVVNPARIKRYGESKLHRNKTDKADAALIAEFCQKEHPPTWEPLPPSVKHLRALVRRLDDLQGAYQQERNRSLCGERDVWVVEDLAIHLKYLQERIRAARLAIQQHIEQQPALRSQQDLLTSIPGIGKLTAARLLAEIGDISAFENAPQLVAYAGLNPKGNRSGSSVHKKTRISKEGRAFLRYILYMPAIVARKHNPVIIEFCQRLSDRKLAEMAIVIAAMRKLLHIVFGVLKNQTPFDPGYGKQFAFNP

SEQ ID NO: 287873 - protein, 414 aa, unidentified
MFAVGVDVSNGRSTIAVLGTKRTMVVKPYEVPHTTNGFAELVKRLHGLGGEVRIVMEHTGRYYESFAMSMCRAGFFVSAINPLAIKDYQEGITVRKVKTDKADALKIAQFAIDKWEILPQYTPMDTIRYELKTLHRQFQLSSKTRTALNNNLIALLEQSYPGVNKYFSSPVRSDGSQKWVDFADTFWHVDCVAKVSRKAFVERYRKWCKSHSYSFSEAKAEEIHEESRQKFPLVPKTDTCRLLVREAVAQLNAVSRTVEAYRSEMDRLASQLPEYQTVMAMTGVGKSMGPQLIAEIGDIRRFAHQKSLVGFAGTDPIKDDSGDKISGSKPSSKRGSPYLRKTLFVIMTILLQLQPPDDPVYQFLDKKRSEGKPYHVYMTAGMTKFLRIYYGKVRNSLKEQGLWEQSDVVEVNPD

SEQ ID NO: 287874 - protein, 413 aa, unidentified
MTSHDELTYFAGFDWAGDHHDIIIVNASGRVVADFQIEHTAAGWRSWREKTMAYQKLGVAIETSFGMVVEQLIDSGARVFPVNPKSARRYRERKNPSGTKTDRHDAWALADALRTDGHAWRALGPKDPIIEELRILCRDEVALIEERTALINQLRQALREYYPTALEAFEDWIAPSAWAFIERFSNAEVLIQKGKRQWEKFLHVQKLNRPQTYEKRLEIFAKAGEWKLNSGLVKAKSLYALAKIKQLRTLATQLEEYRRRIEELFANHPDSGLFGSLPGAGPKIAPRLLSEIGSDRALYDDASGLQSVAGTSPVSFQSGKIRKAQMRRACNRNLRHAMHLFAHNSVERSSWARAYYDALREKGKSHAQALRCLGQRWLKIIWKMWQSKTAYNAELHLKNQLAHGSWVLELQTA

SEQ ID NO: 287875 - protein, 357 aa, unidentified
MKIVGCDLHARQQTIAMVDTETGEFVERTLSHEGNALREFYAALEGPVVVGIEATGSMQWFLELLQELGIQCRVGHPAKIRAKETRKQKHDRRDARLILELLIEDRFPEIWMPSIEERDLRTLLRDRHQWVKMRARLQHTLQAIALNHALRQGHALWSQAGQSALEALPLPPYTSQRRTELLSLYEQLQKRIQELDKEVEAQARQRLQARRLLTHPGVGAVTALATDVFLGDPSRFDTANQVASYIGMIPCEHTSGKRQRLGKLTKQGNSLLRYLWTEAGMHAVRKDPELQRFYRRKLIQKGMGKARIAAARKLGIRLWIMMRDQIDYEQFCRRGRLRQKGEAHAGMPDFNSGPAMQ

SEQ ID NO: 287876 - protein, 441 aa, unidentified
MAMRKQDELVVFPNAAGIDVGASSHWVAVPRERDEEPIREFGAMTDDLHALADWLLACGIDTVALESTGVYWIPLYEVLERRGLVVWLVDARQMKYVPGRKSDVQDCQWLQKLMSLGLLRAAWRPGDEVCVVRAIVRQRALLLSEQASWVQRMQKALLQMNIQLAEVLTDVMGLTGQAIIRDIVAGQRDPAALAQHRRGRVKASVADIQRALTGNWRDEHLFVLTQALAMYDSLAQRLLECDTKLEALLAPLARQPIELAGAGKRHGKNTPGFDLRTALARWAGVDLTRINGLAVSSVLTVLSEIGPDLHRFANVRHFCSWLGLCPGSKISGGKILSARTRRSTNRVRQALKLAAMSLSRNSSALGAFYRRLCSRMDKPRANTAVAHKLARMIYFMLTRGEDYVDKGQQHYEEQQRQRSIAALRRRAANLGFAIMPAATSA

SEQ ID NO: 287877 - protein, 324 aa, unidentified
MKLYLGVDMGKSGFTAALCSEDQTFQIIHPEVRNQIDGWQAIRDWVLKQSKEKPAEVHLGVESTGGYEKPLVGWFRCNTEFAITVLNPVRVKKFAQSELSRTKNDRNDARLIARYLAIRKPEPTLVTVPEIEELKLMVRHLEHLIRKQADEKIYLDSVTETAIRRQTQDIIQTYQKQIEKVQAQIRKHIDSHPNLRNQSGLLQSIPGIGEKTSAILLCECIPALTPKQQVAHAGLAPRHNQSGKMNGKTQLCKTGNKRLRTALYLPTLCAIRCNPVIREFYQRLIARGKLKMVAVGACMRKLVHIIVGVLKSQISFNPNYALLT

SEQ ID NO: 287878 - protein, 434 aa, unidentified
MTLINFVAANQKYYAFNLLSVFIMVFWSVQYLLQHLLVQTQLSDQLLQPLIFILQLPQTPQFRHARPGKFFLPVNRMDYLLPLRLTVRNVLTRRITMNIVFLGIDLAKNVFQLCGLNQVGKPVYTKRTGRKELLQTLANIPACLIGIEASTGAFYWQREFEKPGHKVKVISPQYVKPFVRGQKNDGNDAQAIAVALMQPTMQFVPPKSPEQQDIQALHRARQRIVNHRTATVCQIRGLLLDRGIPIGSAVSRARRAIPLILEDAENGLSSRMRRTIAELYDLFNDLGRRIHFFDKEIETVFRQSEACQRIAKVKGIGPETATAVVAAISKGTEFKNGRHFAAWLGLVPRQHSSGDRQVLMNMTKKGDKHLRTLFIHGARAVVRVATNNNDGHMNQWVNQLKERRGFNKTTVAVANKNARIIWSMLRNDTGYQVV

SEQ ID NO: 287879 - protein, 343 aa, unidentified
MQAVTTIGLDIAKSVFQVHGVDAQGTIAIRRSLKRRQVLPFFKKLPPCLVGIEACATSHHWSRQLQALGHTVRLMPPAYVRPYVKSQKNDAADAEAICEAVMRPSMRFVETKTPEQQSCLMLHRTRHLFIRQQTAVINAIRAHLAEFGVVAPVGRNGVEELLDVIADPKDNRVPEVARECLAALGRQLHMLKAQILQFDRHIMAWHRSNETSKRLDAIPGVGPALATALVASVANPRAFRSGRDFSAWVGLVPKQNSSGGKEKLGNITKRGDRYLRSLFTAGALAVIRYAKIHGTKHRPWLTQLLARRPTKVAAIALANKIARMAWAMMAKGERYKEPIALAA

SEQ ID NO: 287880 - protein, 378 aa, unidentified
MAVIIGMDPHKRSATIEVIDDRGRVLAAGKYTTDKTGYAEMVKAGRRFAERVWAIEGCNGIGRHLAHRLVHDGETVLDVPAKLSAQVRVFATGNGRKTDPVDAHSVAIAALHAANLNRVELDAELAVLGMLADRRDELGRARTQTINRLHRLLVELFPGGAKKFLSATQACALIATIKPRDPVGKTRRRLVVELIDELERINKKIKIVNKELQQLVTDRGSTLMDLHGIGPSSAARLLADVGGIHRFRDRDRFASWNGTAPLDASSGEHQHHRLSRAGNRRINRVLHIMAVVQLRNPTEGRAFFDAKKAAGKTSMEAMRALKRRLSNVVYARMVADQRQRERQTREGTRDDSAIQRDRPNPKHRPFGQATSRTCHQPG

SEQ ID NO: 287881 - protein, 361 aa, unidentified
MLSIGLDGHQRLYVLCIGDGSGRILERRTIRGDWRQLIGFLRSLATPFQIVYEASSGSGFLYDRLKTIARRIVVAHPGHLRLIFKAKRKNDRVDAEKLYKLLLLDAVPAVYVPTPAVRDWRKLIEFRSRLVAKRTRVKNAIRALLKDHGLEAPKRGTLWTTKGIAWLRELTLETHLASLQRDMLLDEHDAHDEKIKRLERELDAVAADHAGAQLLRTIPGVGPRTSEAVMAAIDDPRRFRRNKAIGAYFGLVPCQDESAGKARFGHVTREGPATVRRLLTEAAWQGIRRSDRIRAFYEQVKHDDPQRNKIALVATAHHLAKIMLSMLKSGEVWHEEPRSTTRGRSVPNPARGRGGRNHDVT

SEQ ID NO: 287882 - protein, 416 aa, unidentified
MNAAGIDVSSRKSTVSVLRPFGEVVRLPFDIVHSAEGFASLIRQLKSIEGETRIVMEHTGRYYEPVAQILHEAGFYVSTVNPLLIREYGGNSLRRVKTDKADAMKIARYALDNWSELRDYTPMDTIRYDLKTLNRQFQLASKQKTAASNNLIALLEQSFPGVRKCFDSPVRKDGTQKWVDFVYTFWHADCVRKNSLNAFTERYRKWCKRHGYFFKQSNAAEVYELARSVITLVPKGPVAKVLVQQAASQLTSISRSVETYRAEMNRLASMLPEYPVVMGLYGVGESFGPQLMAEIGDVRRFDRKQALVAFAGIDPMPNQSGEKNVRSNKSSKRGSPYLRKTLFSIMMCLLQSAPADEPVFQFLDRKRSEGKPYYVYMTAGANKFLRRYYAKDRDYLATLDNFPPVDMDSTGLNHLN

SEQ ID NO: 287883 - protein, 386 aa, unidentified
MNVALPRVAEQTAIQTQLGAIFVSLELSHSTWLVTSLSPGGGEKMSKHSVRAGDLAGLRERFSALTQRACARTGRNCPLIAIQEAGLDGFWVHRVLAAGGIESWVVDPASIATSRRRRRAKTDKIDGEALLRALLAYKRGEPRVCAMVRVPTPWEEDRRRIGRERKTLIAERTGHLNRIKGLLYSQGIFGYEPMRRDRRARIEELRTGDGRPLPQHLKAQVTRELDRLELLFEQIKAVEAERDALIAPAAGAVPVPVAMLMGLRGIGAEFANILYSEGLFRHFGNRRQVAAYSGLAPTPWQSGSIDREQGVSKAGNPRLRSTMIELAWLWTRHQPNSALSQWFRERAKVDARRKVTIVALARKLLVALWKYVTAGIAIEGAIIKTA

SEQ ID NO: 287884 - protein, 333 aa, unidentified
MSIMNMNLQGGVAKSDVKHNAGIVVSKHHLDVCCAGQERRVPNDAHGWDESAAMLKAADVDLVVVEATGGYERGVVCALQGAGMCVARVNPRQARDFAKSLGVLAKTDQVDARVLRDFADVLARHKDRHKYITPMLEQARVELGELMTRRRQLVEMRVAEHNRLEHAGPRAARSIQSVVKLLDKQIGAVEQHIDDHMDRYFKEQKDLLDSVKGVGPVTILTLTAALPELGRLGRRQIAKLVGVAPLADDSGSRQGKRYTWGGRSQVRAVVYMAAIVAMRHNPVIREFYERLLKAGKAKKVAIVACMRKLLTILNAMLRDQSMWDAARHVQQEI

SEQ ID NO: 287885 - protein, 392 aa, unidentified
MVCVGIDVAKDKHDCFILSSEGEVLADVFTVANNRNGFETLLQRIRSCSRPTDIIKVGLEATGHFSYNILGFLLEKGLATFLINPLHTNLYRKSLSLRQTKTDRIDARTIASMLMSDVDLKSYTDTAYHNEELKSLTRYRFDKVQERAKLKQSVSRLVNILFPELETLVPTLHMASVYAMLSEFPGAKQIADVHLTHFTTVLSDASRGRYDRDKAVEIREAARRSIGSAMPAKSLELQHTIRLICELDKEIDEIEAAIKAIIDKMAPPILTIPGISYRMGAMILAEIGDFSRFDSPDKLLAYAGLSPSTYESGKLKATGAYAHMEKRGSRYLRYALFNAAKYVCHWEPTFAAYLAKKRVEGKHYNVAISHAAKKLVRLIFALQTSGKAFQPA

SEQ ID NO: 287886 - protein, 317 aa, unidentified
MAEVTFPQLIQRACGIDVHLKVVVATIDGAGIQRETRSFKTFTSSLNELKEWLLSNGVTHVGMESTGVYWKPVYKVLEDSIPNVWIVNARHIKNVPGHKTDKMDSEWIYKLLLAGLLKPSYIPPKEQRQLRDLTRYRNKLIQQIASEKNRMMRILEDCNIKLSSVVSNTSGTTATSLIDMLCEGKVLTLDDINSVYHGKLSASPEELLEACTGFVEEHHIYLLQMIRKDIDQTQTLVDDLSERIKRLLSKYENVLELLREIPGFSTKVVEDLVSEIGLDMSHFPSEKHLSSWAGLSPGNNESAGKKKAHESLTETNR

SEQ ID NO: 287887 - protein, 398 aa, unidentified
MRYIGLDVHKDNITACVLTSTGKPKFEKDFIKDSGSWDLSELMGYGDKDGFCVMMESGTYAYQPFRFFSDQGVETHVVHAQALKLITQSDKKTDKKDAYTIARMLRLWKRGEIDLQTAFMPTREQCELKDICRYREEISRKIGDETRRIKSHMSRNCEHLPDDFDNFQTRKARDYVRSAFPADITLMRRMVDLERLFEERDSVQKEVESRLPGSREVEILTTIPGIARQTAVQIMSMIVDIDRFDDAEKLCAYFGMVPRVRDSGGKDHHGRMTKNGDRMMRAVMERVTESHVRNCDSSVTRYYKRKCSEMGTKKALITASRKMLSVIFAMLKSGSDFRLAARIVIRFKPNSRHPMPVMGCEVRGILPSLPFAALTALRNYGVDRRPGSKSHLTAIRTV

SEQ ID NO: 287888 - protein, 332 aa, unidentified
MNLNPQGRVAKRDVRPNAGIDVSKQHLDVCCDDDDLRLSNDASGWGELIAKLKAADVDLVVLEASGGFERGLVCALQQAGLAVARVNARQARDFAKSMGVLAKTDRIDARCLRDFADVLARHDSRDKYILAPADPQREVLAALMLRRSQLIDMRVAETQRLGQANERTARSVRVVIKTLERQIQDIERDVDKHLDRHFKDQRKLLASVSGVGAATTLALVAALPELGKLGRRAISKLVGIAPLANDSGQRKGQRHIWGGRAQVRTALYMATLSAMQYNPAIAPMYQRLIQAGKPRKVAMVACMRKLLVILNAMVRDGAVWDATRYAPATPTA

SEQ ID NO: 287889 - protein, 436 aa, unidentified
MGGKEEVDGIAVLVEGPVQIAPLATDLDVDPMGTGYRLGRLHATISGSATMIQHTHLTASNGLDYDRTLILAVEVSGRSWVVAAQVPGLRQKSAKQQLAPCADALMAAVEGYKRRAAAAGMAVDRVIVAYESGGSGFWLARWLQQRGVEVHVMQPSSVPVDRRMRRAKSDRIDADRLLRTLLAWLRGEPRVCSMVPVPDEATEDARRPIREREELIRARVAIVNRIEAVLTVLGSGEDNPLRRDCRERLGQLRTALDQPLPPHARAQMERLLDRLDLVCQQVAELEAQRDQAVESEAAGQAERMIQRLARVRGIGVQTATVLVHEAFVRRFRNARALGSYAGLTGTPSSSGGTQREQGISKDDNRRLRATLVELAWMGLRDQPDCALSRWFHDRLGSSRGRLRKVMIVALARKLLIALWRYLQDGAVPQGMELKPA

SEQ ID NO: 287890 - protein, 347 aa, unidentified
MKFYTQQHRYYCGIDLHARTMYLCVLNQQGEILLHRNMPCSPDFFLKAIAPYREDVAVAVECIFTWYWLADLCAQENIVFVLGHALYMKAIHGGKAKNDKIDAHKIAALLRGGMLPMAYVYPALMRSTRDLLRRRMHLMHKRSELLTHIQNTNSQYCLPQFGKKIAYKKNRQGVAEHFADSSVRKSIEMALSLIDHYDKLLTEVELYITQNAKIHDVNAFNRLRSVHGIGKILALVILYEIHEIDRFPTVQDFVSYARLVKCSKESAGKRHGSSGAKIGNVHLKWAFSEASVLFLRANPAGQRYADKLTSKHGKAKALSILAHKLGRAVYYMLKRDKAFDMNKFLNS

SEQ ID NO: 287891 - protein, 459 aa, unidentified
MPVQRNTKQKTVSAPRLESLKQINANAAGVDVGATELYVCVPQDRDPQPVREFGTFTRDLDDIAAWLKQCGVRSVAMESTGVYWVPLYEVLEEAGFEVQLINAHEAKNMPGRKSDILDCQWIQQLHSYGLLTASFRPSKAIVAWRSLVRHRDTLIDARAAHIQQMQKALHLMNLQLDNVIADITGVTGMRILRAVVGGERNLDVLASYRDPSCKNSTEVIRRSLEGNYQPEHLFQLKQSLELYDFFTGLIQECDREIERHCQRLSAQATPPAKPLPASRKPQQKKKPRKNDPTFDLRPHLYQLAGVDLTAIDGCNNSTIQVVLSETGVDMSRWRTCGHFASWLGLSPHNDISGGKVLRSRSKRTKNRANTALRLAAQALTHSDSWLGAYCRRMRSRLGAGKAITAAAHKLARIIYYMLKHRCEFRDLGADHYEIQYRWRQVASLQKKAASLGLQLVSAA

SEQ ID NO: 287892 - protein, 476 aa, unidentified
MARRQTVRPDIVALPLLPHETLYVGVDVGKFGHIAGFLSRTLLARHERFEGCPTLAFDQSREGFRAFVDRLRELVPIEQVTVLLEHTGHYHSLLEQYLLDLDITVYRIHVQERPKGMVKTDKRDALSLANRLYTQLDLGAQVEDKMQLVRRALPPTKAASQLKGLIQHRYELSHQCTQLRNKLTAICDELFPELVQIFRDPNREVALAYREKFPTPYAIATASMAALRELRSRSFPSEAQLLKFQQLARETIGIKNVDRQQGLLIEQALLIKELRIVQEHLELLQTAIADVVTNCREGQILLSIPPIGPIQAATIIATVGNIANFEKACELKSYFGWAPKRSQTGVSFDRTKLASRGVRPMKQTLFLMAARATTLDCEWARIYQRLLPRLATYDERTKDYRGKLRVIGRIAGQMASMIFALLKTDYETLSQVPPGEVPPPPMLYDPAIHRKHQEGHYRSLKPGTHPRKIIQLPHFS

SEQ ID NO: 287893 - protein, 414 aa, unidentified
MKYVGIDWGGDRHDVSLVDESGKRIDFWHVSSSPDGLVALMKRLAEEGGPSEVLVGMESGALPVLRALLRERYQTYVLNPKQADRFRDRHTVAGAKDDDLDSFVTADAVRTDRNHLKPYEPDTPLAEEIAIRDRVRTQMVQRRAALENQLRSMLEEYFPAMLKLGRPMEDPFFLDLLHLARDPLHVRTLRTSAVGRLVTKYRLRVLTAQKVLEVLRQPSFNTSAHVMGALRDGALQLATLIAAFNGQIEASETILDDLATKHPDYELLLSLPGLGDRSVVRVLAELGDSPSRRADDTSVQTYAGTAPVTRRTGRRGRKTNGRVVMRRGCNRILQAALFNMARASQASCAWAAAYLEDFRRRRVARVMALRSLSNKWAKIIAVVLRTHVPYDEARHVADLTRYGVEWAPKPGVAA

SEQ ID NO: 287894 - protein, 388 aa, unidentified
MEQVIIGVDPHKLSATIEVVDQHEQLLGSGRFTTDRAGYAAMRKYVDAWPERVWAVEGANGAGRPLAQRLLEDADQVVDVPAKLAARVRLFDTGHNRKTDALDAHSIAIVAVRTPNLRVLQLDGELEALRMLTDRREALTRRRVQTVDRLQALLAELLPGQAKRDLTTGQAKAMLASVRPRDIAGKTRRRIAAEELAELVAVEAKIKKATAELKAIVLARGSRLMDLQGVGPVVAARVLADVGDVTRFADRNRFASWTGTAPLDASSGEQNRHRLSRAGNRRMNHMIHIAAISQIRLDTDGRAYYRRKRAEGKKPLEAIRCLKRRISDAIYRQLLEDAHAAADRELGTGPGGHCGATHQSSAVDLPPHIDTSDKPLPGPAQKTLRRTG

SEQ ID NO: 287895 - protein, 362 aa, unidentified
MEQFIGCDAHKKYSVFVAVNERGEASQAVRVEHDREQYRRYLQQLPAGSQIALEASGHYYWIVDEMEGTGHHPRLTNPLEAKKRMGKPGKKTDKVDANGLGILLRNGTLPEVWIPPARLRDQRELLRLRMFLMQQRTRLKNRIQGALALYNIQVVARDVFGVEGRQRLGKRLGELPEHTRQSVELELVTLDFVEIQIEEAEKRLGVIMQVSAEADLLKTLPYVGRILSMVMTLEIGRVERFPSAAHLASYAGLVPRVHASGGHTRLGQICGDVNHYLKWAFIEAGNLVVIHQKHLAGHHVVRLYQRVKRKHNHQKAVVAVARHLAEAAYWILKKQEVYRDPQPKPKAPAKVPAVSTLSSTHG

SEQ ID NO: 287896 - protein, 407 aa, unidentified
MYCGIDWSERHHDIAVVDEHGRLVAKGRIGDDLDSFTTLVEMLAAAGDSAAEPVPVAIETPRGLLVAALRASGRRVYSINPMAVARYRERHSVSGKKSDHVDAVVLADILRTDAHVHRSLPHDSELVQAVAVLARAHQDATWRRTRASNELRSLLREYFPTFLAAFNGRKGHLTSADARAVLAVASTPAAAAKLSTTRIAAALRRGGRRRGVEDLAAELQQALRRPQLRQPAVVEEAMGIQALALLATLNVECASVEQLAEAASEAFHQHPDHTIVTSFPGLADVTGARVLAEIGDDRARFADARALKAYAGAAPVTRASGRSISITHRKVKNDRLAAAGYIWAFVAATHAEPAKQHYQRRRDHGDRHPAALRHLLNRLLGCLHHCLATEQLYDPTKAFAQVTPTSP

SEQ ID NO: 287897 - protein, 411 aa, unidentified
MIFAAIDWAEQSHMLVVLDAEGKTVDKARVTHDRTGFGELDRMLLRHGIAVAEVPVAIELNDGVLLDWLLRRGYRVYGLNPKSAERARDRFTPAGLKDDDRDAWAMAEFLRTSHQHLRPMRPESDQTIALREWVRLREDLMQERTVHLQRLRSHLVQWNPHLLQAVTDLNAAWVLALLEKTPTADAFARLTHRSVQAFAKGRRLSLITRDRVLTQATFHSPTPGSARNDAHVAEVRHRVASIRHLSERLAEVDRTLAQLIENHPDAVLFRSLPVSGIVTTATFLAAFGEDRDRWDGPEEVAARWGVAPVTQQSGKHRVVKRRMACDTTVHQSWLWFSFNTIRRKDCWASEYYRGKRSAGTDHFTALRCTSQRWTRIVYRVWHDRTPYDEELYQKRRNQRLQPRPGETHPRA

SEQ ID NO: 287898 - protein, 339 aa, unidentified
MSEHNLISVDLAKNVFQLCGMTDRMKIVFNRQLKRNDLARFMATQKPVEVVMEACYSSHYWGRCFEAMGHQVRLLPAQHVAPFVRGNKSDHNDAVAIAEAAHRPNILPVPIKTLEQSDIQSLHRMRERYVAHRTGLINQTRGLLSEYGVVAPQGHRAFTRLLREVSQPEYEDLSACLKEQLNSIADEYQYQSQRISEITRTLSDIAHHHPLCRILLSIPGIGPINATAIYSAIGNGSQFKNGREFAVWLGLTPKQSSSGDKMSSGGITKRGNRYLRKQLVHGARAVLSRSKNKSDRLSRWAQQLAGRRGVAKASVALAARIARLSWTLLQKQEPYQARD

SEQ ID NO: 287899 - protein, 395 aa, unidentified
MKGRYNLMIYVGIDIAKLNHFAAAISSDGEILIEPFKFSNDYDGFYLLLSHLAPLDQNSIIIGLESTAHYGDNLVRFLISKGFKVCVLNPIQTSFMRKNNVRKTKTDKVDTFVIAKTLMMQDSLRFMALEDLDYIELKELGRFRQKLVKQRTRLKIQLTSYVDQAFPELQYFFKSGLHQNSVYAVLKEAPTPNAIASMHLTHLARTLEVASHGHFGKDKARELRVLAQKSVGVNDSSLSIQITHTIEQIELLDSQLFSTELEMANLVTCLHSVIMTIPGIGVVNGGMILGEIGDIHRFSNPKKLLAFAGLDPTVYQSGNFHAHRTRMSKRGSKVLRYALMNAAHNVVKNNATFKAYYDAKRAEGRTHYNALGHCAGKLVRVIWKMLTDEVAFNLE

SEQ ID NO: 287900 - protein, 428 aa, unidentified
MAEDTTLTSQTWLVAIDIGKAFHAVLVEGGDGTRQQFRMANHVEDYDRLVAFLRGLPGPARIALEPTGDFHRTLAHRLLREGFSVVSVSSVAGARYREALFNSWDKNDPKDAYVILQLLKHGLVQHYHDPLLAGDHDLQELAKTYHQIVLARKRLADSLLNHYLLLYFPEMGRYWESTRVEWFVAFLEQFPTPAAVQALPKEAFVRAAWSVVGRKVNKQAKLEELYELAQRSIALPVAVDSVAIETFRLQLAQLRRLAELRQTLEARAHALLKDRADFQRLCSLPGVAAILALVILAEGGDLRRFPHHRQFLKYCGLDLAKCQSGQFRGRERLSKRGNARLRMAFWMAAQRAVRMNENSFRDKYERYTRHDSGNPDVRRKALTAVAAKMARVAYAVVKHDQPYHGYHEHALPSGSIPLKRAVGARATP

SEQ ID NO: 287901 - protein, 414 aa, unidentified
MSNPYAMFVGIDLGSQTHAVCVVDADGNVVDRQRVEHGGAAIDQMLAWLEEQIAPTTPQSVGVALEAPRGAMIDALLERGYALFSINPKQLDRFRDRYSVAGAKDDGRDAYVLAASLRTDLMHYRKLEPDHPLIVRLRELSRAEEALQQDWRRGANQLWSYLQRYFPAVLEWAPAADELWLFDLLQQTQAQPQRAARWTLSRLDTLLRRHHIRRFTATQLQQQLQHPLTLADGVEVALAEQVLLLLPRLRLLYRQRSDLVRRIEQLLEDMAQPENFPEHRSVQILRSIPGVGRVLTATVLSEAVTPLFQRDYHALRALAGVAPVTKQSGKTKIVSMRRACNGRFRNALINTSGVHIQKDARAKQTYAQLRSKGNSHARALRGVADRLLHLICVLLKHDQLYDPRRRYSTHDAAA

SEQ ID NO: 287902 - protein, 420 aa, unidentified
MKAPIANDFAALIGIDWADKKHDVCELPTGTTKYQYSVISCKPESLNEWAISLKKRYPGKQIAVACELKKGPLIYGLSRHSHLTLFPIDPSTVAKYRKAFTQSGAKNDPMDALIQTEILALHMDKLSPIEPESSEVRALSQLLEYRRKLVQDRVDLSNRITATLKNYYPQVLDWFEEKDTFIFCDFVLRWSSLPCVKQVRKSTLLKFFNQHNSRYPDVNENRIKNIKAAVALTEDKGVIEPNRIMVEVLVPQLRLLIESIMRMDKEIKTYYKHQDDRIIFDSFPGAGPQLAPRIFVAFGVNREKYHGASEVQKYVGIAPVIEQSGQKSWTHWRYSCPKFLRQTFVEWAGQSVRYSFWAKAYYEQQISKGKPHNTVIRALAFKWIRIAYRCWKTNTPYDESKYLKALKRRGSPLLTYAVNS

SEQ ID NO: 287903 - protein, 347 aa, unidentified
MNLVAIGLGKSKSVACLYRSDDDVTFRTIETGQQAVHDLLVEWAPERLVVEVGTVTGWVHDIAVGLGIEVQVANPNTEGWRWKRVNRKTDRDDALKLARLSVLNQLPTVWMPVLRVRQWRSLINYRHELVSRRTAIRNSIRSILDMQGYRMAMGARAWAETGIAVLRSLARPAAECEPEELWKGQLETELTLLEALRQQINLIESKLDSLAAAEPRTSRLRTIPGVSPRLIEAVVAWIDDLHRFRNARAVGSYVGLVARRRQSGTYDRSGRVTKHDPVLLRKLLVEVAWIMPQHNRHAAALYNKLNKGEKTRRKQATIALGRRLLTWCWAMLWDETTWDAQKVGIAV

SEQ ID NO: 287904 - protein, 372 aa, unidentified
MPEVSSNAPFDVRVWVSLDVHKFSIVAAALPPAGGQPEVVQIETTRAAIRRLVERLGGPEGLAVCYEAGPGGFDLQRVLCELGVACDVVAPSLIPVRAGALVKTDRRDAKKLVRLYRGGQLSFVAPPSPQTEGLRDLMRCRDDLRRARTAARHRVSKQLLRHGRVYRDGKTQWTKMHRGWVARQQLDDELAQAALFQMLIHLDGLDRQLDALDRDLETIARGKRWADTVQILTRFRGIATRTALGLIAEIGDFARFRHPRELCAWLGIVPSEYSSGDQRHRGHITKTGNHHARRLLIEAAWSYQHPPRRPSRDPTPDPRAWHAQIRLHRRYHHLTAQRGKRSTVATVAVARELAGFLWAAATHQPFPTHTTA

SEQ ID NO: 287905 - protein, 500 aa, unidentified
MEKVAFEPTLYIKLGVGHTPKGEVEKNYLVYYPTWGKKETSCKEIVWGHATQIHSDRRFLMNQEDRSRLEDFRQFRKEIRGSSEYLLVGIDVAKDKHHAFFGTATGKTLFKRLVFENNLEGFQKLLAQAEAMKGQGGLTKVVFGMEPTGNYHKPLGEHLIRCGHGVVLVSGVAAHENRKTLDGRWDTNDSRDAANVADLVSQGKCLFYEFPVGALQDLRNLLSLKRRLKRMEHGHRVRIRNHLVAKYFPELDRYYEQSESTALAIVRWCLDPSEVAGLEYQRFVQMVSSVRGRSSQEKRLQTIWKMAVDSVGCEAGPTVEFEAQVMVEGLKQIRESIRQIDEKIQEVCSRFPEYEFLLSIPGFGPDVSAKVLGAIGDPFRFQNGRQVLKMAGLDLSAERSGKTSQSAIPVISKRGKADLRYALYQAALIASIRNQDFIVYYTDKLRGREREPGIRTKMRVKLAAKLLLIAWTLMKKKEPFHPSYLRAACQSFSTGAGRER

SEQ ID NO: 287906 - protein, 315 aa, unidentified
MDHATLIGIDLGKHHFHLHGQDRNGKAVFRKKLGRKQMVEFFATCDVCTVVMEACAGAHHMARKLASFGHNVKLISPQFVRPFVKSNKNDFVDAEAICEAASRPAMRFVTPKTESQQTLSVLHRVRESLVRDRTRTINQMHGFLLEFGVSLPVGKTGIARLSELLNMHALPPRLIAVLERIHEHFKYLQAQIGEIDRELARQLADDDVGQRLMSIPGVGPITASALAAEMGDGAQYRCSRDFAASVGLVPRQYSTGGRFNLLGISRRGDRHLRSLLILCARSYLRGLEKRSGRLAEWARDDDAAPFKRRGVCAGQ

SEQ ID NO: 287907 - protein, 371 aa, unidentified
MADYREAFVGIDVAKLKNAIAVAESGREGEVRYFGEVDASYASMRRIIQRIAAKFDRVHFCYEAGPTGYGLHRLIQSLGHECMVVAPSLIPRKPGDRVKTNRRDALALARLLRAGELTAVWVPDEGHEAMRDLVRARAAAVETLRVHRQQISAFMLKHGRIYPRKKGWTMRYLCWLQEQQFDHPAHQIALQEMVEAVRVSKERVERLEKVIEEFVPNWSLAPVVRSLQTLRGVDLIVAVTFATEVGDVSRFESPRQLMGYLGLVPGERSTGETVRRGAITKAGNGRVRHMLVESAWTYRHPPKVGARKLYRLEQAPPKVREIAWKAQNRLTARYRMLAGRGKRTTVVCTAIARELTGFMWAVAREAQAIRS

SEQ ID NO: 287908 - protein, 356 aa, unidentified
MTSTIKYVGMDVHKQSISVAVRNAAGKIVMESVIETKANTVLQFFDGLRGEVRVTFEEGTWAAWLHDLLKPHVGKLVVCDPRRNALLLDGNQNDRVDARKLSDLLYMNKLKPVYHGDHGLRTLKELVRSYLTITRDLGRVMTRVKAIYRSWAIPCSGKQVYGSRHRAEWLGKINEPGVRLRAEFYYQQLDTLRSLRQTVRRELLAESKKHKAWKLLCRIPSIGPIRAAVLLGILQTPHRFRTKRQLWTYSGLGIEIHSSADHEVAQGQLRWKKKPVEIRGLNENCNHDLKNLFKGAAVVASTKPGAFEKFYAAVVAKGMRPEMARLTLARKIATIVLIVWKKGVSFDANHRKPQTA

SEQ ID NO: 287909 - protein, 309 aa, unidentified
MRHARTRYVGLDVHQESIAVAYAREERDAEVICLGTIGTRQCDIDTRVRTLTSKATHVVLVYDAGPCGYWLYRYLTKKQLRCWVVAPALVPKQAGDRVNTARRDATQRAQLRRSGDLTPVYVPAVEDEAIRDLSRAREEASRERQAAKSRLKAFLWRQEIRYEGRATWGPAHRRGLAEVVCPTPAQPMVFQAYVRAVSEPQERLQRLEAERREQVPAGRLHPVVQALQAMRGVQCTVAVTLIAALGDLTRVDHPRPLMRSLGLTPTEYSSGARRRHGPMTKAGHTFARRALIAGAWADRSPAQGSRQLP

SEQ ID NO: 287910 - protein, 371 aa, unidentified
MGQQRSEAFVGLDVAKLHNAVAVADAGRTGEIRYMGEIPNTPEAARKLVAKLAARYDELHFCYEAGPTGYGLHRCLTDMGQDCMVIAPSLMPRRPGDQVKTNRRDAVGLARLLRAGELTPVWVPDAQHEAMRDLVRAREAAVRDVRAKRQQVSAMLLRHGRVYPGKRTWTLQHRRWLADQGLGLRASDIALGEAVKAARDAEERLARVERALEEMLGGWSLAAVAQALQALRGIGLISAITIMAELGDLTRFETPRQLMAYVGLVPSERSTGDRVRRGGITRTGNGTVRRTLIEASWGYRHAARVGRDKLYVLDDLPKPVTDIAWKAQSRLCSRYRKLCASGKRSSVAATAVARELAAFIWAISREVPIAI

SEQ ID NO: 287911 - protein, 385 aa, unidentified
MIYIGIDISKYKHDCFIATETSVSFSFENNSSGFKELLEHFKPFNKSEMIIGLEATGHYGDNLKSFLSSHGFSFMEINPLLVKKFSDSKSLRKLKTDKKDAKLISEYMMTVDYKAYHHQSYHISALKSLTRERSKLISFRTAQYNMITKTLDIIFPEFNPFMKEQGYSDTSLYILSYFKSPDKIAKMTDLHYDKIRKKSMGKFSYPKFMKLKELAKETIGTSQDYHLDRLSTSISYVEKLNTDIKVIESRITELMKKYPTYFGSIKGIGILTEAIILAEYGNISLYDSPSQMVSYAGLDSTIKQSGTMSTTGKLVKRGSKYLRSALINITLILMVNNPLFYAYYHKKKQEGKHHRVAQVNLAKKLIRVIHHLETTKTYFDSSLLK

SEQ ID NO: 287912 - protein, 316 aa, unidentified
MNSKTQEEINIGIDTSQSQLDIYVRPIGDYFSVENSPEGARKAARKLRKYQPTRVLIEATGRLEMQFVCAAHKVGLPVVVCNAGQVRQFARSTGRLAKTDKLDAQDIAHFGEALHPPLTLLKPAKLREISDLITVRRQCLDMSTMQKNRLLRMPKSVQRPIQRILKAIQKEIERIDLKLDKLVDAIPQWRDQRDLLMSAKGVGKVVAYTLMSELPELGKLNRKEIASLVGVAPMNRDSGAYRGKRRITGGRSQVRTVLYISMWSAIQHDPKIKAMYERLVAAGKPKKVALVACMRKQLTILNTMMKNGTHWSEKLA

SEQ ID NO: 287913 - protein, 428 aa, unidentified
MNYNQNEKIAQITSHTLIIGVDIAKFKHVARAQDFRGLEFGKPLYFENSKSGFNHFLDWINKLIIQLDMEKAIVGMEPTGHYWLNLAHFLKEHKIKFVVVNPMHVKKSKELDDNSPTKNDVKDARVIAQLVKDGRYAEPNIPQGVYAELRVARKIRDLLSVDRQVVQGQIHNWLDRYFPEFLTVFKDWEGKAALQLLKLNLLPNELVKLSNEEILIHVRQVVKRGIGISKIKDLTGVAQVSIGIREGSNMAKLELSTLIEKYELITEKLEELESNIDKLLDQIPGVSQMIAIKGIGKDTIAGFLAEVGDLSNYTHPRQIIKLAGLSLKENTSGKHKGQTKITKRGRKSLRALLFRVAMPLVAKNSAFKALHEYYTKRPNNPLKKMQSLTAICNKVIRILFAIGKKQCEFSEERMLQDIPHMAILKIAA

SEQ ID NO: 287914 - protein, 355 aa, unidentified
MSRDIKYIGMDVHKEATVIAVVNANGNLVMESIVETKAGSLLQFIHGLRGELHVTWEEGTWAAWLYDLLKPQAQVLVCDPRRNALLKEGNKSDKVDARKLADLLRTGMLRPVYHGENGLRTLRELGRSYQTISQDLNRVMNRLKALYRGWGIACAGTQVYAPRYREEWLQKIEHAGVRRRAELLYQQLDGLQALRRTLRPELLAESRKHKATKLLRQIPCIGPIRAARLLALMQTPHRFRSKRQLWTYCGLGIETRDSAQYRFVRGQLQRAKKPQQIRGLNRNHNHEMKEIFKGAATRASCGVGPLRDFYVALLDKGMKAEMARLTLARKIAAIALTLWKKEERFDAEQLKTQAA

SEQ ID NO: 287915 - protein, 388 aa, unidentified
MVMIGLDPAKHSHAMAVLDSAERQLAALQVANDNDGYRAMLRLARRWPQRTWAVEGASGVGTQLAQRLLADCESVLDVPPKLSTRARIFDTGHGRKNDPTDARTIAVVGLRTAGLRQVQPDGDAVALKLMSERRRELVRTRTQTVNRLHQLLMELIPAGASKDLTASRAKTLLATARPRDVAGRTRRQLAADFIDDVAALDRKIKDIEKRLADAATATGTTLTDIVGIGPVTAAAILGEVGDVRRFASRHRFATYTGTAPTEISSGDIKRHQLSRAGNRRLNHALHMAALSNKRHDERGRSYYARKLAAGKGKKGALRCLKRRLSDAVYRTLVADAERKAAGPGGHSGAATKSSAAGRSPVASTSDKSLPGPAATEATPKVLVATAPA

SEQ ID NO: 287916 - protein, 419 aa, unidentified
MQDAHQTLSHFAGFDWAKDHHDVVIVDRDGRTVADFRFEHSAAGWRHWAETVRQWPALGVAVETTCGHAVDQLLDSGAAVYPVHPMNAKRYRERKTSAGNKTDRLDAWALADALRTDGHGWRQLALQDPIVAELRLLCRDEVALIEERTALVNQLQQALLEYYPTALEAFDDWTCPGAWAFVEAFPDATTLVKAGKRKWDKFLHTHRLFHPQTYEVRIAAFGKAGEWKIPRHVIEAKSRLALARCRQLRVLKQQLDDYRKRIEKLFASHPDSGTFGSLPGAGAKLAPRLLSEIGSDRDLFPDATSLQCLAGTAPVSYQSGQIHKVHFRRACNKHLRQAVHHFADLSRPQCAWASAYYDTLRKRGKSHACALRCLGQRWLKIIWKMWQGSTPYDGEHHLRNQLAHGSWVLAMMPATASTP

SEQ ID NO: 287917 - protein, 351 aa, unidentified
MTNSAKAIPVTIGLDIAKNFFQVHAVDGAGQVVLRRKLSRGEVLRFFETQPTTLVGIEACGTGHYWAREITALGHEVKLLPPTYVKAYVKRGKTDAADAEAICEAVSRPNMHFVPIKTPEQQAALMMHRSRDLLVGQRTALANALRGHLAELGIVAAKGLHRVADLLAELVGLENTKIPPLARSSLRCLASQIEAVEKQIDELEALIIEWHKGNAASQRLVKIPGVGPITASAVVATIGDASNFASARHLAAALGLTPRQNSSGGKARQGGISKAGNTYLRRLLYIGATSVIRSKRAREAGGWMAGLLERRPAKVVAIAMANKTARVIWAMLRRGEAYRAPKLPITATAMA

SEQ ID NO: 287918 - protein, 307 aa, unidentified
MTQNTYIAIDISKDSLDIRSDLFTGKIEYTSTGLTQLRKHLQRAEHPLVVCEATGGYERELLHMLWKHQLPVALINPRRIRAFAKSEGIKAKTDALDAAMILKFAEHKELRKTSAPSERQQALQELMDRRAQLTETIAREKNRLHRATKRTKTSIEKVIRFLERELKGLESTIKELINEDESMRTQRDLMLHVKGVGETTVWNILAYLSEITSLNRNQLVALAGVAPYNQDSGKSKGKRRIEGGRAKVRTCLYMAAQSAAVYNPHIKTYVDGLRARGKSYKMAIVAAMRKLLIYIQSILKNPQKALA

SEQ ID NO: 287919 - protein, 385 aa, unidentified
MTFEPSLSTFRPQNYQVFSGLDVDKGSIAVTFSDHNRLINSLRLPYSSAQLLNYVRKHFPQQQVAFVYEAGPTGFGLYDDLTAEGYPCLVVAPSMVPTAPGKRVKTNRLDSKKLSEGLRGGQLRSIHVPARPYRELRHLVQLRDTHVRQLSATKCRIKSLLLYEGIPYPDPKGRWSAAVIGALRALPCTEAVHFKLEHLIGTLYFHFNSAAVVQKQIRRVCQKDPELRQSIALLKSIPGIGWIVAAHLVARLGDWREIDNVRSIAGFLGLVSSEHSTGDKQNRGSITRTGDSRLRNKLIQSAWTTIKKDPELRAFYRSVYQRQPQKLAARKAIVAVARKLTTRIYAVLKQQRPFVLRPDIAIAPLTAEETAALQERLDTAQNEQP

SEQ ID NO: 287920 - protein, 313 aa, unidentified
MAKPVSQITLGIDVAKDELVIADWDTGEITTLINRPSEIQAWLGSLHGPVRMALEPTSHYHRVLADKAQAAGHQVYLVNPRQLAHYREAVGERHKSDPRDALLLARYLAHEAPKLRLYEPQSAAARELWTLLTRRATAVESCKRVRQSFLGTGISIQALRSEYRKVLKRIDRRMEALIDACGWQQSYQFCLSIPGIGPSNATALVAAFHRGAFSSQDAFIAYLGMDVRTRESGTYKGKRKLTKKGPSELRRLLYCAAIAGRSYEPFARYHQRQLDKGLPKIAANCILARKLARLAFVLMSRQENFKKEPLPID

SEQ ID NO: 287921 - protein, 362 aa, unidentified
MGEVSKDGHGMTIGVDLGDKWSRLCVLDEHGEVCEEGRIASTAHAMRKRFSIEAPSRIVIEVGTHSPWVQRLLEELGHEVITAHAQSVRLIYGGTSKDDRLDAERLARLGRVDPKLLHPIRHREGSVQADRAVIRSRYVMVGCRTKLINHARGIVKSMGGRLPTCSADCFPKRAREILPKELKPALRPVLETIAALTTRIRRFDRLIERLGAERYPETGVLRQVPGVGPVTSLSFVLTIEDPARFRRSRALGAYLGLSPKRSQSGDEDPELRITKAGDDDLRRLLVGSSQYILGPFGPDTDLRRWGLALAARGRKNAKKRAVVAVARKLAVLLHRLWVTAEVYEPLRDRVNKPDKIAQAVPA

SEQ ID NO: 287922 - protein, 386 aa, unidentified
MKTVAGLDVHKDSVYLCILRENGEKIERVYGVLTPQLDSMRDFMAENKVSEVAMESTSVYWIPIWRVLVDSFELKLVNPYFIKQLPGRKSDVKDAQWIAECVMKELIRGSFIPSPLVQRLRLYDRRIFEINAELVRKYSKIDAILQRCNIRLSNYVSNTDCKSYKAVVKQISEGVTSPQELLRHVHKRIINKHGEDTILAALTGVVSDSEIDMLAQYVAESAILEDNKNKCIEKMREICNSEFKEQMKNLQEIPGVSERSALTVLAEIGPDVNAFPSAKHLVSWCGFNPRNDESNKKIKSNKITHGNRFIRIASVQCAWAASRTKDCYFSKFYAFHTQVRKKFKLKVVVAVARKVLVCIWHILKFNVPYKDFEPQKSVTKDCTQFA

SEQ ID NO: 287923 - protein, 449 aa, unidentified
MKNQARMIKSSDGNKLAIVNPNAAGIDIADTEMQVCVPEDRDGDNNRRFGSFTKDLNTIVEWLIGCNITTVAMEATGVYYLSLFLKLQDAGIEVLLANPADVKNLSGKKTDAADAEWLMVLHRYGLLSPCYQPGNAARQIRNLTRQRSNLIRMADKEVLYMQKAMEQMNIKLSTVLSDITGLSGRRIITAILQGQRNIYELAALAEPNCKASQEDIALSLEGTWDVDLLFMLKQSLAAYDFFLSQVAECDMEIEQLLSLYGAQIEASDAELIRCQRKNKRSKNAPKMDIENFAYQLWGVNVFEIPGLKDTAVMHLIGELGHDFVDKFESAEKFSRWCNLTPNNKISGGKILSSKIMKRKNPVGQIFRTAVAPLARDKGEMGNYYRRIKSRSGALQANVATAHKMAKIFYTMIKTKAAYNASKVGLGERELAERKIAKLERILMKLKNVS

SEQ ID NO: 287924 - protein, 357 aa, unidentified
MKKLFIGIDFSKEKLDATIILACGMNEIGSREYGCFPNNTTGYRKLCNWVKTNAWNTIAEEWLFCGEDTGSCSIGLSKWLYGKGYDIWIENAYAIKHSSGIQRVKNDKADSAIIAEYAWRQQDKVVPFEPLNESLAQLREIFLYRHKLVGQRVAMELRKEDKSQSNKSKAISFINRKSKHLIAEINKTIAECDKAIDSIIEADEELKENYAIITSIKGVARQNATCMLVYTNNFKKFGYDPRKIACYYGVAPFGKQSGTSVNTPAHTSHFANKLIKSLLGQAAHIAKIYNPEIRDYYQRLISKGKKPQVALNNVKNKLIRIIVALVRKKVPYDQNTYKYYEEREVMKEKKNEKLIYC

SEQ ID NO: 287925 - protein, 338 aa, unidentified
MDILRQNVGIDVAKDSFVATLTVLLKGQIVDHIRTRTFDNSVKGFTELLRWVNKLKHQDIPVHFTMEATGVYYESLAYYLWDRESIIHVLLPNKAKKFGESLNIKSKTDKIDSRILGQMGVERALSRWTLSSKIYRKLKTLTRERQQLIKERTRCKNQLHAETESAEPLRTTLSRCRNLIKYLNKQIVSIENEIKTTVKKDDFVHEKIEKITTTPGISLITAVVVIAETNGFQNFSSIKQLTSFVGYDVQIKESGKWKGKAKISKKGNSHIRHALFMPSLSVLTHSNTYNVFYNRLNEKKQNGLIANTAVQRKILGLMYTLWKNDTEYIENYQQNKVI

SEQ ID NO: 287926 - protein, 353 aa, unidentified
MEKVSKLDFTGQHIYIGLDVHKKSWSVSIRTPQFEHKTFTQPPEVEKLTNYLEKTFPKGTYHTVYEAGFSGFWLHDRLKEKGVDCMVVNPADVPTKDKERTGKTDRIDCRKLARGLCNGELKGIYVPSRKQVEDRSLVRTRQSMVRKQTRCKNQIKSILFFYGIVIPEESRWSKQFLNWIESIPMERASGDFALKTHLEELKHLRQLIANLNRAILSLSRTEEYHERVLLLKSIPGISTLTAMILLTEIGDILRFSSLDKLACYAGMVPDIRSSGETEYFNGITYRRNPALRALLIESAWIAARKDPALMMVFNNLSLRMKKTQAIVHIARKLLNRIRFVLKNRQQYVLATVN

SEQ ID NO: 287927 - protein, 411 aa, unidentified
MEVVYEHCCGLDIHKKTVVACVVVSGSGKQPHKEIRTFNTMTADLLELADWLTAQRVTHVALESTGVYWKPAWNVLESSFSLLLVNARHIKQVPGRKTDVKDCEWIADLLRHGLLRASFVPDRPQRELRELTRYRTTLVRERSVERSRIQKTLEGAGIKLGDVASDVLGASGRQMLEALVRGVTDTSLVADMAKGSLRGKRPQLERALTGEFGAHQRFLVGQQLAHLDGLDVLIDQLSQEIGERLRPVQDKIERLDAITGVGLRTAQVFLAEIGTDVKRFPTAAHLASWAAMCPGNNESAGKRKSGRTGKGNQWLRTALVEAAHAVSHTKDTYLYSQFHHVAARRGKKRALVAVGHSILRIIWHLLEHDCEYVDLGSRYLEERDRQQIQRRLVRRLEDFGYKVKLEPASAA

SEQ ID NO: 287928 - protein, 481 aa, unidentified
MSRQKKHPEKPAEEKTRAGKGKRGGRRKGMCLEDRPILEPNAAGIDIGAREIFVAVPPDRDEHPVRVFSTFTEDLQKMAQWLVSCGITTVAMESTGVYWIPPYNELEQHGVKPCLVDARGMKNVPGRRTDWHECQWLQFLHSVGLLRAAFRPADDVCAVRSLMRHRAGLVEMTSQHIQHMHKALTQMNVQIQHVISDITGLTGLAIVDAILEGQRDPATLAKLRDPHIKASEETIRKSLEGNWRPEHLFTLKQSRKSYQHYQGQIAACDEEIEKLLVAFAARVDPVERPLPPDRKKKQSGRKKKNVNPKTGFDVRTESYKLFGVDLTQIPGLMAMILTLFSEVGRDMSRWPTAAHFVSWLGLCPDNDISGGRVLWRGLRKVQNRAGHLFRLAAFALHHDQTPLGDYLRRMKSKMEAPAAITATAHKIAIIFYTMVKKQVEYDTSIWAQRDAERDKRIEAKLKRQAARRGYRLVPIEEKPAA

SEQ ID NO: 287929 - protein, 419 aa, unidentified
MTASMTQHFVAYVGIDWADTKHDICVQAGDGNHREFDCIPHKVDRIDEWAKALHQRLGGPIAVAVELAKGPIVSALLKYDFLVLFPINPSTLARYRLAFKPSRAKDDPSDAELALDMLLRHPEQFTALKPQSVAMRSLLSLIEQRRDLVNDKTRFTNRLSSTLKQYYPQALEWFEQRDTLLFCDFLARWPTLLSAKRARKTTLEAFFYSHNGRRAALIQTRVASIRAASALTDDAGIIEPCRLHVLALVEQLRTVLMVIDRFDTEIERVASALPDYALFHSLPGAGQHLAPRLLAAFGEQRERFHGADELQKYSGIAPVTERSGKKSWVHWRWQCPTFLRQTFVEWAGQTINKSFWAGAYYRQQRAKGSSYQAAVRALAFKWIRILYRCWQTRTPYDETTYLNALRKRGSPLLKTLDLG

SEQ ID NO: 287930 - protein, 416 aa, unidentified
MDTMYERCCGLDIHKKTIEACFRSGKKKTHMSFGTTSAELRKLTMWLVENDCQSVAMESTGSYWKPIFNILELSGTDMKIIVVNARHMKNVPGRKTDVNDAEWIAELLQYGLLRPSFIPDREQRELRELSRYRKSLVGERAREINRLQKMLEGGNIKLTSVVSEVTGYSSRRLLDRLLRSYEPMTEEVISELVHTSLVGKSKELEIALDGLLSELQKELLIKVLDHIDDMSRRIADLDDFCRKQMKKYEDALDKLDEIPGIARRTAETILIETGLDMSRFPTAKHLARWAGLAPGNNESAGKRSSGRTTKGNPTLKSTLIQSAKVAARKKNSFFKARYQKIAAKRGANRASVAVAHSMLIAIYHILKSGERFKDLGEDYYNQFNKEKKKKYYLKKLTKLGVNLKEATLSISIQAAT

SEQ ID NO: 287931 - protein, 370 aa, unidentified
MKYVGIDLHTNRFTCCYLYDEQGKKQTATFNLDKEGLRDFYSSIDKDTYVLVEATINTFAFVSLFKDLVKEVIVANTYQLKSVGIPGKKTDKIDAFKLAEKLKAQVVSGVQQIVPVVVPPKEIRDLRALFATYGTLRKEIGRTKNRIHSLLKENLFPFTKEYIFGKKTRKRIRVISDDTVLSFQINLLMDTLEHLEDAFDKLVIEIKKAGSIFMSEIEVLTSMSGISVITALAVISDVFDVTRFKNSKHFASYLRSVPRVESSNEKTIIKSTTKAGRKLSIVLLSQSLNHFRDNNKTLCNWYERAKVCKKKGVVRMALCRRVITEIYQMMKKGEYHYFRNQILHEKKLSEYRRFLEKENVIFDKNTAIAA

SEQ ID NO: 287932 - protein, 462 aa, unidentified
MSKKRTYGSADVEHVDVAALVAMLTVGCIVAVDVAKTKFVAAIAKATGEVLKIVRFSHPVQTLTFLKLVEAIRDAKLSPRIVMESTGTYGDALRYQCHLRGVAIEMILPKHTHDFAEVVDGVPSTHDAKAAVTLVQLALIKPGRRWTPDEDGRRDLRALLDQRSLQTKELDVYHGHLEAYLARHWPELLSLIDVREQRSWMTLLKAYPGPHRVAEAGSEAAKLLHTASHGRFSKEHIKAIVDAAGTTFGVPMRQSEEAMLRFLVENMEEHTKGIDALDDELAQRVKEDDVASRLAAVVGPACAASIVSRLGSPTLFASAGALEKAMGLNLKVRSSGEKQGQLHITKRGPAQVRQLLYFAVLRMLQADPIVAAWCKARKSYDGESGKRKAIVAVMRKLVRALWHVAKGPRFDASKLFDVRRLDLTSASAESKVSPPTSVPQLAPTRAPSRSRRRAKDISQQVA

SEQ ID NO: 287933 - protein, 458 aa, unidentified
MNLRLGVDVACRAAHQASCTDDTGKFLWAGHRFRTDPGDLDVLWAKLPAGAREVTVIMEPTRNAWVPLAAWFRRHGATVVMVPPEQSADLRDYYNKHAKSDRLDSKVLARLPLLHPEGLTAETGIGPGDALKRAVKIRSGLVHRRTTSMQRLDCLLELMGPAWVGAIGSDMCKTAFRLLSRYANPRTVRQLGKRRLTDFLHRSSRGAWAEERATEIIAAATTTIELWGDEFDFDELAADIATEARLALSLCEEISMMDKRIGALYAKADPAGIVRSAPGVGVVGAPQIHGRLGDAKRFRNLAGVRSFSGLAPRRDDSGHTATAGGPTKAGDACLREALFTSADHARKIDPTLAQRYHRLMTVEGKHHNSALCHIATVLLTRIAACLRADQPYQLCDIDGTPITETEGRVIVADRYTVPKATRTARRAATTTSRQPRRNERAEKGVAERSEAPPVPTPA

SEQ ID NO: 287934 - protein, 441 aa, unidentified
MTRLQQVVSTGTQVRVRLDFVYKHPEEVNPMSQMLIGIDVSLRSHHVQFMAGDGRKLASFSVTNDRHGADTLIRRMLDTAAEVKCQTLRIGMEATSNLGWHLAHYLKDQLAPYEPNVQAQVYVLNARKVARFKKGYDTLPKTDRIDAWVIADHLRFGRLPHDMNEVVQYQALQRLTRTRFHLIHSIKREKAYFLNQVFLKFSGMRIDNPFSDTFGATSLAVIQELDPERIAEMPMEELIEFLQEKGKKRFANPQEIAELLKKLARSSYRLDKAMSDPVNISLSVTLSVIKNMEAEVKKLDKQIDKIMKGFQQTLTSVKGIGAVYAAGILAEIGDISRFDDHNALAKFAGLVWNKYQSGDFEAEDTERVMTGNKYLRYYLVEAADKVRKYDSEYEAFYHKKFNEVTKHQHKRALVLTARKLVRLVFMLLKTKKLYTPPERRN

SEQ ID NO: 287935 - protein, 485 aa, unidentified
MSALEASSLGCCATSLAIDEHSDEYGKGEAVRLWCGIDWAENHHDVSVVDETGSQRVRVRIEDTAAGFARLMRLLAEQNAISEQPITVAIETAKGLLPAALRAAGVPLIAINPLAVSRYRDRHSPSRAKSDAGDAFVLANILRTDPHAHRPLPVDSELAQSIHVLARAHQDAIWDRMQIANKLRSVLREYYPTFLGAFPELASREARAVLHLAPAPAQGQLVRRPSLTAALRRAGRSRGIPAAVDQIHTALRQDQLRQPPRVEAAMTHRATALLHALDTAVANVARLEAVLAEAFEQHPDAEIITSFPGLSTVLGARILAEIGDDRTRFASARGLKAFAGTAPITRASGMKTLVTRRVVRNKRLGQAAYLWALPMIAHSPGAHAHFTDRRDRGDSYSAAARNLTNRALGMLHHCLQTRQHYDENKAFPNRHDQPVTSDKPSAGKAYQEAEAQPTPTARTPTCPRPAVSIAPPASQAHRKIEAHPA

SEQ ID NO: 287936 - protein, 387 aa, unidentified
MDGALCRGVERSGTPRHNARGVRSIVARPTKAVTERDRRRVHGLSPNSRLSGRRRPAADTSSHSQDREIAMTTPSLCVGIDVAKDKLDVFLDSTGELFTIENQPTAIATLAKKLLTLSPQVIVIEHSGGYERRLAIDLMDAGLPVALVNPRQTRDFARATNRFAKNDPLDARLLADFGKACQPQLAQRPSENRLHLDELVNRRRQLVAFRVAELTRLEQARGKDIRRSIQSLLRQFDRMIDKLDRQIAQCIENDDDWRGKAQQLRSVTGVGPVVASTLLAELPELGQANRQEIASLAGLAPFDRESGRWKGKRRCFGGRASVRKVLYMAAVTALRHNPVIAALHQRLTAQGKPFKVAIVACMRKLLVILNALLKNGQSWQPKIATNP

SEQ ID NO: 287937 - protein, 322 aa, unidentified
MTPPAIFVGIDVSKDRFDVAQRPGGESWSVPNVEAGIEGLARSLARLAPALVLLEASGGLETPLVTALLEVHLPTVVINPRQVRDFARATGQLAKTDTIDAAVLAQFGETIKPEVRPLPDGATRELDALVTRRRQLSEMLTAETNRFLRTGPKRVRHDIQVHIRWLRRQLVAIEKDIDDFIKASPAWREKDDLLRGAKGVGPVLSATLLGELPELGRLSRREIAKLVGVAPLNRDSGRFQGQRKIWGGRASVRACLYMPTLVATRYNPMIRPLYERLLAAGKPKKLALTACMRKLLTILNAAVRDGEFRKIVPLTLAIQDSC

SEQ ID NO: 287938 - protein, 347 aa, unidentified
MDHIGIDVHKKESQICTLAEGGEVIERRVRTEPRRFAEVLGERPCARILLESSTESEWVARCLETLGHHVVVADPNFAPMYATRTRKVKTDRRDARALAEACLLGAYRPAHRLSDAQRHVRARLTVRDTLVRTRTRYISLIRALLRQHGWQVPSGSAEGFPRRVLALPLPGRLRSEVAPLLAVMRHLQHQLAYSDERIIALTQTDERVRRVQSVPNVGPVTAAAFVAAIDEVQRFRRAHEVEAYLGLVPRELSSGETQRRGRITKAGSSRVRWLLIQAAVSMLRLHDARTADLRDWATRIAARRGKGIAVVALARRLAGILFALLRDGTVYEPRRGAPHPVSQPVAA

SEQ ID NO: 287939 - protein, 465 aa, unidentified
MGKGSGSGMTRGDRRRNARRERLRSMVPCDGAVIGIDLGEDKQAIAVVDHDVRVVARKTVRVKAFRLGEGLDWAVAQARAGGFSRVAVACEPTGPRWLQVQRLCGERGLPLVCIQPLVSHIAREQQDYTTHKTDESDCVMIARLAFELHCYVPEELDEMWAELRHLGRRRGQLITAGTASVLRVRDFLSVAWPVVTETCAQPFVSVTWLAALQVVTGRCGGDPARLAVMGLEEFTAQVRAAMGGWGGQRPCRAIAGRVFAALTDTEGVVVSCRRGLLRRVADELGDLARTRAQLRAAEADMVAVLAGLGLSRLAGIPALSAVGAAAILAETGDPHRYNSSSSLVKHAGLAPAENASGGFAGQPRISRRGRPGLRLTVWRAVWPMLRYNPVLAAKYQAMATGGAAPESTGTRPGSAAAAAARARRARARVACAASLLRWIYSMTVHGTSWDPAEAGRGQHPRAEAA

SEQ ID NO: 287940 - protein, 348 aa, unidentified
MLIIGCDYHPGFQQIAFVDTDTGEAAERRLTHREEAEQFYRTLEARRVRIGMEASGHGRWFERLLNELQFELWIGDAAEIRTKRVRKQKTDRQDAQLLLKLLMEDRFPRIWVPDAENRDLRQLLWHRHRLVQMRTRIMNQLHVVALNEGVRRKRALWRPAGRSELESLVLAPWALRRRRDLLDLFDQLTPKIHDLTRALEEEVEKRPIARRLMTHPGVGPLTALAFELVIGTPERFHCGKQIASYVGLVPSEESSGDRRRLGHISKQGNALLRFLLVEAAQVTVRSQPQWRSKFFHLAMRRGRKIAKVAMARKLAVHLYWMWRQGLDYGQFEKLGSHAGEPGNRHGVQ

SEQ ID NO: 287941 - protein, 369 aa, unidentified
MGNCVSQKFERQHFLFIGMDVHKDKHFAIATNCFGQNLLQLEIANSKRDFRHLVSTVKQVSKKNELNPIFGLEDSYGYGLHLAKYLYQQGMKVKMVAPVLVDRERKYETHPEKSDSLDALGVAKVLIQRIDSLPNYSLTKADELAKEIKELVLDRGFIVKERTRIKNQLHRLLHNAYSSEYQKKFKNPFALKALKYWLKHPVPKANKSFILKNQIKRKVCRLLDIREELKELETDLSVLIKQTNQLIVTMPGCGTVLAAQVLAEVRNIDRFHSSAALAKYAGLCPREKSSGKTFRHVKTKSGNRRLNMAIHRIALSQISRIGNQTAKAYFQRKLSEGKTKVQALCCLKRRLVDIIYLMLKHREEYRYVN

SEQ ID NO: 287942 - protein, 346 aa, unidentified
MEHYAGIDVSLEASSVCVVDAQGRIVREAKVASEPGALIAWFAALGLELGRVGLEAGPLSQWVYAGLREAGLPAELIETRHVRAAFATMPVKTDKKDARGIAQLMRLGWFRPVHCKSMAAQETRAMLTGRRLLQSKLHDVEMSLRGILRGFGLKVGKTTAREFEGRIRELAEGHPTLEAVTGALLGARAVLKREFAALDRKVRAMARRDARARLLMTTPAVGAIVALTYVSAIDDPTRFRSSRGVGAHFGLTPRRYQSGVTDVAGRISKCGDAEVRCALFEAAHVMLTRPTRASKLKTWAHAVARRAGMRKAKVALARRLAVILHRMLAEGAAFNPHLGGPIGTIA

SEQ ID NO: 287943 - protein, 409 aa, unidentified
MEIVHPRCAGLDVHKKSVYGCVICCEANGEKRQEKRNFGTMTRDLLSLADWLKQHQITHVVMEATGVYWRPIWAILEGQFELMLVNPHHVKAIPGRKTDAKDCEWIAELLQHGLLRGSFVPPTEIQDLRDLTRYRVELTQAQARVANRIQKLLEQANIKLASVVSDTLGVSGQQMLDAIIAGQQDPEQLADLARKRLRGKIPELRLALEGRVRDHHRFMLKEYLEEWRALGERIQRVEEEIERRIVPFEEVVALWESIPGMNRRTAYNLVAEIGVNMAQFPSAQHAASWAGLCPGNNESAGKRISGKTRDGNRWLRRTLCQGAWAVTRVKDCYLAAQFRRIAARRGMKRAVMAVAHSMLIIAYTMLKTGRNYQDLGGSYLDQINRDQLQRYFTKRLVRLGLTVTVAPAV

SEQ ID NO: 287944 - protein, 413 aa, unidentified
MKRVFERIFERVAGLDVHKAQITAAVRVPDGDGGRLQDVAEFRTTVQGLLALGDWLKAHGVTHVAMEATGVYWKPPWAILEDEFECLLVNARHVKQVPGRKTDVSDAAWLAQLLEAGLLRASLVPPKPIRALRNLTRYRKTQIEERQREANRLHKILEDTGIKLDCVASDVLGASGRAMLDALCHGTTDATVLAELAKGRLRAKIPALQEALEGRFDALHALIVSSILAHLDFLDEAIDRLSDAIAEQLRPFAKAVELLCTIPGVQARTAQVIIAEIGTDMRVFPTAKHLASWAGQCPGNDRSAGKRRSGRTRKGSRWLGIALTEAALAATRTKNTYLAAQYQRLRPRCGHKRALGAVKHSILTAVWHMLTTGELYRDPGGNYFTRDPQRQITRLVSQLERLGQRVTLEAAAA

SEQ ID NO: 287945 - protein, 339 aa, unidentified
MQVTTIGLDLAKNVFQVHGITADGTVAFNRSLRRAQMFTFFQKLEPCLIGMEACGSSHYWARELSKLGHVVKLIAPVYVKPYVKRGKSDAADAEAICEAVTRPTMRFVEVKSPEQQAILSIHRARDLIVRQRTQTINMLRGLLAEFGIIFAQGVGHAVRFAKRAHEGYMPDLPQAACDVIIDLSEQLLTLHARVNWYGRRMAAAAKSEPRIALLETIPGIGPITASAIVATVGSGEQFRSGRDLSAWLGLTPINKSTGGKERLGRISKMGDRYIRRLMVVGMTSRMKQIRENPERFDPWFADILQRKPAKLAAIAMANKTARIVWAVLSRNEPYAARTV

SEQ ID NO: 287946 - protein, 344 aa, unidentified
MNSTTIAVDVAKSVFEVAVSEQPGQVRERQRLSRERFRRFLTERPAATVLMEACGSAHHWARHAQAQGHRAVLVPPHVVRPYVLRNKTDRTDAKGLLEAFRNEDVHPVPVKSETQQALAALHRLRSTWLATRTARINTVRGVLREFGLILPLGAHHVVPHVRTLLEEADSGVPGLLRPALAAAVEEIRAIEARMRAVEQQLEAGAAQTLSVRQLRTIPGIGLLTATALVAAVGDVQRFPSARHFASYLGLTPREDSTGPRRRLGAISKRGDTYLRMLLIHGARAVLCHAKTKTAPPPDRLRAWALQVERLRGHNKAAVALANKLARIVWAVWRHSKDYVGTPAV

SEQ ID NO: 287947 - protein, 366 aa, unidentified
MGWTPPRRPWCARVMVLVTTEQEASVSEVSTIGLDLAKRVFQAHGADASGKVVFRKRLRREQVLAFFAGRPACVVAMEACSSAHYWAREIGELGHTVRLIPPAYVKPFVKRQKNDTTDAEAICEAAQRPTMRFVSVKSKAAQANAVVFRVRDLLVRQRTQAINALRGHLGEYGVVVAKGPSHVAKLIAHVEDPAADLPEAARTVLRALTASLQFLSERIDLLDREVARRAREDKEVRRLTTIPGVGPVIATALAALAPPADAFRRGRDFAAWVGLTPSQHSSGGKQKLGATSKMGERTLRRLLIIGASSVVQKAIKHGTRSGSWLGRMLARKPRMLVIVALANKMARTVWALQATGEIYRAPVVAA

SEQ ID NO: 287948 - protein, 412 aa, unidentified
METIVERPAALDVHKAQVTACVRVPGERGRREQHVAEFPTTVRGLLALRDWLAGHGVQQVVMEASGVYWKPPWAILEDEFDCMLVNARHVKQVPGRKTDVSDAAWLCQLAEAGLLKASFVPPKPIRQLRNLTRYRKTQIQERAREVNRLHKALEDAGIKLDCVAADILGKSGRDMLDALVAGTTDPEILAELARRQMRKKIPALREALEGHFDAHHRLWIGAILRHIDFLDEQIEQLTGMIEEQIRPFDPAVDLLCTITGIQRRGAECIIGEIGTDMTCFASARHLASWAGQCPGNDKSAGKRRSGKTRNGSKWLDFALEEAAMAAIRVKGHYLEAQYRRLKPRRGHKRALGAVKHSILNAIWHMLSTGETYRDLGGDFFTNRDPERQTRRLVAQLERLGHRVTLTEGAAAA

SEQ ID NO: 287949 - protein, 369 aa, unidentified
MPHVTSIGLDVHARSVAAAAFNPFTGEVVHRDFGTDAAEIAEWALGFEEPRACYESGPTGFHMARELRALGLDCAVAAVSKMQRPAADARRKNDRRDAEFIARMLATHNIVEVPLPDMAVEAARDLDRALDDATRELRRSRQRLNMFLIRLGHVWDERNADGTRKGSWTRAHWRWISGIRLEGPQRDVLEYYVTAARCAESDRRQLEKKVLALARTDRWRPAVEALSCIKGIDTLTAFRLAAEAGSFSRFRSAPAFASWCGLTPSEHSSGESERRGGITKAGNALARTALIESAWHYSTCSPRPKAPAPGTDVPPAIRSRADDCTARLHRRREALAAAGKSACKANAAVARELACWVWEIGCRSEGTVL

SEQ ID NO: 287950 - protein, 339 aa, unidentified
MTVYCGVDFHARQQTIAYCNTQDGEIKFLQLKHDDREALRCFYTQFQEPVIVGLEAGGYSDWFERFLEELNIEAYFGNPTEIRRRARSRQKNDWRDAELLLDLLMKDEFPRVFRQSPESRAVLAQLRYRHKTVQLRTQITNSLHALAIREGLSLRSTLLTKAGRVKLKALSLTTTQVKQRDEWLELIDQLTENIKRIEQELEKQSAQDERVKCVRTHPGIGLLTGLALVHTLAPVTRFPNARKVTAYVGLEPREFSSDSKQRWGGISKAGSPLLRFLLVEAGQHAARGDDELKNTYQHLSARRGRPKAKVAVARKLLVRAYILLRDEIDYATYLRRRSQ

SEQ ID NO: 287951 - protein, 366 aa, unidentified
MKKTSTVRVNRNLIFKGHKLTIGVDLGDHWSCYCVLDEAGKIILEQKVATTPEAMKQTFSKIPQGLIAMETGTHSPWVSRLLTELGHKVIVAHAQKVQLITKSNRKDDRHDARTLARLARIDAELLGPVRHRSAQAQIHLTVIRARAELVRARTALVNAARGLVKSYGQRLPKCGTRQVSRELGAGLHAELREVLEPLFKEIESLNERIQEYDARMEKIAKASYPQVELLKQVKGVGTQIALTYVLTLDDPHRFPKSREVGSFLGLRPGRRDSGESQPQMRISKEGDRYLRTMLVQGAHYILGPFGADSDLRRWGLKLAGRGGKNAKKRAVVAVARKLAVLLHRLWVSGEVYEPLRNSQKAMRVAA

SEQ ID NO: 287952 - protein, 428 aa, unidentified
MENMDINRIKEFRQFKKEIRGSEQHLIVGIDIAKDKHHAFLGTANGHTVQKGLIVENNLSGFSYLMGRVQFHMDRDGFEAMVFGLEPTSVYHKPLAEFLIEQGCLVVYATNEAIKKNRSLLDGRWDKNDTKCSANVADLISQGKCQYYDLPDIKLRDLRNLLLFRKRLRKQLHSSKMRIRNNLVAQYFPELDKFWKTREEENLAIVRWCLAPAKIAAMKFEDFCCLVTSRNRGDRQKQRLFKIWDSASFSIGCFAGNGLELEAKLLVDTVKLIQAQIVEVDEATEAICEQFEEYQYLLSIPGFGPYVSAVVLAAIGNAHRFENTSQILRLAGFDLSAIRSGKKSATAVPVISKKGKADLRYAVYQAALVASSLTTHFAHYYHRLLDGRQREKGIRTKMRVKLAAKLLVIAWTLMKKKESFNPDYIISQ

SEQ ID NO: 287953 - protein, 321 aa, unidentified
MNKNTEFFGIDISKDVFDVFSLEMGHNQFSNNEKGFKQLIKKLSKDSLVVMEATGYYHYCLAQYLYEKGYAVSVVNPLSVKRFIQMKLSKVKTDKSDAKSICEYARNNEVPLYTAKDKSQAECLQLLRLMDTYVKHRTAMKNKLDGEKVLGIPSKAVYRSLSRTVKHLNKELVLLEARLIALVKEEQQEQLRLLKTIPGIGEKAAILLVVFTDGFSKFENSKQLCCYAGITPTIRQSGSSVRGRSRISKIGNKKLRNQLFLSSFTACQYNKACRELYERIVDQGKSKKLALLAVCNKLLKQSFAIAKSRMPYNENFVSKLV

SEQ ID NO: 287954 - protein, 338 aa, unidentified
MKFKRIAIDTSKHVFTLHGVDEQERPVLRRELKRGQVEAFFSKLLETEVVLEACGGSHHWARVLQAMGHRVRLIPPQYVKPFLKRGKNDRNDAEAINEAAARPSMRAVVVKSVDQQAKAIIVKHREMLVGQRTQASNALRGHAMEFGVVVAKGAANVAPLLAVLAADMAIPAAAREMFVQMGAHIEALESRIAGLDAELLAMHKAHPVSRLLAEVPGVGPMIAATMALTVEPENFASGRHFAAWLGLTPREHSTGGKQRLGKISKAGNERLRSLLVVGAMSVIRCAKPGSKSASPWLLQLLERKPRKLAAVALANKMARIIWAMMARGEAYRRQPIAA

SEQ ID NO: 287955 - protein, 345 aa, unidentified
MPIVGGLDIHRKQITFDCVDLDTGELQRGKIAPADRAHLADWLARQMAGRGEVHLAFEGCTGWRYVAEELARAGLSGHLAEPADTAALRGRRRHPKTDRADSRHLRQLLLDERLPECWISPAHILEYRALLETYHDLRAEHTAWVQRIHAVLFHQGARRLSATLRTDAGQAELAAIAATELSAAGQRQIAVALAMLSVSETQLATLRRDLVIIAGHLAGAKALTACLYGVGPITGLALTCWLGGAGRFSSARKAVRFAGLDVTVHASDGKRSPGHLSRQGPEVLRWCVYEAGKTHARASAPDHTYYAQTQQRLDGKRAALSQARKIVRQACHILTELGDDALITT

SEQ ID NO: 287956 - protein, 408 aa, unidentified
MTEILCGIDWASDHHDVALIDPAGTRLARRRISDDAAGLGELVSLFAAQGGGPGTVKIAIETERGLLVASLRAAGYEIYPVNPKSVDRYRDRHHLARGKSDAADAMVLAHILRTDAHLHRPLPADSGAARAIEVLARAHQDLVWSRQHEVNRLRSLLAGYYPAALAAFPDLATRTALAVLAAAPTPAQAAQLGLDDLLDLLESAGRGRRRSEAQRLAAVFAAPQMSQPAEVEAAMGAAAAAAAGTITAMNTGLAALQQQIGQHFRQHPDAAIYHSMPALGSILSARVLGEFGDDPTRWPDPASRRAYAGSAPITRASGRKRLVLARYIRNQRLYDAVRWRAFAALSVSPGARAYYDQRRAAGDGHEAALRRLASKLIGQLHHCLTHRITYDEATAWPQPEHQAPAQAA

SEQ ID NO: 287957 - protein, 348 aa, unidentified
MSQSNQYVGLDVSLKETSICVIDDADKIVWRGRVDSTPKAIASAVKQHAPHAVRIGLESGQLSSWLFHELKEAGLPVICVDARHAKAALSLKVNKTDANDALGLAQIMRVGWYREVTVKGLDCQAVRALLVARAQIVSQITTLKNCGRGILKTFGRVLPKGLRSQFPARVRAAIDGHPVLGAIIEPTLQVLEAARAQLLVYDKAVIQRARSDDTARQLMSAPGVGTVVALAYMTGVEDPARFKRSSSVAAYFGMTPRRYQSGEVDYAGRISRCGDGMVRGLLFEAAKVLLSRSARPSALKTWGEALGKRIGAKKATMAVARKLAVILHRMWTTGTTFQWNAEAGSPAA

SEQ ID NO: 287958 - protein, 315 aa, unidentified
MNQSTDSVKFLGVDVAKDTLQLFSRTLKVPAQIENTPKAIAAWLKALGRHHSQLHIACESTGGYENALLRACWKVGVRVSRLNPARVRDFARCRGLLAKTDAIDAEAIAEFASTFPPQPTPEPSAQQVLLNELVARREDLKTQRAAESNRSRDIQDKSLCRMLEKHLKFLDAQIKQIDQLIEDTISQDQEMSRKRDILVRTKGVGKTSAAILLSCLPELGTISGAAISALAGVAPFNRDSGTLRGKRCIRAGRATARKALYMCALVGSRTNSILKEIYQRLTSKGKPPKVALTALMRKLVVHLNSSLKTLQSTTA

SEQ ID NO: 287959 - protein, 325 aa, unidentified
MFQLGIDVSKKTLDLCLLREGVKGSVKTRKLQNDINAVNAVIAWLSKQHCKPEDVHIIMEATGVYHESLAYGLHKAGGRISLANPHRAREFARGMGMLTKNDRVDAYMLACYGALKAPEPWLPPPEEVRHLSALLRRRDALVADSTREKNRLEKYLATDTPSVIAESVEAMIGQLNAEIKRLDRLIRSHLNQHPELKKDFDLLTSIKSVGYQLGLNMLVILRSHDFATAEQAAAFLGVVPVEKYSGTSVRGCPKLSKIGPPEIRAKLYLASLCGLRFNPLMKAMYERLCLRGKGKMCAIGALMRKLVHWCYGVLKTHGLFVFICA

SEQ ID NO: 287960 - protein, 369 aa, unidentified
MTESSDYESVQVFIGVDVGKDTHHAVAINRSGKRLFDKALPNDENKLRSLISDLKQHGQILLVVDQPATIGALPVAVARSEGVLVGYLPGLAMRRIADLHVGEAKTDARDAAIIAEAARTLPHALRTLKLADEQIAELSMLCGFDDDLAAQTTQASNRIRGLLNQIHPALERVLGPCLDHPAVLELLQRYPSPEKLASLSEKKLAAQLSKLAPRLGKSLAADITRALTEQTVVVPGTNAAIVVLPRLALQLITLRKQRDEVALEVEQRVLVHPLYPVLTSMPGFGVRTAARLLTEVACRAFASAAHLAAYAGLAPVTRRSGSSIRGEHLSRRGNKTLKGALFLSAFAALRDPISKAYYTRKINQGKRHN

SEQ ID NO: 287961 - protein, 356 aa, unidentified
MSREVKYIGLDVHKEAIVIAVLNTKGHQVMESIVETKASSILQFIHGLQGELHVTWEEGTWAAWLYDLLKPHVHQVLVCNPRRNALLKEGSKNDKVDARKLADLLRTGMLRPVYHGEHGLRTLRELAHTYQTLSQDLNRVMNRLKALYRGWGIACGGTQVYAPRYREEWLTKIEHAGVRRRAELLYQQLDGLQTLRRTLRPELLAESRKHKAAKLLRQIPCIGPIRAARLLALMQTPHRFRSKRQLWTYSGLGIETRDSAQYRFVRGELQRGKKPQQIRGLNRNHNHEMKDIFKGAATRASCGVGPLRDFYVALLDKGMKPEMARLTLARKMAAIALTLWKKEERFDAEQLKTQAA

SEQ ID NO: 287962 - protein, 387 aa, unidentified
MPQSNDLSRSLTALSQDNTIIAVVEMSLASWLVAGIVPGIERHPLKKLKADAEALLRLLQRWRDEATKAGRTITRIAVAFETGRDGFWLARWLKARDVEAYVIHATSVAVSREHRRAKTDRLDTDHLKRAFIGWLRGEPDHCHMAAIPTLEQEDAKRPNRERENLVGERTRIINRIKSCLVRFGIRGFKSKLRKAAERLAALRTPEGVALPPNTLAELRRDIARLRFVMDQIKAIEVARLERLQKAPKEGPNALVCLLARVIGIGIETADMLVHEVLSRNLRDRRAVARYAGLTGSPDESGKRRREKGLARAGNARVRRGMIQLAWRFLTFQKDSALAQWYRSQTVNARGGTRKTMIVALARKLLIALWRLVTSGEIPNGVTLRPAA

SEQ ID NO: 287963 - protein, 434 aa, unidentified
MTNDGAAVRATKGKHMKLWTELTHYAGFDWARDHHDVIIVDRAGQIVADLRFEHSLAGWQQFREHIKSYPGLAVALETSQGAAVDQLLQLECTVYPVNPLSAKSYRERKAPSGNKTDRLDAWSLAEALRLDGQGWKPLQRLDPLTQQIQLLCRDEIGLIEQRTALVNQLQQALCEYHPAALQAFEDWTQPFCWDFIQQFPTPEKLVAAGRRRWEKFLHTQKLWRPETAATRLAIFQKAREFCGSAPVTAAKSLLALSLVRLLQTLQLQLDEYRRQIEALFKQHPDHDLFGSLPGVAKTLGPRLLGEVGGDPQRFADTAALQCHAGTAPVSFQSGQIHRVRVRHHCNKVLRHTVHLWAQCCVRVCPWAETYYRQKRTEGKSHACALRCLGQRLLKILSKMLQTRKPYDPDLHTRNQKRHGSWVLTLIKPATKTSE

SEQ ID NO: 287964 - protein, 408 aa, unidentified
MNPLFVGIDVSSKNNVVCLMKPDGTKFSTFSVQNNLGGAKILSERIVSVLDKLQFQEVTIGMEATSIYGDSLVYALREDGSLGRYQRHIHVLNPKQVRKFKEAYPDLPKNDYVDAFVIADHLRFGRIASEVYMDDYRYRSLQTLTRARFEAVKNLTREKQRFANYLFLKCSGIAQDKNIPNTSATTLALMEHFETVDDLANCNLETLTAFVSAAGRGRFANPEATAKEVQAAARGSYRLPKTVNDSINQAMSVSIASMRALEGQIKVLEKAIEQQFEIIPNTLTSIPGIGKVYSAGIIAEIGDIRRFESQASVAKYAGLVWTQHQSGDFEAQNTRMIKSGNRYLRYYLLEAANSVRRCDSEFRRYYDLKFKEVNKYQHKRALALTARKLVRLVFRLLKDNRLYIPPEG

SEQ ID NO: 287965 - protein, 343 aa, unidentified
MELHAIGIDLGKTLFHVVGVDACGNVVVRKRCSRTQLLKYTANLQVQRIGMEACSGSHFLGRALREQGHDARLMPAQYVKPYVKTNKSDYIDAEAVAEAVQRPTMRFVPIKTEEQLDLQAVHRARERWVMRRTAVINQIRDLLLERGVTVPKGRSYLEQALPLILEDANLNLSDSSRVLLAQLKLELEQLTVRVEQMDSVIQCTVKENEACQRLTTIPGVGPVTATALVAAVGNGSGFRRGRDLAAWVGMVPREYSTGGKQKLLGISKRGNNYLRKLFVQGASTVMQHRAKQSPGLSCWLAQLLVRVHQNVAIVALANKLLRMAWAVLCKNEVYRSPVLATSS

SEQ ID NO: 287966 - protein, 363 aa, unidentified
MQTIYIGVDFHARQQTICYLTTETGELVTCELKHQDKEAVRAFYAAFRGQVIVGLEASGYSPWFERLLEELGYEVWLGHATEIRRRARWRQKNDRRDAELILDLMLHNEFPRLHRPALQSREVMRMLRYRHKLIKIRTMSKNSLQALALQAGVAKRSSLFTRAGKQELETALMSPAMQWQREHWSQLLQPLDQQVLEAMVWLKAQSKDDVCIARLRTHPGIGLLSSLCLVHTLQPVARFRNTRKVAAYAGFDPVERSSAEHKRFLGISKAGSRLLRHLMVEAANIAVRKDEDLKRFYQRVADRRGRPKAKVAVARKLLIRAYIMLRDEIDYAEFRRRAVAARLARLGHRPNMPEVVIGQPAST

SEQ ID NO: 287967 - protein, 404 aa, unidentified
MKGPIVSIDVSKGKSDYQAFKDLNVKYTGSRSIKHNKEGFDEIVNLVREMEKKLETEVCVVYEATGVYHRVLKKVLEDNNIKQFIINPLLSAKTRKNDSLRSPKTDKLDPKSIAKTYYSHSLHNSHKQETIYHELRELSRYYEDILVHIRKDKVAFRAQLDVVFPGYDTLYDDLYGPVALAIIEKYPHPEMLQKKKINTVSKVIQNKTCHRQAVSDTMADKAIEYSKTIYSGCDKDDIEVLILQRFIKKLNEDMAEAERTIGEMIKLAQELPDFNIIKSIPGIGDNLAARIIAELGDMTRFKKKNELVAFAGLDPRISESGQNDGDHMHITKKGNKRLRCLLYLAVTCSIRLKRDDNSIKDFYIKKKQQSNPMCSKAAKTACASKLVRIIYSMCKTGELYQYNK

SEQ ID NO: 287968 - protein, 396 aa, unidentified
MLYLGIDIGKNTHVASLVDEKGKILFKAFSFSNASASAEGLIHRLNDFISATSEVEIGMEATGHYWLSIYSFLALKGFVIHVVNPIQTDGWRKGIEIRKRKTDVIDSVLIAELIRYGDFLETSLADEDTMSLRNLSRFRNYLVSSIGDLKRKTVCVLDQVFPEYQSVFSNIFGQTSKEILLHLTSPEDFENITSNQLQEVLSKITFKKFATNKINEISSLAKDSFGIKFALDSFGLQLKLLIEQINFIELQVKDVEEQISTLLDKINTPITTIPGIGNVTAATILGEIGDISRFSSPSKLVAYAGIDASVSQSGEYHSSNNKMSKRGSPYLRKAIFSAALVASNHDPVFKAFYQKKRKEGKHHLTAVGATARKLCYTIHAILKNNIKYEVQHPRNE

SEQ ID NO: 287969 - protein, 347 aa, unidentified
MKVTTIAIDLAKNVFQVLGMDSHAKQVFNKRLNRTQLIEFMLQQPHCNVVFEACYSSHYWGRKFLAMGHNVKLIPAQHVTPFVRGSKNDNNDTMAIFEASFRPNIRFVPVKTEEQQEILMLHRVRERLVKEKTACTNQIRGVLVDFGICFAQGYKAFEVAMWDIINDASQRPIIKLMANDFWDEYQSVNTRLDRINTLIKKLVERDPNGKILLSIPGVGPIIASTFVASIGKGQAFNTAKELGVWLGLTPKQFASGHRSVNGSITKRGNCYLRKQLIHGARTVVSHASKKQDDLNLWITQLRSRKSICSTVVATAHRLARLIWVLLQKQVPYAPQYTANQGANHGTC

SEQ ID NO: 287970 - protein, 349 aa, unidentified
METDIILALDLGRYNSVACWYDPRTRVAEFRSIQTTPEEVRSVLVREPVSSVVFEACSQAGWVHDLCEVAGLSARVASTTGSAWQWKHVKRKTDRDDALKLARLEAVGEIDPVAIPDRNTRQWKSLICLRKRLVSERVRTQNRIRGVLVSQGLSSPRGFSAWTEAGLNGIATLALPLAECAPDQLWRGELSVLLERLRSLEEQVHLTETRLDGLAKGDHRVRLLLSIPGVGPRTAEVIAVHLPDAKRFRRADEVSAYAGLVPRQYQSGETDRRGRITRRGPRLLRAALVECAWCSLRYNNWARETWLRLQANGLSKKKAVIALARKLLVRAWAILRTGKPWCVAPAAVA

SEQ ID NO: 287971 - protein, 270 aa, unidentified
MTFRPHALHLKAELFVKSSRVHVRDDGFTRCNFHLKFFIMVYRGIDISKSSFVAAYPSTNGNPTKTFPNTTAGMRELIGTLAVAEHHCVMEATSNYGCCCTCYIRTVLPSVLPPPKKKQIKHFSRMMMPVTKTDEKDAYMIAMYGEKMNPPIYKMPSQATIRILTTEGFTYFDNAKQLSRFIGICPTYQQSRTSVNIREHINRNDEERLRSLLYIAFWTALRYNSRECYIRLKANEKPFKVALIAVTNKLVRPVLTITTINSIYRWICPG

SEQ ID NO: 287972 - protein, 469 aa, unidentified
MAYALFNHIQGKKGSRWAEFIRETGSENILMVAIDAAKYTQKVLICTFFGDILVKPFEFDASLTGFDYLKKIIDTKKGKFGYKEVVVGIETTGHYYEDLVRRCQLVGFHVRTLNAATTAQERETLLNWSKTDNLDLMAIVQSMIHGRGTSNGLPTGKVHNLQKLTRARRELVKEETETKNLIRVHMDHIFREFQGKSVWLNGKRTHVKIFDDMFGKSSIYLMKHYPHPSDIIKLGEEGLRQLSIRENLKFRDKSIHLLLDFARNSISQPREFLEVDIFLLLQKLERLELLASQIKVLERKIEGLFVETEGAVILSVPGIGVVTGAELFAEMGDLSDFDYAGQLIKLAGTNPIVKQSGGKRPSYHGISKQGRRSFRNITYQVGKSLAHNNPEMKQRYKAFKERGKLPNQSYIALGNRMIRLAFSMIRKHTLYRSSDKNYVLQDVLGNKLSASNLKKFYEIHVSPTLSQSA

SEQ ID NO: 287973 - protein, 390 aa, unidentified
MLSSNVKYIGLDVHKEAVAIAVLNGAGKLVMESIVETKASTLLDFLHGLRGELHVTLEEGTWAAWLYDVLKPHVAEIVVCNPRRNALLKEGSKSDKIDARRLAELLRSGMLRAVYHGENGLGTLRELARGYLTISKDQARVMSRLKALYRSWGIPCSGRQVYTPRHREQWLSKILQPGVRRRAELLYQQMDGLLLVRHTVRGELLAESRKHPAVKILRQIPLIGPLRATLLLALMQTPYRFRSKRQLWTYSGLGVETHDSAQHRYVDGQLQRSKKPEQIRGLNQNHNHEMKKLFKSTAMSASRCAGPLQDFYAGLLAKGMKPDMARLTLARKIAAITLTLWKKGERFDAEHLKIASSLSVCRNQTNPGLLTRWLAHRFMRRSGSRVSINQ

SEQ ID NO: 287974 - protein, 352 aa, unidentified
MEMVIGLDLHRSQFTFRTVDLRTGEVQRGRIYPGAREAVREWLDRFEPGTDAHFALEGTTGWRFVVEEIQRRDLTAHLADPAELSTLRGPKRRAKTDHADCELMVNLLLEGRLPESWIPPAHILEMRTLVRLRKTLVDQRIEWQQRLQAQLYHQGVVPGLRLCRCEDRRRLGEAQMSPAGRQMTQTGLTMLDDFDAQLGPLSTQLVRLAKSQAGCRAQERELYGVGWLTSAAILAELGDCRRFHSADQAVRASGLDVTVYESNGKRPGGHLARQGPQVLRWALFEAAQCAARKSSPDHDYYVTVRDRIDHNRACLSVSRKLCRRACHILKDLGDAAMAAPELPSASHETKAA

SEQ ID NO: 287975 - protein, 418 aa, unidentified
MQDKRRDDMQKRENYLYVGMDLHKDTHTAVMVNCWNEKLDVIVIENKPSEFSKLAKKVDKAALRLNLSPIYGLENAYGYGRSLAVWLIEKGYVVKDVNPSLAYDQRKSAPMMKKNDEHDAYCVATVLINQLHTLPDAKPEDNHWTLSQLVNRRDTLVKDGIRLKNALHQQVAVVYPSYRKFFCEIDRKSALYFWKTYPSPGYLKGKSAEELMAELKAVSANYTINKAEMILECVQNYGNTIRDYQQSRDFITQSLVRDLEHQVVELAQIDTEIEKMLKNFDYKLTTMPGVGNTVASKLIAEIGDIRRFPNTDKLASFAGIAPKSFSSAGKGRDESNKQGNRELHGLFYFLAVTMVSVSTKGKPYNPIFRTYFLRKISEGKTKSQALVCIMRRLVNIIYGMMKNKTKYRPYVLSEDKAI

SEQ ID NO: 287976 - protein, 311 aa, unidentified
MATSSKVYVGIDVSKDKLDIAVLGESTEKQVDNSREGIEKLVQWMQEIQPELIVVEATGGYQRSVVDALFHAGVCVAMVNPTRVRQFARACGLLAKTDKLDAQVLAVFGQRMQPKRYEGKSEAEKQLSALLVRRKQLEEMLKAEQNRLRTISPSLRSSVERIIAFLKDEKKRLEEQIQELLKEQKAWQEQTQILSSAPGVGMVTTATLLADLPELGKMDRKKIAALVGVAPMNYDSGKKRGYRKTKGGRTSVRSILYMSTLVATRYNPIIQAQYQQLLKRGKVKKVALTACMRKFLTILNAMVRDQQPFRA

SEQ ID NO: 287977 - protein, 426 aa, unidentified
MRVLYDRVAAIDVHKDMVKVAIRVPGAKRGTRKTDVLEFRTFYGVLQAMARELRGRGVTHVVMEASGVYTDPVYYALRELDFEEVMVINPAHAKALKGHKTDAKDAIRLLDLYECGLLSGSYIPDPDLREVRDLARYRMKTVQARTSEIQRLQKTLETAGIKLSSVVSDVTGTSATAMIEALISGERRGTVMAGLAQTRMRAAGKMADLSMALTGRFTDHHALMCRLHRDRITIFDDAVKDLDAKIAPLVARYAREADLLKSLPGFGDVIVAGWLGAIGPAPHRHFATASRLASWATLCPGNYMSAKKSKGGRTGDGGAYIKPLLIQAAWAAVRVPGRLQARFGRLVRKFGGPRNKGAQKRAITAIAHTLLKIAYGVLKTGTPYADLGADFYTRRESPDARQDYLMRQLQKLNPGCVITITPTEAA

SEQ ID NO: 287978 - protein, 389 aa, unidentified
MGEAIRATVAYLGIDVGKSSHSACALDAGGGVAFRAELANRPDDIDRLLERAGSGALVVVDQRRNIGALVLARAHAHGNPCAYLPGYAEKQARGMFPGIAKTDAIDAEVIARTALGVPRALRPAPEEPEGTASLRILSSQREFASSARTRAKNRLRATLLEADPALEGAVDPSSRWQVSMLAEFGGAAGCSAAGWRRFSNAARRAGAPAAGARRLWEALLASSRSGRRLPAGEDVAVRILAREIASLDADIEELDSLVADSLAGDEVYECLLTVPGIGPKTAAALVTSIDISAFRGHDELASYCGVAPSDRRSGSSIRSTSPQRGGNRQLKNLLIFSCNSLIGTDNRFGRYYGECRARGMRHGKALKAVARKRLKVIYAIMRDAVPYAA

SEQ ID NO: 287979 - protein, 329 aa, unidentified
MLYLGIDISKNKLDSCLLFDEGRRKRTKIVANSRVGCTELLAWLKRHWPDVPLPQVHVVMEGTGIYHEVAACALHDAGLKVSVINPAHARDFAKALGVHSKTDAIDSQVLALFAQRMIPAAWQRPAEPVRQLQAMLSRRQALQKDLLRERNRQEKALAAGTTQLVQQSLQRSIAFLRQQIDELQSQIDDHIDGHPQFREDAKLLRSIPGVGSKLGALMVALLCAKRFASAEQLAAYLGLAPVQRLSGSSLKGRSRLSKTGPAQVRAMLYLPAVVATRCNAHIKALYERLLKAGKTKMSAIGAAMRKLVHLCFGVWKTRQPYRADWPLNA

SEQ ID NO: 287980 - protein, 339 aa, unidentified
MTVKTVGLDLAKDVFQVHCVSATGRKIINKKIKRAKLLSFFETLPRCVVGMEACGSSHHWGRKLRELGHDVRLMPAAYVKPYVKRGKTDAADAEAICEAVRRPTMRFVEIKSEEQQAVLAIHRARDLVVRQRTQVVNMIRSILREFGHILPTGIEAVSKFAREHGTKDQLEMPEIADGILGVMCHQLNGLNARIDGLTKLIEQHAWLDADARRLMRMPGIGPITASAIVATIGDAKQFETGRDLAAWLGLTPLNKSSGGRERLGRITKKGDRYIRKLLIIGMTSRALMAKNKPEKADIWTAKLLYEKPFRLATVAMANKSARIIWALLTKRQEYRQPII

SEQ ID NO: 287981 - protein, 355 aa, unidentified
MERYIGIDVHAASCTVAVISEAGKRLKDFPVETNGQALVEAIRMIPGQKHLVFEEGLQSAWLYETLSPHVYEAVVAGVTESRGPKCDKSDAYGMAEDLRSGSLDKKIFKAPQEFTLLRELSRIHMTLVADVVRAQSRIKSLYRSRGVLVTGLDVYSPRRREEWQKQLFSSAQARATRLYDHFDFLLEQKKQAEADLLREAKKHPIVRILETAPGFGPIRTARMVPIVVTPHRFRTKRQFWSYCGLGIVTRSSSDWVQTANGGWIKARVPQTRGLSRQHNRFLKSIFKGAATTVITQRNKDPIHARYERLLDGGTKPTLAKLSLARMIAATVLRMWKDEEEYDPGRAGLPTQTREG

SEQ ID NO: 287982 - protein, 405 aa, unidentified
MDIIVDKGCGLDVHKGTVVACIMGTGIKKEIRTYTTMTNDLLRLKEWLQNSGITHVAMESTGVYWKPVFNILEDHFEVILVNARHVKNVPGRKTDVQDSEWLCRLLRSGLVSGSFIPPRDIRELRDLTRHKRKLIQAITAEKQRVEKVLEDANIKLSSIASDSFGVSGKRIVEELIKGELRAEEMAELSKGRLRQKRGDLKEALVGEVREHHKFMIKVSLKHIRAMEEILSEIERKIQEKIDRHYKEEYELLQTIPGVKGEASTLIAEMGVDMERFPSEEHLSSWAGMSPGNNESGGKKKPGSTTYGNKCLKTMLTEFAWVASKTKGTYLRSKYHSLVGRRGKKKALVALGHKILIMCYHILKYRCAYKELGVDYLDKRRKDKIARSYIKRLNHLGYEVILQEAA

SEQ ID NO: 287983 - protein, 345 aa, unidentified
MTYYTGIDVSLRSVSICVIDEEGAIKFEGKVASDVEAIVAVFQKKFGARIRQIGLEAGTLTQYLTYGLRAAGYEVICLEARHVAATLAAMRNKTDRNDARGLAQILRSGWYRTVYVKSMQSHQSRALLTSRKAVLSKCIDLENELRGLLKVLGVRLPMRVGHGSFDALIRRHLQHHPDWAAALLPLLDARTMLYQTFLKLEYAVRSMARQDPVCQRLMTVPGIGPVSSLTFKSAVDDPARFRSSRTVAAHFGLTPRRFQSGESDNPGRISKAGDAGVREALYTAAHALLTRSDAWSTLRAWGLRLAKTRGHRRAVTAVARKLAVILHQMWVRATDFQLRRPKATA

SEQ ID NO: 287984 - protein, 411 aa, unidentified
MKSMEITAVGIDVSKRKSTVAIRRPGGVIVACPFDISHSSHDLEKLVSILKTTGGDIRVVMEHTSNYWKPIALTLKNAGFYVSVVNAMLIHDFSDNSIRKLKTDRADSLKIANYALTFWNQLPPFNDEDETRLVLKEQSRMYERLASTATSLRNGLIALADQTFPSIDQAFGHAIKNADGHEKWVDFFSIYWHRDCVLRLSIEKFTESYRKWCLRRNYKFRTNTAHKLYALAQDAVPTLPKNNGTKALVLQACKSLNAVCEAKQSTQEEMNRLASLLPEYEVVMQMEGTGPITGPALMAEIGDVRRFKNKKALVAFAGIDAPPFQSGNFESKSRHVSKRGSPHLRRTIFIVSNIILTRSNPENAVYCFMDKKRSEGKHYYVYTVAGSAKFLRVYYARVTEFLRSQPSPDAC

SEQ ID NO: 287985 - protein, 415 aa, unidentified
MKFEKDTSGIKRYIGFDIHKEYALVGGQNARQEWVMQSRRVGLEKFRAWAQANLCPGDAAIIETTTNVWDVYDIVAPLVSYVVVAHAGGVRQIAEARVKTDKKDIERLLKLLIADIVPEVWVPPVAVRELRGMISYRNRLVKTATMIRNRLQSLIHRHNLLLPKGALTDKAWWETQTLNALEKIQIRQELELLAGLDKNKTEVDAELGRQCLGEQWGRQAVRLLQLSGFGVVMTMTVLSAIGDISRFEDAKKLVGYSGLGPGVHDSGKEHIEKRITKSGRKELRWALVEAAWRAIRISPYWKEQYEKYLRRMRKPNQAIVVIARKLLVAVWHVLSKEETDEHVSEEDLAYKMLVLAWDLDEEVRMGLSYKQFAKYALMKLGVETDITRFVRKNVARLVAPKAEVLARMEELGLTC

SEQ ID NO: 287986 - protein, 359 aa, unidentified
MQSTPLIAFDQHAATTVAAVLLPGERTPALHTLPSDSATMLRFVKRLQRHGPIRCCYEAGPCGFELQRALSQDGIPCDVIAPALIPRRPGDRIKTDRRDAGQLAVLYRAGALTAIHIPTEHEEAARDLLRCREDIRADLLRARHRLSKFLLRHGRRFTGTKKAWSKRHDAWLRAQTWPLPALEQTHRLYLRTVDEAVARLRTVEEDLRALLTLAPLQPRVTRLRCFRGIDDLTALTIAAELGDARRFATAPSLMAFVGLIPSEHSSGTKQARGAITKTGNAHLRRVLVEAAWHYRHHPFVGDTLRTRQRGAPAAVVAGAAQQRLHRRYARLAARGKPKQHVVTAVARELTGFVWAALTQ

SEQ ID NO: 287987 - protein, 447 aa, unidentified
MPKQKRTRNARTLPVARVLEPNAAGIDIAATEVYVAVPAGRDPQPVRRFSTFTDDLHRLADWLQACRVQSVAMESTGVFWIPLFQILEDHGFRVCLVNARHVKNVPGRKTDVSDCQWLQYLHSVGLLRASHRPTQTICAVRSIWRHRESLVQMAAVHIQHMQKALDQMNLQLHHVISDITGTTGLAIISAVLDGERNPENLATLRDPRIVASRETIARALVGDYRVEHLFTLRQSLQAYRQYQQWIAACDSEIERQLQVLPSNLPDDPKPLSKPRDHHKPRRNEPRFDLRSQLYRVFGVDLTAVPGVSSLTAHTLLTEVGPDLRRFPNAAAFASWLGLCPDNRISGGRVLSVVTRKVKNRLTIALRMAAQSLHRSQSYLGQYFRRMRIRLGTPPAITAAAHKLARVLYHLITTRQPYEESTFAAMEERARQRQLLRLTKQAASSVSN

SEQ ID NO: 287988 - protein, 388 aa, unidentified
MRNIGLDLGAKKISFCEVQDGKVVARRTVSCLAGLDDVLSVDAPKARVAIEACREAWHVHDEFVRRGHEVKVVDTTRVKKLGIGQHGRKTDRIDAEVLALALESGHIPEAHVLSPHRRALRTHMMVRRGLIEMRSQTVTTIRGIVRASGQRVGACTTETFVDRYREQDLPDEVRTVCEPLVQVLATLEPQLDEIDRKISQLAKHEAMIAFLMTAPGVGLMVAAMFVSVVDDAKRFTKAHQVESYLGLVPSEDSSGGKRRIGAISKHGNSYLRTLLVQAAWTMLKGRPAREAETSRLRDPLRTWADAVAARRGKNVAAIALARRLAGVLWAMWRDGTVYDPEVVGRASTIGKTREAQSSHEQAVAIARASKKAKRYLRGTAAPKAEVYA

SEQ ID NO: 287989 - protein, 375 aa, unidentified
MNNNNTLYVGLDVHKESITVAYAINSEPVELMGKIGTSPTDIQNLCKRLRSKSSQVSIVYEAGPCGYGLYRRLVKSGFDCMVCAPSLIPKKPGERVKTDRRDAIRLVRSLRAGDLSAVYVPCIEDEAFRDLARAWASARDDLRHARQRLKSFLLVHGVHYVGRADWGPAHRRWLSKYSFESPWRQLAFDEHRRTIEDRQAQCERLESALKEAVTEWRLYPVVEALQAMRGIQFITAVGLISELGDLTRFEHPRQLMSWFGITPSEYSSGGSRHQGSITKAGNSYARKLLVEAAWSYRHPARISPAIQKRQENLPRPVIDRAWDAQLRLCKRYRKLQAKGKNVNITIVAVARELAGFIWDMGRIAMSVAQQPQCHK

SEQ ID NO: 287990 - protein, 402 aa, unidentified
MNSVGIDISKGRSTIAVMRPFGEVVISPFEVRHTDSELSELARQLKSLDGETRVVMEATGNYHAPVAKLLHDAGLYVSVVNAKLVHGYGNNDLRRVKTDKKDAVKLANYGLDRWLTLPRYVPEEDTRLLLKNCYRQYRQYSKVQTVLKNNLISLLDTVFPNVNRLFSSPIRGDGSEKWVDFVAEFWHCRCVSEKSEKAFTNKYQRWCKTHGYNFSEAKAHTIHAEASGHIGIMPKSETTKLLVEQAVVQLRATSAALIALKREMLTLAAQLPEYPVVMGMFGVGPTLGPQLIAEIGDVRRFYSKKALVAYAGLDAPPNDSGDVTGRHKSMSKIGASSLRRTLFLVMGIYLQNAPLDEPVYQFMDRKRAEGKPFRVYMMASANKFLRIYYATVKAYLESLEQV

SEQ ID NO: 287991 - protein, 338 aa, unidentified
MTIVMGLDQHRAQITAEWLDTETGEVTRSRIAPAHRQGVRRFCERFRGLELEVALEATTGWRFVVDELRRAGAAVHLAEPAETAARRGNKKRAKSDRADARHIRELLTIGRLPESWIPPDHLLDLRAQVRLRHTLSHQRGEWQQRIQAVLYHHGCPQRGELLTLAGRAWLAAQPLAPAAREQITVALAIIDALDIQLAPLDARLRAFARHQPGCKALLGQFGVGELTAVTILAELGDARRFSSSRDAVRFAGLDITVHQSDQRRAPGHLSRQGPPALRWALFEASMCAARKCSPDYEYYAQAAERLGSNRARLSVARKILKRSYHLLRELGDEAIAAA

SEQ ID NO: 287992 - protein, 361 aa, unidentified
MEERSIKRTVGMDLGDKNHVLCILDEAGEVLDRPVVGNSAGKILVFFDQFEDPSSVRVAMETGTHSPWISRLLLERGFEVLVGNARKLRAIWQSDLKDDYRDAEILARIGRFDPQLLYPIIHRGAEAQADLAVIRARDVLVRSRTSLISCARGLVKSFGQRLPACSAPAFATKARDHVPEELAPAINPLLDQIASLTATIREYDRCIEGLCEHCHPETAAVRQIQGVGAVTALAFVLTIEDPSRFKKCRSIGPFLGLTPRRDQSGTTDKQLPISKAGDTCLRRLLVQAGHYILGPFGPDCDLRRFGLRIASRGGKAGKKRAATAVARKLAVLMLQLWKSSEKYEPFHRRPANEAKSVKPAA

SEQ ID NO: 287993 - protein, 338 aa, unidentified
MKNVKYFIGLDVHKEKTTYVVKDRIGNILLEGETATLYTELQERLKPYLNTSSIGLEASTSYYTLYQQFLKNGYNIKVANTIQMRQLIAKNDKLDAKRLSEMLRLGTFPCSYIPDDKIQRLRSLAQLRHSLMEEKVRCNNRIQAFLDKNGVIMPSQEAFGKKWRQALMRHMGAGDVSLEMRYEYDHFEFLEKKNKQLDLEMQGYTHKHWPFEYEIIQSITGFGPVLSCYIIAHIHPINRFISNRKLRRYAGVVPTYKESGNKKSKGHITKISSRKLLRWALIQAANAAGRTDTKLGKYYRMKKKQKKNASIAKVAVASSMIDIIYKVLTTKTPYNAKC

SEQ ID NO: 287994 - protein, 452 aa, unidentified
MNENKISMEIVNSYAAGIDIGSRSHWVAVGQKEEDIKEFGVFNEDLKNLSNWLKEKNIQTVAMESTGTYWQALYAILLADGFQVILCNGKFTKNIKGRKTDVQDCQWIQKLHSIGLLTGSFLPDETTEKLRTYCRHRANLLDSGASTSKKMQKYLRLLNLRLDVVVNDICGLTGLLIIHAICNGETDALKLAELRHGNCRKTEEEIAKALHTNGREDYLFALKQELEMYETLQSKISQCDVEIEKILNTTINEDNNKKEHHIEPKKHKKINKNTPKNIDLNLMAYQYFEGVDLLAIEGVSYSTILSIMSEVGLGGIKKFPTAKHFASWLRLTPNNKISGGKILSNRIPKGSNRLKIALRNAANAIGNLKDSTPLSDFFKRINFRKGRVSAISATARKLAIIIWNMVVKNQSYVNPEGYLFLDEKRKLGLVKRIQKQITKFGLTNEEINFATN

SEQ ID NO: 287995 - protein, 403 aa, unidentified
MKQFNDIYVGLDVHKDTIAVAIARGLRTKPHYFGQIPNTPAAVTKLLKQLSPDGEVLNFCYEAGPCGYEVYHQVTRQGHVCDVVAPSLIPKMPGVRIKTDRRDAMSLAKLHADGSLTAVWVPDKEQEGIRDLSRAREDFKQTETKARQRLGAFLLRNGKVFTGKSKWTVAHWRWMETLTFETPTQHIVMQEYVEALKESSRRVLGMEKQILLAVRGWSLEPVLNSLLAMRGVNMITAVTLLAELGDITRFDNPKQLMSYLGLVPSEYSSGSKRQQGAITKTGNGHVRRVLIEAAWNYRFPARKSRTIEMRAEKTSERVQAIAWEGQKRLCGRYQKLLTSGKLKQKVCTVAGQQHEQEVGDCGSGTAQAVLQNPRCSYVALTRKGEMTHDYRDGQLRDRRQGMW

SEQ ID NO: 287996 - protein, 412 aa, unidentified
MAEDRQVEVCGGVDTHRDVHVAAVVDTAGRVLGSAPFPADVAGYEQLGDWLGSHGSVARVGIEGTGSYGAGLTRHLISIGIQVVEVNRPNRQLRRRFGKTDVTDAQAAARAALNGQATGLPKTGDGPVEAIRMLSVARRSAIKARTQAINQIHALVVTAPDQVKHPLWGLSPKARVKVCAAFRPGTAPTTIRYAKQALRSLARRYQTLTAETKELDTQIHRLCTQANPALLAARGVGTDTAAILLTAAGDNPHRMTSEASFAALCGTSPVQASSGQTVRHRLNRGGNRQANQALWRIATTRMRYDQTTIEYTQKRQTEGKTRKEIIRCLKRHIARQIYHLLTNPPPTPDRVHLRALRQQAQITLTHAAQALQTHPTLLSQLERGLRHNHHLATRYQHWLTNQPSTNTPICKP

SEQ ID NO: 287997 - protein, 316 aa, unidentified
MEAIFDNCCGIDVHKKTLTACIMIGREGKITKKEIRTYSTMTEDIEGLRDWLKSEGVTHVAMESTGIYWRPVYNILEEGFEIMLVNARHIKNVPGRKTDVADSEWLCRLLRNGLLNGSFIPPIYIRQLRDLTRYRSKLNNNIAAEKNRLQKYLEDANIKLSSVATDTLGVSGRLMIRDIIKGNTDAEGLSELAKGRLKNKKEELKKSFNSRVTEHHRMLIEMSLKHIEYIEGMMVKLEGEMDELIKKQNLANDLELLDTIPGVDKIAATAIVAEIGADMSKFPTDAHISSWAGMSPGNNESAGKKKAQVPRMETYG

SEQ ID NO: 287998 - protein, 403 aa, unidentified
MDVLYPRCCGRDVHKKTVAACLIISTEGPEPVKEVRIFRTMTADLLALADWLQEAGCTHVAMESTGVYWRPVYNLLEGQCELLVVNAQHIKAVPGRKTDVKDAAWIAELLRHGLLRGSFIPSKPQRQLRELTRYRSTLVQDHARTLNRLQAVLEDANLKLASVVTDLYGVSARAMLAAILDGQRDVETLADLARGRLRAKRDQLKEALAGRVTAHHSFLLTEHLIARLSAEIDQRLTADQEAIALLDTIPGVGQRAAEILIAEIGPDMSRFPSAKHLASWAGMCPGNHESGGKRLSGKTRKGNRWLRQSLVEIAQVASKTKNTYLATQYRRIAARRGKKRALIALGHTILTIVYTMLTRQQPYQALGAAYFDQREQHRVERRLVQRLERLGYEVSLQPRALAS

SEQ ID NO: 287999 - protein, 394 aa, unidentified
MKLVGIDIGKNKHFFCVMDQQTGEIISQPVSFSNDKEGFDFLIQKINSYPKDSVLIGMEDTGHYHFALLKYLLDLQYTVALINPKTTDFNRKMQGGITKNDKLDTINICDVLDTPERKKQYRISKVNSFDLYEQKQLTRHHHNLKEEENVYKNRLQKCIDIVFPEFNKLFNSKYGTVYMNILKTFGSAENIANTDIRTIRKCFEIEGRGNRISLTPERLKECARSSIGISSSAEVIQIKHLTAQVELIEEQLTEIDKKIEEFSIQNNSPILSIPGISHFSGTSILAELGDISNYSKPSQIIKFAGVAPLHYESSQFNAQHTAITKKGSKYLRKTLYQIILPVIRHNPVFNKYYQLKISQGKGHRCAQGHCVRKLLRIIYHLLKTNQQFDPQLLR

SEQ ID NO: 288000 - protein, 347 aa, unidentified
MDHIGIDVHKKESQICILAERGELLERRIPTQPRRFAEELGARPHARILLESSTESEWVARCLEGLGHEVMVADPNFAPMYATRTRKVKTDRRDARALAEACLLGAYRPAHRLSDAQRHVRARLTVRDTLVRTRTRYISLTRALLRQHGWPVPSGSAEAFPRRVMALPLPGRLRSEVAPLLAVMRHLQQQLAYSDERITAVTQTDGRVRRLRSVPNIGPVTAAAFVAALDDVQRFRRAHEVEAYLGLVPRELSSGETQRRGRIPKAGSSRVRWLLIQAAVSMLRLHDPRTAWLREWAGRIAARRGKGIAVVALARRLAGILFALLRDETVYHSARRQPRTMQDAVPA

SEQ ID NO: 288001 - protein, 400 aa, unidentified
MKTVLSVDVAKNKSMIMLMNNDGEILIDTKEIKHNLGEFEKVKEQIEKINLENLTVFMESTGTYHLPVERYFKENGFNTLVINSLTTKNNFDTIRKTKTDKKDCYRLAKLFFVNEVEYHEISKKDLYANLKAMTRQYFYLTQVNIRCKNRYKRLINICFPEFEGFFARNRIYEDTALNFIKAFPHAYIVREKRIDALYNNLRKVDARHDYYYKRLARQLKDTAMNSFPGVDKDHADVKNLSDMASILQENNKLIDEIRKNMIELAKQSPYFEIVNSFYGIGEVLAAELLGELGDITRFDNHKQLIAFCGLDPAIVQSGKSINVHGAISKRGDKYARWILFNISQMVVKLGHQYPSHPVYNYYLIKKAEGKHYYESLTACSTKTLRMLYFMCKNNKRFLEE

SEQ ID NO: 288002 - protein, 347 aa, unidentified
MRFYTKQHPFYCGIDLHARTMYVCILDQAGETLLHRNMPATPEALLKAIAPYREQIVLAAECMFTWYWLADCCAEHGISFVLGHALYMKAIHGGKAKNDRIDAHKIAVLLRGGMLPQAYVYPAEMRATRDLLRRRMHLARKRGELLAHVQNTNSQSNLPAIGKKIAYKANRDGIAERFADPAVQKSIEVDLALITYYDELLRDVELTIVKTAKHHDANTLYLLQTVPGIGKILSLVLLDEMHDIARFPRVQDFASYCRLVKCAKESAGKRSGTSGSKIGNAHLKWAFSEAAVLFLRDNPAGQKLLTRLEKKHSKGKALTILAHKLARAVYYMLKRQTAFDLDTFLRG

SEQ ID NO: 288003 - protein, 333 aa, unidentified
MDKRFSVGVDVSQETLDVAACTERGERRTAQFANTGAGHRRLITWLTKGGRCARVVLESTGVYSLDLALALEAAKRIEVMVVNPRAARKFAEACLQRSCTDSTMAVALQEYAARMEFVPWTPPAAAVREVRAIARRIAALTVEKARERNRQHAAAASTSTPAVVLNDVAVNVRHLERRIAELERHAVALISGDAQLQRVYQHLLSVCGIAGPTAIQLLGELLVLPTDMTARQWVAHSGLDVRYVTSGTSVHKRPRISKQGNAHLRRILYMPALVAIRHEPHVRTFYDQLVAAGKKPIQAVVAVMRKLLHTIWGMLKTDTDFDGSKFRKLAEAA

SEQ ID NO: 288004 - protein, 355 aa, unidentified
MDSKKYIGMDVHQASISIAVLDSRGKVVMDSVIETKAGTILEFIRGMRGTLWVTFEEGTCAAWLYDLLKPHVAKVVVCDPRKNALLKAGNKNDRVDARKLAELLRAGLLSPVYHEGVSVRTLKELARSYLTITKDLTRVRNRIKGLYRSWAIPCAGQKVYSPRYRSAWLKQLTEAGVRRRAEWLYQQLDDLQPVRREARRELLAESHQHPANHILRQVPWLGPIRVALLIALIQTPHRFRTKRQLWAYSGLALRTRVSGEYRVAGDQLQRAKRQPSLRGLNENHNHELKALFKSTATRASTAAGPFGDFYAALLATGMRPTMARLTVARKIAAIVLTIWKKGEHFDPEHLKRQAA

SEQ ID NO: 288005 - protein, 345 aa, unidentified
MPIVGGLDIHRNQITFDYLDTTTGEVRRGQIAPADRAHLRAWLARFADRDDVAFAMEGCTGWRYVAEELAAAGCAAHVGEPADTAAARGRKRHAKTDKTDSRHLRQLLADGRLPECWIPPAQILECRALLETYHDLRREHTAWVQRIHAVFFHQGAPRLGQGALRTDQDLAALQAAAAAHLSPAGQLQIATALDMLAALDARMDMLRQQLLATARHLTGAKVLAARLYGVGPVAALALTCWLGGAGRFSSSRKAVRFAGLDVTVYSSDGKRSPGHLSRQGPEILRWVVYEAGKTHGRASAPGHDYYAAVKDRKDGKIAALSQARKIVRQACHILAELGDDALTAA

SEQ ID NO: 288006 - protein, 456 aa, unidentified
MSAGCKVKTKTAKANTQLPTLHRHAAGIDVGASHLQVAVPCDADPRPVRTFTTFTDDLLKLRDWLVQCGVRTVAMESNSVYWIPLFQILEAAGLEVCLVNARHAKNLPGRKTDVSDCQWLQYLHSVGLLRASFRPPEHICAVRALLRHRTNLIRYAGQQVQHLHKALTQMNVQIQNVLSDIVGMTGLLILDAIVAGERDPQQLARFKNGRVKASRDTIARSLTGNWQPEHLFALKQALVTWRHYQTQIAECDGEIARVLGTLDARVDVQKKPLPAARVRNSHGQRITFDARAELYRVLGMDATQVPGMQEGTALVLFTELGPDFVAKFPTAKCFASWLGLCPDNRITGGKIISVKTRDVKNRAAMALRLAAQSLWRSKDYLGECFRRWKARLGTPKAITAMTHKLARILWHLIKYRQAYDPKVWAAAEEKMKAKRLKRLEQSAAAYGFKLVCASIT

SEQ ID NO: 288007 - protein, 342 aa, unidentified
MGEVSTIGLDIAKSVFQVHGVDAGGVVVICKRVSRVKVLEFFAALPPCLVGIEACPTAHHWSRKLQTLGHTVRLMPPSYVKAYLKRSKNDANDAAAICEAVTRPSMRFVPTKSEQQQSALMLHRSRQLLVRQRTMLSNAIRGHMAELGIISAKGRHGTAELLEIITKEDDRIPTVARVSLAVLARQYAVVTAEIGTIEKHIHALHRSSQESRRLEEIPGVGPIVATALVAEIGDWTAFSSGRSLAAWIGLVPRQHSTGGKDRLGRISKQGNRHLRWLLVAGAMAVIRYARQHGTKRLWLVRLMGRRPVKVAAVALANKIARMAWAMMVRGERFSEPKLLPAG

SEQ ID NO: 288008 - protein, 388 aa, unidentified
MSKQDLEKSNGGKTVVGIDPCSEFLQLAILAPKKTTEFKKLPLSPSITEEIVKSTDPKTTQIAIECYGSYGKLFVYDLLKKGYDIREVNPHISCKLANLYSEEHSDQKDAESLAKALLLIPDLPKISITDKKQWLAKLTRTRRKLVKDLNGYLNRLHIALTESYGAVYKKLFKTLFAKKALKFFEDHPTINDSISDNETKDRLGEEKWDLLIQAGRWEDDFYLETLRTEIRGLIEIIRCIDSTKLAIEEKIREVADQVEEMRILETFPGIGGIAGATLLSEIGDIDRFGKESYLSAYCGVSPVIWQSGTGRIRTKRRKRYSRRLKGILYFISLSQIRINPESRAYYERKIKEGKTHWQAMNALSRQLMKIIYYMLKNKEPYCREPLIN

SEQ ID NO: 288009 - protein, 381 aa, unidentified
MGDHIAAFVAFDTLKLGNAVAIAEEGRAGEVRFYGEIENTAEATAKFVKKLSAKYERVAFCYEAGPTGYGLYRQISDLGHECMVVAPSLIPKKPGDRVKTNRRDALDLARQLRAGQLTAVWVPDGRHEAMRDLTRARGAAVQDARQKGQQVSAFLLRLGRHYDADKKTWTKAHMNWLASQKFEHPEQRIAFEELLLAVHQARDRVARLEEAIRQAVPDWSLAEVVPALMAMRGIDMVTATAFLAEIGDLTRFRTPRQLMAYLGLVPSEHSTGGTIVRGPITKAGNRRARRLLIESAWAYRHPPRVGKDKQAKVAAAPRAVREIAWKAQHRLYARYRALTRNGKLKTVAITAVARELAAFIWAISREIANTGDAAAQQGIRG

SEQ ID NO: 288010 - protein, 435 aa, unidentified
MKVTYQTCCGVDVHKSFLVATIVKTTGGIEPSYQKKRFSTFNNSILEFKQWLLDNHCHDVCMESTGKYWVPVFNLLEDKINVVIANPKWVKAVKGNKDDTKDSKWIGDLFRLGLVKGSYIPCKKVRILREYTRYRYKLVSCRSSEKNRYQNALTVCNVALDSIVSDIFGKSSTSIIDYLLEQSGTSINHEEIASKLLRSLKSKEDAVIESVEGYQMTDAQKYRMRLVRAHMDYITAEINDVDKMIENMISSNPDFENAVQFLCTIPGVKRDSAITIISEIGTDMSQFSSSKRLCCWAGLTPGSNESAGKKKSVRITRAGVYLKPALVQCAHAAVKSDKSPYYKKKYESLVKRRGKKRAIIAIARMILTAIYQMLSTGEQWNPSDLYKIDMPVALVEKQKAKAIKQAKKLLQREGLLPPQPYVITDYETLFSGIHQ

SEQ ID NO: 288011 - protein, 347 aa, unidentified
MLIIGCDFHPSFQMVSILDQPTGEVRQMRLGHREEAERFYRSLAGPVRVGMEACGQWVWFERLLAELGQELWLGDAGQIRAMAVRQQKTDRRDAEHILNLLLQDRFPRIWLPSLEERDVRQLLLHRHKQVQARTRVKNQLQALALSQGVQRKRKLWTEKGRAELEQLPLLPYAAQRRQHLLQSLEQLEEEIRELDRRVETEVGRRPAAVKLRTHPGVGPVTALATVLTLGPVERFASARQVASYLGLIPREHSSGGRQQFGRLSKQGNPFLRFLLVEAGQSAVRGDQQLQRFYRRLAVRKHRALAKVAVARRLALRLYWMLRYDCSYAQLMQGRLADEPESFCGRSN

SEQ ID NO: 288012 - protein, 395 aa, unidentified
MFIVGIDVAKRSHEVCMITSDGQTVQRPFSIRNNCTGYNLMLEKIRKHTNIKSQIVFAMESTAHYWLALFTRLRKDGYHVILLNPIQTSAMRDMFIRKIKTDAKDSFIIAELIRFGRYAESNVAQDRLLALKELCRNRFYLVDMAGDLKRKLIALIDRVFPEYEAQFDTIFCKSSVAVLKKYPTPQKLSNAHLDKLTELLWNSSNGHFGEWKARELKELARNSFGVEDCDGAYSTLILLMLDQIQSLSGKADALEKEISRLFQSFDTTVTTIPGVEPIIGAVILSEVGDISRFSSADKLAAYIGVDPSVNQSGEFQAAHAHMSKRGSPYLRRCIWMASQVAVQRDPMFRAYYEKKAAEGLKYMTIIGHVTRKMTAVVFAILRDHKVYEPILPTAA

SEQ ID NO: 288013 - protein, 332 aa, unidentified
MKIEYIHHLTSVGIVMTNAKVEFEQIIERGCGIDVHKETLTATIRGIGIQETSRVFSTFTSSLIEFKEWLKTEGITHIAMESTGVYWKPLFNILEEDFLIILVNARHIKNVPGHKTDKKDSSWISKLLLSGLLKGSFIPPKEIRELRDLCRYKKKLINQISSEKNRLQKILEDANIKLSSVVSDVFGVSGTRIIDAIIEGKQDIDELAGLCHRSLIGKREKIKESLNGKVTDHHRFMLQTIKKTIEGLEEIIQEIDKRIDKQTESYTVEIELLETIPGVGKEAAITIISEIGTDMDVFPNEQHISSWAGMSSGNNESAGKKKVAERLTEINI

SEQ ID NO: 288014 - protein, 450 aa, unidentified
MEKIRKVSAPVKGLSTPPSMTRGLRRQQAKMRRRREAVPAGALVVGIDLARERQAVSFLVRGEVLGRRRLTCEPQDLTCVLDEAQVLAAHHASSGIVVAFEPAGHYWCLAAEAFERAGAPYVLVQPLSVKRAREESRYTPEKTDPRDADLIGQLAAQGRFTDTRLPLTSDEDAAWQLAREYFRVRKLAAAERTRLHNFWHRMLPEFFSVLRDPTGKTALAISAAMGPLSELATMTSRTWLARVRKAAQGAQILTSRAVALLPLLKDAHRDPLRRSGEGMPLRIRHAAERRRLLEAQKAYLHEELVRRYMVRPEAVLLDSIPGSNPLYSALILALVGDFHRFDDPRAIVKLAGSEVNHYASGDWKGTSRISHRGRSALRAAAYQQARQLVANNEDFRARFHTLIHRTTRRPLTLKAAYVAVMNSYLRIAHGLVTRQELYRPLAERAYAAVP

SEQ ID NO: 288015 - protein, 413 aa, unidentified
MKVKNKITHFAGFDWARDHHDVIIVDTIGKIVADFRIEHSPAGWKSWEEKISPYPHLGVAIETNFGAAIEHLLASDVTLYPVNPANAKSYRKRKCSSGNKTDRHDAWSLADALRVDGHHWRTLADQDPIVAELRILCRDEVTLIAERTALINQLRQALHEYYPAALEAFGDWKTLSAWAFVERFPTAAKLTKAGKTKWDKFLHAHKLYRPQTYAARLSAFQQAGEWKAGEPIVQAKSLYALSKCKQLRVLQKQLDQYRKRIEQLFETHPDCALFGSLPGAGPKLAPRLLSEIGSDRSFYDEPGGLQCMAGTAPISFQTGKIHKVYMRRPCNKNLRHAMHLFADKSRKQSAWAASYYEGLRERGKTHAQALRCLGQRWLKIIWKMWQTQTPYDAELHMKNQIAHGSWVLKLQSK

SEQ ID NO: 288016 - protein, 309 aa, unidentified
MKQAIVYIGIDVAKAHLDVAWAGIFRRLPNERSGHAALVRWIKQSATPVQLICEASGGYEQALLESLEKSEVKVTLVQAVRVRHYARAAGILAKTDRIDAKVLAAFGSAMQPQPTSPLSAEQKRLRQYEAQRRHLSRTLVAEENRLAQLSCTELRTLSRSLISKIKTQIKTIDRGISDLIAQDQTLCVKAQKLTAISGVGVRTAALLLAQMPELGQLNRRQAAALAGLAPFNHDSGSVRGKRAIFGGRPALRSGLYMAALSAARFNPILSNFYQRLRAKGKPHKLALTAVMRKLLLALNHTLKPLPCTT

SEQ ID NO: 288017 - protein, 335 aa, unidentified
MKNYLFHVGIDVSKLKLDVVVLDIKSSNQTEHFVVGNNQKGIKSILDYLQKRKVNPITTLFCYESTGVYNYPLNVFLSEKKLDYWVVPAIEIKRSKGIARGKNDKADAKDIAFYSLRNIDKLNLSSVPEKEIQQLKLLFSEREKLVKAILLFESSKENKGFISKDVYREIALINTKTIHNLNHSLKIIEKKMKTIIVRNEQLKQQYDLVKSIPGVGEQTAIYFIIATKGFKAFKTWRKFACYSGVAPFEYSSGSSVRGRTKVNHLADKKMKSLLQMCAMTTIKYDPQLKEYYQKKKEEGKNGMLVLNNIRCKIISRVFAVVNRQTPYINTYKFAS

SEQ ID NO: 288018 - protein, 343 aa, unidentified
MYYIGLDVHKKTISYCVKDAAGCVHQEGKIGSTRRELDAWIKTLPQPRMIAMEATIFTGWIYDHLLPHAEKVKVAHPLMLRAIAAAKKKNDQIDARKIADLLRCDLLPECHMASTEIRDRRRTLRYRGLLVRQMVQMKNRVSGLLMETGVSYNKRRLHKVGYFAELLSTNEEVNQCIRPLLKLSREAIVRCQKTDYALVSSLERDPLLAERLKRLRTVPGVGPITALTWALEIGDVTRFESIKQAISYCGLCSAEKSSADKVMRTPISKQRNKHIQRALVEAAKLAPRQCHELAVIYEKEKQRGNGNRATLAVARKMVAYMLAVERRRQDFVPAEEFAGTAAA

SEQ ID NO: 288019 - protein, 333 aa, unidentified
MNEHAVGIDVSKKKLDVCVAVGDKIKTKAIKNTAAGHAELDRWLAQRDLPGDTPIVLEATGPYSEAVAIALSDAGWAVSVVNPARITGFAQSELSRNKTDKADAKLLAKFAQRADLDIWAPPSLAVRELRALVDRLQALTDMRQQELNRIEALEQGTPTNVTPMVEEHVDWLNVQIDKIQSDIDDHIDGHPELKRDAELMQSIPGVGNRTSARFLAYIGDVRRFKSAKALAAFVGVTPKQRQSGTSINGRTMISRAGHTAARKSLYMPGMVAKRHNPVIIAMAKRLEQKGLAPKAIVGASMRKLVHLIYDVIKSGQPFQADIPMAGLEIQEGI

SEQ ID NO: 288020 - protein, 320 aa, unidentified
MRFYTKQHQFYCGIDLHARTMSLGILNQEGEILVHRNMPAGPDPFLKTIAPYREHLVVCVACICTWYWLADLCAREGIPFVLGHALSRKAIHGGKAKNDNIDAQKMAVLRRGGMLPQAYVYPAAMRATRDLLRRRMHLMRKRTELRAHIQHTHRQYNLPEIGKQLAYKANRDGVAARFPDPAVPKRLEVDLALIDHYDHLLRAVELAVRKTAKQHDANTLYRRRTVPGIGEIRSLVLLYEIHDLQRCPRVQDFVSYGRLVKCAKASAGKRYGTSGTKIGNASRKWAFSEAAVLFLRANPAGQKSLARLENKHGKGKALTI

SEQ ID NO: 288021 - protein, 482 aa, unidentified
MKAKQKEPTEKSTGQSSQLNWRQMNRKQRRDLERKIQSADLTLQLVHPDAAGIDIGNESHYVAVPPDRDSQPVQHFGCTTAELRAMADWLKHCRIRTVAMQSTSVYWIAVYDVLEQAGLEVYLVNARETKNLPGRKSDVQESQWLMKLHTYGLLRNSFRPPQEIRTMRTYWRQRNDLVRSAARHIQRIQKTLTQMNMQLANVLSDVSGVTGQAIIKAILAGERDPQKLAAFRDPRVKASEKDIAQSLEGNWQEDLLFVLKQEQAAFEFCRKQMAECDRQLEQYLQKMEDRSQGASLPEEKRKDRLQKKKGNQPQFDLQQQLFRMTGTDLTQIDGIDVMTATTILSEAGWDMIKWKDEDHFVSWLRLAPDNRISGDRIIGKGRLPTSNRVTVALKLAASNLRTSQSYLGAQFRRLRARLDTPVAIKAMAAKLARLIYRMLRYGTKYVDHGSRYYELQQRTREIRRLKLKAATLGFHLVQSTAA

SEQ ID NO: 288022 - protein, 287 aa, unidentified
MTMLAEVVDVVIGVDTHKHTHIAAVIDARTGAVLEQRTADTDPDGYAELVAMADRHSGLRAWAIEGTGGYGAGLTRLLAERDEMVIELDRPNRPARRNGAKSDSLDAERAAREALAREHLAQPRAAGERAAASVRLAARRSAVDASTVAQRQMLSLITAAPEVIHSRFRGLSTALAITTAATLRVLKTWDLETCTHADGIRALARRIKLMQTEAADHEKAILDTIKAWRPDPLDQTGVGPIAAATVLCAWSHPGRCRNDAAFANLAGVAPIPASSGRSRWRPMKWWK

SEQ ID NO: 288023 - protein, 387 aa, unidentified
MPEQFDSHNAMAAFDHDSTLVVALELSGKSWQAGAVVPGAARRPRRRLEPRDIAGLLKAIERWKAEAAGASREVRRVALTYEAGRDGFWIARDLLARGIEVQIMHPASIPVARPGRRVKTDRIDLDMLLRTFLAWLRGEPRVCSMVRIPSEAEEAMRRPGRERERLVGERIQLENRIENLLCLHGVADFRPRLKKAAERLDELRSFAGAPLPAQTMAELRRLMARHRLLSEQLREIEAERDRVARVAHPDGAERMIQHLAQIVGLGLETATLLVREMFCRPFRDRRAVAGFAGLTGTPFQSGGMAREQGIGKNGNPRVRRIMVQLAWRWLRFQPQSALAQWFAARTDGAKGRIRTVMIVALARKLLVALWRYAGTGEVPAGARIAAA

SEQ ID NO: 288024 - protein, 387 aa, unidentified
MAEPSFEVILGVDTHAQVHVAAVLDHLGRLQATLTIPATPAGYRQLLTWAAQHGHLTRAGVEGTGTYGAGLTRCLTRAGVKVIEVDRPNRQRRRRRGKSDPTDAEAAARAVLAGEATATPKTRSGIVESIRVLRVARSSAVKARTQTANQLRDLLVTAPDTLRAQLYPLPTAKRVAQLAAQHPGHGADPAVATRRALWYLARRYQTLTAELDALNADLAALTRRAAPRLLARYGVGVETAGSLLVTAGDNPDRLGSDAALAALCGASPVEASSGKTVRHRLNRGGDRQANNALWVIALTRLRDDPRTLVYAERRTKQGKTTKEIMRCLKRSIARELFPLLKADLHDACQLSLTQELRSVALVPARPRDEAAVLSARVIGSTPAKLRG

SEQ ID NO: 288025 - protein, 438 aa, unidentified
MFLRATGDEKVVLRAPQYKGTAPQERCEHTRGDSMFYAGIDWADTKHDGLILDEAGRKLGSIRVAHTPEGLAKLDEWLAHLLGEQSREQMACIIETTHGLLIAFLLEHGWPVYPVNPRTVDRKRSASGAKTDAIDAYLLAKTGRADFADLHRLTPDSEKVAELKTLTRDQDSLIQMQTRLVNQLTACLKDYYPVALKLFSKLQQKSTLLFLQTYPTLEAAQTASVEQLRHVLQSAGHTTASKVAPTIFEQLHEPSLRANAVTTRTKARLTMALIAQLLPLVEQIAAYDKEIEQLFLSHEDNEVFRSLPGAGKRLAPRLLAEIGDDPTRYEAAASLQALGGTSPVLFASGNYSKPHRRLGCIKPLRNALHQFAWQSTLQEKWALAYYERKRAEGKSHSVAVRALSNIWARVLFAMLKSHKPYDPTVFEQAQRLHAPKAA

SEQ ID NO: 288026 - protein, 408 aa, unidentified
MDVVYSHVCGLDVHKKTVVACIITPDEKEIRTFSTMTDDLLQMVDWIKSKGCTHAAMESTGSYWKPVYNLLETEEIQTLVVNAQHIKHVPGRKTDVKDAEWIASLLRHGLLRGSFIPPRDQRELRELIRYRRSLIEERAREVNRIQKVLEGANIKLSSVASDIPGKSARAMIEALIAGNVDPESLSELALRRLKNKKVDLQRALKGLIGPHQRLMLQTQLRHVDELDALIQQLDEEIKRRMLPFEEDLERLDTIPGVARRTAEQIVAETGTDMSRFPSAAHLCSWAGLAPGNNESAGKRKSGRTTKGNPKLRSALIEAARAAVRTKHTYLSSLYHRIAARRGANRAAVAVAHRILTIVYHLLKEKQVYNELGPHYYEERRREQMARQAIRKLEMSGYDVMVKEREQTA

SEQ ID NO: 288027 - protein, 335 aa, unidentified
MAIVTIGLDTAKSWFQVHGVDESGQVVLRRKLARGRVLQFFAGLTPCVVGLEACGGAHFWARELAKLGHDARLMPARYVRAYVKTNKHDAADAEACCEAVQRPGMRFVPVKSEEQQGMLMIHRSRDLLVRQRTAAVNALRGHLAEYGITAAKGTARARELMSLVDTDERVPAIARDALLQLVEQIRDTERKIEAFDKQILSLARENEVCRRLMTVLTIGPFAATALTATVGDPRYFASGRHFAAWIGLVPKQYSTGGKERFGGISKRGDAYLRKLLIHGARAAVHRVRSHQRPGAWIAALLARRHFNIATVALANKTARIAWAVMVNGSNYRAAA

SEQ ID NO: 288028 - protein, 309 aa, unidentified
MKQSVVYIGVDVAKANLDVAWAAASRRFPNDPNGHAALVVWIKQSAAPVQLICEASGGYEQALLESLEQNNLAVTLVQAIRVRQYARAAGILAKTDTIDAKVLAAFGAAMQPKPTPPFSAEHKRLRQYEAQRRHLSKVLLAEQNRLAQVSCAELRSLSRSLISKIKKQIDTLDTGIANLIAQDQVLCVKAQKLTAISGVGARTAALLLAQMPELGQLNRGEAAALAGLAPFNHDSGSIRGKRAIFGGRRALRSGLYMAALSAARYNPILSSFYQRLRAKGKPHKLALTAVMRKLLLALNSSLKPQPILA

SEQ ID NO: 288029 - protein, 414 aa, unidentified
MDVHFANCAGLDVHKQTVVACRIARQVNGKRVMETRTFGTMTADILLLGEWLGLAGVTHVAMESTGVYWKPIWNLLEANFTLWLVNPQHIKQVPGRKTDVKDAEWIATLMEHGLLKPSFVPPAPQRALRELTRMRSTIVRQRSEMLNRVQKVLEDANIKLASVASDAMGVSGRAMIEAMIGGESDPKVLADMALGKLRNKHDELEKALLGSVNRHHKIILQQLLDLVDGMDKSIATLDKEIEDGCAPFIEAVKRLDAITGIGVPTAQTVLSEIGTDMSKFPSDNHLCAWAGLAPGNNESAGKRKSGKTRKGNQSLRSALVQAANSASRSKDTYLSALYKRIAARRGKKRAIIAVAHAILKIMYHMLTKGTPYNEMGADYFDKLSPKRTANRLIKRLEHLGYNVTAATETQAIAA

SEQ ID NO: 288030 - protein, 355 aa, unidentified
MKQYIGCDSHARYSIFVSVDEKGGVGAPVRVEHGDRSLRDYLGTLDRGTPVAVEASGGWYWFMDELEQAGLDARLVNPLEAKRRMGGKHKTDKLDAKGLAILLRNGTLPEVWIPPAGLRDLRGLMRTRLATRSQTTVLKNRIHAALRRYGTLQGEPSDDLFGKKKRLLLSVAIGRLPEQTQRATRHEWEMLDLIEEHIKELEVPIRERIGRLGWVRLLKSMPGVGEILGATVYLEIGDINRFPAPEHLARYAGLVPTVHASGGKSWSGPTSPQANHYLRWALVEAANAVLMHRHRYAGQHVIELYDRLKKHKCHGKAIVALARHLAEASWWILKKRQPYRPPHAQAAAMSASRNG

SEQ ID NO: 288031 - protein, 424 aa, unidentified
MLGVGVDWAESFHDVALGRPGEGVISQFRIEHGPAGVQRLVARCLELEPDPAEVRVVLETRHGLLVEALVDAGFTVLPVNPDLVARRRGPAKKKNDAEDARICCLLALDAYLDLRRLIPHGQAGAELRAIARDDERAARDERRIGNRLRADLLAVFPAAIDIADGDPGAAVFLRLLERWPSAQALAAACPDEVEAFARSCRHGWPGRFADRVTAAMAAPRLAARPELARAKAGSIRLAAAQLLAIRAQRRDWERRMGELLLGAPRYGRGKTPKDPDPGKAFPGGETYLSMPGLGDRLAARVAGEIGEHFEQFTTPNALQCYAGRAPVTRRSGRSEFTIARRLAYNRHLGEAVQQWAFCSLTRSAWAREFYDAKIAAGDTHHAALRKLGNRWLEVLWHCLRLGVRYDEAIHAANRARARARKEAA

SEQ ID NO: 288032 - protein, 408 aa, unidentified
MNTLYVGIDVSSKSNVVYLMLPNGDKHSNFSVANSHEGSTQLVKRILSALTSLSLDTVLIGLEATSVYGDNLVYFLREDASLAPFHRKIHVLNPKQVKKFHDTYNDLPKNDYVDSFVIADCLRFGRINKEVYLGDYRYKALQNLTRARFFAVQNLIKEKQRFMNVLFKKYFTMTQEKVFSDTFSTTALAVYDEFDSAEALANMDLHELTDFIIEKGKNRFPDPDAVAKAIQKAARSSYRLPKMVNDSVNQVLSISITSMKALESQIKEFDKAIKAQMELLPNVLISIPGIGPVYSAGIMAEIGDINRFDNQAALAKYAGLAWKQHQSGDFEAEVTRLIPSGNRFLKYYLCEAALSLVRCDKEYSDFYHLKYKEVNRCQHKRALALTARKFVRLVFRLLKDNRLYCPAK

SEQ ID NO: 288033 - protein, 409 aa, unidentified
MQPIIKSCCGIDVHKKMIKACIAKGPLDQPPKFEIKTFSTMTSDLLRLKDWLRQNEVEKVAMESTGVYWKPIFNILEDAFPVVLANPQHLKKTPGKKSDVIDCEWIATLLRCNLVPGSFIPTKPIRELRDLNRTRRKLVGVMAADKNRLQKVLEDANIKLSSVVSKVDGVSSMNLIQALMTKDELTRDEIKALVHGKLRSKVDQLVEALNGKLTDHHRFLLKIHLENIAFMAEQIQELDDEIAKRMIPFQEEAHLIQTIPGISTTTASAIIAEIGVDMSQFHDVARLSCWAGICPGNNESAGVKKSGKVRKGDKFLKATLVEAAWSASKKKGSAYSAIYNNIAKRRGKRRATVALGHQILMDVFRVLKTGEPYVDEGAEAVFQRNSAARQQSAIRLLERSGYMVTKAAA

SEQ ID NO: 288034 - protein, 373 aa, unidentified
MGWTGRAPALSGRASKHEEHAAMSQKTNAVAVRTIGIDTGKNTFHLIGLDEQGAIVLREKLARGRIGRRLANVSPCLIGIEAGMATHYVARELLALGHDVRQVPPAYAKPFRQGHKNDFRDAYAVAEAVQRPSTRCVPVKTDDQLDLQALHRVRSRLVGQRTAVINQIRSFLLERGIAVRQGPRFLRRQFPEILAKRIDVLSPRMIAIIEDLGGDWRRLDERIERVTEEIEQLAHGSESCRQLMTVPGIGPLIASAMVAAIANGAAFAKGRDFAAWLGLVPKQMSTGDRTILGHISKRGNRYLRTLFMQGARVILLRPANWARHSFGPWLTAAAKRLHHNVLATALANKLARIAWTVLAQRRNYETRVVTEAA

SEQ ID NO: 288035 - protein, 394 aa, unidentified
MRFAGIDIAAETHVVALVDEASQVLVRPTPFGEDAAGYQTLRTLLGGPEDLLVAMEATGHDWQNLFAVLVAEGFAVALLNPMRTRRFAGEDVARAKTDAIDAVGIARFAAQKRPAVTRLPEAATRELRELVRLRDRLRQEFGDRVRQLHRVVDLGFPEFTRLVPDLKGRLATGLLAAYPTARAFAGVSVARLAAVRYDGVHRVGADLARALLAAAKASVGQHHGPAYQLQVRYLCEDLELLRRRIDALEEDVATTLQAHEVGTLLTTITGIGVQTAARLVGELGDPAAFRSAAALAAYVGVVPGTRESGKRRLTHARLAPTGHARLRAALWMPTLVAVRTNPWLRAYYARLRARGKLPKVALIAALHKLLFAVYSVAKHRRPFVPHLTGQGVQA

SEQ ID NO: 288036 - protein, 369 aa, unidentified
MADRITYVGLDVHKESIVVAVASGDLRGEVREYGRIANTPTALDRLLRKLGGDGVSLRFCYEAGPCGYGIQRHVSAQGHECVVVAPSLIPRRTGDRIKTDRRDAASLAKLHRAGELTAVWVPDAWHEAMRDLVRARLDAVHSLRRARQQLSGFLLRQGRHYGRPAWTKLHRRWLAGLNFEQAVHHIVLEDYIAAVEAAETRRDRLTTQIEAMLPDWTLAPVVSALQTMRGMALVNAATLIAELGDLSRFANPRQLMAYLGLVPSEHSSGASVKRGGITKTGNGAARRLLIEAAWSYRFPARISRELLLRQENQPKPIRDIAWKGQVRLCARYRKLARTGKPANVVTTAIARELAGFVWAIARRVTVTPG

SEQ ID NO: 288037 - protein, 391 aa, unidentified
MTILVGIDVAKDKHDCFFMNSEGEVLAKPFTIFNNKEGFDFLYEKIQSVSSSDNIKVGLEATGHYSYNIIGFLLNKGLATFILNPLHTNLYRKSLSLRKTKTDKIDSKTIAMMLLSDVSLKSYSDISYHNEDLKSLTRYRFSKVEERAKLKTSLSRLAQILFPELEKLVPTLHMTSIYQLLEEFPSASAIASVHLTRLTNLLSKTSKGHYDRETAIKIRDAAKNSIGSNMPAKSLELKHTIKLIRALTIDIGEIEAEISKMMDKIASPITTIPGIGRNMGAMIISEIGDFSRFSSPDKILAYAGFSPSIYQSGKLDNCYAHMEKRGSRYLRYALFHATKLVCHWDKTFADYLAKKRAEGKHYYVAISHAVKKLVRVIFHIEKTKQAFLKAS

SEQ ID NO: 288038 - protein, 430 aa, unidentified
MHEEVYYERCAGIDVHKKVIVVCLRIGRNSETRQFGTLTHELRGMVAWLKENGCQMAAMESTGSYWKPLYNIFEQENLPVMVCNAHHIKNVPGRKTDINDAQWIARCLSQGLLNPSFIPDREQRELRELTRFRQSQIQERARNINRLQKFLEGANIKIGSWLSDVEGKSATQILELVIGKPDFTVDDVAARMHGNMKSSPEELFLSLEGYMTPLQRELFAHIMDIIRQQTSQIEKTDAMIKRSLSNNYKAAVKALDAIPGIGEISAEQIIAEVGTDMSRFRTPQRLSKWAGVCPGNNESAGKRKSGKTPHGNKTLKSTLTQSASSAKKKKDSFFHAQYNRLVTGRGKNKATMAVAHSLLIAIFYVLSGKDFKDLGADYYTNFNREKKINSHVKQLSKLGVSIPEDVLREAIIEAVRTAEKAARAAPVKSA

SEQ ID NO: 288039 - protein, 427 aa, unidentified
MNQTMQNDPVDEYAAFIAIDWADQTHVYSLKVAGESKKEIGTLEQKPEVIGPWVAKLRERFRGRPVAVAVEQSRGALIHALLSYDFITIYPLHPTTVAKFREAFKFSGAKSDPLDTNQILEILTKHLELLNPLRPDTEETRLLGRLVEDRRKTVDLRTSQIQAALAVLKEYFPQAIELCSSNLSSRLAYDLLKKWPTFEAFQQAKPATIKRFFYGHNIRSPQIIDKAVEGATHGTALTTDAAIVESSSRICLMHLQVIQTLNPIIEDYEERIQKVFNGHPDAFLFEKLPGAGQALAPRLLAFFGTDRTRYAAAANVQTFSGIAPVTKSSGKSKVVYFRCACPKFDRQSFHEFARLSIRSSQWARNYYDYYKAKGKKSHAIVRALAFKWIRILFRCWQNRTAYKEDTYMESLKKRGSIFATLHLEKNS

SEQ ID NO: 288040 - protein, 428 aa, unidentified
MDSTQNNRLEQITDKTLIVGIDVAKDKHVARAIDDRGRDLAKRLVFENSLTGFQSLLDWAEHLAEQQQRPHFMFGMEPTGHYWLNLAYHLKAQGLHAVVVNPTKVKRTKELDDDSPTKNDTKDAKVIAQVVRAGRFHEPILLEGLYAELREGMKLHDIMEKDLTSIKAQVQNALDRYFPEFTTVFKDWTKKTPIHFLKKGYLPVDIASCSEEALLAEIKEAAKRGVGIKQARSLKHAAETSVGMTVGLTMAREEISYLIDQYVAIKGRIEAHEARLEELVLQVPGARQMIAIKGVGVMTVAGFFAEVGDLSNYQDPRQIIKLAGLNLQLNQSGKFKGQTTITKRGRRRLRSILYLAARPLSANNEGFKQLHHYYRNRPDHPLTGKESFVALGRKLIKIFYVMGTRNCAFDGERMMRDIPSLRSLQKVA

SEQ ID NO: 288041 - protein, 355 aa, unidentified
MENKKYIGMDVHQATISVAVRDSAGKLVMESIIETKAATILEFVQGLRGSLWVTFEEGTSAAWLYDLLLPHVTKVVVCDPRKNVLLKSGNKNDRVDARKLAELLRCGLLSPVYHGESGVRTLKELARSYLAIAKDLTRVMNRLKGLYRSWAIPCAGQKVYSPHHRAAWLEKLTQAGVRRRAERLYQQLDHLQPLRQEARRELLAESRKHPASGLLRQIPWLGPVRVALLIALLQTPHRFRTKRQLWAYSGLALETRISGEYRFSGGQLERSKRQPTLRGLNANHNHDLKNLFKSTATVASASAGPFQDFYIALLAKGMKPTMARLTLARKIAAITLMIWKKGERFDPEQLKRQAA

SEQ ID NO: 288042 - protein, 391 aa, unidentified
MSLYFVGIDISKYKHDCCIISATDQKVISKFSIKNDKVGFEELITTFNSLSSPEDIRIGFESTAHYALNLELFLENAHHSFMEVNPVLIKEYKKSTTLRRTKTDSVDCESIARWLMTVEYKPHSKGFYHAYSLKSLTRLRDRLIRQRSFYLVKITNVLDHTFPEFKPFFNERLSKTALYLLENYGSAEKMARMNSVSYEKLRSISRGKFSPQQFIALKELAANTVGVNNSIFDIELNSLLTLYKTLVTEIDTLEKEIYRLIEEVHPHYLSVPGIGPISAAIIYSEYGDISNFDNPGQMLAFAGIEPGINDSGTESHGGRMVKRGSSQLRYALINCCLPLIRFDMTFATYYAKKRAEGKPHRVAITHVAKKLIRVIYALERQDTDFCVQKLR

SEQ ID NO: 288043 - protein, 408 aa, unidentified
MNAVGIDVSKGKSMVAALWPMGEVALAPREFLHTAPGLDQMAHAILALGEDTRVVMEATGRYHEPVAAALSAHGIYVCVLNPLYIKQSGAGSIRKVKTDKADSLKIAKYGLDNWVDLREHTAMDTIRQQLKLCSRQYNIYMKTEVSLQNNLISLTDKTFLGVNELFSSPTRADGHQKWIDFVMTFWHRDCVCRISENAFTARYEKWCKRKGYHFRTEKAAEIYARSCELFVTLPKDDNTKLLITTAAQQLLTGKMTLAALRAEMSRLAKQLPEYDTVHAMYGVGETTAAQLIAEIGDVRRFPRRSSIVAFAGVDPAVAQSGKHEVQSTATTKRGSPHLRKTLYQIVCTYLRKAPEDEPVYQFLDKKRSEGKPYFVYMTAAQNKFLRIYYARVKECLEAFDTQQNTVQD

SEQ ID NO: 288044 - protein, 404 aa, unidentified
MGLDIHRDVIVACLAKGELGTDPEIEIRSFSTLIPEMRKLRDWVLEAECRYVAMESTGIYWQPIYEMLEPCFDGQINILVVNARHMKNVPGRKTDMRDAQWIATLLRAGLLKGSFIPDKTFRELRHLTRYRKSIVRDITAQKNRIDKFLQSSGFRFTAFLSDAFGASGRNIIRHLMEYGNISREALDRCLKTQTRKRIDEILIALNGSLSEHQRGFLRMIFGHLEALEQHRHTVEDAITKEITKHEEALSLLCSIPGIDVTAAAAIIAEIGTDMSAFPDSQHICSWAGLSPGNNESAGKRKSAHINKGNPYLKSMLCEVGWVISGKRSLYLSGWYWRIKQRKGAKRATIALARKLLALIYTMLKTGSPYNEDCFEIRRKQSERKRASRMVNELQKLGYFVVAPS

SEQ ID NO: 288045 - protein, 346 aa, unidentified
MQFVGLDVHAEVTSISVRNARGVVMKRSVVPTTAVSLRRALGGVRGRACIVSESGPLARWLRDTLETRLREVIACDRRRTRLAAGAKTDRIDADKLSELLWKNELQAVYVPRGDHVGLRRLAAHYVRMLRDRARILHRLRALFREHGLRVATPRSAPWRVPVYRLRDTAAKYVARAYLIQLEAVSELLNAARLELLEVARTFPAFELLQTVPHVGEIRAAELIAIIGMPGRFKSRRQFWSYAALGLIQMTSAEHRVTNGEVVRAERTRSVRLAKTGQPLLKKILRDMALFASVGRGIFRDVYEAHVARGLKPSIARLSLARKIAAVIRAVWRSGKPFDATLVHRPA

SEQ ID NO: 288046 - protein, 411 aa, unidentified
MDVLIERCAGLDVHRDTVVATVRRPGPGGARRSETRTFTTMTGQLEALAEWLAAEKVTLVGMESTGIYWKPVYYVLEDSFPVWVINAEHLRNVPGRKTDVADSMWIAQLIEHGLVSPSFVPPRNVRLLRDVTRHGRRLTEERTRAIQRLEKVLQDAGIKLTSVASTILGKTGRAILAALLAGEEDPAVLAELAKGRLRPKIPALREALTHRFRLEHHGGLIAQMLAHIDFLESAIAETHQRTEVLLRPVADIVELVMTIPGVGRRTAEVLIAEVGLDMTVFPTAGHLASWAGICPGNNSSGGKHRPGRTRHGSMWLRIALTEAAQVAARGKGTYLAAHHAQIRGRRGTQKAIGATRHDILIAYYHIVRDRVPYQDLGPDWNDRRRSTAQQTRRLVRQLERLGVTVTVAPGA

SEQ ID NO: 288047 - protein, 318 aa, unidentified
MDTTALFVGIDVAKAHLDVALGPAGATSRHPNDEAGIAAILALLAGSPPALIVLEATGTLEVPLVAALAAAGLPVAVVNPLQARRFAQSIGRTAKTDALDARVLALFAERVRPEVRPLPDAAARDLADLLARRRQLVAMRTAEKNRLGTAAAAAVRADLEAHIAYLSRQVEEMDRRLAEAVRESPAWRERDELLRGIPGIGPVASRTLLAELPELGTLDRRKIAALVGLAPMNRDSGTLRGRRMIVGGRAAVRSALYMAALTAVRHNPALKAFYGRLVAAGKAKKVALAAAAHKLLTIADAILRSKRPWDPAKAGSQA

SEQ ID NO: 288048 - protein, 344 aa, unidentified
MNDTTIAVDVAKAVFEVAVSAQPGHVRERHRLSREGFARLLRAQPAATVVMEACGSAHYWGRRAQQQGHEVVLIPPHVVRPYVRGNKTDRTDTEGLLEAFRNEEVRAVPVKSETQQALAALHRLRSTWVATRTARLNTVRGLLREFGVVIPVGARQVVPHVRALLEDADAGIPGLLRPALAEAVAEIGELETRLRAVERHLETAAAGSLVVGQLRTVPGIGVLTATALVAAVGDVQRFPSARHFASYLGLTPREHSSGARRRLGAISKRGDTYLRMLLIHGARAVLWHAKRPSARPLDRLRTWALQLERLRGHNKAAVALANKLARIVWAVWTRGTSFTALPMA

SEQ ID NO: 288049 - protein, 310 aa, unidentified
MDAVFVGIDVSKDRLDVHVLPSGEAFAVARNGEGLAALNERLSALGAKTIAIEATGGFETVAAASLASAGLPVVVVNPAQVRAFAQALGKRAKTDPIDAAVIARFAEATRPEVRPLPDEQTQALADLVARRRQIVQMITAERQREKRATVKRIKRSITRLLAALEKELSELDQEIDDTVRGSPVWRRNEDLLKSVPGVGPIIARTLLAEMPELGTLDRREIAALAGLAPWTRQSGTWKGKSFIGGGRSSVRAALFVGALTAARHNPTLKAFHQRLIDAGKPKIVAIIAVARKLLTILNAIIRDQKPWQTA

SEQ ID NO: 288050 - protein, 349 aa, unidentified
MTMVGGFDVHRKQITFDYVDDDGVVHWGEIRPATRKMLRGWLGKHCPSGDAEFALEGCTGWRYVVEELAMAGVVAHLGDPAEIAGLRGPKKRAKTDRADARLLRTLLVEGRFPELWIPPAQVVEVRTLGRLYCALMEERRAWQQRIHAQLFHQGCPPVTALLSAAGRDALAGAELSGVGRQYVDTALRRTDELGAEIVPLRAQLVNFARHQRGCQALQARHYGIGWLCAAIIWAEIGDARRFSSSDQLVRFAGMNVTVYSSDTKRSPGHLSRQGSLELRWATFEAAKCAAWPGSPDYGYYHQLATKHDGHNGKNPTLAVERKILRRCSHTLRELGDGALSPPQPVREAA

SEQ ID NO: 288051 - protein, 391 aa, unidentified
MIYVGIDVAKDKHDCFITNSNGEVLFKAFTISNNQDGFNFLYQRIESVMEDVTKVKVGLEATGHYNYNLLGYLIDKSLPTYVINPLHTTLYRKSLSLRLTKTDKVDARTIAYMLMSDVNLKSYSDTSYHNEELKSLTRYRFDKVKERAKLKTSVSRLVCILFPELEKLVPTLHMASVYALLSEFPGAKHVAGAHLTRLTNLLSDASKGRYGKDTAITFREAARASIGSNMPAKSLELKHTIQLILELGSEIEEIENEIKIIMDEINSPILSIPGINYRMGAMIIAEIGDFSRFDSPDKILAYSGFSPSTYQSGQLDSAYSHMEKRGSKYLRYALYNAAKYVCHWDSTFAGYLAKKRAEGKHYNVAISHAVKKLVRVIYHLVKSNQQYIKVA

SEQ ID NO: 288052 - protein, 341 aa, unidentified
MEQATTIGLDIAKHVFQVHGADAAGHVLFRKRITRGKLLGFLAAQAPCVVAMEACAGAHYWAREIGKLGHHVRLIAPAYVKPFIRRQKNDAADAEAICEAAQRPSMRFVPVKTEEQQANGIVFRARDLLVRQRTQCVNALRGHLMEYGHVFPKGITHVETLVAVVEDPRSSLPDSVRVILKLLVDTFTALEAQITALDAEINQRSKSDPTARRLMTIPGVGPIASTAITALVPAAEGFPAGRDFAAWLGLTPLQKSTGGKQKLGAVSKRGERTIRRLLIIGASAVVQQASRRGAPKGSWLAQMLARKPKMLVTVALANKMARIIWALLVKGGTYRTPTAAA

SEQ ID NO: 288053 - protein, 422 aa, unidentified
MTRQKEEDYAALIGIDWADQKHDYYLGAVGTDIAECGTISSRPEKMAAWINQLRERFKGQKIALCLEQTKGAVLHQLMSVEFIDIYPVNPQALAHFRKAFAVSQAKDDPTDAQLMWEYLVKHRDRLRMWMPEDVDTRRLALLVEDRRKMLDLRTKLSNKLTATLKGYFPQALELIGMKVASPMACDFLQRWPSLGQLKKCRDRTVETFYRQHHVRGSERIEARIGLIRDSVALVEDPAIVETSALKVKALSRQMACLNEDLEEYDQCINALFVTHSEQALFDSLPGAGPALAPRLLVAMGTDRERFTCADEVATFCGIAPVTERSGKHTWVHWRLACSKFQRQTFHEFANMSRRQSLWANAYYEVQRARGKSHHTALRALAFKWIRIIYHCWKQQEVYDEKKYIASLEKRNSPLIKYMAEAA

SEQ ID NO: 288054 - protein, 384 aa, unidentified
MSADSRPEQSAIRTDLGAIFVSLELSRATWLITSLSPGRQKMSKHQVRGGDTAGLLARLAELQSRAHARTGQLFPLIVIQEAGLDGFWIHRVLQSEGIESHIVDPASIATSRRRRRAKTDKIDGEALIRALLAYKRGEPRVCAMVKAPTPREEDERRIGRERKVLTAERVAHVNRIKGLLFAQGISDYEPMHRHRRARLDDLTTGDGRPLPQHLKAQVSRELDRLELLLEQLKAVEAERDALLAATESPDKPALAALLLDLKGIGPEFASVLWSEGLYRSYANRRQVAAYAGLAPTPWQSGTVDREQGVSKAGNPRLRTTMIQLAWLWLRHQPGSALSRWFHERVARRGGLRKTMIVALARKLLVALWRYVTAGVVIQGATMKR

SEQ ID NO: 288055 - protein, 323 aa, unidentified
MTNESTEVIAGVDTHADTHHVALINEHGKHLADQKFAATGSGYRDIIDYITRDGPVAAVGVEGTGSYGAELARVLATEGFHVVEVNRPNRQERRLRGKSDPLDAYQAAQAVLSERGTSTPKTRNGYVEALRVLRTARTSAMKARTAVLTQISSLLVTAPEEVRAKYRGQGTAARLTAMGGSRPADDPADPATATAITLKRLAKRHQHLTVELTDCDTDLSRIISENAPALMEITGVGTAVASQLLVTMGDNPERLTSEAQFAALAGVAPIPASSGKTTRHRLSRGGDRDANAAIHRIALVRMSKDQRTRDLRQQTHPRRQKQA

SEQ ID NO: 288056 - protein, 347 aa, unidentified
MERASVTDANIIGLDLAKRVFQAHGARADGSVVFRRKLTRQQVLTFFSKQPRCIVAMEACATAHDWGRALQALGHEVRPVPPAYVKPFVKRQKNDAADAEAIAEAAARPTMRFVTVKSEEQQARAMVFRTRDLLVRQRTQLINALRGHLAEHGVVAPQGTTKVKLLSDVIEDVNTTLQPLVVELGRLYIDQIAALDGKIADLEKVLKREAARGETTSRLQTMPGIGPITAMAIETFAPPMESFRRGRDFAAWLGLVPIQHSTGGKQVLGRTSKMGQRDIRRLLIIGAMAVVKTAGRKNAPEGSWLARILARKPRMLAAIALANKMARSAWAMLTKGEDFRVPVATAS

SEQ ID NO: 288057 - protein, 317 aa, unidentified
MNRPHALGIDVSKKTFNAALLTDKRHYSKSFTNGAAGFRQLEAWLSAKNIEKAHACLEATSIYHLDLAHYLHASKHDVSVVNPLVIAGHRRSRLTRSKTDECDAKVIASYCDTARPKLFQPVPEKRTRLQDLIKRRENLERSVKQEKNRRERVRDSWVRQSIERMIDLLEKEIERVEQELEDHIDRHADFKKNAELLGSIVGVSSKTALSFIAFVDINDFKNARQVAAFIGLTPRLNLSGTSIKGQSPMSKVGNRHLRKALYFPAISAKQHNPAIAPWAEKLSNKGKVPKAVVGAAMRKLCHIMYGVLKHQAPFHTN

SEQ ID NO: 288058 - protein, 435 aa, unidentified
MDEVTDEPLYRDRVCGIDIGKAGMVATIRVPSERDPARRAAETRSFGTTKREVLALADWLRCWQVPAVVMEATGDYWKGPFYRLEAEGLECVLADAKQVKNLPGRPKRDPSDSRWLAACFERGAVTPCFVATEEFRVIRLHTRYRRELTEERTREKQRAEKLLESAAVKLSSVVSDLHGVTGRAIMDQLIAGERDPRVLAQLARARARRKIAELEEALDGAEFFTPAHAALLATMLARIDHLNTEIDQLTGVIERLLAPYEEQLQQAESMPGWGRRAAQDAVAETGADMTRFPTGGHLASWAGRTPLDNQSGKRQGRAKSKKGNRYLGGLLGETAVAAGRTQTREGARYRRIARRRGKPKAQVAVGNTQLKVYHTLLSNPGMRYQDLGVDYYERQRGIRRRIAHHVGKLGALGFDVTLCRRPDPQSAGTGETTAA

SEQ ID NO: 288059 - protein, 359 aa, unidentified
MPSRTPSLKEGMAVTIVDTSRPITGGVDTHLDVHVAAALDSIGGLLGVAEFDTTVSGIKALLSWLAGFGTVGRVGVEGTGSYGAGLARYLRRAGVEVVEVDRPNRQERRRKGKTDTVDAIEAARAAQAGRQLGAAKTRDGNVEAIRALMVAKRSATDCRIKTMNQIRHLGFTAPEEIRQQLQGLSTIMLPRKAAAMRPRPGGDPVVYATKMALRTLGRRALALETEKQELKLLLRRLVTEQSADLLSLYGVGVDTAATLLVAAGDNPERLRSEASWARLCGVAPIEASSGKITRLRLSKGGNRQANAALWHIVTTRMVSDPRTREYVERRTKEGKSKREIIRILKRYVAREVYYYLPPL

SEQ ID NO: 288060 - protein, 388 aa, unidentified
MIQVDDLSRSLVAFEQISTLVIVVELSQSSWLAAGVVPGVERRPLKKLDPDPTALLHLVEGWRDRATKAGRAITRIVLAFESGRDGFWLARWLRVRGVETFVMHSTSVSVSREPRRAKTDRLDSEMLIRVFLGWLRGEPHHCKMVAIPTLEEEDARRPSREREILVGERTRIINRMKAALVRLGIRGFKPGLLTAPQKLDALRTPEETPIPPNMLDEMRRDMARLAWVREQINAIERARLERLERAPATGRHAMVRMLARVIGVGVETADMLVQEVLSRNLRDRRAVARYAGLTGSPDESGSKRREQGLSKAGNARVRRGLIQLAWRFLRFQKDSALAQWYRGRTEDVAGKRKKTMIVALARKLLIALWRLVTIGEIPVGVALRTAVA

SEQ ID NO: 288061 - protein, 337 aa, unidentified
MIVVGLDVHKHSLTAVAVDGLGRSVGEMRGPVDEQVIDWGRSLDEECLWAVEDCRHVTRGIEQALVARDERLVRVPPRLTAPQRRRGRTRGKSDSIDALAIARAALQEPSLDGPRPGEQILHDLKLLVDHRDDLVAERRRAQQRLRWHLHELDPSLAVPLGALDRTVWLDRLSRQLARREQTTQVRISRELLGRCKSLTRSVLTLDRELEQRAQTLAPGLLEIAGCGPLSAAKLLCEIGPIDRFRTDAQLARHAGVAPLDASSGKHQRHRLDRGGNRQLNCALHRIAVTQGRWHPPARSYLERKQNEGKTRREALRCLKRQLARTVYTTLKNEPPLT

SEQ ID NO: 288062 - protein, 399 aa, unidentified
MTPDDIDVWVGLDVGKSAHHAHALDHDGNTLYDKPLKQDEKAIRTMLGKLSKHGRVLLVVDQPNTIGSLPLTVARNMGIAVAYLPGTAMRRTAQLLPGDAKTDRRDAHVIAWAALKLPETLRDAGPDDETLAALKLLAGHDEDLAHESTRHVNRLRSLLLQTHPAFERALKGERITRDATLALLERYGGPMGVKWAGIEDVKDWAKSNGLRAGRIIDDMFKAIGEQTVTVPGTLMAETIIPSIAHDIKTIRDRRREVDRQVEKLLEDHPLLTVLTSMPGIGVRTASNILLGIGGDIANFKSSAHLAAYAGISPVTGQSGTSIKGERPSRRGNKRLKNALWQTAFVASTKHPPSVAYYKRKREQGKHHNAAIICLARRRCDVIYSMLKNGTLYQEPALVA

SEQ ID NO: 288063 - protein, 400 aa, unidentified
MPQPNDLSRSLAALDHDSTLIAVIEMSQSTWLVAGIVPGINRQPLKKLAADEATLLQLLYRWRDEATKAGRTIDRIAVAYEAGRDGFWLARWLRGRGIEAHVIHPTSVAVSREHRRAKTDRLDTELLKRAFLGWLRGEPRHCSMAKIPTPEEEDAKRPNRERENLVSERTRIVNRMKSTLARLGLRGFKPTLRKAAERLDRLRTAEGVPLPPNTLAELRRDMARLRFVMDQIREIEAARLIRLEQHPELASHAMVRLLARVIGVGIETADMLVHEILSRNLRDRKAVARYAGLTGSPDESGARRREKGLARPAPGREQGAGNARVRRGMIQLAWRFLMFQKNSALAQWYRTQTADRRGTTRKTMIPAFARTALARKLLVALWQLVTSGEVPEGVVLRPAA

SEQ ID NO: 288064 - protein, 345 aa, unidentified
MPVAEVDTFVGIDVSAHELSVALRRGQSHDKAAMAKFPNHPSGHKALVAYLLRGGGRVRVCLEASGNYSLDLALTLQAHRQVEISVINPRRARRFAESLGERSKTDPVDARVLCEYAARMPWVRWQPPSPVALHLRALTRAIADLGVIHTQQNNRAYAAAASQALPVLVVKEMQRHKKYLEQRMTRLRREAVRLIACDPELERRFRLMLTTIGIAETSALQILGELAVLPDMLDARQWVAFSGLDPRLFKSGKSVEKRPRISRSGSRHLRRALYMPALVALRRDPYLRVFYQNLLARGKARLQAVVAVMRKLLNALFAMFRSNQPYDGSKLCAVELAVHAIAACA

SEQ ID NO: 288065 - protein, 318 aa, unidentified
MLSFCGIDVSKDRLDVMVLPEEQCCSVPNDASGWAALVERLRNFSIMAIGLEASGGYERGVMRALLAAGMSVRQVNPFKLRQFARASGVLAKNDPLDARMIFVGIMPTRPAQRPTPATEQLVETLAVRRQLSAEKVAAENASRLLEETILRRLSRRRIRRLAADIEVLDERLLEIVATDAVLARRYRLLTSMPGVGSLLACTLIALLPELGRMNRKQVAALAGVAPYAFESGTLRGRRCIWGGRANVRQVLYMAALSASNWNPALKAFHDRLEAAGKKPKVTIVAVMRKMITTLNAMVRDDVVWADRHSGRNSVTTAR

SEQ ID NO: 288066 - protein, 360 aa, unidentified
MTGTMTWAAMDVHARSTYTASLDVVTGELSRQRFDTGAVEPVVGWLVGLPGPVRACYEAGPTGFGLYRAAVAAGIDCQVIAPSKTPRPSGDRNKSDRRDTDLLLRQLMAGGLTPVTVPSATFEAARDLARAREQVRLDLMRCRHRLSKLLLRHGCVWDRTAWTQTHRQWLSAQTFEHQNTELAFIDNLAACDGLTARRQALDERLSWVATDPEFWPLVRRLRAFRGLDTLSALIVVLEVADFTRFPRAVQLGSWLGLVPSRQQSGESDVHGSITKTGSKYARRILVEAAWHYARPPRIGRTLAERQEGLPDHVLQIASRAQHRLYRIHRRMRERKKPGNVITVACARELACFLWAAATAP

SEQ ID NO: 288067 - protein, 280 aa, unidentified
MKQNIIYVGLDVDDTQYHGSALDKNTGEIITFKCRPTLKGSLNQLDRLHKCFPQSAFKLCYEASYIGYTLQLDLVEKGYHCELVAPTSIPSPCGKQVKTDRIDAARLVQFYANDLLTLVSIPEPEQEQDRDLIRSRQKLLAQQTELRKHIQALLRRNGRHYKVETQNITHWTLHHYCWLDRTIEASSGSLKINLELLVRQLKGVNSILLEYGQQIEALAKTPRYEQLVQALTCYKGIKNLFALTMITEIGDVKRFPHPRQLVSWIGMDIREYSSGGKHNM

SEQ ID NO: 288068 - protein, 421 aa, unidentified
MTQSAPDTFAAFVGIDWADAKHDVCLQAAGSTKRECLQLEHTPEAIDAWVTTLRTRFNGHLVAVCLELTKGPLVFALRKYDFLILFPINPLTLARYREAFTPSRAKDDPTDAALQLELLLTHRDKLQPLHPQSPAMRALEQLVEHRRRVVGDKVRITNRLTSTLKNYFPQVLQWFPDKDTPIFCDCLSRWPTLKAAQLARRSTLETFFRDHHVRSADVVAQRLHAIKAATPLTTDEGVIAPNALLVQALVNQLRVTLAAIETFDNAIAQRAQSHPDFPLFQALPGAGPVFASRLLVAFGEQRERYTTAAELQKYAGIAPVTERSGKKAWVHWRLQCPKFLRQTFVEWAAESIRHSFWARVYYQQQRDKGKAHQAAVRALAFKWIRILYRCWQDRTLYDESVYLNALNNRGSSLIHNLAQGS

SEQ ID NO: 288069 - protein, 349 aa, unidentified
MKIIGCDLHARQQTIAMVDTETGEITEKTLSHEGNAMREFYAALEPPVVVGIEATGAMQWFLELLEELGVECRVGHPAKIRAAETRKQKHDRRDARLLLDLLQMKDRFPEIWMPSTEQRDLRTLLRDRHQWVRMRARLQHTLQAMALNHALRRGPALWSAAGQNALQALPLPPYSSQRRTELLRLYVQLQKRIQALDKEVDVQARQRPQARRLLTHPGVGAVTALATEVFLGDPNRFDTGNQVASYIGMIPCEHSSGKRQRLGKLSKEGNSLLRYLWTEATMHAVGKDPELKRFYRRKLIQKGMGKARIAAARKLGIRLWIMMRDQIDYEEFCRRGRLRQEGESPCGDA

SEQ ID NO: 288070 - protein, 347 aa, unidentified
MRFYTKPHKFYGGIDLHARTMYLCVLNQDGEVLLHRNMKAAPEPFLKAIAPYREDLVVCVECIFTWYWLADLCAQEGVPFVLGHALYMKAIHGGKVKNDRIDAHKIAVLLRGGMLPQAYVYPAAMRATRDLLRRRMHLMRKRAELLAHIQNTNSQYNLAEIGKKLAYKANRAGVAERFPEPAVQKSIAVDLTLIGHYDRLLMDLELDLVQTAKAHDAQTFYRLHSIPGVGKILALVLLYEIHDIHRFPRVQEFVSYCRLVKCAKESAGKRYGTSGKKIGNAYLKWAFSEAAVLFLRNNPAGQKYLARLTKKHGKGKALTVLAHKLARAVYYMLKRDTAFDLDKFLHE

SEQ ID NO: 288071 - protein, 353 aa, unidentified
MGHKYVGLDVHQSSTVAAVQDEQGKSVMESILATEAEAIRDFLKGLRGTIHVTFEEGTQAAWLYEIVKPVVGEVMVCNPRRNKLLAVGNKADRVDAQKLAELLRGGQLKAVYHGMPGVRLLKELVHSYDSLVGDTTRVMNRVKAIYRGRAIGCAGRDVYYQRNREQWLEKLSEPGVRQRAVILYQQLDTLRKLRREANQAMLKESRRHPAYATLKQIPVLGPIRIAQILAKVASPHRFRTKRQFWAYCGLAVVTRSSADYQFREGKVEKRRRAPMTRGLNPNFNHRLKYVFKSAALDGIHQAPFEGYYARLLVKGMRAEMARLTLARKIAAVTLTLWKRGERFDELKVSEQAA

SEQ ID NO: 288072 - protein, 413 aa, unidentified
MGNAVVIGMDPHKRSATIEVMDGEETILGSGRYATDVAGYQAMLTFGRQFERRTWAIEGCNGIGKHIADRLLADGELVVDVPPKMSARVRVFATGQGRKTDATDAHSVALVGTRMSGLRPVVADEQLAVLRLLIDRRNSLGDDHTRMISQLHRLLLELIPGGAKKHLSAAQAKVLLGKVRPRDTAGRTRRRVAAELIGDLERIYERTKAADKELKELLAATGTTLTQLHGIGPSGAARLLVEVGDITRFPNRAHFASWTGTAPIDVSSGDHVRHRLSRGGNRQINRVLHIMAVVQLRSATEGRAYYDRKKAAGKAPMEAMRCLKRRLSDVVYRQLLADAIRPSKAGPGGHSGATTSSSAVDSNPDIDASEKSLPGPAKTHATRVTNSRPDRSSTRSRRPVTAPARSRRQAQSA

SEQ ID NO: 288073 - protein, 363 aa, unidentified
MKIMVGIDLHSNNALCGLMDENGRRLVHQKLPCDLAVILKLLEPYKDRIATIAVESTYNWYWLVDGLQDHGYHVVLANPARMQPYSGMKYTDDVSDAYFLADLLRLNLLPTGHLYDRKTRPVRDLLRRRLLLVRQRTTLILSFKSLNERTLGQRVPLTRVKAMKSEEAQARFTDPADQLLSGQQITLMGHLTDSITKLEQHILGVAGKWPAYQRLQELPGIGKILGLTIALETGEAQRFADAGNFASYSRCVKSLRTSNGKKKGENNRKCGNKYLAWAFVEAAHFACRYDDQCRRFYDRKKQQTNPVIATKSLACKLAKAAWHVMAEDVPYDAARVFGPARKSDFGETGREPAKGSGHPSQQD

SEQ ID NO: 288074 - protein, 450 aa, unidentified
MHPDAAGIDIGGSEHSVAVAPDRDPEPVRKFGCYTADLIRMAEWLKACGIRTVAMQSTGVYWFAVYDVLERHGLEVYLVNAHHTKNLPGRKSDVQESQWLLRLHTFGLLRNSFRPPADIRELRNIWRLRDRHVSDAARSVQHMQKALTGMNIQLANTISDISGTTGMAIIRAIVGGERNPQTLAGLKHRRIQATNRELVQSLEGVWQQDLLFELEQALDEYDFKWNQIEQCDRKLKLLLADLPAKVIADSSDRSGPRYPATSSAADKPVKKKRRNRPSRNAPQSFDLAAELTRICGVDATRIEGVDVMTIQTIVAELGTDLQRHWRTQEHFASWLKLTPQREISGGKVIRHTREKSGNRVAGRLRMCATTLLRSDSYLGARYRALRARLGARKAIKAMARHLACLIYQLFTKGHQWIDLGREMYEHRLAERQKTALQSKARALGLKLVSA

SEQ ID NO: 288075 - protein, 349 aa, unidentified
MTLYIGVDFHPHQQTIAWCDAQTGEVRTTDLANDPELIRKFYSSLPEPVTVGIEASAKATWFEELLFETGHKLLVGNPVLIRKRATSRHKNDRRDAELILELLMRGEFPDIRRRPPESDQILEILRLRQTFVRQRTQAYNRLQAPAHSVGLPKGKIRTKGFQQMLKAARMTEAASIRREHLFSLVEKFNQQIDELEQWLKKKVETDKSVQLLLTQKGVGYLTALATVHTLGDVSEIPKLSKYVVGFAGLAPVEDSSAGRVRFRGISKAGSALLRQQLGMAAHIASRSDVKLKSFYKRLAKKKPKPVAKTAAARKLLVKLAIMLRDQITAEEFDQRGRTVGNARGIQDLK

SEQ ID NO: 288076 - protein, 363 aa, unidentified
MVASRPPHRLEKEVSVITIGIDPHSRTHTAAALDERGRVLAEITVGSDVRELDRLVRWIQSVGPERIVAVEGARGFGLALCRRVLAAGETVLDVAPALTASERRSNRKAGKNDRGDAVAVARIALRELGLPHASAEMIGADLKLLVDARDQLVREATRTRNRLHALLLVIAPGYQEHIRDLTSSAGLLIARRLASRARATDRVRSSLACSAITRLRSLSGEIGAVERDITSALDQVAPANLLSICGVGPLVAAKILGEVRDVGRFSSAAAFASYCGTAPIPASSGTIIRHRLHRGGNRQLNRALHTVALTQARRDDRAKAFLARKRGEGKTPRDARRALKRHLADAVYRALLLDAEGARSIAA

SEQ ID NO: 288077 - protein, 342 aa, unidentified
MTLYIGVDIHARQQTLSYLETADGTTGQVVLDHEVDDVPGFYRQFQGEVIIGIEACGYTNWFEELVERLGHQLLVGDAAEIRRLARRRQKNDRRDADLLLDLLVHDEFPALYRYCQESREVLRQLRYRHKLVKLRTMVANTLHALALNAGLSLRAKLLTKGGRQQLSALPLSAISQQQRNELLSLADELTRRIQLVEQWLAVQAARDGRVQRLQTHPGVGLLTSLCVVHTLGEVQRFSSTRKVAAYVGFDPMEDSSAERKAYGGISKAGSRLLRYLLIEAGQTAAKDDEQLKQFYRRLLPRRGKARAKVAVGRKLLIRCFIMWRAEIDYAEFLRRGQKEETE

SEQ ID NO: 288078 - protein, 368 aa, unidentified
MKQVTTYVGIDAHKKDLFIAMLMGHEPKPVTWQLANEPNAVRRLVRKLEREAPGAVRVFYEAGPCGYALQRQVTTSRVSCDVVAPALIPRKPGERVKTNRRDARKLAELGRAGLLTAVQPPTAEDEAVRDLARARDDAREDLQRCRHRLGKLLLRRGLHYVGRNWTRAHRQWIERVTWTHAAERIVVDDYLLAIDHTEARLLELDARLAEIAEREPYREPVGWLRCFRGIDTLTAMLILAELHDFRRFASAPALMAYLGLVPGEDSSGEKHRRGRITRTGNALVRRLLVETAWHYQHRPTVGTALTRRRKGQPARVIAIADKAQQRLCRRFRKLAAEHKPAPKIAVAIARELTGFLWAALQREPATVN

SEQ ID NO: 288079 - protein, 442 aa, unidentified
MSELVLLDPRAAFVDVGSEKMHVSIGGGPPEVFGTVTSQLHALRDFLLEHRVCSVAMEATGVYWLPLYGVLEAAGLDVRMVDGRQTRHLPGRKSDMQDCQWGATLHAHGLLRAGFVPPAHIRRLQDYLRLRGDHIAAAAGHVQHMQKALERMNIKLHDVISSLTGASGLAVVRAILAGERDPAALLALCDVRIRKVKAERVVEALRGDWADEHLFALEQAVQSWDHYQAQIVDCDRRIADILARMPGGDGPAAAVEKPAKPRTRPGVNTPQIDNLRELLQRMCDGKDATTLPAHSEYTVLQLVGEVGTDLTRWPTEKHFASWTGLAPGSAQSGKRRTAVKRRRNRAGQIFCVMARALARSKYIALGGYYRRMAARRGGLVANKALAHKLAILFWRVMVKGMDYVEQGLAHYEAQVLQTRQRLLRSLAKQFGQQLVPIQENPP

SEQ ID NO: 288080 - protein, 393 aa, unidentified
MRKPKKQKKPLNDLNRSLTPFDPNETLIGVVELSKGSWLVAGIIPGVERQPLKKLAPDEDGLLKLLERWRAEAQKAGHKIIRIAVAFETGRDGFWLARWLRKRGIEAHVIHAASVPVSREHRRAKTDRLDTEQLKRSFLGWLRGERDHCKMAAIPTFAEEDAKRPHRERETLVGEQTTIINRIKSTLARLGIRSFNPTLKEAPERLEHLRTPEGEPIPPNTLAELSRDLERKQLVAEQIHQIEKARMEQLKRAPKAGPNLMVLVLMRVIGIGIETADMLVQEILSRNLRDRRAVARYGGLTGSPDESGSQRREKGLARSGNARVRKGMIQLAWRFLQFQKESTLAKWFEARTKNARTSRKKMIVALARKLLIALWHLVRDGVVPEGVVLRPAH

SEQ ID NO: 288081 - protein, 353 aa, unidentified
MSQTLNTTIAVVGIDIGKNSFHIVGHDERGAIVLRQKWSRGQVEARIANMPPCLIGMEACVGAHHLSRKLRALGHDARLMPAKYVRPYSKGQKNDFRDAEAIAEAVQRPTMKFVATKTADQLDLQALHRVRERLVSQRTGIINQIRAFLLERGIAVRQGLRFLRAELPRILATPPDVLSPRMVRIIEDLACDWRRLDERVERLSDEIEAIARQDAGCERLMSVPGIGPIISSAMVAAIGAGDVFTKGRDFAAWLGLVPKQISTGDRTILGKISRRGNRYLRVLFVQAAWVVLIKPTVWERHGLKPWIEAAKKRLHHNVLAIALANKLARIAWSVLAHGRSFEAGSPKTLQGQA

SEQ ID NO: 288082 - protein, 336 aa, unidentified
MFFVGIDLHKKTIAVCVVDQQLRIIGRQSFLCVEPERIREYFAKLGRFHAVVEATASYEWLWQLLEPLAQRLVLAHPKKLRIIAESTRKSDRLDAQVLAEFLARGMIPQAYRPTPRQRQHRTLVRHRCYLRRQASSRRVKIRRVVSDYNADRSDLFTAEGLQYLAALKLAAADRFVIDQLLTAWTHQLQQLREAEKQLRVFAQGAGAAEAEAREVLGSIPGVGVVTIDILLSEIGDIHRFRAANEVVAYAGLAPARRESAGKTKDLGITKDGSRLLRWAMVEAAWRLVRQTARWRNVYETLQRRRGKKKAIVAIARRLLTVVVAVWRKGEKYRLAM

SEQ ID NO: 288083 - protein, 347 aa, unidentified
MQFYTKQHPFYCGIDLHARTMYLCILDQAGETLLHRNMTATPEALLKAIAPYRAQIVLAAECMFPWYWLADLCAEHSIPFVLGHALYMKAIHGGKAKNDKIDAHKIAVLLRGGMLPQAYVYPAAMRATRDLLRRRMPLARKRGELLAHVQNTNSQYNLPAIGKKIAYKANRDGVAERVADPAVQKSIEVDLALITYYDALLRDVELSIVNTAKHHDANTLYLLQTVPGIGKILSLVLLYEIHDIARFPRVQDFASYCRLVKCAKESAGKRSGTSGTKIGNAHLKWAFSEAAVLFLRDNPAGQKWLTRLEKKHSKGKALTILAHKLARAIYYMLKRQTAFDLETFLHA

SEQ ID NO: 288084 - protein, 405 aa, unidentified
MVTVGIDWAEAHHDVAIHDPHGRSLRTGRIDTGPAGFSQLLEMIADCGATPETTAVAVETDKNLLVVALQGAGFEVFAINPRAVARYRERTGQAGAKSDARDAAILADILRTDRHLHRPMPHPSDQAQAVKALARQHQEAIWALHQTLSRLRSVLLEFYPGAVATFPQLKHHTALAVLAAAPTPTQGRQLTRRQVVAILHRVGRRNDAGLADQIRAGLQSPALVQPQPVADALGVSVAALVAVAQTMTIGIDALEAQLAIVFAAHPWAPVLRSAPGLGPVLAARVLAEIGDDPTRFATTANLRSFAGTAPVTRASGKARWVQARRVRNKRLADACHWWAFAALTRSAGARAHYDRRRAAGDHHNAALRHLANTLLSKIWHCLQHQQPWNEHHAWPTPANPPAVAA

SEQ ID NO: 288085 - protein, 358 aa, unidentified
MKTKVKTISFKEEKIFCGIDTHKKNWTVTIIVGEVVYKTFSQDPYAETLANYLKKNFPEGKYYSVYEAGFCGFSVHRELINNGIQNIIVNPADVPTTNKEQCQKEDRRDSKKLARGLKNNELKGVYIMSIEMEDLRSLVRYRKTLMKELCRDKNRVKSYLNFKGIKIPAELNIQSKYWSGRFIEWLKTIEVSTPHGSTVLQETIDTAEFLRKKLLKINRQLRQIEKDSKYTKRIQQLRSIPGIGLIVALTFISELEIIKRFKNLDKLCSYIGLIPSTFSSGEKDVVGNITRRSNKPLRSAIVEAAWVAIRHDPALTLKYNELRSRMEPNEAIIRIAKKLLNRIRFVLKNEQEYVTSIV

SEQ ID NO: 288086 - protein, 412 aa, unidentified
MEVIYPCCCGLDVHKKSITACVLWAEAKGKSRKEKKRFGTFTHDLLQLADWLAERGVTHLAMESTGVYWKPVWNILAEQFEALLVNAQHIKAVPGRKTDQKDSEWIADLLQHGLLRGSFVPPQPIRELRDLTRYRVSLVQEINRIANRIQKVLEDANIKLASVATDALGASGRAILEAMLAGEQDAARLAEMSKGLLRNKIPELKLALEGRMTEHHRFLLRQLFEHLRFTESKRSEIEQEIDKRMRPFEDKVTRLCTIPGVDRVTAWGMLAEIGMNMNQFPSSGHLASWACLCPGSFESAGKRLSGKMRKGNVSLRRCLAQAAWAISMMKNNYLSALYRRIAARRGAKRAIMAVAHALLEIAYHMLKRKEDYRELGADHFDRIDVNRIRRSLVRRLERLGHKVTLEPVAQTA

SEQ ID NO: 288087 - protein, 325 aa, unidentified
MPPRRELVTNKAEFNPNFMSEKIYFGVDVCKESLAFCGANVAGQVPNNAPGVRRLLARLPQGAHLIIEASGGYQRELVKVAQQSAVLLSVVNPRQVRDFARGVGRLAKTDPIDAEMLARFGAEVNPPPDAVPTTAELALQELVSARQQLVEQRTVLLQQQSQQLNNVVRRLDRARLKLLQRQIGQLELAISSILEEQSALKQKVERLQQVKGVGFITAVTCVALCPELGSLSKRQTAALVGVAPYDEDSGARKGWRHISGGRPKLRRALYMASISAVRSNPILRRFYQQLRQRNKPPKVALVAVIRKLAILLNRLLRNASFLPAS

SEQ ID NO: 288088 - protein, 389 aa, unidentified
MLNSEGSTVDQRWIEHTGDSLYELIEWLRTKASQTPNTVAVAIEVPRGAVVETLVENGFAVFSINPKQLDRFRDRYSPAGAKDDRRDALVLADSLRTDLHCFHRVKLDEPTLIRLRELSRLEDDIAQEQNRLHNQLREQFHRFFPQLLALSPAANEPWLWDLFQAAPFPAKAAKLSAARIEGILKKHRIRRVDAVKVQAAVSTRALTLAPGAAEAASEHALLLLPRLRLLEQQREHIAKRVQTLLEELTQKADDEESLEHRDAAILLSLPGVGRKVAATMLSEASEAIAERDYHALRCYAGSAPITRQSGKKTVILMRQGCNERLRNALYHWARVSVICDPKAKTMYAGMRARGHSHGRALRGVADRWIAVLISMLRHNALYDSKKRAA

SEQ ID NO: 288089 - protein, 412 aa, unidentified
MLFIGDDWAEGHHDVVAQDDAGKTLARRRLPEGADGIARFHEMVASCLGEDGEPDPARVVVVIETDRGPWVKALAAAGYRVYPANPKQAARHKETIAVSGKKDDFFDAGALADMGRTRRHQLRELAADSDIAEAVKIAARAHQKLVWERTRHLLRMRSALREYFPAALEAYADLSLTGADALELLGKAPEPDSAARLTITQITAALKRAGRRGRLDERARDIQAALRAPHLPQPAVIAEAYAASVQAGAAVIAALNEQCKVMEAKVSELFRRHPDAGVYLSQPGIGDITGARILGEFGDAPGRYASAKARKNYAGTSPLTIQSGKKKTVHARYIRNRHLIDALHAQALSALRASPGARAYYDELRAHDTGHDDALRRVAGRLVGILHGCVKTGREYDEITAWSHRAEFPQAA

SEQ ID NO: 288090 - protein, 368 aa, unidentified
MKKETITSDGISGASLVNDVNRVLNLGLDMHYRQVTVAMQEDGGRIKAAGKMGHADFLNWVPKKLEEGWEIYSCYEAGASGYWLHRELVKLGVKNLVVVPKAMGQGGKKQKTDQRDAGELCDSLDRYLRGQKKALSEVAVPTEEQEEKRALIRYHRQIMADRGRCEARGKGLLCAQGIQVRGRWWRGDSWLELTSDPRLKDWMKEQLVGWRNKILSTDEEQSALRERIAALAPAILPKGVGAYSAAVLHYELRGFEHFKNRRQVGSITGLCPGVHLSDGRGKEGSINRCGIGIVRWTLVEMVWRLMIWQPQYPPVRRLAAGLVKSKRARKRLVVQAARRLAIDLWRLSTGQTTPEKLGLVMQSNATGN

SEQ ID NO: 288091 - protein, 403 aa, unidentified
MYFAGIDWADDHHDIVVIDEQAKQYDSFRIKHSHKGFTTLEERLKSLTCDPANIACIIETSSGLLVSFLLDKGFRVYPVNPSTLERKRKPSKAKTDAIDARFLARYGRNEFDELRELKPDSLIVEELKVLTRDQAMLVEQQTRLVNQLKDCLKSYYPVAIMFFTRIHQKTTLAFLETYPTLEHVRQDHPQNIAQFLKNQKHPRPNETAQKIYTLAMEEQLTARMPTVRGKVRLLLTLIRQLKTLMQDIAEYDKEIEKLFFEHADSTIFSSLPGAGPRLAPRLLSEFGDDRSRFLSYESVTSLSGVAPVPKTSGKNTFTVSKRTAYVKPFHQALYHFARQTSLKEPWSKEYYQSKRAQGKSHSATIRQLASVWCRIIFAMWQNNEPYCSEKFLTAGKKHKQNAA

SEQ ID NO: 288092 - protein, 365 aa, unidentified
MQKISTVQARGKRILKEQLTIGLDLGDRCSSCCVLNGAGEIVSEEKVPTTPEAMKKTFGKMPRCRIAMETGTHSPWVSRLLTALAHEVIVAHARNVRLITQSRRKDDRLDARTLARLARIDPQLLSPVQHRSAKAQLHLTEIRARAGLVSARTALVNAVRGLVKTHGERLRKCGTFQVSREITGGLSTELREALQPLLCEVESLNERIQEYDRRIEKMAKEIYPETELLQQVKGVGDLIATTYVLTLEDPHRFRKSRDAGCFVGLQPGRRNSGESEPQMRISKEGDEYLRTLLVQGAHYILGPFGEDSDLRRWGQKLAARGGKNAKKRAVVAVARKLAVLLHRLWVSGEVYEPLRNSHKAMNAAA

SEQ ID NO: 288093 - protein, 422 aa, unidentified
MKAFNVSDFVALIGIDWADRKHDICEVNSQTKEQHFSVISSQPKAINAWANELKQKYKGQLIAVACELKKGPLIYALSKFSHLVIFTINPSSVAKYRKAFTHSGAKDDPTDAAIQVEMLQLHMSKLNVITPDSESVRSLAQLVEYRRKLVQDRVDLTNRITTTLKNYYPHVLDWFKEKDTMIFCDFLLRWPSLDHAKRARKQTLIDFFNQHNSHYLAVNEKRINNIKQAELLTNDKAIIAPNQLLVECLIVQLKHLMSAIEHFDVEIKAIYKSHKERFIFDSLPGAGPQIAPRLLAAMGSNRDRYQSCEEIQKYAGIAPVTERSGKKEWIHWRYSCTKFLRQTFVEWAGISVRYSFWARAYYRQQESKGKPHNTIIRALAFKWIRILFRCWKSKTPYDETTYLEALKRKGSPLLKYAVESKF

SEQ ID NO: 288094 - protein, 349 aa, unidentified
MANLTMGMDLGDQYTTVYVLDGEGAEVETARVRTTPAGLARWLRGRARARVVLEAGTHSPWVSRVVEALGHEVLVANPRKLRLIYQNPGKTDRVDAEYLARVGRLDPRLLGGITHRGEAAQAALAVLRARDALVRTRTQLINHVRGVVKAMGARLPGCAAEAFPRKVGPAVPDALRPAVMPVLAHLAQVTQQIRSYDRQLAQLGTEGYPETARLRQVAGVGPVTALAYVLILEDPQRFQRSRMVGAYLGLQPRRRQSGERDPQLRITKAGDAFLRRLLVQGAQYILGPHGRDCDLRRHGERIAARGGTNAKKRAVIAVARKLAVLLHHLWRTGEVYEPLRRDATLATAS

SEQ ID NO: 288095 - protein, 399 aa, unidentified
MRKVAGIDVHKEFLEVAYRLPSGRIETKQVEYTPKGISRLIKLLRRHGITDVYMESTGDYYLPLYYALKGAGIRPHVMNAYKIRRPEPNKTDKKDAIWLLEIGESEFFSDSYVPDEDIQALRFLIRKRMKLVDRISDIKREINSILWRLGLQVAHYAKKLRSKKKRVLLLALLEGRLRPDSINDSDVRHLYDILSRPEFRAYVFVLRSRLVDLAHLESQLEEFDREIVALARKFEDTIRILMSVPGISFILAVGILAEIGDINRFPSPAHLASYAGLVPTARNSGGKRRSGRPSKKSNKYLRRYMFLAGMAATRSNSRVVREFFTRLLGRGKHYKVAVVAVARKLLCVIWYLLRRDKFWCEDGYFKHPRRLPRGRRIRISVREAIAILVRAGYEVRRKV

SEQ ID NO: 288096 - protein, 359 aa, unidentified
MKKDSRKTKCMDKPAITVGLDVGDRFSRYCVLNEDGEVVEEGKIQTTEVALQRHFDKEPRQRIALECGTHSPWISRLLERLGHQVIVANARKIRAITASESKNDRNDAEKLAHFAYCDPFLLSPIRHRSPERQQDLNLIQVRSTLVRARTMVINSVRGLVKSAGGRLPKCSTADFAKQALPLISAELSLVVAPLVEQVGTLTDQIRRLDKQIENLSQRYVEIKLLRTAPGVGPVIAAAYVLTLDSPDTVANSRQAGAFLGLRPRQSQSGDSNPQHSISKTGNIYLRSLLVQSAHYILGRFGQDCELRRWGLKLAASGGKRGKKRAIVAVARKLAVILHAMWRSGHPFEPFLLPATTAVV

SEQ ID NO: 288097 - protein, 455 aa, unidentified
MCSSKPATTAREVRENLNAGGTDSATMHVAAVGPDRDPEPVRTFQTFTEDLHRLADWFVQCGIKSVVMESTGVYWIPAYEILEQRGFSVMLVNARDAKHVPGRKTDVSDAQWLQRLHEYGLLRPSFRPQAEMAGLRAYLRQRERLLNYAAAHIQHMQKALTQMDLQLHHVVSDITGATGMRIIRAIVAGERDPATLASSRDVRCHASAETVRQALVGNDREEHIFALTQALELYDVYQAKVAACDGQIEAVLQRLKQSAVPPAQTLPAARQKSRQPNGLAFDVRKALHAIVGVDLTQIHGLGPYLALKLVGECGTDLSAWPSAKHFTSWLGLAPHNKISGGKVLSSKTRRTGNRAASLLRLAAVTVGRTDTALGAFHRRLSTRAGKSKAITATARKIAVLFYNTLRYGMSYADPGASYYKERYRQRVLSNLRRRAKSMGLTLHPAAEDPAQAVVS

SEQ ID NO: 288098 - protein, 326 aa, unidentified
MQSILGIDVSKNTLDVALVTGDGVFHKLVNNDTQGYQRLEKWIRAQQAGEVHACLEATGQYGDGVAEYLVERGHSVSVVNPARIKRYGESKLHRNKTDKADASLIAEFCQKEKPPLWQPPSPEIKHLRALVRRLTDQKTNLQQEINRLKSGEKDPWVMHDLQIHIDYLRERIKVTEEEIQDLIDQTPDLKSQHKLLTSIPGIGDLTANTLLAEIGDVSVYEGAPQLAAYAGLNPQGHRSGSSVHKKTRISKQGRSELRCCLYMPAIVAMRHNPVIQDLNNRMAERGSHKMEIVVASMRKLLHIAFGVLKNQLPFDPHYGEQFNFSS

SEQ ID NO: 288099 - protein, 489 aa, unidentified
MSTARKQQGEKKDPMLNARAPKRKVRGSHCQQGKGNQRGSELTITHPDAAGIDVGSQVHYVAVPEGRAQESVRSFGAYTAQLDELVQWLKDCRIKTVAMESTGVYWIPLYQKLEEAGFEVLLVDARQAKHVPGRKSDVQDCQWLEQLHRYGLLRAAFRPEDSVCRLRTLQRHRKDLVESAAMWIQHMQKALNEMNLHLHHVLSDISGLSGLAILDAILAGERDPRKLASLAHYRVQKNQAQIAAALTGDYRPELLFVLRQSLQNYRQMQQQITQCDLSIEQQLAKMTDCQNPNQASEPTPPSPDLGGGKPRKRKSPAILEISLAGHLKRILGVDLTTIPGLNVLAILTLVSEIGTNMTKWRNEKAFVSWLGLSPNNKISGQRVLSSRTRKVVNRAATILRLAAMIVGKTNTPLGSFYRRKRAQLGGPKAVTATARKLGCLIYRLIKNGQGYHEPDLHTYELKYKDQILNSLRKRANTFGFDLVELPKAA

SEQ ID NO: 288100 - protein, 412 aa, unidentified
MEVLYPCCGGLAVHKKSITACVLWAEAKGKSRKEKKRFGTFTHDLLQLADWLEQCGVTHVAMESTGVYWKPVWNILAERFEVLLVNAQHIKAVPGRKTDQKDSEWIADLLQHGLLRGSFVPPQPTRELRDLTRYRVSLVQEINRIANRIQKVLEDANIKLASVATDALGASGRAILEAMLRGGQDAARLAEMAQGKLRNKIPELKLALEGRMTEHHRFLLRQLFDHLRFTESKRSEIEQEIDKRMVPFEDKVTRLCTIPGVDQVTAWGLLAEIGLDMNQFPSSGHLASWACLCPGSFESAGKRLSGRMRKGNVSLRRCLSQAAWAISMMKNNYLSALYRRIAARRGAKRAVMAVAHALLEIAYHMLKRKEDYRELGADHFDRIDVNRTRRSLVRRLERLGHKVTLEPLAQTA

SEQ ID NO: 288101 - protein, 321 aa, unidentified
MQKDLLYCAIDVSKDKLDVDGAALALPAQLGNDHGSFRQLIKAAKKYPGPVQFVFEATGPYHLGLALALWEAQIPLSVLNPARVRYYAKAQGKAKTDPLDKQVIGDFARSFRPPPTPAPDPVRRELTELLQRRDGLISTRAAEQNRLGQCRHKMIKGQIRRLMAQLAEQIGQIDGLMKKLVNSSQELKAKVKALCQVKGVGHLTAVTLLITLPELGTLGRNRIVRLVGLAPLNDDSGTQKNKRYIQGGRARPRCALYMPALSASRHNPVLKEVYERLLKAGKLKKVALTALMRKLLICLNALLRKLADQHPSPQGLCLAKP

SEQ ID NO: 288102 - protein, 416 aa, unidentified
MNAAGIDVSSRKSTVAVLRPFGEVVKLPFDVRHSAEDLAALAAQLKSIDGETRVVMEHTGRYYESIAKVLHEAGLYVSAVNPLLIKEYGNNSLRKVKTDKADAMKIAKYALDNWTELRDYTPMDTIRYELKTLNRQFQLASKQKTATANNLIALQEQSFPGIRKLFDSPVRSDGTQKWVDFTHDFWHVDCVRSGSQNAFAERYRKWCKRNRYQFSMEKATEVYALAKSSVVLVQKTSVTKTLVQEAANQLTAISRSVETYRSEMNKLASQLPEYPVVMEMYGVGESLGPQLMAEIGDVRLFERKQSLVASAGIDPEPSESGDYCSRSNRTTKRGSPYLRKTLFNIMKVHLQRAPADEPVFQFLDKKRAEGKPYYVYMTAAGNKFLRRYYGKVMAYFSTLEGLPPVDMDSTGLHHAE

SEQ ID NO: 288103 - protein, 369 aa, unidentified
MDHHTEVFVGIDMAKARNAIAIADGERGGEVRFLGEVDASLDAMRRAVQRIVAKHERAHCCYEAGPTGYGLHRLITGMGYLCDVVAPSLIPRRAGDRVKTNRRDAIGLAKLLRAGELTPVWVPDEGHEAIRDLVRARAAAVETQRVHRQQVSAFMLKHGRVFPRKKTWSMRYLRWLQEQRFDHPAHQIALQELVDAVRTSRERIGRIEAAIKEYLPSWSLAPVVHALQALRGVELVVAVTFAIEIGDIRRFDSPRQLMGYLGLVPSERSTGDNIRRGGITKAGNGRVRHMLVESAWTYRHPPRVGATKLYRLEQTTPKVREIAWKAQSRLTARYRALTAKGKKTTVVCAAIARELAGFMWAVAREVQPA

SEQ ID NO: 288104 - protein, 387 aa, unidentified
MPTTGAAAQDRAAIPVDRATLFVSLELSRSRWLVTSLSPGSAKLSNHTVAGGDGNALLDLLALLQSKAARRVGVPVKIVAIQEAGLDGFWIHRLLVANGIESHVVEGASIAVPRRRRRTKTDIVDGEMLVRTLAAFKRDEPRVCSMVVPPSPAEEDRRRLSRERRTLIKERVEHSNRIKGLLASQGIRDYQPLRRDCRERLAELQTGDGRPLLPRLKAEIIRELDRLKLVRQQITEVEAARDALLQSQDAEGKAPAKLLLRLMSIGPEFATVLWLEGLSRTFRNRRQLAAYAGLAPSPWRSGRIDREQGISKAGNPRLRSTMIELAWLWLRHQPDSSLSRWFHARVQANRSRIRRIAIVALARKLLIALWRYVSQGEVPEGARLKTT

SEQ ID NO: 288105 - protein, 407 aa, unidentified
MTRYYLGVDWADTEHAVWVGNEAGEEVMARSVEHTPAGLGEFGRWLYERQAEGIELWAAIEKPEGRVVDFLLDHGVVVYPVNPKALDRARDRCRMSGAKSDGVDARVLAEFLRTDHPHLTPLMPSSARAQELKLLTRDYQRLVRQQTRLVNQLTATLKEYDPRPLECFEELTSAVAREFLRSYPTPEALATLTPKAWQRWARAQHVSQARTVELWEALRAPQLSVPAHVVRAKARLVRVLVDELETVVRAVNEYRKAVDDFFTAMPEAEWARSLPAGQSGTTVPTLWAELGDAPGRWQGLRHLQAQAGAVPVTERSGKHQFVHFRFACNTHLRYAVHLLAFLSLRQSEWARAYYQRYRARGHTHHQAVRALGAKWLKIIFVMWDRQVPYNENDHLAMIARQQLRQVA

SEQ ID NO: 288106 - protein, 417 aa, unidentified
MKSIKAEKIKTINEKMLVVALDIGKKVHYGYFRTPKNQDVKPFQFYNSGQSFNKFWEKLCRFKEKHMLDEVVIGFESTGPYAEPIANYLRKKPVKLVQVNPMHTKRIKELTGNSPNKTDKKDPRVIADVISLGHSLTVVVPEGAAAQLRRITHARERAMERRTAMNNQLQDLVFVIFPEFGDIIKPSTKTGMYLIKNYPDPKRIVSIGIGTLCDIVRKISRGRFGIDQAEELYNAAKESVGITEGKESILLETSHLVSNIEAENRYIESLEGQMIVYLDQIPYSHSILSVKGIGNITVAGLIGEVGDFRKFKTISEVMKLAGLDLFEVSSGEHKGKHRISKRGRGLIRKLLFFAAINTVKSHGIMHAKYQKMLNNGMPKIKALIAISRNLFRIIFALARDNVKYVENYKSHEFKLAA

SEQ ID NO: 288107 - protein, 326 aa, unidentified
MTSLPSPTREARITVGIDVSKATLEVAFSEGASSLVLPNDEPGCTQLLAELAARDVGLVLFEATGGFELACASALQMAGLAVAVINPRQARDFARAMGYLAKTDRIDAAVLADMARTLLTRGDLSKLVKPLPDAQQLELQGLVTRRRQLMAMKLAEDHRMKMPGVRQRRSLNTIIKALDRELARVDKELQAFVGANHAELAALLNSVKGVGKTTISTLLAEVPELGKLSGREVSALVGVAPINRDSGTMRGKRSIFGGRPDVRRVLFMAALVASRHNPVIKGFYQRLLGAGKPKKVALVACMRKLLTILNAMVRSRQPWNEALHLG

SEQ ID NO: 288108 - protein, 305 aa, unidentified
MWADKRAGQHFSNSPTGFGKLHQWLSRRLKAEQVHVCLEATGRYGEAVAEYLYAHGYTVSVVNPARIKGYADSQLQRNKTDKLDAALIADFCRTQHPPAWTPPSPEIRQLQQLVRHLDDLTEARQQARNRLGVPGQAQPVTDHLNAPVARLETQIAQTKHAVTDLLDQHPHLRQQKDLLRSIPGLGDLTIGKLSAECRDLTAFRDVRQLVAFAGLNPPHHTSGSSIHKKPTLSRTGSASLRAALYMPALTAMRFNPVLRAFADRLRSRGVVGKALVVAVMRKLLHLVFGVLKSGQPFDPNWAIAA

SEQ ID NO: 288109 - protein, 388 aa, unidentified
MPQPNDLSRSLVALDQNSTIIAVVEMSQSSWLVGGILPGIERQPRKKLEPSPERLLVLLHRWRDESVTAGRTITRIAVAFEAGRDGFWPARWLEARGVEAHVIHPSSVAVSREHRRAKTDRLDTELLKHGFLGWLRGERGHCSMARVPTIAEEDAKRPNRERECLVKERTRLVNRMKGTLARLGIRNFKPTLRQAAERLATMDTPEGTPVPPNALAELQRDLSRLGFVVGQIKQIEKARQQRLEQPASESGPQAKVRLLARVVGIGVETADMLVHEVLTRRMRDRKAVARYAGLTGAPDESGARRREQGLARAGNARVRRGMVQLAWRFLQFQKESALALWYQARTADGRAGTRKTMIVALARKLLIGLWRFVTTGELLEGVILRPAG

SEQ ID NO: 288110 - protein, 338 aa, unidentified
MEQITTIGLDLAKNVFQVHGVDGAGKVLVRRQLRRAEVLRFFDALLPCLVGMEACGTAHHWARELTKLGHTVRLMPPAYVKPYVKRGKTDAADAAAIAEAVTRPTMRFVAVKTTDQQSVLMLHKVRDLLVRQRTMLINALRGHLAEFGIVAARGPGGVNAAITALHEAQDGLPDLARQVLHGLIDQMRAIGGEIAKAEKRIMAWHRASEASRRLATIPGIGPITASAIAAAVPDATLFRSGRQFAAWLGFTPRARSSGRKERLGGISKQGDGYIRRLLVIGATAVIRLARQDNPSKTWAARLLERKPARLVSVALANKTARIAWAVLARNQSYTAPAV

SEQ ID NO: 288111 - protein, 291 aa, unidentified
MNKIIYIGMDVHSTNFTLCSFEPGYGFEADKIFGQTQIKEDIFNSTVKYINKLKSMRPDVDVICGYEAGCLGYNLHRKLKAKEIESVILAPTTMAVSRNSSKKKNDYRDAITIAKCLASSAYKAVYIPDEKDEDVRDFIRMRDDHKTALKQIKQQLNAFCLRHGHHYDKTKWTGLHLNWLRKLELSKVQRETVEEYLATYEALTGKIAALDVRIEDIASEERYAEKVNKLKCIKGIKTHTALSFVSEIGDFNRFKSADKFAGFIGLVPGECSSGNTERMLGITKAGNRHLR

SEQ ID NO: 288112 - protein, 312 aa, unidentified
MIQQGYGGIDVSKDRLDVMVLPERQFFSVENSTAGCGELVQRLRGWSVATVGLEPSGGYERGVIRALLAAGLSVRRINPNKLRQFARARGVLAKNDHLDARLIAEYVAIMPTRVVQCDPVTERLAEVVTMRRQLCDEHVAVENQTAHLEDAMLRRLNKRRLARLEADILLLDRRMAEIVASNASLARRYELLTSMRGVGPTLAFSLIALLPELGQMGRKQIAALVGLAPYDFDSGRLKGHRCIYGGRLPVRNVLYMAALSACRYNPALTAFHLRLADANKKPKVRIVAVMRKMIVILNAMLRDNVAWQPNFA

SEQ ID NO: 288113 - protein, 329 aa, unidentified
MVIAPSLPVVGLDVSKATLAVCYQVDELVKHLEVSNNKAGFQQLVEACGAHCRFVMEATGTYNLALAYYLHEQGGEVAVLNPLVIKRFIQMHLSKGKSDRKDAQWLLRYGQQQPVKVWQPDETTLVECRQLEQVNEQLLKQKTMVSNSLEALQRQPVISKLALKRLQQMLKTLTQQVALVEVELLTLLERRFAAEMTLLCSIPGIGRKTAGMLLLFAGGFTRFDNYRQVIALAGLSPREHTSGTSIRGKVRITKMGGGLIRGKLFMCSFSAKKTNAACAALFDRLVAKGKNKKLALIAVCNKLLKQAFVIVKSGVAYQADFSSKLALTA

SEQ ID NO: 288114 - protein, 406 aa, unidentified
MRLFVGDDWAEDHHDIEVMDETGRVLARKRLPEGVAGMAQLHALVGGLLGEDGDDSEVLAGIETDHGPWVMALIAAGYRVFPVNPQQSARFRARHGVSGAKSDAGDAHVLADMVRTDAHQLRQAAGDSPEAAGIKVLARTHKTMIWERARETQRLRHQLREYFPAALEAFADLDAPDTLELLGKAPDPARARRLTRAQISAAMKRARRRDIPAKASAVLAALRSEQLSQPPVLTAAYAATARSLISVITALNEQVTTLQGQVEEYFGRHPDAEIIMSQPGMGAILGARVLAEFGDDPHRYRDGKARRNYAGTSPITRASGKRKIVAARFVHNDRLVDALHAQAFAALTASPGARAFYDQQRASGREHNDALRRLASRLVGILHGCLKTRTPYNEHTAWGHRHQQAA

SEQ ID NO: 288115 - protein, 427 aa, unidentified
MSATQNEKIRQVTDTAMVIGVDIASEIHWARAFDWRGLELGKAVKFENSAEGFNFFLRRASELAVEQKKDSIMAGLESTGHYWFTLAAHLQGGDFKLVLVNPYHVKRSKELDDGHPSKSDKKDTKTIAKLVLEGRYVYPYIPQGLYAELRVAMNCRWRVRKELASLQNQIQRWLKIYFPEHGKVFGRFTGAGSMALLHSAPLPSDLISLGVEGISGIWKQMKLRGIGKKRAQRIYEAAQTSVGCTTGMEAVRMELQILLEDYDAKLQQYERVMQVVENLCSQIPTVAELLKIQGLGLVTVAGLFAEIGDIRRFESPHQIQKLAGLAITENSSVKHKGPTEISRRGRARLRAILFRAAIPLLAKNREFQLLHRYYTTRQDNPLQKIQSVIAICCKLLRVFYALATKGCAYSPEKMLADIQRNQPLKAA

SEQ ID NO: 288116 - protein, 410 aa, unidentified
MVKENFIYVGIDLHKETHTAVMIDCYNQKLGEITFPNRPADFPKLVTKVKKCNTDAKEVVYGLENAYGYGRPLAVWLIDKGYFVKDVNTAISHRQAKHRGAMYRKSDSDDAEAIALATLNMLDKLPDACPNDAYWSLGQLVHRRDNIMKQRTRLVNQLHEQLCIAYPSYKQFFNDISRPTALYFWEHYPSRKYLKGKSVEDLRAELVPVSHNKCSTKTCEKILDAVASDKVKNNAYQDARDMVTLSIVSDLQHYDSQLTEVDKMLEQMYKMLGCTLTTIPGVNVITAVKILAEIGDIKRFSNANKLAQFAGIAPLHLSSSGKGKDVATKQGNRRLQATIYFLAIQMVQVSSKGTPRNSVVRAYYEKRKAEGKTSQQALICISRRLISIIYGMLKHGTEYRMPVVESAGEN

SEQ ID NO: 288117 - protein, 364 aa, unidentified
MLYVGMDVHARTTTMCILNDNGREVKTVTIRGSWKKVLKELGRIKEPWQVAFEASCGYGYLHEKLSAMAERVLVAHPGHLRLIFRSKKKSDRVDAGKLAKLLYLGEVPTAYVPKVEVRAWRSLIERRQGLLRERTRTKNGLRALMRSHGLVCPKGLWSTKGLTWLAEQELPTEMDTLQREVLLEQFHSVQGVMRKVEKVLKQVADGHPGVALLRTIPGVGIRTAEAVIAYVDDAHRFHSLKAAGAYFGMIPCQDQSAGKNHLGHITRQGPPTVRKLLTEAAWQGIRHSPQIRAYFERIQQDNPQRRKIALVATAHYMLRVMVSMLKSGEVWRYGAEAADALAVDSVQATAPVPKASDNPVAIPA

SEQ ID NO: 288118 - protein, 353 aa, unidentified
MDNGSRYVGLDVHRDTISIAVCDSRGKLLLERVIPTSATAVLELLELLRGKLHVAFEEGTSAPWLVGLLQPRVAQVLVCDPRKNDRRGSKSDRIDARELADLLRCGRLSPVFHQDCGLTSLQQLTRTYLVLTKDQTRVMNRIKALYRSWAIPCAGQSCYSSKQRQAFLSQLPDAAVRGRAHIYYQQMDSLVTLRQQVRQQLLREGRKQPALRLLRQIPYIGPMRATMLIVFIQSPHRFRTKRQLWAYCGLGIETRDSGEYRFRQGQLERKRQPTVMGLNRNHHHLLKYVLKSVAARCCSGSGPLRDFAQTLLDQGMRPEMVRLTVARKIAAIILVLWKKGVSFDAHYLKSQAA

SEQ ID NO: 288119 - protein, 444 aa, unidentified
MKVKTVSALRSKRGLHRVNGAEPQVVGLASVTTDERKTDTMKTYILRNPKPVQPQKAIRPPRPKPVVAMVAKGPVLFIGLDVHNNSIAVSLAPSDSTEVRRYGIIGGEHDDVLKLAKKLADAHPGTLLRFYYEAGPRGFALCRCLRSHGWDCILVCPSKIPRKPGERVKTDRRDADDLARLYRAGELTGIYVPAPADEAMRDLIRARFQVGRQQHRARQQLKMYLLRQNFRYGGQTSWNAAHLRYLAKLKMPFPVQQIVFQEMLEVISEATARLERYDREIERAVPGWRWAPVVRALMSLRGMALLHAATLVAELGDFNRFEHPGQLMGYLGLVPSEHTTGNDRQQGGITKMGNAPARRALVEAAWQYRVPARLSPHLKKRQEGLPKAITDIAWEAQRRLHHRYTHLTRVGRKKSQVAVTAVARELAGFVWAIARQVPPVTRPT

SEQ ID NO: 288120 - protein, 353 aa, unidentified
MKYIGLDVHKQYSVACILDDESGEINHTRLNNLHSEFEKLFSEDSSQYKAVLEAGRSSYPVYDIIKGMADEIQMANPLRVKIIAWEAVKTDKIDAKTLAMLLHIGWIPKSHIREQDNRLQLYLLRHRLFLVRMRTMVKNNIHALVDRQAEPIRKSHPANTDLFGKTGRQWLDSIILPPEEARLLGNLLELLDKQEELIKNSDRWINDLFKLDPVAQHLATIPGIGKFLALMIRTEIDDISRFPKVEKLHCYAGLVPSTSSSGGKTYHGKMIRNCNKWLKYALIEAVWPAIANDYEIEQIYRKHKKHKHANIAKSITARYLATIVYRLWTENRNYLPEKILSKNITNRAAFVRA

SEQ ID NO: 288121 - protein, 388 aa, unidentified
MSCVINHLGQNGAAAQANAARILVSLELSRHTWLVTVLAPGSEKMSKHSLTGGNGVALLELLARLRVKAEERLGAPVGGILVIQEAGHDGFWIHRLLEKNGIGSHIVEPASIAVSRRHRRARTGRIDGETLIRTLAAWRRNEPRVCAMVRPPNPEEEDRRRLTRERSTLIKERVQHVNRIKGLLFGQGITDYEPLHRDRRARLETLATGDGRPLPPRLKAEIGRELARIELVCAQIDAVEQQRDALIASMSTDPVEPVSVLLGLKGIGPELAARLWLEVLFRRFANRRQVAAYAGLAPSPWQSGATNREQGIAKSGNPRLRHAMVELAWLWLRYQPDSALSAWFRQRVGQGRGWVRRIAIVALARKLLIALWRYTSQGVLPEGAVLKA

SEQ ID NO: 288122 - protein, 421 aa, unidentified
MSRNSDKAIGWAAAENGAQSSSEAAAQPMVEVVAARVLLRGDCQVVRAADGRLAPEPGQAVRARGIDLAGELGPPGLHLGDLEQLTEQRSYRSEARIASRRHPMPATPATNLHHYIGVDVSKHFLDVAFEANAGERLANLATAHRELIRRIRTLPIPCVVVVESSGPYHHGLVLALWNGGIEVCVVPPGRVRAFARALGLRAKTDRLDAQLLRRYGEACTPPCWSPPAREHALLRSLLEARQALIEQRTDWHNRLEGADALMRRTATAQINSANRHIARLEARLRAHLAQHETLAAHACRWQQVCGIGPVSAWTLLGFLPEILEAHSKPSELAGLVGVAPDPDESGTHHGLRHVSGGRWQVRCVLHMAARSAREHNPILRAFADRLEARGKPYKVIITAITRKLLHLLHRLSHDPDFSLAT

SEQ ID NO: 288123 - protein, 339 aa, unidentified
MNISTVGLDLAKNVFHVVCFNDRDKEVKKRMLRRNQVLGFFTQLSPCCVAMEACASAHYWGRQFSDMGHEVKLIAPRHVKPYVRGNKNDYNDARAIAEAANRPNMPLVGIKTAEEQDMQALHRIRSQCLRDRTALSNSTRGLLGEYGIVFAKGIPTLRKKIPEILEDAENGLSLDFRNLLARRYEQLVEMDEHIAFYTKRLESLSQKDDACVRLQTAPGFGSIVSSAFRGAIGDGRAYARGRDAAASIGLVPRQYSSGGKKVLLGISKRGDKYLRKQLIHGARAVVLQAANKEDPLSLWINRIREERGWNKAVVAMANKMARIGWAILRHNTSYQPASR

SEQ ID NO: 288124 - protein, 340 aa, unidentified
MEHYAGIDVSCVVDAQGKIVRETKVASEPEALVAFFASLGFAVKRIGLEAGPLSAWLHAGLKRAGFDTVLLETRHVKAALSAMMVKTDRKDARGLAQLIRMGWFRPVHAKSMGSQEVRALLVARKQLLGRLIDVELSIRGILRGFGLKVGVVTRKGFEGRIRELVTGHITLERIAGAMLSARATLKVEYEKLHKIVLTIVREDAVCRRLMTVPSVGPLVAITYKSAMDDPNRIAKSKSAGALFGLTPKKYQSGEKDVTGGITRAGDEMVRTALYEAANVLLARITRFSKLKRWGMDVAKRRGSKRAKVALARKIAVILHRMWVDGTTYRWTDAQPTAVQV

SEQ ID NO: 288125 - protein, 357 aa, unidentified
MIKINQKADFNNHTIYVGIDVHLKSWNVSLYCNQQYLKSFNQPPLPDALQSFLLNSYPGASYKCAYESGFCGYWIQRELLQKNIDCIVVNAADVPQTNKGTKNKTDKNDSKRIAQALQAGLLQPIYIPDDEIEADRQLVRCNERFNNDLVRAKNRIKALLYQLGIKLPDNFNNCNWSNLFINWLKNLEFKNASAKLSLRHQLIMVETIRQQKLFVLKDIRKLLRKERYITIAQYLCSVPGIGPITAASLLTEIDDMKRFATFEQLNSFIGFYPSQFSSGENIHQGNITARQHRRLRSLIIEAAWVAIKTDPAMTKCFIEFKNKVGAKRAIIKIARKLLSRIRFVWINKMKYEKGIIK

SEQ ID NO: 288126 - protein, 359 aa, unidentified
MKIVGCDFHPRWQQVAVFDPETGELTEHKLFNGDGEAERFYRELEPPALVGIEACGNSQWFIELVERLGHMVWVGDAAQIRASYVRRQKTDRRDAGHILRLLMENRFPRLWVPDAEQRDLRQLLIHRHKLVEIRTRVKNGLQHLALNRGLQKQRALWSVRGRACLEKLPLQGWMARRREDLLQLLAELDRHLEELDKAVTQAAEAHPQARLLMSQPGVGPITALAFALTIGDVSRFRHSGQVASYVGLVPREHSSGGKQRLGSISKQGNRFLRQLLVEAAQSVTRLDEGFRKQYQARCHHKPKGVAKVAAARKLAVRLYWMMRQNVAYPEIAPIESSSRVPLTGPRQVAMLNERSRIQR

SEQ ID NO: 288127 - protein, 351 aa, unidentified
MKKIFIGIDFAKEKFDVAIIEACGLKEFGNRQYGTFPNDKKGYRQFIKWVNANCGSALEDEWLFCGEDTGSCSIGLSQWLYGKGLDIWIENAYSIKHSSGIQRIKTDKADASMIAEYAWRHQDKAKLFEPMNESLMQLREVFLYRHKLVQQRVAMEVRKKDKETVSIAKATAFICRKSKHLMAEIDKAIKECDEMIDRIISDNPEMAENYRIITSIKGVARQNGACLLIYTNNFKRFDMDARKIACYYGVAPFGKESGSSVHSPAHTSHFANKLIKSLLSQAAQIARIFNPEIKEYYERLIKRGKKHSVAINNVKNKLLRIIVALVKKQSTYDPEAYKLYSNRLNKQFSHA

SEQ ID NO: 288128 - protein, 363 aa, unidentified
MTSMTTNSSAVTGGVDTHGQTHHGAALDPVGRQLGDREFPTTPAGYRALLSWLQGYGHLERVGVEGTGTYGAGLTRQLRAAGVTVVEVDRPDRKARRAKGKSDPLDAYSAARAALARKATGVPKAQDGRVEAVRILRVARSSAVKARSQATNQLKALLVTAPVDLREQLRHLTTTTLVAACARLRPTGDIADPEQATKTALRRLARRHQHLSEEITGADTDLRTLVAAAAARLLALPGVGPEVAGQILVTAGDNPDRLRSEAAFAHLCGVAPIPASSGRTHRHRLNRGGDRGANNALYIVVLGRLRYDSRTRAYAARRTTEGLSKPEIIRCLKRYVARELFTALTSRTADDQARRACATSTAA

SEQ ID NO: 288129 - protein, 362 aa, unidentified
MQYVGIDYHKRYSVLCATDERGQKLKQGRVNGNTASGFAQFFAELGEPSKVVMEACWNWGWLYDLLGEIEQVEKVVLAHPYKTRLIAEAQVKSDRIDAQTLATLLRGDLIAQSHAPSARTRARKHLLRQRLFWVRLRTMLRNRMHAILDRQHDLERPQLKNFFSRRGKTWLENVQLPRRADQPLLEQNLEVAELLEAKIKQLDKQIGQSQSEEEKLLESIPGIGPLFSSVIATEIDGIGRFSSSAKLAAYAGVVPTTHASGGRVFHGRLLWQCNKWLRWALIEASWSSIQFSGYFGAIYRNARARGKNRNVAISAVAHRLAKIIWLLLSEQRPYIETLPDRSEDKLTVVVRRNQAPSYASQG

SEQ ID NO: 288130 - protein, 468 aa, unidentified
MKKRPPRRRPWKQPASASPALLERINPNAAGIDCGSEAHYVAVPADRDATPVRAFPTFTADLHRLADWLTACGVTTVAMESTGVYWIPLYEILEARGLEVVLVNARHVKNVPGRKSDVVDCQWLQELHSVGLLRGSFRPAAAIAALRALLRHRETLGQSAATHIHRMQKALVQMNLQLPLVITDITGVTGLRIIRDIVAGQTDPHALAQHRDVRCQASEADIIAALTGHYRPEHLFVLRQNLELFDMYHRQLAACDAAIEAHLAPLAAQAPPPASPLPASRTKPKRRDNAPRFDMRTPLHQLTGVDLSQIDAIGPYSALRLLAEIGTDMSRWPTEKHFTAWLTLAPQNKVSGGRLLSAKTQPSANRAAGILRLSALSLGRTETALGAFYRRLAYRVGKAKAITATARKLAILVYRTLKDGLRYQDPGAAAYTAHHRARVLRHLRQRAATLGFALVTRDTGEVLEGTVS

SEQ ID NO: 288131 - protein, 342 aa, unidentified
MSTLQQFCGIDVSSSTLDYIVLKSTDNTRISAKAISSKSKEFIQIPNTLDAITSKFSQPEFDETLFVFESTGTYSAKLLHQLSQMDRPISVISPYQSKSYMASKGITNKNDKNASFCLAAMGKNEELRLYKAPSMEMQQRKQIFSTYRALQKQELMLSNQIHALEQYPEVSQLAANSLKQVLEQVSQQLENLEDQLYKPSQDSEYQEKMKYGTSVIGIGKKTSEAILLATNGLTGFEESGSVAKCLGITPQSHRSGTSINRKGGMTKFGSNSVRALLYMCTRSAIRHNKACKELYTRLRAKGKPHKVAAVAVMHKLVKQFFACVKFKRTFDNDYHTKKQALK

SEQ ID NO: 288132 - protein, 391 aa, unidentified
MLPTRLREQNESDKVLIKGDSMSVRRILAKTINTDLEYEAIGIDLAKNCVSVALLTTDGEVVCIDRLDYSELEKSAQVLCPTTFAMEPCTEMNYLVQKLEAWGHRCLVIGGKNVQNYVENHYSGQKTDLNDAQALAFLAQDTQLRTIKAKDMEQRKYASLTTLREQYIKQYRQTIVSLKGICQAWGLNISKGISGKARLKDLIENHAAFPEELKESLVDMVTHAQTAQKALNKITKTLEELAKNDKLCQLIRTIPGLGLICSCRLRATIGDIKRFKNPKDFPAYYGLVPRSIATGHNEKKGRITHRGDKTMRSLMVQGAGSVINMATRGKLKSKQLTKWILKKQKEKMPWGKLVCAVAAKLLRIVRAVLISSKPYNPQIAGVAKCSLPKGT

SEQ ID NO: 288133 - protein, 355 aa, unidentified
MERYIGMDVHAASCTLAVISEKGRKLKDFPVETNGQALVEAIRMIPGHKHLVMEEGLQSAWLYETLSPHVDELVVAGITQSRGPKSDKRDAYGLAEKLRVGNLDKHVFKAPRQFTRLREFSRTHMTFVGDVVRTQARIKSVYRSRGVLVTGIDVYSSRRRNEWLEQLPSTTQIRATRLYDHLDFLLEQKKEAEADLLREAKKHPIVKTLETAPGFGPIRAARLVPIVITPHRFRTKRQFWSYCGLGIVTRSSSDWVQTTDGAWVKARVPQTRGLSLQHNRFLKDIFKGAATTVITQRKKDPIHARYERLLDGGTKPTLAKLSLARMIAATVLRMWKNEEEYDPGRAGLPAQTREG

SEQ ID NO: 288134 - protein, 423 aa, unidentified
MKLASEYRFTALVGIDWSDRKHDFCLQAAGSEHRESGVLTHSPEAIARWAMGLYSRFGGPIAVCLEIAKGPLVNALQRHEFIVLFPVNPATLAKYREAFVPSRAKDDPSDAQIALELLLRHPDKLQTPQPQSVDMRTLATLVEQRRDLVGDKTRITNRLTSTLKEYFPQALDWFEDRDTLLFCDFLQRWPSLKHVKRARQTTLRSFFSAHNLRRTRLVEERIHGIRCASALTDDAAVTRPNQLLVQALVAQLRVTLQAIDDFDAVISEVAERLPDYPLFAGLPGAGSILAPRLLVAFGEQRARYGSAAEIQKYAGVAPVLERSGNKSWVHWRLACPTFLRQTFVEWAGSTIPRSFWASAYYQHQRAKGCSHQVALRALAYKWIRIVYRCWQARTPYDESVYLNALKRRGSPLIRDMATTAQIS

SEQ ID NO: 288135 - protein, 318 aa, unidentified
MRTRTIPLFVGIDVSKANLDVFVHPSGESFRAANVTDGIADLTARMRKIKPVMVVLEATAGFERKAARALASAGIRVAVVNPRQVRDFAKAMGELAKTDAIDSAVIAQFAEAIKPKPRPLPDEQAQNRDALETRRRQLVGLLAMERNHLATSPPELRDAVTKHIRHLQELIKDVEAQQHELIAADPELSAKATLLQSVKGIGEVTSTALIVNLPELGSLDRRGIAKLAGVGPLNDDSGKRTGKRSCWGGRRDVRTAMYMPTLSAVKYNPVIKPFYDSLVARGKPHKVAMVACIRKLLTILNAMVRNNSPWTPELAFPR

SEQ ID NO: 288136 - protein, 363 aa, unidentified
MTSMTTTTSHVTGGVDTHGQTHHCAALDSVGCQLGDREFPTTPAGYRALVSWLQAFGHLERVGVEGTGTYGAGLTRQLRAAGVTVVEVNRPDREARRAQGKSDSLDAYSAARAALAGKATGVPKSRDGRVEAVRMLRVARSSAVKARSQATNQLKGLLVTAPAELREQLRTLSTIKLIATCARLRPTGDIADPEHATKTALRRLARRHQYLSDEISAADTELRTLVTAAAPALIALPGVGTEVAGQILVTVGDNPDRMRSEAAFAHLCGVAPIPASSGKTHRHRLNRGGDRRANNALYIVVLGRLRYDSRTRAYAARRTTEGLSKPEIIRCLKRYVAREIFTVLTARAAGDQTSHAHAMSTAA

SEQ ID NO: 288137 - protein, 369 aa, unidentified
MYSTKYIGMDVHKDTTSIAVMNSAGKVVMESILETKALTILQFIQGLRGNLLVTFEEGTWAAWLYDLLKTHVTKVTVCNPRKNALLKSGNKSDRIDAQKLAELLRNGSLSAVYHGENGLRTLKELSRSYLAVNKDLTRVMNRLKALFHSGGIACSGTQVYAPRHWSEWLEKITEAGVRRRAEFTYQQLDGLQALRQAVRRAFLAESRKHKATKLLRQIPGIGPIRAALLVALLQTPNRFRTKRQLWAYSGLAIETHGSGQYCYLEGQLRRVKKPVALRGLNRNHHHDVKWIFKSAAVKASSPSGPLHEFHEALLAKGMKPSLARLTLERKIAAITLTVWKKGVRFDAEYLKLQAASASQGRWSIHPKII

SEQ ID NO: 288138 - protein, 315 aa, unidentified
MEEKGTIFAGIDVGKYNVDMAFGGQGEVKRFKNDDDGIGQILGLLKGRQVGRIVLEASGGYQRQLLAALLGAGWPAVAVNPRQARDFAKALGRLEKTDKVDARVLALFAEKIRPPVRALPDETLQAVVDWLTRRRQLVEMLVAEKNRAHQAQGAVRRDIEQHIDWLKKRIHDGERDLPRLLADCPAWNARVQLLDDQKGIGRVSALTLVACLPELGTLSRKGIAKLVGIAPLSRDSGTLRGKRCCWGGRSAARACLYMVTLVAVRHHPVIRDFYQRLVARGKLKMVAIVAAMRKYLTILNALTRDHLKAIAVQAK

SEQ ID NO: 288139 - protein, 431 aa, unidentified
MNYNQNKKIAQITSQTLIIGVDIAKFKHVARAQDFRGMEFGSPCQFENTKEGFEQFLNWISGIKKEQRMDKVMVGMEPTGHYWFNLAHILKENGIKFVAVNPLHVKKSKELDDNSPTKNDVKDAKVIAQLVKDGRYAEPTIPQGVYAELRVAKKIRDLLTEDLQTVQGQVHNWIDRYFPEFLQVFKKWEGKAALQFLKLYALPHEIAVFSEEELLVHLRKSVSRSVGLTKIRELMQAACKSIGLRQGAEMARLELKTILAKYELIQLQFEELDTKIDDLLDEIPGVQQMLAIKGVGRDTIAGFFAEVGDLGEYNHPRQIIKLAGLSLKENTSGKHKGKTTITKRGRKKLRALLFRVCMILVAKNTAFKSLHAYYTQRPDNPLKKMQSLIALCNKLIRIFFGIGKKQFEFSEERMLKDIPHLALLKQAELAA

SEQ ID NO: 288140 - protein, 348 aa, unidentified
MRCYTGQHQFYAGIDLHARTMYTHVLDQKGKTVFEKDLAAQPEVFLDAVKPFRDGLVVGCECMFAWYWLADLCEDHSIPFVLGHALYMRMIHGGKAKTDRIDAAKLASMLRGGLFPMAYVYPRAKRQTRDLLRRRSFFVRQRAQLITHIQNTNTQFNLPPLSKKLTYAANRSPEIADRFAHPSTKLSITADLGLIDAYDEQIAELERHLVKNAKVDDPVTFGLLRTTPGIGPILGLILLYEIDQIARFPEAGNFLSYSRLVRCSHVSAGKVKGSGGKKIGNAHLKWAFSEAACLLLRALPAAKAWMQRQEKKRGKKKALSILEAKLGRTVYHLWRKQVPFDAKRFLAS

SEQ ID NO: 288141 - protein, 326 aa, unidentified
MEHELHYIGIDTAKEKLDVDVLRPDGRHRTKKFANTTKGHDGLVSWLKGHKIDHAHICIEATGTYMEPVAECLYDAGYIVSVINPALGKAFAQSEGLRNKTDTVDARMLAEFCRQKRPAAWEAPHPLERALRALVVRHQALTDMHTQELNRTETAREVQRPSIDAHLLWLEAELKRLEKQIKDLTDDDPDMKHRRKLLESIPGIGEKTSAVLLAYIGLKDRFAHARQFAAFAGLTPRRYESGSSVRGASRMSKAGHVSLHRALYMPAMVATSKTEWGRAFRDRLAANGKKGKVILGAMMRKLAQVAYGVLKSGVPFDASRHNPVAA

SEQ ID NO: 288142 - protein, 428 aa, unidentified
MQYALIQVLPDVPPGGVCAGIDWASTDHVACVVDMAGRVVDRFTAAHDKAGIAGMIARLRRAGAGEVAIERGDGPLVAALLAAGLTVVVITSRQVKNLRSRFSAAGGKDDRFDSYVLADTLRTDRARLRPLVPDTAATVALRSAVRARKDLVAHRVAAANQLRAHLAVAFPAAVGLFSELDGPLSLAFLARFGSQDAAAGLDEDAMAGWLSTLPARGNPAPAAVLCARLQAAPPGATGGDGTAQAGVTTALTATLTSLSAQIKALEIQIAGQLAAHPDSHIFTSLPRAGTLRAARLLAEIGDCRSRFPDPWSLAALAGVAPVTRQSGSHISRTFRWAVSRQLRDAVCDFAADSRHASPWAAAIYGDARDRGKDHPHAVRILGRAWIYVIWRCWQDGTAYDPAKHNALQRVLDQQHAAQDEATGAQANR

SEQ ID NO: 288143 - protein, 355 aa, unidentified
MDSVKYIGMDVHKESISIAVRNGTGKIVMESLIETKASMILQFIDGLRGDLQVTFEEGTSAAWLYDLLKPHVTKVVVCDPRKNASMREGNQSDKIDARRLADLLRLNHLSPVYHGEHGLRSLKELVRSYLTITKDLGRVMSRVKAIYRSWAIPCTGKQVYAPRHRAEWLGKIGEPGVRRRAEFYYQQLDALRTVRQQVRRELLAEGKKHQAWKRLCQIPSIGPIRSAILLGILQTPHRFRTKRQLWTYSGFGIETQSSADHRRVDGQLQRAKKQSSIRGLNRNCNHDLKNVFKGAAIVASSKPGPFQEFYAALLTKGIRPEMARLTLARKIATIVLIVWKRGACFDAQHLKPQTA

SEQ ID NO: 288144 - protein, 481 aa, unidentified
MSRQKKHPAKPAEEKTKAGKGKRRRKRKGMCLEDRPIQEPNAAGIDIGAREIFVAVPSDRDEHPVRVFSTFTEDLQKMAKWLVSCGITTAAMESTGVYWIPLYDVLEQHGVKPCLVNARAMKNVPGRRTDWHECQWLQFLHSVGLLRAAFRPEGDICAVRCLLRHRAELVEMTSQHIQHMHKALTQMNVQIQHVINDITGLTGLAIVDRIIEGERDPAVLAKLRDRRIKASEETIRKSLEGNWRPEHVFTLKQSRNSYRHYQEQIAVCEEEIEKRLVAFQPRVDPEQQPLPPDRKGKQRRRKKKNVNPKTGFDLRTESYKLFGVDLTQIPGLMSIVLTLFGEVGRDMSRWPSAGHFISWLALCPDNDISGGRVLWRGMRRVRNRAGHLFRLGASSLHHDETPLGDYLRRMKSKLGPAGATTATAHKIAIIFYTMVKKQVEYDGTIWAQRDAERAKRFEAKLQRQAQQLGYKLVPITEKPAA

SEQ ID NO: 288145 - protein, 409 aa, unidentified
MLFVGDDWAEDHHDVELVDEHGKVLAKRRFPEGLDGVTRLHALIAEHLPDPGPDPDPGLEVLVGIETERGPWVASLVAAGYTVYAINPRSAARYRERHLLSGAKSDAADAHALAEIVRLDRAGHRPVASDSALAEGIKLAARAHQGLVWERTRHVLRLRSALREFYPVALQAFPDLDEPDALELLGKAPDPDTAAALTRRTLVVALTRARRRRVEERAEELQAMLRATGLRQPAPVQAAFAAIVSAEVAVITTLNEQITILGQVVGEHFGRHPAAELIISLPGLGVILGARLLGEFGDDPRRYVDAKARKSYAGTAPITKASGKKKAVLSRHVRNKHLADAAQQWAFSSMRGSPGAKAYYQQIRARSTSHQAALRQLANRWIGILHGCLKTGALYDEDTAWAHIHQRAA

SEQ ID NO: 288146 - protein, 337 aa, unidentified
MKVTTISIDLAKTVFQVCGTNQAGSEVFNRQVRRNKLLETVIQFPGADVVMEACSGSNYWGRLFIKHGLTVKLIPPQHVKPFVRGNKNDRNDAFAISEASRRPNLIFTQPRSVAATDMAVLHRIRDRRQGSLTRLTNQIRGLLNEYGIVIPQGIEHLRRYIPLVLEDADNELSQLMRSELHSLYEEWCMMASLIKQHDKAIEQFARADEQTTLLMTARGIGSITATALMSVMGSPANYKNGRHFASSLGLTPSEHSSGGKQKLGRITKRGNRYVRKLLVQCAMSHVRHLESRTDNLSLWLKKLKDRRGVQVAAIALANKLARISWAMLHKQQEFKLN

SEQ ID NO: 288147 - protein, 365 aa, unidentified
MAQSERDRSKRSRSQKTEGQLGSSRSSLTKPEQLRGPRARIMQGRAPWRYDMRTPLFVGIDVSQSQLDVALRPGNTFGVSHDEAGMAEIVEKLEGLQPTLIVLEASGGLEVPLTGALAAKGLPVVAMNPRQVRDFARATGQLAKTDRLDAQVLAEFAEAVRPPVRKMPDEETQVLAALVARRRQILEMLTAEKNRLRLAARPIRKRVQSHITWLERELGSTDKELTKTIQASAVWRDKEQVLRSVPGVGPVLISTLFANLPELGSLTRKQVAALAGVAPFSRDSGTLRGRRTIWGGRAHVRAALYMATLVATRFNPVIRVFYQRLCGTGKAKKVALTACMRKLLTILNAMLKTGTCWQENFGQSG

SEQ ID NO: 288148 - protein, 350 aa, unidentified
MNPGLSRMTVGVDTHADTHVAAAVDPLGRTIATAAFPTTLAGYADLLAWARSHGDIDGVGVEGTGCWGAGLTRFLADHDVRVVEVLRPDRRDRRSHGKSDTLDAEAAARAVLAGTATNTPKSRDGVVEAIRALRSARDGAIKARSAARNQLRCLIVAAPAGLRADLEDLTWTRLVAACANLTAGDLTDPAEAVKTALASMARRWQHLHAEITALDRQLDTLVTAAAPQLLERTGIGVQSAADLLITVGDNPQRIATEASFARLCGVAPLPASSGKITRHRLNPGGDRRANRALYTIVITRMRLDERTRDYVARRTEQGRSTREIIRCLKRYVAREIYRDLIAPTQPVTAT

SEQ ID NO: 288149 - protein, 402 aa, unidentified
MNAVGIDVSKGKSMVAIMRPFGEIVSAPFEIKHTASGINSLVELINSVEGESRIVMEHTGRYYEVLAHQLSEANLFVSAINPKLIKDFDNDSLRKVKSDKADAVKIARYALDKWQNLKQYNVMDELRNQLKTMNRQFGFYMKHKTAMKNNLIGILDQTYPGVNTYFDSPARSDGSQKWVDFASTYWHVDCVRKMSLNAFTCHYQNWCKRKKYNFSQSKAEEIYGKAKELVPVLPKDDLTKLIIRQAVDQLNSASTTVESLRTLMNETASKLPEYPIVMDMKGVGPSLGPQLMAEIGDVSRFTHKGAITAFAGVDPGVNESGSYEQKSVPTSKRGSGTLRKTLFQVMDALIKTKPQDDPVYLFLDKKRAQGKPYYVYMTAGVNKFLRIYYGRVKEYLATLPES

SEQ ID NO: 288150 - protein, 430 aa, unidentified
MKSNTQNAKIEAITEKTLVLGIDVGSETHYARAFDYRGIEYSKKPFKFSNTEAGFVTFKEWILDLKERHEKDKVVPGMEPTGHYWFNLGKFLQDNEMKPVLVNPHHVKKSKELDDNNPTKNDRKDPKVIAGLVREGRYMIPYLPDGVYADLRTASNIRFQLQAELTRIQNRISRWFNIYFPEYKTVYGKPDAKSGMLILKAAPLPEDILTLGIDGVNQIWRDAKLRAVGKARAKTLIEAAEHSVGSKEGAVSARMEIRMLLEDYESRNIRLQEVMTLIEGLVKQIPMAEKLLEIKGVGIKTVSGFLAEVGDISRFNTPKELQKLAGLALVESSSGKHKGETTISRRGRKRLRYLLFEVAMSLVAKNSEFRELHNYYTTRRLNPLKKMQSLMAIAAKLIRVFYAMLTKGVDYDPKKMVSDIKRPAVYLQAA

SEQ ID NO: 288151 - protein, 282 aa, unidentified
MTSIKYIGMDVHTESTSIAVRNSIGKIVMECVIETKASTLLQFLDGLRGDLRVVFEEGTWATWLYDLMKPHVTEVLVCNTRKNAVRKGSKSDRIDARKLSEQLYMNNVKSVYHGERGLRMMKELARSYLTITKDLTRVLNRLKALYRSWGIPCAGNEVYAPRYRAEWLAKINEAGVRRRAEHYYQQLDVLRPLRQEVRRDLLEESRKHKIWKLLRRIPAIGPIRAAILIAVMQTPHRFRTKRHLWTYSGLGLETYDSGEYHAVQGQLERSKKQATVRGLNRD

SEQ ID NO: 288152 - protein, 341 aa, unidentified
MTITTIGLDLAKNVFQVHGVDGDGEVVVRRQLRRNAVLPFFTDLPSCLVGLEACGSSHYWARELKQLGHDVRLMPPHYVKPYVKRSKNDAADAEAICEAVSRPSMRFVPLKGEEQQSVLMLHRTRNLLVRQRTMLVNALRSHLSEFGVVVAKGIENISKLATIVESNEKGHLPTAAVTALTMIIDQLRDLNTRIDILEKEIVRRHRKNPESKRLATIPGIGPITASALSATITDASQFKSGRQLAAWLGLVPRQNSSGGKERLGRISKQGDKYLRQLLVIGATSMLGVVRKKRTPDDEWVIALLDKKPPRLVTVALANKMARIAWAVMSRQEIYKTRQTHI

SEQ ID NO: 288153 - protein, 361 aa, unidentified
MNATTAAIDLAKNVFQVALADSNGRVLEQHRLTRAQFERFFDNRSVSRMIMEACGSAHHWARVFGARGIEVTLLPAMYVRAYVRRSKTDAADALALLEAARCADIVAVKVKSVEQQSLQALHRTRSLWMGTRTSRINALRGFCRELGLHVPVGARTGLEAIGRAVADEQSPISALLRPIMQQLLEEIRVLEVRIAQLERQLAQLARESSACRLLMSIPGVGLLTATAILAATSGSVAHFKSARHFASWFGLTPKESSSGGARRLGRISKMGDKYLRMLLTHGARSLLRAAKVAQMKGIELIGVRHWALALQARSNHNKSACALANKMARICYAVLRDQTPFGQPAARLAKKMQRQSFELAY

SEQ ID NO: 288154 - protein, 317 aa, unidentified
MADVRFPQLIQRACGIDVHLKVVVATIDGVGIPRETRSFATFTSSLTELKEWLLSKGVTHVAMESTEVYWKPVYKVREDSIPHVWIVNARHIKNVPGHKTDKMDSEWICKLLLAGLLKPSYIPAKEQRQLRDLTRYRNKLIQQIASEKNRMMRILEDCHIKLSSVVSDTSGVTATALIDMLCEGRKLTLEDIACVYHKKLAASPQELLEACTGFVEDHHVYLLQIIRKDISQTQLLANELSERIKSILSQYDNVLELLKEIPGFSTKVVEDLVAEIGLDMSHFPSEKHLASWAGMCPGNNESAGKKKAEESLTETNK

SEQ ID NO: 288155 - protein, 463 aa, unidentified
MPGRDDVATSQNNKRRQLQGLPVLRRNVGGIDLGSERHWVCAATLDGSGREIASFGATTPELLRLAEWLKARHVESVAMESTGVYWIAPHEVLEAHGFEVLLVDTRQLARVPGRDKKTDPTDCEWIQRLHSCGLLRGSFRPEETICMLRTLVRDKANLVGERGDWLRRMQKSLDQMNVRVHRAVSDIDGATGMAILRAIAEGERNAQKLAQLRDPRCSKTEQEIAEQLSGHWREDHLFSLQQALKMYDAVQERIAAYEKEILRKLGDMEREEHHEPTAPPLPNANKAKKIKKRGQEAKRQALYRISGVDITQIDAIGVETVEVVLSEYGCDLSRFPTEKQFVSHVTLAPHVPKSGGKPSKKKKRNSASTRVAAALRMAALSLRHSQTALGAYYRKLAQRLGGDVAVFATARKLATLIYRLLRWGQPYVDQGAAAYENRYHQQRIRSLMAKAKELGYQLAPASA

SEQ ID NO: 288156 - protein, 348 aa, unidentified
MTHFVGLDVSVKETSVCVVDEAGKVLCERKVPTEPDDIAVLLTSIGGDYSRVGIEAGPLSQWLVNGLTAAGLPMVCVETRHMKALLQAQQVNKSDRNDARGIAQMMRVGLFKPVHVKTLAAQEQRMLLTSRKLMQRKLLDIECDMRGTLRNFGLKVGVISKIGYEARIRQLIGGFPRLAAIIEPLLTVRRVMRQQLATLHKMLLDVVRQDPVCRRLMTAPGVGAVVALTYRATVDQPQRFVHSRAVGAHVGLTPRRHQSGEIDYDGGISKSGDTMLRAMLYEAAQVLMTQSRHWSWLKAWGMGVAKRRGLRRAIVAVARRLAVILHRMWTDGTDFRWGSEPSTAVATA

SEQ ID NO: 288157 - protein, 403 aa, unidentified
MTPKFVASWIYLYTMNWKHINGNRDYRIQIGGHYMNYNTVYVGMDVHKESFTLCSCKYEDEKASHYQRTQASYKNVLRYLEFLRTIYGDDTRFVCGYEAGCLGYSLYRQLESFNVECVILAPTTMLEQRSKRRIKRDAEIIARSLAQHNYSPVHIPTETDNQTKEFIRMRDDHKAELKKIKQQILSFCLRQGYQYDGSGNWTEKHVKWLRSLKPVGLYKEILDEYLLTYTTLTDKLNRLDHRIEELASKEEYKESVSKLTCFLGIRTHTALSVIVEVGDFQRFASARKFAGYLGLVPGQHSSGDDRNGLGITKAGNTHVRRLLTESAQSYTRGKIGYKSRVLRLRQAGNSPQVINYADRANERLRRRYYKMVLKDGKKYNIAKTAVARELACFIWGMMTDNIY

SEQ ID NO: 288158 - protein, 338 aa, unidentified
MAIVNVGIDLAKNVFALHGVNEIGQTDLRRPSVPRAKLHELVAALPPCTIGMEACSGAHHWARLFVQHGHTVKLMAPKLVTPYRMSGKRGKTDAADAAAICEAVQRPNMRFVPVKTVEQQSRLMVHRTRQGFVEARTAVINRIRGLLAEFGIVLPQKAQVVRFEAARHMDSLPGLGKIVIEDLLAEIRHLDERTKAYDAHVRNMARDCTAAQQLMQIIGIGEVTATAIVAMVGNAREFSSSRQFAAWLGLVPGQYSSGGKTRLGRITKAGDAYLRGLLVMGARAVLNAAGAKDDSVSRWARNIALRRGYWKAVVAVAAKNARLAWAALTKGESFTIPV

SEQ ID NO: 288159 - protein, 348 aa, unidentified
MRFYTKTHKHYCGIDLHARKMYICILDAEGKIVVHRNINCNPAEFLKTIAPYRENLVVGVECMFSWYWLYDLCLKEKIEFTLGHALYMKAIHGGKAKTDKIDSHKIAVLLRGGTFPIAYCYPAEMRATRDLMRRRNYLVRTRAELMAHIQNTITQYNLPAINFTLAYESNRNLVLELFSDPEARKIVQLDIAMIDSYDDVIKKLELDIEKTANKHDKHSLLLLRSIQGVGPILSLVLLYEINDINRFETVQQFASYCRLVKCSHESAGKKKGTGGGKIGNAHLKWAFSEAAILFMRYNSAAKTLVENLAKIHGKGKAISILSHKLARAIYYMLKNNQPFERDKFFATV

SEQ ID NO: 288160 - protein, 348 aa, unidentified
MDQVSRIGMDTSKHVFQLHGVNAAEAVVLRKKLRRKEMVTFFEKLAPTVIAIEACGASHHWARLLHSFGHTVKMIPPQLVKPYVKRGKNDAADAEALCEAMSRPTMRFVPVKTAEQQAALMLTSVRDRLIRNRTQLANAIRGHAAEFGLTAAKGMAHLVPLLEHIQADESLPALARELFAAQAKDYEQLQTQIDEVDAQLMARHRADECSRRLAKIPGVGPIGAMLLTMKTPAPELFRSGRQFAAWIGLTPRDHSTAGKVRLGVITRAGDEGLRSVLVVGATAVIQHARRSGKASPWLGALLKRKSPKLAAVALANKMARIAWKLMLTGEAYTVTPAPAAAAGAAGAA

SEQ ID NO: 288161 - protein, 341 aa, unidentified
MDKELYFGVDVSKKTLDLAYYDGEAIDWKNAHIQVSNDDAGFKKIGSWVAKVGKDFDTFLFCMEYTGLYNQNFRLWLESKEYIYGMVEPRKMHRFEPDLDDDQRSLDRIKTDELDAFRIAIYCEQNHKKILRNPSKLPSPVYFKLKRLLAERKQNTKQSTLYKQQLHDICAYDTDLSVERKKLLLKNMQENQKAIDKEIDSYMNEDTSIRKNYNLLTSIPGIGRIIALETIVLTENFTAISNPRKYACYIGIAPFKKESGTSVRKKTGVSKKGFSEAKADLSIAVLSAIRNNPSIRDYWIRKRKEKCGGIVLNAVKFKLVLRMFAVIKRGTPYVETDAYKN

SEQ ID NO: 288162 - protein, 318 aa, unidentified
MQGRERAVDVFVGIDIAKNTFDCHVLPSGERWRGEASGLTDTVARIKGLKPALIVMESTGGYHLPLMTALMIAELPVHLANPRQVRDFARGCGTLAKTDAIDAHMLALFAERIRPEPSRLRPKEEQMLKELVTRYRQLIRMHTMEANRRQQTADPAVKASIDAVLTVIGREIDRLEKDINAHIRNNADWNAKHNIITSIKGIGDKTSSMIITNVPEIGTITRHRVGSLMGVVPFNNDSGKKKGKRSIRGGRGDVRAVLYMATLSAVRFNPDIRTYYQRLLTRGKPKKVAITACMRKLIIIVNAIVRDQTTWAPNSIAC

SEQ ID NO: 288163 - protein, 460 aa, unidentified
MITQMAQKAKSVKNSKRRELVIVNPDAAGIDVSSTNHQVCVPEDRYENHNQSFGCFTEDLHKIARWLLQCKISTVAMEATGIYWVQLYMVLEEYGLEVILVNARHIKNIAGKKTDVVDASWIQLLHSYGLLTASFQPENMIRQIRQLTRQRESLIKSSSREVLHMQKALEQMNIKLHKVISDLLGKSGMAILKAIIVQGIRTASELAQYADHRIKASQQEIIKSLEGNWAEDQMFILKQSYELYNFYQQKINECDEKIDQFMQVYVQHKASADTDYHPSGKRKKQKNDLKFDAEHYLFRAFGVNITRIPGICQLSGIKLLAELGGDFVQKFPSFKQFTSWANVVPNNKISGGRLLSSYVPRKKNKVGSVLRTVASALKQNRSPLGEYFRKVQARHGYAQAVVATANKIARILYTMVKEKTEYDPAKHARSSASLSKQIQSLERRLQMLKMHQTEYQQTTG

SEQ ID NO: 288164 - protein, 347 aa, unidentified
MDITTIGIDLAKLVFQVHAVNAHGKVVLKKQLKRNQMAEYFVNLKPCLIGMEACGSAHHWARKLQSYGHTVKLMPPQYVKPYVKTNKNDAADAEAICEAVARPNMHFVPIKTLEQQGILTIHRIRQGYVKARTAQANQIRGLLAEFGIEIPLGIGYITKRVPELIEDASNDLPGIVRIEIQELLEHFKHLEVRVNDCEKKIVCWHRKDDTSKKLEAIPGIGPITASALVASIGDSKHFKNGRQVAAWIGLVPKQHSSGGKQTLLGISKRGDSYLRTLLIHGARAVIHHSVGKIKPTGTQSWVNQLAARKNKNIAAVALANKNARIVWALLNHDRDYQDNHKTLRVAA

SEQ ID NO: 288165 - protein, 349 aa, unidentified
MKKILKEVLGVDVAQKELVVSLGRMYADLSIEIYAYKVFKNDDAGIVALLKWVKLLANKDVRVNFVMEATGVYHEKFAYYLDEKGYDVSIVLPNKISNYFRTLDIKTVTDKTCSEAIARFGLERKLDFWNRPKKVYKELKQLTRERDQIVEERSMVKNQLHAEEVEAEPNKGSVSRLKTRIKFLNKQEQEIKNDIDGIINKEENLKQEMEYICSIPGVGKLTAVIVLAETNGFELIRNKKQLTSYAGFDVKEKLSGTSVKGKPKISKRGNKHLRKAMHLPSLSSVKYNEAHKELYIRIVSQSGIKMKALVAVQRKMLELIYVIYKNKTTYQDNYEQEKRANNTIMVAAL

SEQ ID NO: 288166 - protein, 337 aa, unidentified
MKITLIGIDLAKNVLQVCGVNQAGKAVFNRTIKRTQLLKTLVQYPEAVIAMEACSGSNYWGRELISQGFEVRLIPPQHVKPFVKGNKNDRNDAFAICEAAQRPNIIFVKPRSLEQVDVIISHRIRERRIRVRTALTNQIRGLLSEYGIVIPKGRDPLNLALPELLEDASNSLTTIARRYIRELLDELYAINASIKSLEKDIRIQARNHPDTKRLTAIRGVAEIIATAAVSFAGDGSSYQNGRHFSANLGLVPKEFSSGGKQKLGGITKRGNSYLRRQLIQGAWSVIRYATNNDDRLSVWARNIIERRGKQKAAVAVANKLARIIWAMLYYKTEYRAC

SEQ ID NO: 288167 - protein, 321 aa, unidentified
MQTKNPVVYAGVDVAKATLQLHLQGQQSEFSNTPKSLQQLCAQLQKVPSVHVVCEATGGYERALVKVLHQEQIPVSVTNPARVRAAAQAQGQRAKTDRIDAQGLTDYGQRYQPEPTPPTSATQDQLVALTQWLKQLIHGRALAKTQAEHHQDAFVRRQHAKLMTHLQSQIEAVEKQIEALLEQDAALQQRVNCLDEIQGVGPRTAWMVLAHMPELGLLNRQEVAALAGLAPWTRESGTMKGMRCIGGGRPEVRLALYMAALSAARCNPVLRTLYKRLRAKGKLPKVALTAVMRRLLTYMNHCIKALPSETAGARTQELKAA

SEQ ID NO: 288168 - protein, 426 aa, unidentified
MCYEDDSRLEQFRQFRKEVRGSNDYLIVGIDIAKEKHHAFFGTATGRTLFRRLIFDNTIEGFEKLMDKTQAIQSEHGLKKVVFGMEPTANYHKPLGEHLILCGKMVVLVSGVSVKSNRKLLDGRWDKHDDKDAANVTDLISQGKCQFYEYPVEEIRDLRDLLMLKRKLRKQEHGYRVRIRNQLIAQYFPELDRYSGYAETEAIVRWCLDPSRIAGFENDQFETIVSTGRKTLAKKKRLDDIQKLAIASIGCRMGEGANLDAKIMVEGLRHIRKAIKTTDDKIDETCKQFPEYDYLLTIPGFGPDVSSKVLGAVGNPHRFFNQTQVLKTAGLDLSANRSGKTSHNAVPVISKQGKADLRYALYQAAWIATTRNKDFKAYFAKQLQGREKEKGIKTKRWVKLSAKLLVIAWTLMKNREVFDIKYLQQA

SEQ ID NO: 288169 - protein, 428 aa, unidentified
MKEKANFNEFAALLGLDWADEKHDVALRIPGAATVEHSTFAHTPEAIAAWVGSLRQRLGSGPIAICLEQSRGALLNALSSHAGLVLYPINPQTLAKFRSALHPSGKKDDPVDAGLLLQLLEKHGDQLNRWEPEDPATRHLALLVEARRGFVDRRTALINQLQSVLKTYYPQAFELMGEDLGSPMATDFLKRWSTLAAVQKAKPSALRAFYYGHNSRSADLLTERLRLIKNGLALTSDTAVLAAQSLASESLAAELAALRPIIARYDQQIEQLFAAHPDAPIFASLDGAGAVMAPRLLAAFGTDRDRFADAQAMPCYSGTAPVTEKSGKQKWVHRRWSRPIFVHQSFLEFAGHSLRFSAWAKRCYEGLIQKGKGHWAALRVLAVKWQRIMWRCWRDRRPYDEAIYLQSLHQRGLARYADLVAGAKTHGE

SEQ ID NO: 288170 - protein, 327 aa, unidentified
MQPMTWIGIDIAKQDFVAAQRSQDDFQTQCFPMTQEGFEAFRQWLPKTSGLGIVFEATGPYWLPLVRWLDSLEPSIPYACINPRRLRDFAKASPERSKTDAIDAALLVHFAETFPPALEPPKSRRAQTLRALWRHHLELQGLLDRARDRQEKALADPQLPTQLATRLQSLLDALKLELDQVEREAHDLVQHDPQTRQSYRLLLSIPGIGPKTALTLLAEYGPRLLQANPKQLTRYAGLEPILFESGSSVRKRPRISKQGNWRLRRALYMAALVGVRWNPILKTFYERKLQQGLAKKSALVAAMRKLLHLVYGVLLHQQPFNPQHQKA

SEQ ID NO: 288171 - protein, 410 aa, unidentified
MEVLHPRCCGLDVHKATVVACVRRVIDGKAVKESRTFATITSSLFALSEWLTETKCTHVAMEATGVHWKPVWHILSDGDLELVLANAAHIKNVPGRKTDVKDAEWISDLLAHGLIRASFVPDTQTHEMRTLLRTRKQVVREKSSHIQRIQKTLEDANIKLDSVITDIMGLSGRKMIEALIAGEKDPAKLASLADHRVKASQGTLREALRGRVTRQHRFLLRLHLDQIDAFDEAIAKIDREVEASIAPFRTAVEQVSSVPGVKDLSARVIVSEIGTDMSRFASDAHLISWACLCPRNDESAGKRRSTRIRKGSPWLKTTLVQCAWAATRTKDSYLNAQFHRIKARRGPKKAIMAVAASILTAIYHMLKDGTFYQDLGPNHFDPRTKERQKNRLIKRLADLGYVVELAPQVS

SEQ ID NO: 288172 - protein, 425 aa, unidentified
MTEIEDAPGARVLVGIDISKHRHEVLIAAPCKQRRRRMTLTNAKADFDRLVAVLRGYGLPVRIGFEATGNYHRALAHHLSCAGFELKLVSSVALARTREALHNSWDKNDPKDAQVILHMLQIGAVQVFHDPLLSGVNDIQEISKTHEIVSRAKTELWHRILTHYLPLYFPEADRYHRSSRTDWFMAFLEAFPSPHFIAAMSKDGFIAAAWTVVGRRVSKTDLLSDIYETARTSVGLPVDPDSDAIRMFRMVLAEGRSLTRQRNEIEARSIELLSGLTDYRLLTSIPGIGPINAMTILAEAGDMRRFRHHRQFLKFCGMDLATVQSGMFRGQSKISKYGNARLRRTLWMAGQTAVLKPANSFRDKFERYIARDRHNPHLRRKAYTAIAAKMARTVHAVIKHGEPYRPFFEGASPGGRTPLDRAVEA

SEQ ID NO: 288173 - protein, 384 aa, unidentified
MFKHNILFIGLDTHKVATEVAYIEDQRGAEAVHLGRIPSNKQSIKKLVRQMESKYPHATLHFVYEAGPCGYWIYRYITSLSHCCYVIAPSLIPKKPGDKIKTDKRDALKLAKLLKSEDLTPIYVPEPEDEAVRDLSRLRQTAMEDLKDAKYQLKAFLLRNNILCKTKDNWSLKHLRWLTELILPTPCQQIVLQEAIQTITERTNRLKRLDNELEHNVKKWRYYPVVKAIQALRGVRLLVATGVIAELGDLTRFDHPRKLMSYLGLVPTEHSTGNKRRLGAITKCGNSRARRLLIEGAHGYKYEANISKEMQIRQEGLSKEIIDIAWQAQLRLCRRYQRLMYKGKHRNVVVTAIAREMIAYIWAISREVVLSPVNKKLRIARMPS

SEQ ID NO: 288174 - protein, 318 aa, unidentified
MTIHTESQISINVGVDVGKSTLDIVLHPLDLYFQIPNDEDSILKVVHVLKKRNIERIVVEATGRYEHAFVFACDQANLPIVVVNPISVRRYAQAIGVLAKTDKIDANVIARFAATIQPDIKPIPDKQSRLIKDLLIRRSQLLEMQTMEKNRLQILPKALHRSIKTLLRSLETQIKTITKQIDEAVMQVKHWRTQTEILTSVPGVGKVLAYTLLSELPELGKLNRKEIAALVGVAPMNRESGSWNGKRRIRGGRHRIRTVMFMAMLSSIQCNPVFKRFYEHLKAQGKLPKVAIIACMRKLIVVLNTMLKNETRWGENMA

SEQ ID NO: 288175 - protein, 482 aa, unidentified
MAKRKMSTFERLTTDQMNRKQRRELGRKVAAGDPELMIVNANAAGVDVGNESHFASVPPDRDPDPVREFGCWTEALKEMAAWFQACGIDTVVMQATGVYWIGLYDILEENGIRVVLVNAQHTKNVPGRKSDVQECQWLRKLHTYGLVRDSFRLAAQIERVRTMWRLRDRLVQDAARCIQHMQKALTKMNIQLANVISDISGVSGQAIIKGILQGERDLYKLADKKDYRVQASREEIVRSLEGNYREDVLFELQQAVDSYHFAHRQMQECDRKLERYLAELPTRTLEAAARPEDVAAEPKKKTRKEARKPRGNEPRLDMKAELKRICGVDLTSIDGINVMTAQTILAEVGTDLSGFKNEHHFSSWLGLTPNKDISAGKVVRRGKKKVKNRLAGALRMAASSLLNSDSYLGARYRYLRSRLPTHKSAVKAMAHYLARLVYRMLTKGEAWVDRGAAQFERRNSERELANLTARARANGFQLIPIA

SEQ ID NO: 288176 - protein, 386 aa, unidentified
MSVTVARAYPAQTAAGPDLATLFVSLELSKSKWLATVLSPGGDKMSRHVVAAGDWNALLGLLLRAKAKAEARLGKPVGITAIHEAGLDGFSVHRMLEKNGVESHVVDPASIAVPRRKRRAKSDRIDGETLLRTLLAHKRGEPRVCSMVVPPSPEDEDRRRLSRERHTLVSERVQHTNRIRGMLMAEGIADYDPLHRDRRGRLDALRTADGRSLPPHLKARILREIERTEVLLRQIAEVEAERDALLRPEREAAAAPLLMRLKGIGAEFASVLWFEAFFRRFDNQRQLSAFAGLAPSPWKSGRIDREQGICQAGNPRLRTTAIELAWMWLRHQPGSALSRWFRDRVGAERGRARRVAIVALARKLLVALWRYATQGVIPDGAVMKAG

SEQ ID NO: 288177 - protein, 424 aa, unidentified
MNDTQNKKIAQVTDKTLIVGVDIGSDKHFARAILARGFEVSRKPFEFANTRDGFERFVNWSCHLAVENQLTKIFVALEPTGHYWFNLADYLKAYDVKLVLVAPQHVKHSKEMDDNTQMKNDRKDPLVIAKLVIEGRYMFPYIPDDVYAELRSAFNRRCDLVEALTRNANRMIRWFDIYFPEYRVVYRKANALTGLMVLMRAPLPADILALGVDGICRIWREAKVRATGIKRAKKLIAAAEESIGRKGGEAVRRELWQLMEEHDLLSKQLNDIMQIITALMERIPGADRLLNVPGAGVITVAGFLSEVGDISRFTDPKQIQKLAGLAVVENSSGKRKGLPGISRRGRKRLRWVLFQLARGMVKSNKEMKAYHQYYTTRKDNPLKKMQSLMAIAGKITRIFFGMLKNGTEYDPTIVMKDLNKAAAA

SEQ ID NO: 288178 - protein, 348 aa, unidentified
MAMTIVEVDRAIVGGVDTHLDNHVTAALDPLGALLGSESFATTPAGYKLLLSWLGQFGTVTKVGVEGTGAYGAGLARFLRKEGIDVVEVDRPNRMARRLHGKSDPLDAVEAARAALSGRAGGQAKTRDGAVEAIRVLHVAKRSATRARAKALTQMRHLTYTAPDQLRCSMKGLPGNKLVTEARRLRPRSSSDPVTSATKASLSSLAHRIDSLDREIVELEALLAPLVEATAPELLALLGVGIDTAAALLVAAGDNAQRLHSESAWAHLCGVAPIQASSGKVTRHRLDRGGDRQANSALWRIVIVRLAHDPDTRAYMERRLKEGRSKREVIRILKRYVAREVYHYLPRG

SEQ ID NO: 288179 - protein, 391 aa, unidentified
MVCVGIDVAKDKHDCCILDSDGTIRADCITIPNNMDGFKQLLQTIRDCTKKSDKIKVGLEATGHYSYNILGFLLDNDLAVYVMNPLHTNLYRKSLSLRKTKTDRVDARTIATMLLSDVDLKSYTDTAYHNEELKSLTRYRFDKVRERAKLKQSVSRLVTILFPELEKLVPSLHIASVYALLSEYPGAKQISEIHLTKLTNLLVTASKGRYGKDKAIQIRDAARTSIGSVMPAKSLELKHTIKLIRELTSEIDEIEVSIQKIMDELNPPILSIPGVGIQSAAMILAEIGDFSNFESPDKVLAYAGCSPSTYQSGKLTNCYAHMEKRGSRYLRYALYNATKYVCHWNPVFAEYLAKKRAEGKHYNVALSHATKKLVRLIYALQKSGKAYLVAA

SEQ ID NO: 288180 - protein, 405 aa, unidentified
MANQDQIVYGGVDTHQETHVAAVVDAQGRLLGTRAFPTSALGLKAVHVWLAGHGQIARVGVEGTGSYGAGLTRVLHAAGVEVVEVNRPNRQLRRARGKSDPIDAEAAARAALSGQARVVPKTRDGIVESIRVLKVALDGTRKQMTQLAERIHHLLLTAPDPLRQLLDLPTAQKISRCAGLRPGPEPADPLTATKTSLRTMAGQYQHLAGDHRDLTAQIDTLTRAANPALRAAFGVGPDTAATLLVAAGDNPERLVTEAGFAALCGASPIPASSGKTQAMRLNRGGNRQANAALHRIVLVRLRHDPTTQHYRDRRKTELPTTAAVLRCLKRYVAREMYKLITDPPPVLHTHDLADLRTQHGLTQTEVANRLNTTAANISRIERGTTYQPDLITAYRQLLQPPTRAA

SEQ ID NO: 288181 - protein, 479 aa, unidentified
MASEGSLESSTRKRLTRKQRKDLGRRIWSGSSGLEVVHRDAAGIDIGSREHYVAVGPDRDAQPVQKFGCFTADLHRMAAWLTQCGVQTVVMQSTGVYWIPVYDVLEQHGLDVWLVNARETRNLPGRKSDVQESQWLLKLHTYGLLRKSFRPTAEIRALRTCWRERAEYVQQAGICIQRMQKALTEMNVQLATVISDLSGVTGMKIIRAIVAGEREGKNLAEFRDANIKASKATIAKSLEGTWLPEQLAILRRQLADWDHTQSQMAACDQDLAALMKELPAAEMEPVEPAPPAAGTRKKRNRKKTSRNQPNFDLAAELRRVAGVDLTRIDGIQVMTIQTVITEAGLDMGRWPTEHHFVSWIGLAPRNDISGGKVLKNKTRKVVSRLATALRMAASTLRESDSYLGAQFRRLRSRLGSPKAITAMAAKQARLVYRMLKYGQEYVDKGTALYEEKYRQQKIRFIARQAAQQGSALVPLANPA

SEQ ID NO: 288182 - protein, 304 aa, unidentified
MGEKGCCIGIDVAKNWLDWAAEGSGRVQRLGNDAAGLAELVRQLQALRPALVVMEATGGYELAGVRALQEAGLPVTVVNPRHVRDFARAGGRLAKTDAIDARVLAAFGAAFRPAPLAQTEASAADFAGLVARRRQLIEMMIGEKNRLEHAQGRVRSWIAESLAALKSQLAQVDETIALAVKADAERRRRFEILTSVGGIGPVTAAVLIAELPELGQIDRKKLAALVGVAPINRDSGMRSGERHIGGGRASVRCALYMATLTAIRFNPSLKAFHHRLRQNGKRPKVAIVAAMRKLLALLKRSHPR

SEQ ID NO: 288183 - protein, 367 aa, unidentified
MKQSSKIFVGMDVHKESIDITLAEQDGEVGRLGTVGGDRVSLLKAVRKLTSRGRVLVFVYEAGPCGFWIYRELTALGHACLVVSPSLIPRRSGDHVKTDRRDSENLARLARADELTGIHVPDMRDEAIRDLVRARDDALITQRRARQQLKALLLRNEIRYLNKSSWTAAHLRWLGELKLPQPAQQIAFQEYVDAITAATGRIERLVHAIGNEAATWRFAPVVAALQAMRGIQFLHAVTLVSELGDLTRFGSARQLMAYLGLVPRENSTGEHRHQGAITRAGNAYARRALVEAAWAYRFPARVSRLIATRQSGLPKVACDIAWKAQLRLCTKYRRLSARRVNPNKIVVALARELSGFVWAIGQCVKPH

SEQ ID NO: 288184 - protein, 359 aa, unidentified
MQQQINKNLFKGQSFYIGIDVHKKSWKVTILSKSTEHKTFSQNPDPKILAKYMNRHFPGGDFYAVYEAGFSGFESCRQLMDLGIHCKVIHPADVPTSQKERDQKSDKADSRKLAKCLRSQEFNGIHIPERILEADRALIRQRFKLVKDIARVKNRIKSLLFQFDISIPDQFTSAQSRYWSKVYIDWLKNLEMDQESLRSTLDNYIDMGQVLRKKLLEVNKQMRELSRSPKYEHKCGLLLSIPGIGINTAMMILTQLGDIKRFVRLDELCSYIGLIPKMHSSGDKTQTGKMTRRGRKELKIMMIEASWEASRKDPALMICFENLKQRMKKNKAIIRIARKLVSRIRYVLIHEQEYELGIV

SEQ ID NO: 288185 - protein, 430 aa, unidentified
MHNKNYISVGIDVGSAFSFMTILAPDETVILKPFKITHNNKDSLERAVSEIKKAEELYSLESRTFLESTGIYHFPLFCYLVDCGFNASIINPIITHSTKNGNIRKVKNDKIDSKGIAKLGLSKDIPVSQFPAKLVLELRSLTRKYYDLTDERSAHINKLKGDLHTVFPQYLDVFCDVTGKTSTMILRQYGTPDKILRGHKKTMIEKISKASRKGLAKASERYEKLCAAANAAKTFGCQIDSIYFNIFLTLDLVEKLDSALDSILNRIRQLITFNKNEKFIQQIKLLNTIPGVGFLTAVTIMCEIGDFSAFRNPKQLFAYFGLDPEVNESGKFVGTQLHMSKRGSIIARRAIFAVALASIRTKRDGEGINPYLRKYYELKSGQKPKMVAIGAVMHKVCNIVFAVLRDEKAFELRSPEEHCKQYQRPALAAA

SEQ ID NO: 288186 - protein, 415 aa, unidentified
MALKIVYKICCGIDVHKTFVVACIASTNDKGVTSYESHRFSTYTSGLKTLLQWLLNRNCKDVCMESTGKYWIPVYNILENDCSIVLAHPKYVKAIRGKKTDKKDAKWIADLFKHDLVVGSFMPHADIRQLRDLMRYRFKLTCFQSSEKNRLQNCLTVSNIQLGNVVSDTFGKSAQAILDKLLENPADTSLDLEPLIYKSLKKKLPELRDAIDGYITPEQVVKLKVIKAHYESLESRKAELEELILAIAAPYQQELAILQTAPGIRSDFTAIGIISEIGTNMEAFPSAKHLCSWAGLTPTNNESAGKKKSVRVSKAGCYIKPLLVQCANAVVTSKKHPEIRNRYLRLKKRRGHKKAIIAIARMLLTALYHMLKNGENYNAELYRKSDLPPADWEITVEQAIIIARNQGYKIKSATA

SEQ ID NO: 288187 - protein, 407 aa, unidentified
MKLLIGIDWSQDHHHVCFMAANGSQQASFEIPHTIEGFARLDAERAKFGVSAKECLVALETSHNLVVDYLWSRQYQVYVIAPTVVKGSRGRYGASGAYTDASSALLLADLLRTDRARFILWQPDGLLVRQMRAKLSLIEALRRDINRWSNRLLAVLLRVYPHPVGLFSDLTTQIGLHFLIAYPTPQAAQGLSYEDFEAFCRQHRYPASRWPTLYAYLQSPRPKPDTAALLAYQDEIPFLARTLLPLVQHRLQLIREMKELFSQHPDHFIFESLPGAGDLLAPSLLVKFGDHRQRFPNAAIPQALAGTCPYTKQSNKKRVVLFRKACDHDFRRIAQQFAMESVKQSVWAATYWQEVYARCRSKSQAYRCLANRWLAIIWKMWQTRKPYDEEYHLKQRLLRRQPRSRKH

SEQ ID NO: 288188 - protein, 361 aa, unidentified
MTDAIRWVGLDVHANQTTVAVIDKATGELQRAKLRGSPSMVLDFIAGYDGRVIAVYEAGPTGMSLARQARAAGIDMRVCAPGLIPRKATDRVKTDARDAEILARQLAAGGLSFVRVPTVEEESLRDLVRAREDVRQDLSRARHRLSKFLLRRDLRYANSGAWTQKHLHWIAQQTFDDRSAQLTCAEYLNAVRVLIARRDLLEKSLDEALATAPYADTIYRLRAFRGIDTLTAFGLCAEIGDFARFAKPAQLSAYLGIVPAEHTTDTKRRLGSITKAGSSHARRLLVEAAWHYRRPPRVGETLERRQRGVDPRVVAVAWRCQQRLYDRHRKLRDERRKPAGVVNIACARELACFVWEAATIS

SEQ ID NO: 288189 - protein, 346 aa, unidentified
MCPDLSRANITRPGLFQEHIFLSGGAAISKQVYVGIDVSSTELVVATNPVSEVTQYSNDADGIAALVEQVTLAEPSGVVLEATGGYETLVAIELQLAGLPVSLVNPRQVRNFARATGRSAKTDSIDAFVLARFSEAIKPPVRLFPDEETRELRGLVDRRRQLSHMVTAERNRLRTAPKRMRPQIQNHIRWLKKQMEDLDKDIKKMIRQSPMWRARDDLVQSVPGVGPVLSSMLLTHLPELGNLNRGQVAALVGVAPLNRDSGACRGKRTIWGGRPAGRAVLYMATLAASIHNPIIKTLYRRLLAAGKLKTVALTACMRRLLLILNTMVRRNAHWGPPNMQATALLV

SEQ ID NO: 288190 - protein, 350 aa, unidentified
MKIVGCDFHPRWQQIAVFDTETGEINEHKLMNGDGEAERFYHGLEAPALIGIESCGNSQWFIDLLDGLGHRVLVGDAAAIRASYVRKQKTDRRDANHILKLLLEDRFPRLWVPSAAQRDLRQLLIHRHKLVEIRTRVKNGLQHLAMNRGVQKHSQLWGVRGRAFLKDLSLEGWAGRRRDDLLGLLAGLDGQIAELDQAVEQASFVHPQARLLRTQPGVGPITALAFAVTIGDVGRFKTSGQVASYLGLIPREHSSGGRQRLGAISKQGNRFMRQLLVEAVQTTCRLDEGFRRQYQARCHHKPKAVAKVAAARKLAVRLYWMLKQNVGYPEIAHIESSSRVPLAGTNKPRH

SEQ ID NO: 288191 - protein, 344 aa, unidentified
MHYKLITIDLAKTVFQVAAFRDDNTIAFNKRVKRAQLLDTLRQCEPTRVVMEACYSANYWGREIAKLGHDTRLVSARVVKAMLVGNKNDSNDAVAIGEAAQRPRVQLLRVKGLHQQDIQSLLRARELLIKERTALINQTRGFLAEYGIIVAQGLAQLQQALPALLEDAENGLTTTIRSLLKRWHDRWLQQNQELETLTHELIALISHDEVFKVLQSIPGVGPIVAAAIMASVNEITDFRNGRQFAAWLGLTPTQYSSGLVNRLGSISKRGNEGLRRLLIHGARAVLNWCEKKEDGLSKWLQQLKARKHSCKVTVALANKLARIVWAVLTTRQEFDITKACQAMK

SEQ ID NO: 288192 - protein, 314 aa, unidentified
MADNAVYVGIDVSKPRLEVAIEPGGEQFSEANDARAVRRLVKRLAPLGCTRIVVEATGGYEAPLAAALYAAGLPVVVVNPRWARDFARSIGQLAKTDALDAQVLAQYAALPQLKGRALPDAQTRELKALCARREELIDMLVAEEHRLEHVPPRLRREINGHIDYLRKRLKHLDHDLDQAVRNSDLFRRQSELLSSVPGVGRVLCVALLARLPELGRLNRAEVAKLVGVAPLNHDSGRLRGARMIAGGRAALRRVLYMAALSAIRANPTLRAYYRHLRDAGKPGKVALVAVMRKLLLILNAMIKTQSPWRSPCPA

SEQ ID NO: 288193 - protein, 384 aa, unidentified
MAEQIFKYSVGCDISMDTFNVCILEVSQERTKVKASHKFKNETKGFKEFDAWVKRHKKHDVPTGFYMEATGVYYENLAWYLFEQEYTVYVLLPYKTKHYLKSIGIKSKNDKIDSQGLAQMGAEQKHDPWRPHSKSIYILRALTRQHESVTKLKTSLQNQLHSNEHSAVRNATVKKQLNATLRLLDKQLTELSGEISNLIDADEKLNEKYSHIDQLRGISKLSWATIIAETSGFETFENQRQLVSYAGYDVVENQSGNHVGKTKISKKGNSRIRRILYMPSLVSVRIKEPVLYNLYQRVSERTGIKMKGYVAVQKKLLVLIYHIWKNDKAFRSDYSKIFGEEESKDLFPFGFGETIKESSPDKRATQDEHSYELSSKVLFPLAQI

SEQ ID NO: 288194 - protein, 400 aa, unidentified
MSPVVGLDVAKGESQVQAFLDKSKPFGKSFSMKHTREELHHFIGFLKEIEEMTGQMPMVILESTGHYHTPVIQYLEEHEVLYILLNPIISYQAKKSSLRKVKTDAIDAYQLCVLYYKEDFEPHKNRGLKLLDLRNLSRQQEIVTNMYVEAKLQFHTILDQVFPEYRKVFGDLYSKVSLLMLEEFPTSEAVLSAGESKLAVSIAEFCPSRSDQWAKEKAKKIMDSATRNPFQKVVYQSHLINLQMYIEMLFQYQGHLSILENRIVTLANELEDYKIVQSIPGIGEKIAATIISEIGEIDRFSHPKKLVAFAGVDPRVYSSGKFTATTNRITKRGSSRLRHALYLAVLCGIRSSRNKKLKEFYDKKKSEGKPAKVAIVACINKLLHWIYALLNRKESFLDIA

SEQ ID NO: 288195 - protein, 411 aa, unidentified
MQVIYERCCGLDVHKRTITACRLRWLGSEWQKEIRQFGTMTKDLLALSDWLVKEGCTQVAMESTGVYWKPVYNILEGQVELLVVNAQHLKAVPGRKTDVRDAEWIAELLAHGLLRGSFVPPPGVRELRELTRYRSSVVRDRARTVNRLQKVLEAANIKLASVVSDIDGVSARLMLEGLVAGQRDTEQLASLAKGRLKEKHAQLVEALACRLQPHQSFLIAEHLAQIDYLEGAIERLSGQIEEKLRPFEQQIGWLDTIPGINRRTAEVLWAETGGDMGRFASARHLASWAGMCPGNNESAGKRRSGRTRKGSPWLRHCLVEAAHGAAHTKNKYLRSQYHRIAARRGKKKALLAVGHSILVIAYHLLTRKQAYADLGANYFDERDRQAVTKRCVNRLQKLGYEISLEKLQMAA

SEQ ID NO: 288196 - protein, 396 aa, unidentified
MSKLFVGVDVSKDSFSATGLDVKGDVRFSLSLTMDKTGFSELMKAITSNCKDLSAVMAGMESTGCYHINLFSFLSSKEINAVVINPLLISNFAKLSLRKTKTDKKDSLTIARFILIHKDSIEQFSISQDIRDFRDIARERESISHLIASTKNEIKRILQSIFPELESICNVFTATLLLFLKEFPSARFIRASKAKVVADALERYGKGRKVSISADEIIRTAKNSIASISLAKELILPRKISTLLHLMEQLDQITGILSELCASLAIEEMEIITSIDGIGDTTGAMFLAEVGDIQNFSSHKSLIAFAGMDPTVFQSGKFQGTSRISKRGNRHLRRIVYLMTIGVIRCNAFFKAYFLKRKQDGLPFRKAVMAVAHKLIRTIFAMLSHKSHFRVKENSL

SEQ ID NO: 288197 - protein, 314 aa, unidentified
MAMPASRPEIGIDVAKDDLVIHLQDLNQTVTIDNTPQAIRQWLATLPKGCDIAIEATSTYHLDITERAHAKGHRVYVVDGYRLSNYRKGVGGRAKTDLADAQLLARYLRREKDELRPWSPPPKAYRVLQSLLRRRAALVKARTALRQSLSGEPELKAPLQALIAEMDRIDTLIQKRLKSAVRAAGLQTQVQRCDAIDGVGELTATALVMAFLRGDFKNSDAFVAFLGLDVRVRDSGKLTGKRKLTKQGDTEVRRLLHCAAMSASRHPVWRAFYQRYRDRGLHTTQALVILARKIARTAFTLMKQQQEYCPAKLF

SEQ ID NO: 288198 - protein, 369 aa, unidentified
METKEIDPINFLYVGVDVHKDQHTAVATNCFGHALMEKDIRNSKEEFAELVRKVRILAEARSLKPVFGLEDTSAYGQRLALHLCQENFPVKVVSPVLVVRERKKLTHPEKSDSQDALGVAKALISEIGTLPDFSISKTSEIAKGLKDLVVDREFLVKEQTRIKNQLHRLLHKSYNSEYREKFKNPFSVKALEYWSKHPVPADLSGNVLLKSQIRRKIRRLRGIKKEVAEIEKEMRILVNQIDQKLETLNGCGLVLTSSVLAEIKDIDRFDSPNALAQYGGFCPKEKSSGKRIRHIKTKSGNRKLNKAVHRIVLSQLGRQGNIYSKNYFQKKIAEGKNKSQAICCLKRKLISIIFMMLKHKTAYDYAARC

SEQ ID NO: 288199 - protein, 344 aa, unidentified
MINTTIGLDLAKSVFQVHGVDAAGSVVTRKALRRAQVLPFFTKLPPCLIGIEACGTSHHWARELTRLGHTVKLMPPAYVKAYVKRGKTDAADAEAICEAVTRPTMRFVPIKSREQQAALSMHRARNLLVKQRTQLINMLRGLLAEFGIAIPEGLERALLVARQVVDGAVLDVPAQAGKIVLMLSQQALSTHAQLREIDCALARLHRIDDMARRLATIPGIGPIGATALAASVTDPGQFRSGRQFAAWLGLTPLQNSSGGKERLGRITKMGDKYLRKLLVVGATSLVRRARHKPQTADHRLVALLARKPVRVATVAMANKMARIVWAVMTRGEVYQAGHAPMLAG

SEQ ID NO: 288200 - protein, 349 aa, unidentified
MCPDKSRANVARLGLSKEQLALNEGGVAIPDPAEVYVGIDVSAKQLDVAIRPTGEARQYTNDPEGIASIMDRIVPLAPSGVVLEATGGFEMLVAGELELAGLPISLVNPRQVRNFARATGRLAKTDAIDAQVLAQFAEAVKPPVRPLPDADTRELRALVDRRRQLLEMVTSERNRLRLASKRVRPLIQEHIRWLKQQADDLDKDIAKLIRSSPIWRAQEDLLRSAPGVGPVLSSVLLTHLPELGSLNRGQVAALVGVAPLNRDSGAFRGKRSVWGGRTAIRSALYMAALVATRYNPVIKAFYQRLRAASKPAKVALTACMRKLLIILNSMLRHRTQWGPPHMQTSALLV

SEQ ID NO: 288201 - protein, 411 aa, unidentified
MEVLYARCAGLDVHKATVVAGVRLAAPGGKVVREVRTFGTTTASLLELAEWLAAQGCTHAAMEATGVYWKPVWHILAEGGFALVLANAAQVRNVPGRKTDVGDATWLAELLAHGLIRASFVPDTPTQELRALLRTRKQLVREKASHTQRLQKTLEDANIKLDAVLTDLLGRSGRAMLEALVAGESDPAKLAALAHPRLAATPERLKEALRGRVTRHHRFLLRLHLGQVEALDAAIARVDQEVAEHLAPFRAAVGLLTSIPGIGELAAQVIVSEVGLDMDRFPTAGHLLSWAGLCPRNDESAGKRRSSRLRQGAPWLKTTLVQCAWAASRQKASYLQAQFHRLRGRRGPKRAICAVAASILTAAYHMLKDGTAYQDLGPDHFDRRSKEVHARRLVRRLADLGYVVELTPVAI

SEQ ID NO: 288202 - protein, 313 aa, unidentified
MSNDLPQTIGIDISKANLDCHAYPAGAERQFANTAKGHKALIAWLSQWQVERIAYEATATYHRALEVALADWPCVKLNPERARRFAQATGTLAKTDRIDAMLLARMAATLQTPVRPAQSAEQAQLAELINARDGLVRDRTALKNRDKNLTIAILKRQCKQRLEQIERHIDALDAEIASLIAADAKLARRHEILTSIAGVGTLTANQLIATMPERGSLDNKQAASLAGLAPVARQSGQWKGKSFIRGGRSNVRQALYMPALVAARFNPDLKAKYQQLVGAGKPAKIATTAVMRKLIVTANALLKADRCWQQSIA

SEQ ID NO: 288203 - protein, 438 aa, unidentified
MISAAIERCAGIDVHKKFLAVCVMVGPLEGEPRIEKRRYGTTVSELNDLREWLQSQAVTHVVMESTGSYWKPVFNVLEEAVRVYLANPQEVKNRKGHKTDDKDGWWLAHLLRHAMIQPSFIPPRAIRELRDLTRRRKRLLGNSTSERNRVQKILEDANVKLGNVLSDVFGASGQLMLDALLEGQATPVQVAQLAQRKAKKKIPQIIAALEGHQMSAHHRQLIRYSLDHLQFLEEQILKLDNDIAAKIREAQLEPQWQLLQTVPAIRETSAAAILAETGGDMTTFPSVKHISSWAGLCPGNNRSAGKNKSSQTTGGNPWLRSSLVECSWAATVKRNCFLREKFWRIVTKTRDHKKGPALIAVAHTLLQLIFQVLSTGKPYVERGVPPLDERQRNRIIRHHVRRLGKLGIAIHSMQPAATAGLGRPLKAVLLEPRPPATS

SEQ ID NO: 288204 - protein, 422 aa, unidentified
MLAESQDEEQIIARVAALDIGKAELVCCVRVPARTGGKRRLQEVTTHSTMTKSLTELANRLVELGIERVVMEATSSYWKPVFYLLEAHGLDPWLVNARDVKHLPGRPKTDVLDAVWLCKVAERQMLRPSFVPPWPIRRLRDLTRYRTDLVSARTGEKNRVEKLLEDACIKLSVVASDIFGVSGRAMLAALVAGERDPKVLAQLARARMRGKIDRLEQAFDGHFADHHGFLLSRMLSRIEALDADIAAVDAQIETQLAPFAEAAVHLDEIPGIGPVAAAAIIAEIGVDMARFPTAGHLCSWAKFAPGISSSAGKTKRSVSSGHGSPYLARVLGEAAVSTSKTNTFLAAHYRRIARRRGQPRAVVAVGRSILVIIWHLLNDPDARYQDLGSNHYDRHVNSSTKKHSHIRQLEALGYTVTLTPAA

SEQ ID NO: 288205 - protein, 362 aa, unidentified
MQSTPLIAFDQHAATTVAAVLLPGQRTPALHTLTSDSATILRFVQRLQREVGRVRCCYEAGPCGFDLQRRMTVEGIPCEVIAPALIPRRAGDRIKTDRRDAGHLAVLYRAGALTAIHVPTTHEEAVRDLLRCREDIRADLLRARHRLSKFLLRHGRRFTATKSTWSPRHHAWLRAQTWPLPALTHTHDAYLRAIDEAVARLRTVETQLQDMVTLEPLHTRVQRLRCFRGIDDLTALTIAAELGDARRFASARGLMAYVGLIPSEHSSGTKRARGAITKTGNAHVRRVLVEAAWHYRHHPFIGKQLRRRQLGAPPTALIPAWRAQQRLYRRYHRLAARGKPKQHVVTAIARELTGFVWATLTQ

SEQ ID NO: 288206 - protein, 300 aa, unidentified
MVGTMTVVGLDVHARSTQAAAIDLLSGELRRQKFGPGTEPVVEWLSALDGPVRAAYEAGPTGFGLARVAAAAGLEVMVVAPSKTPRAPGDRVKSDRKDAELLARLLLAGQPKAVTVPPDWLEAIRHLARAREQVRRDLGRARQRVSKLLLVEGRVYPGVTTWNQEHRRWLSRQQFRFEATELAFIDLLAAVDGLAARREVLDERLARLAQDERLWPTVSRLRAFRGVDTLTALLLHLELGGDWQRFRSPRQLGSWLGLTPSLEQSGESLTQGAITKTGSGIARRLLVRRPGITCENPESA

SEQ ID NO: 288207 - protein, 344 aa, unidentified
MVSIGVDMHKRSWHITALADGEIVLTVSLSRPNYDAFEKVLSQFKGNYARIVYEAGPGGFDLYDRLTADGIECIVTPPSLIPTQSGSRVKTDRKDSLKLAKLLESNMLKKVWVLSPEERAHRQLVRTRRQIVTHRSDVMRQIKSLLLFHSIEVPFSSRQQWTGPFIRWLHDVDLGNEYLNRSLKALVDFFDYLSAEKKRLTHEVVELSREEKYVQRVKLLKTIPGIGCLSAMEILVELQDITRFQTADEIAAYLGLTPSQYSSGEHVRMGHITHAGNDRVRTALVESSWILIAKDPHMRCKYEDIKQRRGGKRAIVAVARNLCIRMRRMLLDHVPYEIDFQKAA

SEQ ID NO: 288208 - protein, 358 aa, unidentified
MSRCIPTDAQAITLGVDTHKDVHVAVALDGIGRHRGTLSVPANLAGYKRLVDWAEQFGPLKHAGVEGTGSFGAGLSRFLKGRRIKVSEVIRPKRRDQYRAGKSDPIDAEAAARAVLAGTATGQPKSADGEVEMIRTLRITRRSAVKARVGAANQLQNLLITAPEGLKSELCGLSTARLVAIASRFRPGPNPSDVEAATKFALRSVARRYQRLSEEISELDEQLDRLVTEAAPELVAVEGVGTDTAASLLIAAGDNPERLKNEAAFAHLCGAAPIPASSGKSVRHRLNRHGNRDANRALYVIALCRMSRDERTRSYVEKRTAEGKTKKEIIRCLKRYIAREIYRVLSSLSLHKPSISVP

SEQ ID NO: 288209 - protein, 372 aa, unidentified
MNASVHFIAVDVDDNLFHGCGLNRVTGETQEFTCRPSAGHLIKKLQAFQQEGIKIRVCYEATYLGYSLQRALARHGYDCDVIAPSLIPERAGKRVKTDRLDCRKMAEYFANGQLTAVHIPSLEEETVRNLVRARKFLSKQMTALKIFILSTCRRMEVDFHEGENGKKHYWTKQHRDWLAKRIKDQTNEAQASNLTMLLQQLGHMEECIEMYDIEIEKNAQSSTYQESVRALCCYRGIDTLTSMTLITELGDIMRFGHPRQLCSYAGMELTEYSSGGHERRYRMSKMGNRYVRTSVIEACQLASLRPQVSKSLKARRVDVNMKYVDIADRCMKRLHKKSQRLLGKGKMANKVKVACARELLCFVWESLHAARV

SEQ ID NO: 288210 - protein, 358 aa, unidentified
MTGSSDYESVQVFIGVDVGKDTHHAVAVNRSGKRLFDKALPNDENKLRSLISDLKQHGQILLVVDQPATIGALPVAVARSEGVLVGYLPGLSMRRIADLHAGEAKTDARDAAIIAEVGCELSMICGFDDDLAAQATQASNRIRGLLTQIHPALERVLGPWLDHSAVLDLLQRYPSPEKLASQGEKRLASQLCKLAPRLGKRLAADITQALAEQTVVVPGTNAAVVVLPRLALQLITLRKQRDEVAMEVEQRVLTHPLYPVLTSMPGVGVRTAARLLTEVACRAFASTAHLAAYAGLAPVTRRSGSSIRGERPSRRGNKTLKRALFLSTRPDIQGLLHTQNEPGKATQPGAYRPGKAAL

SEQ ID NO: 288211 - protein, 466 aa, unidentified
MGKPARSARSRGPRLPHKTNPTPPVVHPHAAGIDVGATHLYVALPPERSAEPVRVFETFTADLYALAAWLKEHGITTVAMESTGVYWIPVFQVLETCGIEVYLVNAHHAKNVPGRKTDVSDCQWLQYLHAVGLLRGSFRPPDEICAVRSLLRHRGTLVAEAAAHVQHMQKSLIQMNLQLHHVLSDLSGQSGLAILDAILAGERDPVRLAALRAPGVKAKAETIQKALVGDWRREHLFTLRQARESYRHCQTQITECDQEIERHLAALRSQVDPSQTPPPPPKPSQSSPRRGEIACQAVDLRTELYRVLGVDATQIPGLGTGHVSGLVGELGCDLSAFPTGAHFTNWLGVCPNPQISGGRVLRRGTRDVKNRVATIFRMAAQSLHHDGSALGAFYRRMRSKLGAPKAITATAHKLARIYYHLVTTKQAYDASVFAKNEERETKRRVERLKREAKALGFALSPEGVAA

SEQ ID NO: 288212 - protein, 317 aa, unidentified
MKTVPFEQVILRGCGIDVHKDMVVATISGEGLKTETRSYKTFSSSLTELKEWLLSSGITHVAMESTGVYWKPVYKILECPDMKVWIVNARHIKYVPGHKTDKKDSAWICKLLLAGLLKPSYIPEREQRELRDLTRYRNKLIQHVSSEKNRIVRILEDCNIKLSSVVCSLDGIVANKLIDMLIDKGHVTMDDITCIYHKKLEASPELLYQACEGFIEPHHIYMLQTIRKDMEQTKAIIADLTCRIKEVLSPYENVMELLQKIPGLSRKTVEDLIAEIGVDMEAFPTEKHLASWAGVCPGNNESAGKKKVVEPPMATNS

SEQ ID NO: 288213 - protein, 320 aa, unidentified
MSKKKSHSFVGIDVSQQLLEVAVHVSSYHFSCPNKVSAFANLIAELVALRPKLIVLEATGGLEKPVVNALRGVGLPVAVVNPRQVRDFAKALGQLAKTDRLDAAVLAHFGAAIKPPVTPLKSQDEQELDALLKRRNQLVEMLGDEKNRRASAPSAKWQEEIEKHIDWLKDNLAELDAQLKSLLKTSAQWQVKDQILQSTPGIGAVVSSSLIADLPELGQLSRQAISKLVGVAPLNNDSGPKRGTRHIYGGRAHVRRILYMAAFNAIRWNPVIKEFFARLIAHHKPYKVALTACMRKLLAILNMMVRNNTEWTNKAQLVSD

SEQ ID NO: 288214 - protein, 425 aa, unidentified
MNYKQNEKINQVKESTLVVGIDIGSTTQYARAFDWRGIELGKVFPFSNSREGFESFKAWMQHLQDKYKKPDAIVGIEPTGHYWFDLGAYLEDEGILLVMVNPYAVKQTKELDDNSQSKNDRKDPKVIAKLVTEGRYSAPYTPDGVYADLRIMVANRKRLIREMIQIKNRFARWFAIYFPEYTDVFGDYEAQSSMLLLKKVCTPEAIVELGAEKINQIWRDAKLRAVGMKRATTLCETAKRSIGLKKGSSAARYEMKLLLEDYEYKKTQLDSVMEEIERLCRKIPESEQMLAIKGIGVITVAGFLAEVGDVRRFESPRQIQKLAGLSLRENSSGKHKGQTTISKRGRSKLRAVLFNAAIPLIAKNPEFKSLHKYYTTRANNPLKKKQSVIAISCKLIRVFYAILANGVTYDAQKMLSDIHRQPQAA

SEQ ID NO: 288215 - protein, 435 aa, unidentified
MEEVTDEPLYRDRVCGIDIGKAGMVATIRVPSDKDPARRASETRSFGTTKREVLALADWLRCWQVPAVVMEATGDYWKGPFYRLEAEGFECVLADAKQVKNLPGRPKRDPSDSRWLAACFERGAVTSCFVATPEFRLIREHTRYRRDLTAERTREKQRAEKLLESAAIKLSSVVTDLHGVTGRDIMDHLIAGERNPKVLAQLARARARRKIAELEAALEGAEFFTGHHAALLKAMLARIDRLNADIDQVSQVTEELLAPYEEQLQQAESMPGWGRRAAQDAIAETGPDMTRFPTGAHLASWAGRTPLDNQSGNRRGKAKSKKGNRYLAGITGETAIAAGRTQTREGARYRRPARRRGKAKAQVAVGNTQLKVYHKLLSNPGMRYEDLGPDYYETKTAIRRQVAHHVGKLGALGFEVTLCRAPEPTTDTSGDPQAA

SEQ ID NO: 288216 - protein, 331 aa, unidentified
MNQAGIDVASESFDIQRCCGETIAHRTFANTNSGHEHAIKWLQYGSEQVRVCLEATGIYHLQLALALCRTAGVELMVLNPRAARRFAEAQMVRGKTDKIDALVLLHYLECMLFVPWHAPSELRLELQSLAHRLSQLTKEQVRERSRLHAAARAGEHTHEAQRDIRVHIRFLKRRYAQLAAKAIALMKQHEDLAEDLKLVDSAPGFAETSALQVIAEVGLLPAHLQPQQWVAQAGLDPKPRESGTSVHAPRHISKQGNAKLRAALFFPAMSACRCDPNVHAFYEKLLAKGKTKRLAQTAVMRKLLHSIWAMLKYRQPWDGDKFYRIPESINT

SEQ ID NO: 288217 - protein, 411 aa, unidentified
MENVFLCCAGLDLHKKSVEACVRRMEPNGHVHQQSRHWGTMTGDILMMADWMAAQGVTHVAMESTGVYWKPIYNILESRFTVLLVNARHLKQVPGRKSDIRDCQWIAQLLQHGLLKGSFIPPRPQRELRDLTRHRTQLVEEKTRTSNRIEKVLEDANIKLGSVASEVLGVSGRSMIQALLQGEKDPTQIADLAQRQLRGKIPQLEKALEGNLTEHHRFMLRLLWKGLTQQEALIAELEAKIEEVTRPFASEIERLDAVPGVDRRVAEVVLAEVGANVDPFPTHQQVAAWAGMCPGNEESAGKRRKRRITPGNRWLKRTLVQAAWAASHAKNSYLASQYRRLTGRRGKKRALIAVGHSILVILYYLLKDGSQYADLGVDFFDRLEPERLTRYYVKRLQGLGHNVKLEPCVSA

SEQ ID NO: 288218 - protein, 338 aa, unidentified
MTVVTVGIDLAKNVFAVHGVNAAGKAILVKPLVRRAKLLELIATLPACLIGMEACSGAHYWAREFQKMGHTVRIMVPQLVSPYRMGGRHGKNDAADAAAICEAVARPNMRFVPVKSIEQQGQLFVHRAHQSYVSERTTLINRIRGLLSELGIVLPQAFKAFLSGVAQVLEDLPGYCNQVIGDLLNELFHIEEKIKNSEKLIPQLARDNSAAQLLMQFRGVGPMTATAIVASIGNGHDFRNGCQFSAWLGLTQRQQSSGGKARLGRITKAGDSYLRTLLVLGAKSVLLGAAKNDDPVSKWALQLKERQGYGRALVAIVAKNARMCWAMLHLKDEFRFPS

SEQ ID NO: 288219 - protein, 307 aa, unidentified
MTAVGIDVGKASLDVAIEGRAAVMRVANSAAGICKLVRQLSGLDQVRVVVEATGGYEEPLLEACCDAGLWVARVNPRQARNFARAAGDAAKTDAIDARLLCLMAGMFAGRLQRYQAPLPWQRELRDWLRRRGQVVTALQAHRQQMAMCPSSIRSLAARTIAALRRELAAIDQQMQALLDAHATPALGSCKGLGPIFQATSLALLPELGALSRRQIARLVGVAPMNRDSGQSSGIRRIRGGRAPVRVALYMATLSAVRWDETMKAHYRQLRARGKLAKVALVACMRKLLTIVNARRRDELLLEAAMPA

SEQ ID NO: 288220 - protein, 402 aa, unidentified
MNSVGIDVSKGKSMIAVMRPFGEVVCSPFEVPHTSSELGALAKRLKSLDGETRVVMEATGNYHLPIAVALHEAGIYVSVVNAMLVHDYGNNSLRRAKTDKQDAIKLANYGLDRWLTLPEFSPEAEIRMQLKTCCRQYQQYSKVQTMLNNNLISLLDTVFPGVNRLFSSPVRADGSEKWVDFVETFWHCECVSGLSQKAFEKKYQKWCQKHGYYFRESKALEIYTAACGAIGVMPKTETTHLLITQAVSQLRATSTALAELKKEMLRLAESLPEYPVVQKMYGTGPTLGPQLMAEIGDVRRFHSKKALVAFAGIDAPPNDSGQISGNHKAMSKIGSSALRRTLFLIMGVYLQNAPVDEPVYQFMDRKRADGKPYRVYMMASANKFLRIYYATVKAYLDALETA

SEQ ID NO: 288221 - protein, 351 aa, unidentified
MYTLGIDLHKKSSVWLLIDEQRTELWKEHVSCHPDYITTALKKIPVPHSEIQVAIEPVAGWRWVTSMLTQSGMQVHIAHPRKMQLIAQSTKKTDTEDARVLANLLLAGYFPEAHKSSDIIYQLRLLLRERNFIIQKRTSVKNQLHGIATTQGLHEIKSGNPLFKKGKEDILAGTNFVLKQLHYLIEDLDKRVAPFDEQLLIEYTKHPVAKLLMTFPGVGIITALTIISEVDDFSRFSAGKKLASFAGLVPRQRSSGELVRYGSITHAGSAPLRTVLVETAMRIRAGNAPELYAFVAKLTPISGAKKARVALARKILVIMWKMVITNTPYQPKNPPSVCTTNLSDLDTASGS

SEQ ID NO: 288222 - protein, 409 aa, unidentified
MQVVHERCAGLDVHKRTVVVCVLVPEGREVRTFGTMTRELMEMVDWLLGKRVTHVAMESSGVYWRPLFNLLEGRGVELLVVNARHVKAVPGRKTDVKDAEWLADLLRHGLLRASFVPDRSQRELRELVRYRKTLVEERARMVTRIQKVLEGANIKLSSVASNVVGKSGKAMLEQLAAGNEDAEAMAELALSNLRSKRGQLREALFGSMGEHQRFMLKSHLHLVEEMDAEIEAVNAQLGERMRPFESQIALLDQIPGIGPTSAQQILAEIGVDMSRFPTADHLASWARVCPGMNESGGKRHPASTGAGNPWLRSTLIEVALAAVKAGRRQPNFFSARYHRLSTRRGPKRAAMAVAHSLLIAIYNMLRNGSYFVDLGPTHYDQRRRNLIVKRSVRRLEDLGYKVSIEEAVA

SEQ ID NO: 288223 - protein, 387 aa, unidentified
MKKVNSNVSCAGMDVHYKFSNVTFRDAGGKVVSRQRLAHPDRKQLSERLSRWPKGIPVVMEASFGWGWLSDLLEQAGQDVHLSNCYKVEQMRKARGWVKTNKKDADLVSLLVFEQSDWWKVWRAPPDVRNRREQMRFRGDLVGSQTRVKSRIHAIFHRHGIFHEFSDLFGSKGRKFLVELCLYNPANLPAEALLALRGQLKLLDHLRRQLADVARILHKQLLKTPLAMRLKTIPGIGLILAHVLVAEIGKIERFKNQKSLASYSLLAPRSNDTGEETTGQSPLGRHLGLRGNRTLKWAFIEAAHGAVRSGGKWRAIFDRVTNGGRKNRNRGYIKVARELVKVVYAVWAKGVDYQAIPPVRPGRKSNKKKSRSETGQLLHPMVHALTA

SEQ ID NO: 288224 - protein, 354 aa, unidentified
MGKVKEILDKSYRLFIGVDVHLVSWTVTVRTRDVELKTVTMAACCTTLEAFLRPYMGHPLQAVYEAGYFGYVLHDFLQSLGIDCVVTPPSLIPQNAGNHVKTDKKDSRKLAQCLSNGELKRVYVPTVEERSARMVSRRRRQLLADRKRVQHRIKADLRFHGITIAEPRVPWSAHYRDNLGRITFHDRWGTESFQQLLTEFDHLTEQVASQTRLLAALAQTDPYRDRATLLQSIPGIGPIGAMEFLLELQDISRFRTAKALAAYLGLTPSQYSSGEHTRMGSITRTGKPSLRAQLVESSWILIAKDTAMRTRYERLKARTGGKRAIVAIARRLALIARRVLLSREPYRFGACPTA

SEQ ID NO: 288225 - protein, 348 aa, unidentified
MSTIQIGVDLAKTVFELAISEAPGVVTSRRRLSRAAFPRFLAGQAPAEVLFEACGSAHHWGREAQRSGHRVKLLHPADVARYRDGNKTDRADAKAVLEAARNRALTPVPVKSVEQQAVVALHRIRQGYLRTRTARISALRGHLRELGHVIPVGASRVSREARTAFADEAIPGFLREALVALLEEIRSLDEKAESVRASLTTLARQMPEAQRLLTVPGVGVLTATALVAFVGDIHRFTSGRHFASWLGLTPREHSSGSSRRLGSITRKGNSYLRMLLIHGARAALRAGGVTDRPDDLRTWAKDVAIRHCHNVAAVALANKIARICWRTWRDGRDFERREPQEEGRRTRG

SEQ ID NO: 288226 - protein, 457 aa, unidentified
MARAEGKRRVSAQLVEDEEYQRRYDRVCGIDVAKASAVACTRLPPARDGGRRASRLETVEASVPEVAALAGRLLDDGVEMVSLESTSDYWRIWFYVLEAAGLQVQLVSSSQARRLAGRPKTDALDAQWLARLTEMGLLRPSFVPPARARALRDYTRARAHLVHDRTRAYQRLEKLLEGALIKVSSVASRMTTQSALDMVRALIGGERDPARLAGLARGRMRAKAPQLERALTGMFDDHHAELARAHLDHITFLDRQVARLEDSIAACLDQIPAARGADADGAVLPPGASTPPDAAVLPAAARLAEVPGISEGLARAIIAEIGLDMTRFPTAGHLASRAGLVPETAQSGTRASSKKGHGDGYARAAATQAANAAARTQTFLGERYQRIARRRGKARAQVAVARSILTIIWHLLSDPTARYTDLGYDHHARKVNKDKKLRSHLAQIQAPGYQVTITPAA

SEQ ID NO: 288227 - protein, 397 aa, unidentified
MIAVGIDVSKSKSTVAILNGDGSIRAKPFDVHHVADELQALVDYIKRTSKPPTILMEPTSHYHYPLLKAFTEAELPVCLINPYQMKKYGDTELRKAKTDKRDSLRIAQYALEKSYSLIPYTPQDQKYEDLRFLSRQYSQRISTLTVAKVQLLSLLDETMPGITTILPLKSRDPDNCVLLRFIKRFKSFDVIRKMGKTRFLDSYQVLVKKTKDRFAGSKGLAIYELVLNSVTTRGENPLSAMTQDQCVDLVSTSQKAADEINLQMRIIAETMPEYKVLRSMAGVGDRLGPIILGEIGDIRRFHSGKALNAYAGNDAPPYQSGQFESRNRHISKRGNPALRKACFEVMQALKLTKPQDDPVYLFLLKKEQEGKPYNVAKMAAVNKFLRIYYARAMELYK

SEQ ID NO: 288228 - protein, 353 aa, unidentified
MLIIGCDFHPGFQQIAIFDNQTGAYEERRLSHRAEAEQFYRSLAGQEVRVGMEACGHYPWFERLLAELGFELWLGDAAKIRASVVRQQKTDRRDAEHLQMLMREDRFPRIWVPSLEERDVRQLLVHRHKQVQARTRTKNQLHALALSQGVQKKWKLWTAAGRAELESLELLPYAAQRRRQLLHRLDALEAEIAGLNRQVEEEVKGRAAAVKLMTHPGVGPVTALAMVLTLGPAERFRDGRKVGSYFGLIPSEYSSGGRQRLGHISKQGSSFVRFLLVEAGQSAVRKDAELGRFYRRLGARKHRALAKVAVARKLAVRLYLMLREDWTYAQLCRAVVQASPSHSVAASKNRPLE

SEQ ID NO: 288229 - protein, 350 aa, unidentified
MIIIGCDYHPGFQQIAFVDTDTGDYGEQRLEHSEGAEKFYRDLAAQGKKVRVGMEASGHARWFERLLAEVNFELWIGDATEIARKRERKQKTDRQDAQHILQLLMENRFPKIWVPSGENRDLRQLLWHRHRMVQARTRIMNQLQAVALNEGLRCKKKLWREKGRQQLEAFRLAPWASRRREDLLQLLDRLNSTISDLTQAIEQEVEKCPEAGRLRTHPGVGALTALAFVLIIGRTERFQCGKQIAAYLGLVPLEDSSGNRRRLGHITKQGSSILRFLLVEAAQVTARSIPEWRNKYVHLTMRRGRKIAKVAMARRLAIALYWMWRKGWDYEQLRKFGSHAGQPGNRDGVK

SEQ ID NO: 288230 - protein, 339 aa, unidentified
MKVSTLGIDLAKNVFQLHGVGCNGQTVLKKKLTRDKFLPFLMQLEPCLIGMEACASSHHFARVLRQYGHEVKLIPPQYVKPYVKTNKTDAADAEAICEAVARPNMRFVQIKTAEQQAILVLHTERNILIRERTACANSMRAILAEFGIIMPRTLSQLYKKIPEILEEYDNELSPFVRCSVARQLEHLQGVEDQITLIEQELSRWAKTQPACQRVMKVPGVGSMTATYLVASVGNGQQFHSAKQFAAWLGLVPREFSSGGKQRLGRISKRGDRYFRYLLVHGARAVAAVIERHKDNMPWLYRLLNKKAYNVAVVAQANKTARILWSMLVHHTEYRTLSAV

SEQ ID NO: 288231 - protein, 385 aa, unidentified
MAPIRMPEAVIGLDVGKSSHWACVATRDGEVLLSAPVANREDDLDSLFGRFPDALVVVDQSRSIGALALARARAAGMSAAYLPGLAAHGAARLFAGDAKTDERDAMVIAKTALGIPDALLPVGDPGPTIAAARALAAQRNFLTCENTRNKNRLRSILLESCPAFEALVDLSDGPQLRLMASLGGAWSVADAGPRRAAALTRGAARGKIEALVRSTTSSTRPDASVVAAEDRAVKLLARRISENSAEIEAITAEISALLEGDDTYRCLLTVPGIGPKTASELAISIDIEDFPSHDRLASYCGLAPRNRQSGTSISSVTASRQGNKRLKNLLIFSCNCLTRTEGRWGDYYTRCRERGMSHGKALKALARKRLKVIYAVMRDRVPYAA

SEQ ID NO: 288232 - protein, 345 aa, unidentified
MLAERVDVVIGVDTHKHTHTAAAVTPTGAVLESLTVAADRSGYQKLAAFGARHGDRRLWAIEGTGTYGAGLTSLLVALDEPVVEVDRPVRTARRSGAKSDEIDAARAAREALSRDHLGVPRGRGEREAIRVLLTTRAGAIEARTAALSALHALVTTAPEQLRQRLRNLPTGALVRTCTGLRTSQRHSSEHFATVMALRSTARRILACEREAAEPEHQLEALVRQIAPTLLEQVGIGPVVAGQLIASWSHRGRVHSEAAFAKLAGVAPLPASSGLTVRHRLSRMGDRQLNRALHTVVLVRLRQDPETKAYAARRYAEGKSVREVKRCLKRYVARQLFRQLEGLDRT

SEQ ID NO: 288233 - protein, 341 aa, unidentified
MSIFVLGIDLGKNVCSLVGLDATGAVVLRRRLRRDGVADFVGKMEPCIVAMEACCGAHHLGRVLGARGHTIRLMAPEYVRPYVKANKNDDHDAEAIAEAATRPTMRFVPVKSEAQSDIQALHRARSRLVAERTALINHLRALLLERGIVVAQGRRKLEDVLGLFADEDDSRLSSRMRLLVEDLRAEWRSLDERIAAFDAEFVRMARDDEAARRLSTIPGIGVINATALVAAVGDAASFGRGRDLAAWLGLTPRQATTGGKPRLLGISKRGNRYLRANLIHGARAVLPRIMAQDTPLGRWARGLLERAHKNIVVVALAAKLARIVWAMLRKERSFDPAIAAA

SEQ ID NO: 288234 - protein, 440 aa, unidentified
MSDLPVLHPHAAFVDVGSEQMLVSIAGGPPEVFGTVTSQLHALRDWLLAHEVRSVAMEATGVYWLPLYGVLEAVGLEVLMVNGRQTRNLPGRKTDMKDCPWGATLHAHGLLRAGFVPPAQIRRLQDYLRLRADHISSAAAHVQHMQKALERMNVKLHDVISSLTGGSGLAVVRAILRGERDPEQLLALCDARIQHAKAGRVKESLRGTWAEEHLFALRQALASWEHYQSQIAECDRQVEALLPAPGDNDAPPNIPAQAQPRKRPGANAPAIPKLREILVQMYGGHDLTRLPAHTEYSVLQIVGEVGTDLTKWPTEKHFTAWLGLAPGSHQSGKRRGSVKRNRNRAGRIFCVIARSLARSKDIALGGFYRRMAARRGGLVANIALARKLAVLFWRITVKGSDYVEQGLAQYEAKVLQTKQRALRRLAKELGQQLVPMPAKT

SEQ ID NO: 288235 - protein, 462 aa, unidentified
MTTGRMPAGKCNQRPTSLIMKALPVLDPKAAAIDVGSERLHVSIAGDTPKVFGTFTGDLGRLRDWFKGEAVRTVAMEATGVYWLYLYEVLEAAGLEVVVVNGRHVQNVPGRKTDMADCQWLATLHAHGLLRGGFVPPADIRQLQDYQRLRADHIIGAASQVQKMQQALERMNIKFHDVISDLTGVSGLKVVRAILKGERRPGELLALCDPQIQNKKSTAVKESLRGCWKKEQLFALRQALELWEAYQQKIADCDREMELLLQELAGTQGPGGNALIGPVQLAPAKDPGKNAPEIEQCQELLARICGGRDATQIPGLSQALVLQLISEVGTDMTRWKTEKHFVSWLGLAGGCKQSGKRKGSVKAHRNRAGRLFCSASRGLANTIDKALGGFYRRLRGRVGGLAANVALARKLAQLFYRLLRYGMNYVEKGLQKYEAQVLETEARLLRKLAAKQGFKLVSALQK

SEQ ID NO: 288236 - protein, 399 aa, unidentified
MNANTLRVGIDVGSKRHRVAVGLPSGEVVDEFDLDHHQIGFTQFFRRIGALEVKHQLTVTVAMEGYNGWARPLNGQIRRHGWALYNVNNLKLARFKEIFPAPAKTDAIDARRILDLFQLSAHMPVAREALQEVTPTPAINDKLKRLTRRRKQLVEERVRLTNRFQADLQAVCPELLSITGNVVNVWFLNFLTCRDELPKLLRLQEKSLLALPAVGRKYAAAIQAWQRTAVFAPDIDIVGDMILQDARRLQALRVDIKSLDRSIKAAALDSALAQTLLSIPGFGDTTAAELAGEIGTVARFESEAGLALYTGMAALDNSSGKKTGSRTARQVNTRAKAAMMIAMARHIPLVGASRSYYDKKRTEGKKHNQAVRALGRHMIRVIWSLVKNNRTYEDRSKNT

SEQ ID NO: 288237 - protein, 409 aa, unidentified
MTIVGIDVSKGKSMVAAMKPGGELVAAPYEVRHSDIELSRLALNVLCMEPDTRVVMEATGRYHEPVAALLHSEGIFVSILNPLLIKQSGAGSLRKVKSDPKDALKIAKYGLDNWSTLREYTPMEAIRQQLKLCARQCDLYNKSIVMLTNNLISLSDKTFPGVNELFSSPEKADGHLKWVDFYRTFWHCDCINRMSPDTFGERYKKWCKRKGYHFSADAADALYAASCGLYTTLPRDNNARLLVTVAADQLIALRENQSKLEAEMLNFCKQLPEYETVMAMLYGVGKSTGPHLMAELGDVRRFLHRSSIVAFAGVDPGVVGSGKMQLSSVATSKRGSPQLRKALFQVVSTYVKCKPENEAVYQFYTKKRDEGKPFFVCTTAAANKFLRIYYARVKECLNAAESATQVEEG

SEQ ID NO: 288238 - protein, 355 aa, unidentified
MNSEKYIGLDVHQATISVAVLDSTGKLVMESILETKAATILEFFAGLRGILSVTFEEGTWAAWLYDLLKPHVAKLVVCNPRKNALLKDGNKSDRIDAHKLAELLYLNKLSSVYHGETGVRMLRELARSYLTIVKDLTRVMCRLKAVYRSWAIPCAGRGVYYTRHRAEWLGKIKEAGVRRRAERLYQQLDMLQYLRQQARRELLAESRKHAITVKLRQIPSLGPIRSALAVALIQTPHRFRTKRQLWAYSGLALETRTSAEYCYVKGGLRRSKKQISIRGLNKDHNHDLKGLFKGAATRASVLPGPFQDFYQRSLAKGIKPTMARLTLARKIASVTLTLWKKGENFDADKLKSQAA

SEQ ID NO: 288239 - protein, 448 aa, unidentified
MKQEPEEIPDAEHELVLERVCAIDVAKDSGKVCVRVSSRAGRRVSKVWDVAARSGAVAELAEHLVDAGIEKVTVESTSDYWRIWFYVLEAAGLSVQLVNARDVKNVPGRPKSDKLDAVWLAKLTEKGMLRPSFVPPAPVRELRDYTRLRIDLTRERSRYWQRLEKLLEDALIKVSAVASTLDTLSVRDMLEALIAGERDPRRLADLARGRMRVKHGALVEALTGRFDDHHAELARLLLDQIAALATQIATLTTRIDELLTAMEPATRADEPDTPGAVGTVVDGARKSTTIERLDEIPGIGPGAAQIILAEIGFDMSRFPTAAHLVSWAKLCPRTIQSGAIQRGGKTGKGNPYLKGALGEAAAAAAKTNTFLGERYRRIVKRRGKLKALVAVARSILVIIWNLLNDPTARFRDLGADYHTTRINTERRTRNYVAQLTAMGYHVTLEPAA

SEQ ID NO: 288240 - protein, 347 aa, unidentified
MVAVMIGVDPHKGSHTAVAIGMAEEPLGELRVRASAAQAQRLLAWAAGWPERTWAIEGAAGLGHLLAQQLLGAGERVLDVQPKLGARVRLLAAGAVNKNDPNDARSVAVAALRSASRREVAADDHAAVLKVWSKRHRDLGRTRTQVACRLHAVLCELIPGGVAKRITAAHAAGLLQALTPSGAVQAARCELAAAFVEDLRRIDAQMRDAKKKLTVAVAASGTTVTEIFGVGPVVAAIVIGAVRDVSRFPSRDHFAAYNGTAPIEVSSGHRKIYRLSRRGNRRLNHAIHMAAVTQISHRHSDGRTYYERKLAEGKTPKEALRALKRQVSDAILARLQADAQRSAASTR

SEQ ID NO: 288241 - protein, 453 aa, unidentified
MLAKHREKKKAHGLVAAPVMEPNAAGVDIGASEIYIAVPPDRDMQPVRRFAAFTEDLKAAADWLEHCRIETVAMESTGVYWIPLFQILEARGMKVCLVNARHVKNVPGRKTDVSDCQWLQYLHAVGLLRASFRPSGQVCAVRSLMRYRESLVGMAAVHLQHMQKALDQMNLQLHHVISDLSGTTGMAILDAILGGERNPLKLAQLRDPRIKASPETIAKSLVGDYRREHLFTLRQSVTAYRSYQQLLACCDVEIEQMLGEFSDGAGPDTPVLADPKDRHRPRRNEMKFDLRGHLYRIFGVDLTEVPGLNALTAHTLLTEVGPDLSAFPNVGAFASWMGLCPDNRVSGGKVLSSHTRKVNNRAARALRMAAQSLFRSQSWLGQYYRRMRAKLGAPQAITAAAHKLARIVFHMLTNRHAYDETVFAQQEIQNQHRLQQKLMQQAKKYGFQLIPIT

SEQ ID NO: 288242 - protein, 402 aa, unidentified
MNSVGIDISKGRSTIAVMRPFGEVAISPFEVRHTDSELSELARRLKSLNGETRVVMEATGNYHAPVAKQLHDAGLYVSVVNAKLVHGYGNNDLRRVKTDRKDAIKLANYGLDRWLTLPRYIPEENTRLLLKNCYRQYRQYSKVQTVLKNNLISLLDMTFPNANRLFVSPARADGSEKWVDFVAEFWHCECVSERPLKSFVNKYWRWCRKHGYNFSEEKAHAIYDEASGHIGVMPKSETTKLLVEQAVSQLSATSAALAVLKQEMQSLSSQLPEYPVVMDMFGVGPTLGPQLIAEIGDVRRFYSKKALVAYAGIDAPPNDSGDVIGRHKSMSKVGASSLRRTLFLVMSVYLQNSPPNEPIYQFMNRKRAEGKPYRVYMMASANKFLRIYYATVKAYLEILEQI

SEQ ID NO: 288243 - protein, 428 aa, unidentified
MNCNTQNAKIASITEKTLIVGIDVGSETHYARVFDWRNYEYSKKPLEFSNTEAGFLTFKAWIEDIAEKHGKTAVIPGMEPTGHYWFALGKFLQDNGMKPVHVNPHHVKKSKELDDNNPNKNDRKDPKTIAALVNEGRFSYPYIPTGIYAEIRSLSNLRFQTQEELTRIKNRIARWFSIYFPEYKDVYGDLKAVSGRMVLKVAPLPEDISKLGAEGINRIWRDAKLRGAGMKRAKTLVSAAEHSVGSKEAPEAARIELKNLLNDMDVYASRLEELLQGIEDKLKEIPYVDKLMEIKGIGLVTVSGFIAEVGDIGRFDNPKQLQKLAGYAIVANDSGKHNGESRISYRGRKRLRYVLYEAAISLIGKNAEFREIHEYYRTRKVNPLKKMQSVVAVACKILRVFYTILTKGVDYDAEKLISDIRRPQMQAV

SEQ ID NO: 288244 - protein, 321 aa, unidentified
MDPQGTRVGDAELPTSRAAVRAYFAAHPGPHRAVVESTATWYWLRDLLVPLGVDLKLGHSKYIKAISYAKVKTDAVDAHTLAQLLRNDLIPEGHMISAAHREERDLLRARLRLVSQHVRCRLIVEGLLAQYNVTRIAALPPLVQLRVDMLAQQRALLTAHIKQIERELAPRLVPTRDAQRLLYIPGIGKIAAFTILLEVDDIARFPTVKDFVSYARLVPAAKNSGGKTRQQRSKDGNKYLKLAFHHAAVRAIQYFPEIQRFYHNTARRKPSPVARALVAKELARAVYFVLQRQEPFNGTFKGQPLSRTKTPKWPRLANPPA

SEQ ID NO: 288245 - protein, 452 aa, unidentified
MKTPAAASAPLGVVHPHAAGLDIGKHEIWAAVPPAPGRDTVRAFGTFTPDLQALAEWLVAGGITTVAMESTGVYWIPIFELLEARGLDVYLVNARHIKNVPGRKSDVQDCQWLQQLHSFGLLRASFRPEAEMVALRAYLRHRAMLIEHRAAHIQHMQKALLQMNLRLTQVLADITGTTGLAIIRAIAAGERNPRKLAGLRHPRCQRSEPEIAKALTGSYRPEHLFALGQALALYDAYTTQLAECDRQLAQQYAALKPRYDPDDPDAPLGPDAKTNTHTKNAPPGDVRRELFKLAGVDLTRVPGLHVSSVQALLAEIGTDMSKFPTVKHFCSWLGLAPHNDITGGKVKRSRTLPTHNRAGQVLRVAAQSVGRGQSGLGTYYRTQKARLGAPSAITATAHKLARIVYSMLKDHQSYQPLSKEVFAQQRRDRELRELEKRAAHLGCRLQKEPAPA

SEQ ID NO: 288246 - protein, 344 aa, unidentified
MQIARIGLDLAKYVFEIHGVDCHGKTVLHKTLRRHAVSAFFANLPPCLVGMEASNGAHFWAKAISELGHDVRLISPQFVTPYVKSNKNDRNDAEAICEAVGRPNMRFVPVKFAEQLAVQAVHRIRSRLVADRVRLVNQIRGLLGEHGIVIAKDIGNLRRALAGIVGDNDHRALSHLVRALMGELREELIELDARIAGYDRKIRELYRNSEICQRLGKVEGIGPVTATALVAAVGDRSSFKNGRQFAAWLGLVPKQRSSGGRARLFGISKRGDRYLRTLLIHGARSALGRVREKQDPRSLWLGKMRQRRHPNIVAVALANKNARIAWSLLTNDSVYDVGLSVRAA

SEQ ID NO: 288247 - protein, 313 aa, unidentified
MYYIAFDVSKKVLSVYDGKKDMTFSNTEGLSSLKKHLRKHYRDFNQLIFLLEATGSYSDYLIEMCAKYRIKAVVINPKVSHHFAKSLGIRNKTDKIDARMIYQYQRLINYQMITVPRINKEAKTLSAHLVSYQLAMKQRIALENHLEHVRDKDLFALLQKDLKRAYRLEEQILKRITAYILKHPQLKADYQRLLTIPGIGEKSAPALLYLFITYQGTNRNQITALCGLDPIQRQSGTSVKGKPKISKHGSKLIRKVLYMPMLSAIQVNPRIQAFYQRLLQNHKVKKLAVIAAMRKMILIAHAIYRDKTEYVPV

SEQ ID NO: 288248 - protein, 413 aa, unidentified
MEVMYPRCGGLDVHKETVVACVRLAAGSDTSHVVRTFATTTADLIELSEWLEENGCTHVAMEATGVYWKPVWQVLVDSSCFELILANAAQVKNVPGRKTDVNDATWLAELLAHGLVRASFVPEPAIQELRGLLRTRKQLVREKASHVQRVQKTLEEANIKLESVLSDVMGRSGRAIIQALIDGETDPAKLAALAHWKVRASTETLSEALRGRIKRNHRFLLRLHLQQIQALDAGIAEIDREVDDGLACFRDAVDRLSTIPGISQLSAQVIVSEIGTDMSRFATDAHLRSWAGLCPRNDESAGKRRSTRLRKGAPWLKSMLVQCAWAAIRSKGTYLHAQYVRLRGRRGPKKAICAVAASILTAAYHMLKDGTFYNDLGPTHFDRRRPETQARRLIKRLAELGFSVELKSMATAS

SEQ ID NO: 288249 - protein, 332 aa, unidentified
MDNFYFIGVDVSKKKLDFCVLFEGKVLREEQVSNHQQAVARLIGELKNDLEMDNEQFLICAEHTGQYTFPLVCACKSVECKLWLENAAEIKYSSGVQRGKNDKVDAKRIAIYASRFGDKVKYYDRPSEEIERLKQLERERALYVTDLAKYKGQMYDQKDFMPAALYRKKTKRMKGLIQELQAAIDAITAEMEKIIGSTEVLARQMELLMSIDGVGKVVALNVIIETEAFSRFDNPRKFCCHAGVAPFSYTSGSSQHSKNKVSHRANKNIKKLLHMAAVSVTHRKEGELKAYYMRKVEEGKNKMSVINALRAKIVARMFAVIKRNEFYTPIYS

SEQ ID NO: 288250 - protein, 355 aa, unidentified
MTSTKYIGMDVHKESISIAVRNAAGKVVMECVIETKASMIVQFIDGLRGEVQVPFEEGTSAAWLYDLLKPHVSKLVVCDPRKNKSMREGNQSDKIDARQLAELLRLDHLTPVYHGEHGLRTLKELVRSYLTVTKDLGRVMTRVKAIYRSWAIPCSGKQVYGARHRAEWLGKINEPGVRRRAEFYYQQLDALRVLRQQVRRDLLAESKKHKAWKLLCQIPAIGPIRAAVLLGILQTPHRFRTKRQLWNYGGLAIEMHSSADHRSVDGQLQRSRKNVLVRGLNRNCNHDLKNLFKGAAVVASSKPGPFQEFFAALLATGMRPEMARLTLARKIATIVLMVWKKGVRFDASHLKPQTA

SEQ ID NO: 288251 - protein, 391 aa, unidentified
MVCVGIDVAKDKHDCCILDSDGMVRADCFTIPNNMDGFKQLLQTIRNCTKKSDKIKVGLEATGHYSYNILGFLLDNDLAVYVMNPLHTNLYRKSLSLRKTKTDRVDARTIATMLLSDVDLKSYTDTAYHNEELKSLTRYRFDKVRERSKLKQSVSRLVTILFPELEKLVPSLHIASVYALLSEYPGAKQISEIHLTKLTNLLATASKGRYGKEKAIQIREAARVSVGSVMPAKSLELKHTIKLIQELTSEINEIEDSIQQIMDELNPPILSIPGMGVNSAAVILAEIGDFSNFSSPDKILAYAGCSPSTYQSGKLTNCYAHMEKRGSRYLRYALYNATKYVCHWNPVFAEYLAKKRAEGKHYNVALSHATKKLVRLIYALQKSGKTYLTAA

SEQ ID NO: 288252 - protein, 338 aa, unidentified
MKLTADQLNNATFVGIDSHPDSHTALAINRFKELKGHVTFPNTQNGINQFLIWLQTLEEQKDRIVIGVEGGGTARNALLSAILPTYDLLFEVNPLYTKHKRSFGTKGDKTDLDDAKLIAGVLTTELEELPRITPGQLTSSMLRLKKAVWFYEEVTVQGARLKNQLHKLSREHKLTQDKEEKQLLKKIIAAREKEIAFVRKTKTSMERELKTLLSGNGLNLTGIRGIGNITVARIIAHTGGIERFSNRDGYVRYSGIAPLARSSGKSSFFVKANRGNRKLHSVFYFATLGRIIHSSEIKALYEKKIASGKTKKGAITFLMRKTAILAYSMLKSGEEYRG

SEQ ID NO: 288253 - protein, 345 aa, unidentified
MEPMYYIGLDVHKRKISYCVKDSGGKVHAEGSLPAARSDLDLWIKTLPQPWSAAMEATMFTGWIYDHLKPHAAALKVAHPLMLRAIAAAKKKNDRIDANKICDCLRCDFLPECYMAPTAIRERRRTLRYRNLLVRQMVQMKNKIGMLLMEAGVSYNKQRLHKAAYFRELLATNPDIDEGLRSLLRQCRETVVRLSKTESALIRSLERDQLLAERVERLMSIPAIGPITALTWALEIGEVRRFSSIKKAISYCGLCGAEKSSASTVRRTPLSKQRNKHLQTTLIEAAKMAPRNSSELAMLYDTEKQKGNANRATLAVARKLVAYLMAVDRRQRDFQVVETSSGIAA

SEQ ID NO: 288254 - protein, 338 aa, unidentified
MKITTIGLDIAKSVFHAVGVDKAGKLIKKKMLRRKDLLPFVAKIEPCLIVMEACGGASYWAREFEQFGHVVKLIAPQYVVPFRQGNKNDYNDALAIAEAAQRPNMRFVKPKSIEQQDVQLLHRMCERLTKQSTALINQVRGMLAEYGIVIAKSKSAFKAQLPDILVDEANTLTTKGRAIFYQLYDEVIDIEKRLKSCDTQVLNETQNNVICQRLQTIPGVGPVTATAIYAAVGDGKDFSNGRHFSAWCGLVPKQHSSGGKDNLLGISKRGNAYLRTLFIHGARAVLRHSGSKSDKLSCWAIQLAERRGFNRACVAVANKLARMSWVIAAREEEFRLAM

SEQ ID NO: 288255 - protein, 324 aa, unidentified
MIDGRLGIDVSKNMLDASMSSCNKVRARSFANSSDGWRHLLDWLISQKVQRVHACLESTGRYSLGIACALYDAGHIVSIVNPAQIRDFARTKLGRNKTDGVDASHIREYCELFKPQPWAPPSEAHRRLGELQTIRAGVIAGLTEWKNRKNSGMVDAVAQSLADVTISHFNNQLEAVDEAIAQTIDNDSGLRRKRDLLLSISGVGEILAGVVLAELPGPDVLRSSAAVVAYAGLNPRQHQSGTSIDRVTRISKIGNAVLRAALYMPAMSAMRFNPAIVALVTRLKSRGRLNPKQIVVAAMRKLLVLCFGVLKTGKPFDPAIAMGC

SEQ ID NO: 288256 - protein, 355 aa, unidentified
MDSTKYIGLDVHKETISIAVLNSSGKLVMETILETKASMLVQFVQGLRGNLHVTFEEGTWAAWLYDLLKPQVTKVLVCDPRKNALLKVGNKSDHIDARKLAELLRSNLLRPVYHGEHGVQTLKELSRSYLTISGELTRVMTRLKAVYRSWAIPCAGKQVYAPRYRAQWLGKISEAGVRRRAEFYYQQLDALRSLRQQVRRELLAESAKHKASKLLCQIPSIGPIRAAQLIAILQTPHRFRTKRQLWAYGGLGIETHSSADHRYVEGQLRPSKRPVSLRGLNRNHNHELKNIFKGAAIIAATKAGPFQEFYAALVAKGIRPEMARLTVARKIAAITLLVWKKGVCFDAQHLKPQTA

SEQ ID NO: 288257 - protein, 350 aa, unidentified
MEQISRIGMDTSKHLFQLHGVDAAEKPVLRRTLRRRDMITFFERLAPTRVAIEACGASHHWARLLRGFGHEVQLIAPQLVKPYVKRGKNDAADAEALCEAMSRPTMRFVPVKTAEQQAALMLVKLRDRLIRNRTQLVNAIRGYAAEFGIAGAKGIAHVTTLLARLQADVTLPALARELFAMQAGEYAQVQAKIAVVEAKLLAWHRADPCSQRLAGVPAIGPIGATMLTMKTPAPEAFRSGRQFAAWIGLTPKDHSTAGKARPGVITRAGDEGLRSVLVVGATALIRRVREGRCRDGDRFAAWVGKLLERKPPKLVAVALANKLARVAWKLMITGEAYAVKPASTGAASAL

SEQ ID NO: 288258 - protein, 386 aa, unidentified
MPQPKDDLSRSLVALEQDKTLIVVVELSLKSWLVGGIIPGVVRDPLKKLVPDEEGLLKLLHRWRDEAVKAGRKITRIVVAFEAGRDGFWLARWLRARGVEAYVIHPTSIAVSREQRRAKTDRLDIALLKRSLLGWLRGEKKHCTMAAIPSLEEEDAKRPTREREQLVGKRTGIVNRMKATLVRLGIRGFNPKLRKAPERLAALGTPEGCPIPPNTLAELEREMTHLRFINQQIKQIEDERLKQLKQAPQQGVNVKVLQLQQINGLGIETADMLTHEVFWRDLRDERAVARYAGLTGSPDESGRRRREKGLAKAGNARVRRGMIQLAWRFLVHQKNSALAQWYQASVATGKKRKTMTVALARKLLIALWRFVTTGDVPQGVVLRPAS

SEQ ID NO: 288259 - protein, 444 aa, unidentified
MSKRRRDKGATLRRINPRAAGIDIGSASHWVAIDPSLSDHPVREFAAYTGDLHAMADWLIEHGVTTVAMEATGVYWVVPFEVLRERGLEACLVDARATKQVAGRKSDISDCQWIQELHSYGLLKQAFLPTAQIATLRAYMRQRDRWVAEAGRAIQHMQQALELMNVKLTEVVSDVTGATGMAIIDAILDGERDPQRLSEHRHPRCAKSREEIARALHGSWREEHLFALDQARHHYRYLGERIAACDARLDEILHRCGTDGGEPPGRAKRDASPHPFAFDARAHCFRLAGVDLTTIDGVGINTVLTVLAEVGADMTPWRSDRAFGSWLGIAPNRRKSGGRVLSSHTRPNAQRAATALRLAARSLSNSKSALGAFYRRLRARIGAPKAITAAAYKIAKLIYRMLATKQPYHDLGQAAYDERFRARRLRSLARMAKDLGFALVAVAA

SEQ ID NO: 288260 - protein, 342 aa, unidentified
MEHYAGIDVSLEESSVCIVDATGTIVREVKIASEPEALVRYFDELELPVGRIGLEAGPLSQWLHAGLVAAGRDAVLLETRHVKAALSAMTVKTDRKDARGIAQLLRMGWYRPVHAKSVTCKDSRALLVGRKLLQSKLLDVELSIRGILRGYGLKVGEVSRGKFEARIWELTAGHITLETVIGAMLAARTALWCEFTKLHREMLKIARADKVCRRLMSTPGVGALVALTYRSAVDEPMRFGKSSTVGAYFGLTPKKYQSGETDRDGGVSKVGDAMVRTALFEAAHIMLTRATRFSSLHWALNVAKRRGMKRAKVALARKLGVVLHRMWVDATEFRWSKTAAMA

SEQ ID NO: 288261 - protein, 314 aa, unidentified
MSAPVFVGIDVSHARLDIAVRPGTRFSAANDEQGIVTVVEQMRTLAPILIVLEATGGLEVPLTGALATIGLPVVVVNPRHVRDFAKATGKLAKTDALDAQILAQFAEVIRPATRPLPDEQTQALAALLTRRRQLVEMLTAEKNRLSTAPKPIRKSVRAHITWLERELRHTDTDLAQTIRESPVWRDKDELLRSVPGVGPVLTTTLLANLPELGTLTGKQIAALVGVAPLNRDSGTLRGKRTVWGGRAQVRTTLYMAAIVAARFNPVIRAFYQRLRAAGKAKKVALTACMRKLLTILNAMLKHRTPWCPEITQHA

SEQ ID NO: 288262 - protein, 403 aa, unidentified
MKYFAGLDWGGTTHAICVVNEAGQAVLRAEVRHDAHGLGSLQKQLKRIAPASAIPIAIERPSGLIVDALVAFGHTVVPIHPNAVKACRPRYSAAGRKNDLGDAYLLADVLRTDGHRFRSLVPPSDASKALRALVRTRDDLIKQRLVLGNQLHALLESFWPGPAALFYQIDSAIALAFLQRFPTPSSAAHLGEKRLAAFLKGKGYSGSHSAAELLTRLRAAPVGLTGTMEEQASGDLVLALTRVIAPLQEQIAILTARIKTEIEHLDDGVLLMSLPYAGHLTAAKILAEVGNVRERFATAEQLAAEAGVAPVTKQSGKSRSVKFRWACNHRLRIAITQLADNSRRGSPWAAHVYEAARARGCRHPHAIRVLARAWVRVLWKVWTTRIPYDIRYHTSAQTLAKAA

SEQ ID NO: 288263 - protein, 380 aa, unidentified
MSTSTISKVRKTKKKSSKSIGNISIVRHGFGIDVGKAEFHVVYRILSQDGKLIVRGYKKFTNTVSGIRSFYNWAKKQLKDSDLPCSYLMEATGVYYEELAYYLESQNCSVKVVLPNQSKAFSKSLGQKTKTDKVDAKTLSLMALERLSLRDWKPASSQMRHLKKVTRLRTRLVAEKTRNQNQLHAEKSSFEPDSLVIETLKVSIKEKKLLIRNLEKSLEKTVKEQDAKLYEKVENICELKGLGFITVLTVIAETNGFELFENVKQLVSFSGYDVVHNESGDKIGKTKISKKGNRYIRRALYMPSLSVVRCNPDSPFAMLHQRVFEKTNIKNKGYVAVQRKMLIIIYTLFKNDQAYQADFHKKACSGETEKVGSIKTAYSG

SEQ ID NO: 288264 - protein, 346 aa, unidentified
MRYIGLDLHTNQMTICYLENGKCSYETLSVDEIDTFKKRLLPTDELAVEATGNSSYVYRHCVDLVAKLVVVNTMQFKVITKSCKKTDKNDAKLLAEFLSKDMLPAARVKSILDDRLHSLVDSRNKFIELRTRLKNKIHNLLNRCGIKIKKSSLTSIKGLNKVLAYEVDDLVKFELEQIVMEIKNLNERVDQFDDKIAEFGSKLPGFENVSSIKGIGTNTAVTLLSSIGDINDFEDEKKLAAYFGLVPRVNNSNETVNHGRITKRGDGLVRKSLLQCALIAIKYNQKLCGFYNKIKTKRGFAKAIVATARKLLTIVYYTLKNGWYFTDFVNNVREIRPIGKRVLGVI

SEQ ID NO: 288265 - protein, 460 aa, unidentified
MSKGKGNGGESQRSVQHLAVIQPNVAGIDLAAEEHWVCGPAREDGKPNVQRFGTRTHELDALADWLKAQGVKSVAMESTGVYWIPPYELLESRGIEVLLVNARQLSHVPGRKTDMQDCQWLQLLHSCGLLRGSFRPKEAICKLRALHRQYANLVAERSRAIQWMQKALDQMNVQVHRAVSDLSGKTGLAIVRAIVAGERDPMRLAQNRDFHCRKSVEVIATYLRGNWRDEHLFNLKMALVLYDQIAQMLSDYETELARQMEAMQPPDRRDVSVPPHPNRTKEGVIRSRGEQGQRTGLWRFAGVDLTRIDGLRPDACRLVLTEIGPDLSAFPSEKHFVSWLRLSPRTAISGGKVLPRRRNATGATRIAGVLRMAALAVGKSKTALGAAYRRLARRKGADVAVFAIARKLATLIYRMLRFGQDYIDEGMQAYEARFEAQRLHNLHSAAKQLGYQLIPLETTP

SEQ ID NO: 288266 - protein, 355 aa, unidentified
MTLRGYVPKDFDVFIGLDVDKKSYVLAVRENGSMSRPVRMPANPEILLDYINKRHKGKRVICAYEAGPTGFGLYDYLTECGVPCLVVSPFSIPKAKNETAKTNKIDAKKIAEYLQYGKLKSILVPIGKYRELRHLVCIREKYVTMRVKAKQRIKALLLQESLYGSLKDEDAAWSGGYVCNLKEIKTTDAVRYRLDMLLMDLEYSRAQLLAVCRKLRDFCKLHPEINRYKTFLSSIPGIGFIIALTILAKIGDPLKLGNIRQLAAFTGMIPWEKSTGDVENKGPITHMGNKMLRTLLVEAAWAAIRKDVRLRQFYFRIKHRNHPRAAAKKAIVAVARKMTQIIYRILIDRRMYVLE

SEQ ID NO: 288267 - protein, 356 aa, unidentified
MAPIYIGVDFHARQQTICYLKTETGELVISELKHQNKEQVRAFYQQFQEPVIVGLEASGYSPWFEALLEQLGCEVWLGHATEIRRRARWRQKNDRRDAELIWDLMVHDEFPRLHQPALSSREVLRMLRYRQKLIKLRTMTKNSLQAIALQAGLAKGPQLFTAAGQEQFKAAEMSPVLQWQRDHWFELLKPFNQQLLETVVWFKAQSKDDVQIQRLLTHPGIGLLTALGILHTLQPVSRFRNARKVAAYGGFDPVERSSAERQHFLGISKAGSRMLRYLLVEAVQTAVRHDEDLKRFYKRLAERRGRPKAKVAAARKLLIRAYIMLRDEIDYAEFRRRAVAARLARHGQGPTKCPRY

SEQ ID NO: 288268 - protein, 348 aa, unidentified
MPIVTADTPTVIGGVDTHQDLHVAAVISGDGNVLGSESFSTTRAGYRAMLRWFRSYGELARVGVEATGSYGAGITRHLALSGVPVLEVTGPDRSLRRAKGKDDSLDAIAAAQAALTGQRVQVAKDRSGAVEALRVLRTTRKTAIKCRRATLQQLHNTIVASPDEVRDQVRNLTRMQLLRTCASWRPDTLSYRDPVVATRIALKSLARRVLDLNDEVADLDRLIEPLVEELGSTLTQLQGVGPNSAGEFIVAAGDNPDRLRSEAGFAMLCGACPIPASSGKTQRHRLNRGGNRQANSALHIVVLSRMRKDPRTKEYVERRLNEGRTKREIMRCLKRYVAREIYHAIITT

SEQ ID NO: 288269 - protein, 347 aa, unidentified
MVTLGGDCHKRTHTLVAVDENGRELGTKTVAAVEAGHLEALRWASQWGQRRWALENCRHLSRRFEADLLLAGETVLQVSPKLMAGARRSAREWGKSDPIDALAVARAALREGDLPVARLEGESREVKLLLDHRDDLVGERTRVQNRLRWHLHELEPTFDVGARSLDRKVVLSQVAKVLARHHGVGAEIAVELLERVRELSRRINELEGQIRTLVSRLAPNLLQLEGCAALGAAKLIGETAGVSRFKTSAQFAMHNGSAPIPVWSGSQARHRLNRGGNRQLNAALHRIAITQIRFGGRGHAYVERRRASGDTKREALRALRRRISDEVFRRMWQDHLAAQRAVPEAAA

SEQ ID NO: 288270 - protein, 347 aa, unidentified
MTHFAGLDVSLEETAICVVDETGRLIKELRAASEPLALIAALTGLGLPLERIGLEACSLTAWLHDELRAAGLPAVCIETRLANAAMKTMPNKTDRNDARALAQIMRTGWYRQVHVKSRQSRLWRSLLVARRTVLNEMRAIENVVRGILREGGIKLGTPARAAFAERVREMAGDDPLILPLVTPLLAILATMLEQLDRLTRQVLAIVRGEMVCRRLMSVPGVGPITALAFRATIDQPERFRHSRNVGAHLGLTPSRYQSGETDIQGKVSRCGDELARTALYEAAHSLLTRSRKWSSLRAWGMQVAKHRGMARARVAVARKLAVILHRMWSDGTEFRFGKEPAAAVAAA

SEQ ID NO: 288271 - protein, 368 aa, unidentified
MQELITGFVGLDAHAESTAIAVAEIGRTAPRFVGTVGPRIAELTKALGKLGKPQGLSVVYEAGPCGYALARVLRSLGYRCEVVAPSKIPRRPGERIKTDRRDALNLAGLARAGELVSVAIPDERDEAIRDLSRARVDAVRARLKARQQLKALMLRHGRRYSGKTSWSAAHERYLATVSFAHRAQDIAFTEYRQAVTEGEARVQRLSQSLTQEVEHWRMHSLVSAVMTLRGLDLVAATTVVAELGDLRRFAHPRELMGYLGLVPSEHTTGSKRRLGAITKTGNGHVRRVLVEAAWNYRFPARISRPLQLRQERQPPEIRAIAWRAQLRLNHRYRRLKARGLQHNKICVALARELAAFVWDIGRHVTPSP

SEQ ID NO: 288272 - protein, 289 aa, unidentified
MGIDLAKNVFAVHGVNEVGRGELVKPAVRRDKLHELMASLPPCTVAMEACSGAHHWARLFMACGHTTRLIAPKFVTPYRMSGRRGKNDAADAAAICEAAQRAHMRFVPVKNLEQQSRLLVHRARQGFVEQRTATLNRIRGLLAEFGIVLPLKAATVREQAAACVGTLPGWAGTVIADLLGEVSHLDERIGQYDEHIAVMARADARAQQLMRLKGVGATTATCITAMVGNGHEFRCGRQFAAWLGLVPGQYSSGGKARLGRITKAGDGYLRSLLILGARCSPQPRTRATA

SEQ ID NO: 288273 - protein, 425 aa, unidentified
MNVDSTDEPRFAAYVAIDWGDSKHVWSMQPADSDRRERGEIEHSPEAVAAWAAILSTRFGGQPVAVAVEQSRGSLVFMLGKYEQLHIYPIHPRSAAQFRAALFPSGAKDDPSDAELLLDLVVHHRARLRPLKPDTEQTRLVQHLVEGRRKLVNERTRQTNRLTAQLKLYFPQMLDWFDAVDSPLVGAMLKRWPTLEALQKARPDTVRSYFTAHNCRSQELIERRLDQIRAAIPAVHDKALIEAAQAMTKILVELIATLREGIASFDCQIAQAVAAHPDFAIFDSFPGAGPALAPRLLAAFGSQRERYQSASDLQTFSGIAPVTVRSGKSQWVHVRWACPRFLRQTFHEWAAHSIGFCDWARAYYQLQRGRGKDHHAAVRALAFKWIRIAFRCWKDEVPYDEARYMQSLRRRGSPLTAALAKPELP

SEQ ID NO: 288274 - protein, 475 aa, unidentified
MNVKGTKKKNQVVKVNIFEQQEIIAKAEVIMSNLKASTWHELETKGKFDKNEKLSFISDDMLILGCDVGSETHYARAIDTRGRELSKSAFAFSNNLEGFQSVKEWAAKIAAANDKNQIVLGLEPTGHYWFCLATWMVANGISVVQVNPYAVKQTKEVEDNSQLKDDTKDPKLIANLVKDGNFGMPYLPEKLYADIRRLSMFRDQLNEDRIRNLNRLHREMKIYFPEYKDAFGKVDGAFCLEVLKVAPFPAELVVLGTEGIKQIWHDAKLRGRGYANAASILEYARKSVGIKDGAESSRQAVKWFVDRIIELDEQLSEIENQLNQKCMEIPHAENILAISGIGENTLSGILAEMGDISRFDDVKEIQKLSGLGLVACSSGKHKGETKISHRGRKRLRYWLFQAAKSAVAHAKEFKELHVYYTTRKVNPLKKMQSLIVIACKILRVIYTILTKGTTYNPNKMLGDIVRTNQELTQVA

SEQ ID NO: 288275 - protein, 345 aa, unidentified
MLDTETGEVVNLTLMHEGNAVREFYSQLPRPVLVGIEATGSMHWFLNLMEELGIECRVGHPATIRAAEPRKQKHDRRDADLILKLLAENRFPAIWLPTKELLDLRALVLHRHQWVRIRTRIQNALQAMALANGLRRGPSLWSYDGQAKIAFLPLMPHASYRRSMLQEMYRKMEEEIENLTRQVAEQAEQRCGARLLMTHPGVGPVTALATDVFLGDPKRFTDGKALGSYVGLIPREYSSGERQRFGGVTKQGSPLLRFLWCEAGAHAVRRDPELKRFYRRKLVQKGLGKARVAVARKLGIRLWIMLRDEIDYQEFCRRGQKQQSGTACAEVLEVGNGANRHRPID

SEQ ID NO: 288276 - protein, 347 aa, unidentified
MNTITIGLDIAKAVFQVHGEASGKIVLQKRLRRSQLVDFFAKLPRSLIGIETCGSSHYWARTLRDLGHDVRLLPAAYVKPFVKRNKTDARDAAAICAALGRPDMRFVAIKSAEQQAARAVERSRDLLVKQHTQLMNSVRSQLAELGIIETKGRRGFIALTERVTTADPRIPPMLLTALHMLIGHIEQLAKAIAKLESQIVATARAHPVMRRLATIPGVGPLTAHAIVTAIGDGKQFASARDFAAWCGLTRRVDQSADKRRERGISRQGEMRLRKLLALGASTIMRHLRSCPARATAWQHGILARRPIKVAVLAQAAKNARIAWAILQSGDIYRTPAITAAATTALAG

SEQ ID NO: 288277 - protein, 424 aa, unidentified
MKNTQNEKILQIKNDTLVVGVDIAKRFHFARAFDYRGIELGKLLRFENSAQGFEAFDAWLEKIKQENSMTEAIVGFEPTGHYWFNLGDHLITYGHKLAIVNPFHVKCARELDDNSPSKSDRKDPKTIAMLVKDGRYRDVYIPEGFYQELRELVCERERLQSQLSSLKNQIVRWLDIYFPEFTTVFKDWSKQASWLALRHFSTPQRVVDAGAQEILQTWREEMKRPSLKRAEKLYQVAKDSVGRKEGTMAATSSLQFMLTQYELITMRLEQLRGEMEACLHQIPNASHLLEIKGMGVVAAAIIVSEIGDISRFTDPRQLIKYAGLNLRENSSGMHKGKTTISKRGRKRLRHGLFQAMIPILATNLEFRALHKRNITRLENPLSKMESLTALCGKLLRVTFALLTKDLPYDPEKLAINKSHLAQAA

SEQ ID NO: 288278 - protein, 308 aa, unidentified
MNNSFSYCDIDVSKDKLDTYINGKLNTFDNTIKGIEKLIKKIGTAHFVMESTGGYERLAAWTLMERGFTVSIVNPQRVRNYAKGLGRLAKTDRIDAQTITNYAQTTSPRETRLPTKDFRHFCALMDRRHQLTKMKVAERNRLGSSYDDSVSQSIRDMIYLFENQIKQIEKEVKTIIKKDEQMNEKATKMQKITGIGPITSATILAYIPEIGTLKSKEISALTGLAPFNRDSGKSKGYRSISGGREKVRSALYMPSISATTHNQYIKEFYWRLVDKNHRKKIVARVAVMRKLIIATNAIIKNPDFILAS

SEQ ID NO: 288279 - protein, 358 aa, unidentified
MKTYKLKTEPIATTQNVWMGIDVHKVSLHITILDEEGEQVWAGSVPHGREHVAGLVRRLETTQITAVYEAGPTGYKLKHWLEELGCEAFICPPTHVRQRQGRKRIKTDARDSYDLAEQARAGMLPAIHDLGEENYHQREVLRTRGQLVKHRQQLKAQIKSELLYHSVCAPEGLKANWSKAYLNWLEQGPSESGDLNLTIHCLLRTIETLDLQIKRLDARLRKLAKSQKWKKKAELLQSIPGVGLLTAMAVLLEAGDISRFDRCEEFASWLGLVPSEWSSGEGTRKGSITRAGNRRIRTALVESCWTLIRHDEAMNRTYERIKHRRNGSIAVVAVARRLALIIRAILRDEKPYDYAPVK

SEQ ID NO: 288280 - protein, 398 aa, unidentified
MKTSGLDVHKDKIFCAIYDGKSYSEVKEFSTTTLSIYSMCEYLQSENVKEVAMESTSTYWVPIWDILYEMNFELKLVNPLHIKQMPGRKSDIKDAQWIAKLLYQRMLNGSLVPSPLIQELRSYTREYRLLTQEVTKILTKIDRVLVMCGIRLSSCISNMNSKSAIQIVEALIRGETNPDKLVSLVYGNRKNKESGKLKECLTGHIKEHHRIKLMTCKQQYDLFEKQIAFYLSKMQEVCDEHFSQDITNLTSIPGVSIISAMIIIAETGGDMRAFENSGKFTGWTGLRPRNDESAGKFKSTATTKGNKHLRAIIVQVGWGAARNKGSYFMDKFQKLSMRKSRKKALVAIGRKILVIIWHVLKEKTQYNPNLVHIYDPVKVEHKIKYHEKEIEKAKKLIV

SEQ ID NO: 288281 - protein, 317 aa, unidentified
MICGIDISSRTLDARIGPDGVPAQFPNNREGISSLALFCRAQAVELVVMEATGGYEQQALAGLSEAGLPVAIVNPRAVRQFAHSMGRLEKTDQIDAAMIAWYAAVRGVRPAYLASSEQQHLRALVTRLRQLVDLRTAQRNQVRLVTDPLIRRAFEPLLELVEKQIADLDAEITVAIANDPLWSRMDPVLRTIKGVADRTVARLFAELPELGTLSNKTISKLAGLAPLARDSGAHKGYRSVRGGRAAVREILFVVASVVGRYEPDFIAFQKRLREAGKPPKVVRVALAHKLLVRLNAKARELRQSLTTATKQCKEIAA

SEQ ID NO: 288282 - protein, 419 aa, unidentified
MPPNYQVAAGLDVHKKFIQATILWLNGTKIQQKFPRTPEGLLGLRDWIFEYKCDVVACESTSDYWVCIHDLLDDRVPVIVGNAADIKALAHKKTDKIDSEMIALLALKGMITPSRVMPRHHRDFRKLVRLRHFLVRKRTDIKNRIHSILDGELFHLSQLLTDIFGVSGQRILHGILEGASVDDILRSLPPHIRARKETELRDLLNQTLSQGALMQLGHCLRVVKQLDTEIEQITDEVHAYAVQKYPREYQILTSVPGIGDIAAITLLAEIGNFKEFLSGDRLASWIGIVPKVYQSANHVVKRSITKRGSRLARWVLIQVAHAAARARKNVLRDWYEMKKAVIGTGKATVGLAREMATIIWHLIVTDEEYVDKYTESESPKPQKMHTIRIPASPNYTLEEVLALLTDALGFLKKRDPDPI

SEQ ID NO: 288283 - protein, 408 aa, unidentified
MEVIHPRCAGLDVHKQTVVACARITGQGPLVQEVRTFATTTSGLLELADWLESLGVEHVAMEATGVYWKPVWHVLEGHFELVLANAAHVKNVPGRKTDVNDSMWLADLLAHGLIRASFVPPVAVQELRTLTRTRKQFVRERTSHVQRIEKVLEDANLKITSLLSDIMGKSGRAVLHALIDGQSDPQRLASYVVGNRLKASRAELVEALSGRIRAHHRFMLQLHLGHIDALDKAIADIEKEVGLGLQPFRQAARLLSTMPGLSQVSANVVVAEIGIDMSRFATPGHLLSWACLCPRNDESAGKRRSTRLRRGGIWLKTTLVQAAWAAVKVKGSYLQAQFHRIRARRGAKKAIIAVAASMLTAAWHMLRDGTEWHDLGAAHFDRADATKTANRLIRRLQQIGYTVHAVPA

SEQ ID NO: 288284 - protein, 445 aa, unidentified
MAKRTVQFSMVNPKAAGIDVGSKSHWVCAGQGMDYVREYAVFTEDLHQMANWLKSLGIQTIAMESTGFYWKSLFLLLQDYGFEVILVHAAHVKNVRGKKSDIQDCQWIWQLHSAGLLSASFQPDELTESLRAYTRHRKSLIDGAARYISKMQKALVVQNVHLSVVLTDITGKSGQAIISAILNGERDGQKLAALADRRVKADKATIAKALTGHWKDQHLFELQQSWQMYHFHHQQIAECDVQIELILQAQIEANGQQDLAYEPKKKKKRKKNDPSFDLAQKAYQLTDGIDLTEVDGVSFGLLLALITEVGLDLSMFPSAKHFVSWLGLCPNKKVSGGKILSSKTRKNKGRLAYAFRQSANSVGNQKDTALSYAFRALAYKHGRKVAITATARKIATIVYNMLEKGQPYQPMGTLQYQNMVRQKKVMNIQRTIKKHDVKVDELAFS

SEQ ID NO: 288285 - protein, 359 aa, unidentified
MIRLAEPMPIKSLVAGVDLGDVDSHVCIIDSESGEVVEETRLRTRPRDVAAYFARHSKLRVAVEAGAQSNWVSEAITAAGHDVTVANAARVRLIHGGTRKNDRLDAQKLARLLRYDASLLAPIQHRRLSTHHDMAMLRSRDALVRTRTALVNHVRGVVKQFGLRVQTCETSAFAARARDVIPPELAPALAPSLDAIATVSEKIRTLTWGVERLCKEKYPETALLMQVHGVAEVTALTFVLTIENPARFARGRDVAAYLGLTPGEKQSGASNPARGITKAGDKQLRRLLVQCAHRILRQDAPETDLKRHGLKLARGGSKDNKRKAVVAVARKLAVLLHALWLSGEVYEPLRNTRGQTART

SEQ ID NO: 288286 - protein, 404 aa, unidentified
MKGPIVSIDVSKGKSDYQAFKNLNVKYTGSRSIKHTKEGFDEIVNLVREMEKKLETEVCVVYEATGVYHRVLKKVLEDNDIKQFIINPLLSAKTRKNDSLRCPKTDKLDPKSIAKTYYSHSLHNSHKQETIYHELRELSRYYEDILVHIRKDKVAFRAQLDIVFPGYDTLYDDLYGPVALAVIEKYPHPEMLQKKKINTVSKVIQSKTCHRQAVSDTMADKAIEYSKTIYSGCDKDDIEVLILQRLIKKLNEDMAEAERTIGEMIKLAQELPDFSIIKSIPSIGDNLAARIIAELGDMTRFKKKNELVAFAGLDPRISESGQNDGDHMHITKKGNKRLRCLLYLAVTCSIRLKRDDNSIKDFYIKKKQQSNPMCSKAAKTACASKLVRIIYSMCKTGELYQYNK

SEQ ID NO: 288287 - protein, 344 aa, unidentified
MNSTTIAVDVAKSVFEVAVSEQPGQVRERQRLSRERFRRFLTERPAATVLMEACGSAHHWARHAQAQGHRAVLVPPHVVRPYVLRNKTDRTDAKGLLEAFRNEDVHPVPVKSETQQALAALHRLRSTWLATRTARINTVRGVLREFGLILPLGAHHVVPHVRTLLEEADSGVPGLLRPALAAAVEEIRAIEARMRAVEQQLEAGAAQTLSVRQLRTIPGIGLLTATALVAAVGDVQRFPSARHFAGYLGLTPREDSTGPRRRLGAISKRGDTYLRMLLIHGARAVLCHAKTKTAPPPDRLRAWALQVERLRGHNKAAVALANKLARIVWAVWRHGNDYVGTPAV

SEQ ID NO: 288288 - protein, 334 aa, unidentified
MHYIGLDVHKKTIAYCAKTVDGTIVDEGTIQALRPELEEWAAKRPAPWKGTLEATMFSGWIYDTLEPHSDDLAVAHPASLEAITRAKKKSDKLDSRKLSDLTRINMVPRVWMPPRPQRELRRLLRFRNRLVQQAVWNKNRIATLLMELGEPYTKSKLHTKKYFVPLVDQLEACETDLLLLGVSRDRVEATLSIVREIENKLLSHPSLAKRVELLRTIPGVGAITALTWALEIGDVKRFGKIDQAVSYCGLCSRLDESAGKSRRGPLSKQRNGHLQRVLIEAAKLAPRWNEQLARLHADEVARGHRNQATVAVARKLVALLLAVERRGTGYERRE

SEQ ID NO: 288289 - protein, 404 aa, unidentified
MIFAGVDWAEAHHDVCVMSRDGRVLEQRRVSHSVTGIGELHALIGAHADEGELVAVGIETDRGLVVTALVAAGYQVYAVNPLAASRYRERHATSGAKSDPGDAKVLADLVRTDRHNHRQVAGDSDLAEAVKVLARAHQSAVWSRQRQVNALRSALREYYPAALAAFGTDLADRDATAILAIASAPDQGRALSRSKIAAALRRAGRQRNIEARAGEIQAALRADYLHAPPAVARAYSAAARSAIRLISAYTAEIAELEQALSEHFDQHPDTTIVRSLPGLGTILGARVLGEFGDDRTRFASPKSRKNYAGTSPITKASGRSRIVLARYARNRRLADAVEQWAFCSLTHSPGARRYYDQLRARGKTHRQALRQLANRWVGILHICLQREQLYDETAAWQHLDAAAA

SEQ ID NO: 288290 - protein, 344 aa, unidentified
MTYYAGLDVSLRSTNICVVDHEGLLVAEGKTDSDVAEIIAFLDDLDVAITEIGLEAGTLTQYLTYGLQFAGFEVVCMEARQVKAALSAMRNKTDKNDARGIAQLLRCGWYSRVHVKSIKSHQVRALLSSRRAVLAKCIDLEQEIRGLFKIFGIKLPARLGHGSFDPKVRPLIEADEAFNHALLPMLDARLVLYHTFRELDNRTRHLANEDPICQRLMTAPGVGFITALTFKAGVDDPTRFKQSRTVAAHFGLTPRRFQSGEVDFDGHISRAGDADVRSTLYVAANSMLTRSSKWSPLKAWGMKLAKSRGHKKAVIAVARKLAVILHRMWIDDAQFRWSTEAARS

SEQ ID NO: 288291 - protein, 367 aa, unidentified
MSMLYVGLDVHKTTIVVAIAEDGRHGEVRSYGTIENTPASVDKLIKRLAKSGHELHFCYEAGCCGYGLQRQIVATGHLCTVVSPCMIPRKKGEHIKTDRRDAIKLARLNRAGELDAVWVPDVAHEAMRDLVRSRSDAMEHLRSTKQHLQSFMLRHGRIYTGLKQWSRMHFIWLSNQKFEHQAHQIVFQDYIDAIHDAEKRHRQLIKQIEALVPSWSLQPLVQALCLMKGINLIAATTILSVTGDLRRFPTPTKLSAYFGLVPSEHSSGDKIKRFKMTKAGNSEARRVLIQGAWCYRFPARVTRHKEPQLSVAEKSIRDVAWRAQVRLCTRYRRLIALGKKAPVACSAVARELTTFIWEMGQIVPLTS

SEQ ID NO: 288292 - protein, 366 aa, unidentified
MWLERGEQSIPHQTARRGIHSGSHLEEDIVFVIGIDPHKGSHTAAVLDRQERLVGELRVVADRRQRDRFLHFAEPFTPRTWAIEAASGLGALLAQQLVAAGEVVLDVPPALSARVRLLDTGRNDKTDPHDARSAAVVALRHVGLRSVVAMDHSAVLRLLADRHHDLTALRTQAICRVHALLCLLIPGGLSRRLSADRAGRALRATRPLELVEVERKRMASDLLTDVRRIDNQLVTLKARIDVAVVTSGTTVTNIHGVGPIVAALLVGHTGDVRRFPTSGHYARYNGSAPIEASSGPHVRHRLNPRGNRQLNHALHVAAVTQVGHETPGRIYYERKLAEGKSRKEALRALKRRISDAVYRQLVVDAG

SEQ ID NO: 288293 - protein, 355 aa, unidentified
MSQEKYIGMDVHQATISVAVMDGNGKLLMECLLETKAATILEFVQGLRGTLSLTFEEGTSAAWLHDLLKPHVSRLVVCDPRKAALLKEGNKSDRIDARKLAELLRTNQLKAVYHGEHGIRTLKELGRSYLTVSKDVTRTMNRIKSLYRSWAIPCPGTTVYAPSHRLEWLAKIVQPGVRVRAQHLYEQLDNLQPIRQQARRELLLESHKHPAVKLLRQIPSIGPIRAALLVALLQTPHRFRTKRQLWAYSGFAVETHDSGEYRYVRGKVQRNRERITVRGLNDNHHKDLKNVLKSAAISASTRPGPLHDFYVARVEKGMRPTMARLTLARKIAAITLTMWKKGVSFDPQQLSRQSV

SEQ ID NO: 288294 - protein, 343 aa, unidentified
MDHFAGLDVSVKETSVCIVDDTGRIAKELRVASEPDALLRVLGNPAYRFKRIGLEAGPLSQWLFGALAEAGLPVICVETRHMRAVLKAQINKTDRNDARGMAQMMRAGLYRPVHVKTLRSQKLRMLLTHRKLLQSKAIAIDNDLRGTLRNFGLKVGVVGTMKFEARIKELVESFPDLAELVEPLLIVRRTLREQIGILHRHLLAIVRNDDVCRRLMTIPGVGPVVALTYRATVDVPARFRNSKAVGAVFGLTPSRYQSGEIDRPGAISRCGDEMMRAMLYEAAHIMLVRLAKWSWLKAWAMKIARHRGMKKAIVALARRLAVIMHRIWVDGTEFRWSREVTAA

SEQ ID NO: 288295 - protein, 454 aa, unidentified
MNARKKSSDQKTQKASPISIINPNAAGIDIGDTMHVVAVPDGRSERTVREFGTMTCDLELIVIWLKECNIDTVSMESTGVYWKPLFSLLLQNNIKVYLVNARHVRNVTGRKNDQQDVQWLQQLHSFGLLKSSYLPEEEQEGLRALVRYRHTLIQDSSRFVLRMQKSLELMNIKIHTIISDLMGKTGKAIIEAIVDGERNAENFIPFIDRRIKTDKATIVKSLQGNWREEHLFTLRESYRFYTFYLQEIKACDIAIENQLIHYEAFIQDGNIEEQQSQPVSKFKKTSKNRPGFNMVHYLQRIHQVNVMAIYGLSDISALEILAETGTDMSKWKDEKHFVSWLNLCPNNKISGGKIISSNILKKKPNLASQAFRTAANSICKSNHWLGDYFRRMRAKGGHKYAIVATANKIAAIYYKMLSLKKEFNPVDMVVYQQKYKTAKIAYLERKLQQLKNTA

SEQ ID NO: 288296 - protein, 300 aa, unidentified
MVHYVGLDVSLKQTSICVVSETGSVVREGAVASDPEAIAAFVRSKAPGAVRVGLETGPTATWLWTELKRLGLPVICIDARHAKAVLKMQINKSDRNDAAGIARIMHTGWFKEVRVKDLDSHAVRALLASRALLVKIKRDLENHIRGLLKNLGLIIGRAKFNVFSARARKLIEDRPDLIAMVGPLIRAREAIEQQIDDLDRKVLKLARHDAQVRRFMTVPGVGPITALCFRATIDDPSRFKRSRSVGAYVGLTTRRHASGEVDWSGRISKCGDAMLRSYLFEAAGVLLTRVPKWSALKAWG

SEQ ID NO: 288297 - protein, 463 aa, unidentified
MRTIGIDLAITGTHKAVVVDGQGNAIGSLIRFRTDPAELEALLRRAQEGTDEDEELRVVMEPTGLAWLPMASYFIQRGVTIYLVNTQQASDLRKFYSKYAHSDRISARVLARMPWVNPDGLHPLSLADADHLSGQRWCKQQEELAQQMTAIKNRVQAWERAFWPGLEEVVGDLFAPWVRRWREQWYDPWQLQSLETGQLAAFLAEAGADPEKAEGLAAGLQTVARQAVALFGTPQGRPSPYVDYAALQDQVLRELYLLACCEAEHRAVRCQVRQLYRQVHPDRQLETLYGVGENGAAVYVFFIGQIERFTSQKKFRGWSGLVPKSSQSGSGEKKGLRITHAGPDLIKKYAYIDAEVARRWDPQIAAIYHDQMVHKGKHHVQAVCCCATHLLDRVRAVLRDGRPYELRDVDGTPVTWQEARAIIAERYQVPEEVRKRNSKRARKTRRDEQAERKRKKRRSRPDR

SEQ ID NO: 288298 - protein, 311 aa, unidentified
MPAKAEPHYVGLDIAKDQLDYCINDAAEGRTPNTPEARAGFIEKLKLLGTARVICEASGGYEKIVVAELLAAGIEVCVVQPGRVRAFAYAEGLLAKTDRIDARLLRRYGEKIAPRLAVPTDAATATLRELIEHRRQLTTQLSEVEGRLALAGPTLRKLLQRQKTFLQKQLKSVDAMIGDHINHDPDLRSKSERLQQVTGVGPVLSATLLAYVPELGKIESAQLSALIGVAPYPKDSGTMHAPRHVRGGRAQVRHVLYMAAVSAARSNPILAAFYQRLLANGKPAKVCLIAVMRKMVCLMNRLIKDPDFVLA

SEQ ID NO: 288299 - protein, 368 aa, unidentified
MKSIIYIGMDVHKKTYSLCALLKETGEIIGETKIPADVSLIIKFIENAKKSVDSDDVQIKTGYEAGCLGYSLYWQLAAKGIECDILAPSTMHRSAKNKVVKNDRRDAKNIAANLANGTYKSVYVPTDEDVEIKEYIRMMHDFKIELKKVKQHINAFLLRFGHHYPGKSKWIPAHIKWLKELELSGMYREILDEYLSQLEILSEKIERFKYRLEELSQKETYNEKIGQLRCIKGIDTTAAMTMHAETSDFDRFPTANAFASYCGLTPGEDSSGESYHRLGITKQGNSMIRTTLVEAAQTLVRGTIGKKVKSNQKDQDVKVIDYADKAVIRLQKKYHRMIFRGVKRNIAITAVARELACFVWGIETGHIS

SEQ ID NO: 288300 - protein, 310 aa, unidentified
MIENKNKRFIGIDVSKYKLDIFNSTTGEVKTIENSKAAIRQYIRALEFSQELYIVVDLTGGYEALCVNMFYDKGFKVIRAEGRKVKNFARAMGITAKTDTIDAKLLADYGDKCFERLRLYTPYNSSIKKLVMRLSDLKDMAQKEKNRLKAPDNAPIVIKSIQTLLKAYEKEIAKLEEHIEEVIENNEQLNAKYRMLLEQKGVGKKVAFILLGLLPELGYLNRREIAALCGVAPFAKDSGTISGYRRTQNGRIEVKKALFMAALVAVKYDIKYKAVYESLLERAKPKMVAITAVMRKLIIYLNVKSKILCA

SEQ ID NO: 288301 - protein, 331 aa, unidentified
MEEVKRFVGIDIAKVALDVFIGSVSAAFSVANDEVGIRELLRQLEPDDFVILEATGGLEMPVASALAAAGIAVAIVNPRQVRDFARATGRLAKTDRLDAEVLARFGEAVRPAARPLANEQAQALEALVTRRRQLVEMLAAEKNRRARAPKILHHSIDEHIRWLERRLTGFDDELGELIRDTLLWRERDELLRSVPGVGKVLSVTLLAQLPELGMLNRKQIAALAGLAPFNRDSGTLRGSRCIWGGRAQVRRVLYMATVAGVRCNPTIRTFYLRLRTNGKHAKPALIACMRKFLAILNAMLHNKTHWQTPALTPSTIALSPLPDAVSEHGCC

SEQ ID NO: 288302 - protein, 343 aa, unidentified
MGEVSTIGLDIAKSVFQIHGVDGNGAVVIRKRITRAKLLEFFAALPPCLVGIEACPSAHYWSRRLQALGHTVRLLPPSYVKAYLKRSKNDANDAAAICEAVTRPSMRFVATKSEQQQSGLMLHRSRQLLVCQRTMLSNAIRGHMAELGIIAAKGRNGTAELLKNIANEQDDRIPEAARFSLDVLARQYAAVRAEIVAIEKRIHAWHRSSEESRRLEEIPGVGPIVATALVAEVGDWKVFSSGRSLAAWIGLVPRQHSTGGKERLGRISKQGNRHLRWLLVAGAMAVIRYARQHGTKRPWLTRLMDRRPIKVAAVALANKIARMAWAMMVRGERFKEPKLLPAA

SEQ ID NO: 288303 - protein, 338 aa, unidentified
MQVATLGVDLAKNVFQLCGVDSKGKVVLRRRVSRDQLSELAVSLPPCTIAIEACPSAHHWAREFIRTGHTVKMISPQFVKPFVKGNKNDGNDAQAIVEAAQRPTMRFVPVKTIEQQDIQSLHRARTRLVNNRTGLVSQMRGILAERGIVFPKSITRARREIPRITSDLTNDLSVLARELLRDLLEQLGELDRRIAVMDRRIAAVFHASEPCQRLAKITGVGPMTATAIVAAIGNGSDFKNGRHLAAWLGLVPRQHSSGDRQRLYGISKRGDKHLRTMLIHGARAVVRIASTKTDYRHKWVQAVRERRGVNRTIVAVANKNARIIWSVLAKNEHYRACP

SEQ ID NO: 288304 - protein, 355 aa, unidentified
MNDAKYIGMDVHQATISVAVRDSRGNLVMEAILETKADTILEFIHGLRGSLSVTFEEGTWAAWLHDLLQPHVTRVVACDPRKNALLKVGNHNDRMDARKLSELLYLNKLSPVYHGEQGIRTLKELARSYIAITRDLTRVMSRLKAIYRSWGIPCAGQQVYAPRYRAEWLAKISEAGVRRRAELYYQQFDALAALRQGTRRELLAEARKHPAMRLLRQIPSIGPIRAALLIALMQTPHRFRTKRQLWAYCGLALRTYDSGEYRFVGGQLKRSKKAVTIRGLNKNHNHDLKNIFKGAATRAAATAGPFQKFYEARLASGMKPPMARLTLARKIAAITLLVWKKGVRFDAEQLKQQAA

SEQ ID NO: 288305 - protein, 368 aa, unidentified
MLKRFHGLDRHKHSSMISILNREGKEDKLKSVGISLNSYIKTLGQEDAIVMETGIGSFYWADKIEAQGASCTIIDPYRFRIIKDSWNKTDKNDCRNMSKALWVHKVTGEFGLPEVYKPSQTVRELRKLFAQYSNLNKYICKLKNNIQSTLLDNGIVLSAEDKSSLLAKKSSENIFNNIDISDASKISIEISLDILWNVTEKKKMLTTEIIKAGEPFKKEVKLLISIKGITPLSALAFLSDVGDVRRFKTLRKMNAYLGLVPRIKESGNKTRVGHINKASRKLTRSLLTQSLIQAIDASPYFREFYEEIKARRGAGRSRIALIRKLCGIMRRMLLNNETFRDIKQSLYDKKINCYEKQLKEFKMERKRA

SEQ ID NO: 288306 - protein, 405 aa, unidentified
MADIEQRERIEVFVGIDVGKGAHHAVALDVTGKRLLDSALPNDEAKLRALIVKLKEHGHVLLVVDQPATIGALPVAVARAEGVAVAYLPGLAMRRIADLHAGEAKTDARDAYIIAEAARSMPHTLRSLKLADNEVAELTMLCGFDDDLAQQITQTSNRILGLLTQIHPALERVVGPHLDHPAMLDLIERHPSPAQLATLNEMQLANRLVKLAPRLGKRWAAEIVQALSEQTVVVLGTQAATVVLPRLAQQLAALRRQREEVGKEVEQLVLAHPLHPVLTSMPGVGVRTAARLLIDVASRAFASAAHLAAYAGLAPVTRRSGSSIRGEHPSRRGNKQLKRALFLSAFAALRDPISRAYYARKISQGKRHNQALIALARRRCDVLFAMLRDGSLYSPHQTENSLTTR

SEQ ID NO: 288307 - protein, 464 aa, unidentified
MRYFGWLAERHDKFALQLHGAQPPMMYQDGQVVLFNSCRFWRRVAKKTSRSLISSRAGPLARERRQTDLSRSVEIGLILLMGWTAPRTASSVPRWLSLRAPSGREPSVGKSIIDTSSVTRVGLDLAKRVFRIHAVDATGSIVIARSVNRRTLLKFFDALPRCVVAMEACSSAHHWGRQLLELGFAVRLIPPAHVKPYVRRNKNDAADAAAICEAAERQGQRFVPVRSVENQAALMRHRARELMVGQRTAALNALRGHLSEIGVVAAQGVQNAYALKEMAAEGFDENGEIVVPDCVRLALAPLVRQIDGLDEAIEAIDRELEASARTDEAARRLMTIPGVGPVTATALLATIQDFAAFSSGREFAAFVGLTPREHSSGGKPRLGRITKMGDRYLRKLLVVGACSALGARKGHNDALRRWASGMLERKTVKYKFKLTAVALANKLARIVYALATKGGHYDDRPVAA

SEQ ID NO: 288308 - protein, 349 aa, unidentified
MSRLQYIALDTHQSFCDMAVLNSQGDVVKRERCSTDIPSLVGLLQAVAGRRKLTFEEGPMAGWLARNLREHVEELIVCEPRRNAYIAKDGDKDDPIDAVKLAQLLRGGYLKAVHQVDCLDRELLKQHVAFYHHRVRERVRQGHQITSLLRRQGVFATIAELADPQTRRTFWKKMPQHAVLQRDLNALWAVYELMCTQEEQIRADLVRLARRHEPVRRFVEVPGISWIRAATFYVYLDTPQRFTKKSALWRYCGIGLERHRSGTGPTRVRLAKAANRHLKNMLMGAARSAAARAETPFADKYQYWTQEKGQHPVTAYRNVARTIASMLWGMWKDGSKYDPDLIRGVGRKD

SEQ ID NO: 288309 - protein, 414 aa, unidentified
MAEEETISWFAGVDWGSERHQVCLLDARGGTVGEREFPHSGEGLAELGDWLLSMASAAGTVAVAIEVPHGPVVDVLIDRGFVVYAINPKQLDRLRDRFSVAGAKDDRRDAYVQADSLRTDRRLFRRLQVADPRLIELRAWSRLAEELGAERVRLSNRMRHQLWRYYPQMQKLTKDLAAPWFLELWAIASTPAKAGRLRKSTVERLLKQHRIRRMDAETVLRILREPAIKVAEGVAEAASIHIRSLVARLGIVNRELREAERKLDELCTAVSEIEQTSGESLQRRDVAILRSMPGIGRINLGTLLSEASGPLSRRDYEGLRTLSGAAPVTKRSGKSLIVVRRYAAHVRLRNTVYHWARVATQRDPRCRARYTALRKRGHSHGRALRGVADRLLALVCVLLQRQTLFDPHFGRPTA

SEQ ID NO: 288310 - protein, 372 aa, unidentified
MSQPEVLERGLALLEAAVRKKWLWAGVDLGVETASVCIIDDSGEVLHEGVCPSAADSVRRELTCFRRTRFASVALEAGTGTHVARGLRSLGYPIELYEARQLSKFLRVRRNKTDAGDAQGIAEAGRIGASIVSKVYLKSIDSQALQSRLAIRRHLIRQRVAAINMLGRQIEVFGGRLRCNPLRKGLRSAVEAEIRSLFRSGSSPLVAQLRYLADHCERLIEYQRAMDLELKHAAYENDVCRRLMEIPGVGPLCALTFYAAVDDPHRFSRSSDIGSYFGLAPRVHESGFTSRKARISKMGNKSVRSLLVHAAALYIHHGNPQSALRDWALRIEERRGRAPSRVALARKLAVVMLAIWKSGGHFEPADRLSVVD

SEQ ID NO: 288311 - protein, 363 aa, unidentified
MTYYQGLRYNSPVDLKIKFMKQKYVIGIDISKSKVDCAVIDFGYELKLEKEVFNKEKTLDAFIKTIAKRLQINQEELLVCCENTGIYNRPLEVVCTRLGITLWVEHALKIKRASTDMRGKDDKKDALRIAHYAVRYYDKMVPYQEPSEIVKELNVLTKARDTMLTQKVALENQLREAKTHDTFEYELLARAFKKSISSLSKSIKEIEKQIDLLIQKDEQINQNRQLITSIPGIGNQGAINLIIATNNFQSFKSAKHLACYAGVVPFKNQSGTIVKKERVSKMANKTIKKLLHLSAMAAIRSDKELKGYYLRKVAEGKNKMSVLNAVRNKLVHRIMSVITRKQAYLSQEDYFYQKRNNFACLLT

SEQ ID NO: 288312 - protein, 353 aa, unidentified
MRTYYVGMDAHRASIVIVVLNGAGKVVMEYVTETSAGRVRDFLKQLKGKVYITFEEGTQANWLHDIVRPLVTEVVVCDPRQNKLLQSGNKSDRVDAQKLAELLRNGALKAVYHGDHGMRMLKELVRTYDCLVSDTTRVMNRLKAIYRGRAIACSGHDIYRPDRQKQWLKKLREPGARQRADFLYRQLAALKPLRHEAKRLMVKETRRQTAYPWLLSVPRLGVVSVAQLLAIVGTPHRFRSKRQFWTYVGLAVVTRTTADHEVINGVMQRSRRPIATRGLNRNHNHVLKRVFKNAATTACHSGPFKAAYEARVKQGMDASLARLTIARQLAAITLALWKRGQRFDPERMKQQAA

SEQ ID NO: 288313 - protein, 347 aa, unidentified
MNGDYAGRQVVGMDLHRRRSVLVRMTEDGRKLGTARIANSPAALRAELARAGENPRVVLEATYGWYWAADTLAAAGAEVHLAHPLGVKAFSYRRVKSDARDAADLADLLRMGRLPEAWITPPEVRDLRELTRYRHKLVGLRTSCKDQVHAVLAKLGISVTCSDLFGAWGSAWLDDLRLPQPYAGKVTSLRQLTGELSTEITMLNEVISDLLAGHPGYLVIRQLPGIGPVLAAVIIAEIGDVTRFRRPGQLASWAGLTPRHHESDTTIIRGHVTKQGSRLLRWALIEAIQRTPAGFGPRDAKDAIIARRGAGARNIAKVAAARRLLTLIYYGLRDGQIRCLPEPARAA

SEQ ID NO: 288314 - protein, 343 aa, unidentified
MLYVGLDVHKEFCQACVIDERGRALSNERFPSTHESLDVFLAGIKHAKFVLESTGIWEYIYEGIEDRGFEVVLAHPLRVRAIAEARIKTDKVDAETLAQLLRADLIPRSWVPSRDIRDLRQLVRQRTYLARQSTSFKNRISAELLRRGVRRPPELKTSFTKKDIERMRSLNISTVTSSLDCLERIQAQIEEMNQQLLVEFKRRPDAQLIATVPGIGYYGALLIHAEIDDINRFPDPEHLAAYAGLVPTVSQSASTVHYGGISKEGSAYLRWILIEAVHVHRHIHPESRLSRFHSKLEKRRGKNKATTATARKLAHVIYWMLKTREPYHGQGFNPVTKPARTSA

SEQ ID NO: 288315 - protein, 313 aa, unidentified
MFVGIDVSKHQLDVHVRPSGENWSVSNDASGHEELVKRVLAVSPTLIVLEATGGYQSAVVAELGMHQLSVAVVNPRQVRDFAKATGRLAKTDAIDAAALAHFAEAIRPESRPMPDEHLVELQALVTRRRQLIDMRTAEMNRLETCHVQRVRKDIQKTIDWLTRRIGQVDEDTDKRIRNTPMWREREDLLASVTGVGKTTARTLLTQFYELGTLNRREVAALAGLAPYNNDSGARRGTRSIRGGRPEVRSVLYMATISAVHHNPQIRVFYERLLAAGKLKKVALIACARKLLTILNAMVRTKTEWRRLDAPNAA

SEQ ID NO: 288316 - protein, 365 aa, unidentified
MKRKVYVGMDVHKETIQIAYLTSNSKEILKEQQIKHNEVQIKKFIKKLKLEWNEIHCYEAGVTGYPLYRYLKSLGVNCILVAPGKIPRQNTDKIKTDKRDAIKLARLMRSGELESIHVPSEEDEAVRDYLRSRDSLRLDLGRNRQRLMKFLLRKDIKYSTTKYWTVSHYKWLNNLHFNNEILQETFNDYYSRVRVQEENLKSMDKKIQEIAESEPYREKVGILRCFRGVDYLTAMFLLCEVNDFKRFKTAGSFMSFLGLVPGEYSSGSKRKQTGITKTGSPRLRRILTEAAWQHRFPGTGSKIITARRSGQPALVVALAEKASLRLHKKFRNLQRKNSSSDDNGSFKRVIRISLGGNESCSLKLE

SEQ ID NO: 288317 - protein, 348 aa, unidentified
MKITTSGIDVAKSVFQVHGVDERGNVVLRRQIRRSQLLVFFSRLEPCLIGMEACASSHYWARKLTALGHTVRLMAPQFVKPYRKNDKNDGNDAEAICEGVQRPNMRFVPVKSPEQQAELAVHRIRRRLIGKRTALINQLRGLLAEYGLVLAQGANQVRSKLPELLDASSAFLPPLAVELFRDLYEELVQLEERIGQYERRVERLYRANPLCHRLAEIEGIGALTATAFVATVAHAAQFKNGRQCAAWLGLVPKQDSSGDKTRLLGISKRGDVYLRTLLVHGARSAMRHTPKRNDPKSRWVEQLRKRRGENIAAVALAAKHARILWALMVRGESFSPSASRTIEPQPTV

SEQ ID NO: 288318 - protein, 406 aa, unidentified
MLLVGDDWAEDHHDVEIMDPAGRTLAKARLPEGIAGLARLHALIAGQRGDDAEQVEVRIGIETDRGPWVAALTAAGYTVYPVNPLQAARYRDRHAVSGAKSDAADAHTLADMVRTDAHQLRPIAGDSPDADAVKVVARAHKTLIWERTRQTQRLRHALREYFPAALDAFDDLDAADTLELLAKAPDPTAAVRLTRAQIAAALRRARRRHVDTKTTAIRAALRTPQLGRPAVVVAAYAATTRAAVAVLATLNAQITALEAQVGAHFRRHPDAEIILSQPGMGPVLGARVLGEFGDAPGRYADAKARKNSAGTSPITRASGRRKTVHARHVHNDRLVDALMLQAQSALQASPGARAYYDRQRARRLDHNPALRQLANRLVGILHGCLKTRTRYDEATAWSHHNQQTAA

SEQ ID NO: 288319 - protein, 329 aa, unidentified
MLERSQIIMEDYILESPEIFVGIDVSKAQLDIAHRPTGEKQSFANDKVGIKTLVKRLAKLQPALIVLEATGGYERLPMRALISAELQAVMINPRQVRDFAKATGQLAKTDSIDADVLAHFAQAVRPKLRPLPDAVTVELRGLIARRRYFIETISAEINRLEMASKTVRKSINDHVRTLERALERINKDLDRAIANNPIWKDSENRMRGVPGIGPVSSRTLLAELPELGTLDRKQIASLAGVAPFNRDSGSLKGRRSIWGGRAPLRCALYMATLVATTRNPVIRDFYNRLRAKGKLFKVALIACMRKLLTILNSMIKHKTRWSDTFLQTA

SEQ ID NO: 288320 - protein, 351 aa, unidentified
MTSLQQIAEVVIGVDTHVHTHSAAVVDARTGGVLAEITVTADADGYQELIDFAGQHSGQRAWAIEGTGGHGNGLARVLAQRDEPVIELDRPERAKRRNGAKSDPLDAVRAAREALSRDNLGTPRSHGDRQALSVLLAARQSAVQGAGDAQRQLFSLVIAAPETLRKRFRGHKLPAMTRLAAQLRGSPRWDTETATTAAVLRALARRALDLAAEAARHEKDIRAIVAAWRPDLLTQRGVGPITAAVILCAWSHPGRVRSEAAFAMLGGVAPIPADSGSGTAPKRFRLNRYGDRQLNRALHTITLSRLRYDPTTQAYAKRRTAEGKTPRDIKRCLKRYIARDLYRLLEHPAAT

SEQ ID NO: 288321 - protein, 389 aa, unidentified
MLLDHPSDEPTAIRTHIGAIFVSLELSRSNWLVTSLSPGKGEKMSKHSIAAGDIAGLLALFAELKRKAEVRTGQSYPIITIQEAGLDGFWLHRVLQQNGIESHVVDPASIATPRRRRRAKTDRLDGEALLRALLAYKRGEPRVCAMVVAPSPEEEDRRRLCRERRTLIEERITHVNRIKGLLFAQGICDYAPIRRDRRARLEALRTGDGRELPSHLKAQIGRELDRIELLLDQIKAVEAAQDALLTAARKPASQEAAPDPVTMLLALRGVGANFAAVLWSEAFYRQFANRRQVAAYAGLAATPWQSGGIRHEQGVSKAGNPRLRTTMIQLAWLWIRHQPQSALTRWFKERSQQGRKRAIVALARKLLVALWKYVTAGVVIEGAVMKPAA

SEQ ID NO: 288322 - protein, 341 aa, unidentified
MNHYAGIDVSLKYSSVCVVDTNGKIVREGTVASEPEALIAWFSELRLEVTRIGLEAGPQSQWLYAAMRQAGLAVELLETRHVRDAFKAMPVKTDRKDAQGLAQLMRLGWFRPVHCKSIEAQEMRAMLSARKLVQSKLHDIEMSLRGTLRGFGLKVGRTTPNRFATRINELVEGHPTLQIIATSLLAAHAVLLREFKVFEKRVRIMARTDERARLLMSAPGVGALVALTYASGIDDPGRFKSSKQAGAHFGMTPKKYQSGQTDITGRISKIGDKGVRTALYEAAHIILTKPVRGSALKSWAVRLAKRAGMNKAKVALARKLAVIMHRMLVDRTPFNPAAVAA

SEQ ID NO: 288323 - protein, 346 aa, unidentified
MQNDTLVAVDVAKEVFEVGVSDRPGRVASRRRLRRDEFLEFFAQLPQATVVMEACGSAHYWARRIEELGHVVVLLPPQYVRPYVVRNKTDRTDVDGLLEAFRNEQIRPVPIKTVTQQVIATLHRLRSGWLADRVRGINALRGLLRELGFFIPEGRKHVLPDAWEIIQDPRRGLPDALKPSLMALCEEIASLSTRIEDVEAQLEALARQIPMVARLRSVPGIGLLSATALYAFVGDISRFPSGRHLASFVGLTPREYSSGLRRRLGRISKRGDAYLRMLLIHGARSVLWHSKRMKDRDRLRAWALRLERKLGHNKAAVALANKLARITWAVWKNDRNFEPAPQPQPA

SEQ ID NO: 288324 - protein, 456 aa, unidentified
MSKQSKSTMPAVHAKPTQRKHAAGIDIGATSIYVAVPVDRDPQPVRSFQTFTEDLHRLADWLQRCRIKTVAMESTGVFWVPLFQILEQRGFEVCLVNARHVKNVPGRKTDVADCQWLQYLHSVGLLQASFRPAQQVCALRSLLRHRDSLVQTASTYAQRIQKALDQMNLQLHHVISDITGVSGVTILDAIVDGERDPLKLANLRDYRIKATTETVAKSLVGDYRPEHLFTLRQSLEAWRYHRKLIAECDDEIQRHLVQFASKADPKQNPLPRPRKVSSSKVYSSAPDYDLRTEHYRILGVDLTEVPGINTLLVHTLLAEVGPDLSKFRSAAAFASWLGLCPDNRISGGKILSVRTRHVQNRAALALRIAAHTLHHNQSVLGHYYRRMRAKLGAPKAITATAHKLARILYHLLTTGQPYQESIFEERETQHQQRTLFSLHARARALGYQLIPLAPTT

SEQ ID NO: 288325 - protein, 335 aa, unidentified
MDFKVFIGIDVSKETLDFIPTSEGKRLFHEHVSNDNKGIVRLYRRLAKTVDSSPEQWLFCMEHTGVYCNPMLEFAVEKDLAIWLESAAKIKAHHALERGKNDTLDALRIAEYAFAKKDKIKLWEAPREVMIRLKSLIKLRERLITSKKRFLDPLREEKQFCNKEWVKEHEKLLKPVIAKIEKQTKEVEQEIQQLINEDDDLKRLYGLITSVRGVGQIVAINTLVVTNEFKQITNPKEMACNCGVVPFKYDSGKTIRSRAKVSHRANKTMKVLFHLAAMSAISTKGELRDYYLRKVEEGKNKMAVINAVRNKIIHRIFACVRDQRKYEENYIHSLA

SEQ ID NO: 288326 - protein, 346 aa, unidentified
MRQYVAFDVSKQSSEAVIVDATGTCLVRRKVATDPLAMAAFVRKHGANVVLVGFEAGPLSTWLHHELKGAGLPVVCMDSWRARAALSARLNKTDRTDAAGLADLLRAGFHHEVHVKSYAAHEVRTMLKARDSLVAQRRTLQNTIRGLLETFGLVLGKGAGRRFAALVEEALFSRPSLRPAIEPLLGVWRAAREAAAAMHRRLRAMASADADCRRLMTTPGVGPINALAFTSAIDDPTRFHDSRAVGAYFGLTPRRYQSGKSDHTGKISRAGDGFMRSLLFEAAQCLAFRSSRAPALKAWFEALAARVGRKKALVALARKLAVILHAMLVHGRDFDEKLQATTAAAA

SEQ ID NO: 288327 - protein, 423 aa, unidentified
MRFFGLDVHLDFCEVAVAEGGRVSRVGRIASTPEAIREFATGLNGSDQVVLEASCGAMMIARLLEEGDVGQVVVCNAAETRAISHARVKSDRFDAAMLAKLLSAGMLKAVWVPDEATSSLRRRVARRAGLVRARTRVKNEVHAVLARCLLGRPPMSDLFGKQGRVWLTEQQLPEEEGETVRSCLRHIDFLGSEITELDRRIAQQALAFPGFQRLLTIPGVDVGTAAAVIAAIGDITRFPTAGQLVAYLGLDPKVRQSGSEPARYGHISKRGDPQARSMLVEAAWISIRSPGPLKAFGERVRARRGAQIAAVAVARKLVVLCWHLLTKDQDYAFARPSLTRQKTRRLELLAGAPPLPRRHGGPPVSPTSSQRAAERELQAQAEQAYRRLVDDWRTTPKGGAGATPGRASQRPSKGKAARQATSP

SEQ ID NO: 288328 - protein, 337 aa, unidentified
MKITTIGLDLAKSVFHVVCFDARHQEVSKRMLRRSQVLAYFAQLEPCVVAMEACAGAHYWGRELEKLGHTAKLIPPQFVKPYVKGNKNDYNDARAIAEAATRPGMRFVGIQTVEQQDIQALHRLRAQQVKQRTALCNQLRALVAEYGIVMNKGVAALRRGIPRLLEDAENGLSEAFRALLARGYEQLLEREGHIDDYTRQVVTHSRQHAAIRRLQTLPGYGPIVASVFASVVGDGSAFKRGRDVSACLGLVPRQHSSGGKEVLLGISKRGDKYLRSLLIHGARSVVLHAKHKEDALSRWVNRVRERRGTNKAAVALANKLARMGWALLRHETVYRPA

SEQ ID NO: 288329 - protein, 464 aa, unidentified
MKTKLHPQNKKSPKIKLDALPLLEPNAAGIDIAHREHWCAVPAGRCEKPVRSFGTFTEDLETMADWLHECGIKTVAMESTGVYWIPAFQILERRGFAVCLVNARHVKNVSGRKSDILDCQWIQRLHSYGLLNASFRPADPMCVLRSYLRYRDELVGARSVQCQHLQQALQQMNVQLHQVLSDVTGVSGLRIIEAILTGERNVRTLASLADRRVRASQATVEKALRGDYRAEHLFVLQSAFDLHQTYERKIHLCDEQILAQLATLPARVDLNEKPVPPRKPGRPAFLDKVAGTDLREELYRCAGVDLTAIEGIGVLTAQVVLSEIGLDMTRWRSEKHFASWLGLCPDHRISGGKVLSSHTRHVLNRVADALRMAATTLQNSKTALGAFYRRMRARLGAASAITATAHKLARLIYRLLKHGELYVRQGLEEYEHKYRQRLLYNLKKTAASFGFELAQKQHLPPSVS

SEQ ID NO: 288330 - protein, 342 aa, unidentified
MQVTTIGLDIAKNVFQVHGIDANEKVVVRKQLRRSQVIAFFAALAPCLIGMEACATAHYWARELTKLGHKVRLMPAKDVKAYVKRNKNDAADAEAICEAVRRPTMRFVQIKSAEQQGQLMQHRTRDLLMRQRTQLINALRAHLAELGIVAAKGDSGVKELLAIVADDGEARLPIDARASVIVLAAQLEAVQTVIGAIEKRIKMQHRSNEASQRVETIPGIGVLGATAIVATVADPTVFRSGRDFAAWIGLVPRQDSTGGKQKLGPISKQGDQYLRRILIVGAISVLRRALQNPGKYPWLTQLLARRPFKVVAVALANKMARVAWALLAHGGTYRAPELAEAA

SEQ ID NO: 288331 - protein, 334 aa, unidentified
MNQKYFIGIDVSKEKLDCALILSDYNVVAECIIPNNLKRIKLFLKSTLKKQKIEADQLIVCCETTGVYTVPLRKICMELNIGLWEEHAYRIKKASSDMRGKSDRMDAMRIADYSVRYQDKMIPYKEPSEVIKALDQLSKVRDTFLTQKVAMENQLSETESHDPEAFKELLKHYKPMLAQIESQLKKIDMEIQDLLNQNEDIQRNINLMKGIPGVGKQTALQFVIYTHNFTLFESAKHLACYAGVVPFQNESGTVVKRARISKMASQKLKSLLHLAAMSAVRSKSELKAYYIRKVAEGKNKMSVLNAVRNKIVQRIWAVIQRQTPFLPLENFRPI

SEQ ID NO: 288332 - protein, 360 aa, unidentified
MTTYYIGADVHSNSTELAIEKRNKIVARYSVPTTIPAISNVLDSLQGKKHLAFEEGPMAGWLYRNLNQKVDKLIVCDPRRNKLISSDGDSDDKIDAGKLALLLRGGYLRAVYHSDNDQRAELKHWVNLYHDRVRDAVRNINKIRARCRMFGLTIPRSALRDPAHRLKWLFKINHPALAKQLKMLWIGYDATAKQARIAKRQLSVLGKNHDIIKLWDRLPGIGLIRATTLFAYLDTPWRFKRKNKLWRYCGVGLQRAASGTDKKGRPKPARLRLPWAVNRTLKNAVLGAAISAINQKDNVFKDYYERMVQDGMITSNARHAVARKMLTVMWGMWKTNSRFDEKLLYLPSELSKPTASVSSR

SEQ ID NO: 288333 - protein, 411 aa, unidentified
MRLFVGDDWAEDHHDVEVMDEAGKVLARRRLPEGVAGMAQLHALIGGLLGEDADDSEVLAGIETDHGPWVMALLAAGYRVFPVNPQQSARFRARHAVSGAKSDAGDAHVLADMVRTDSHQLREAAGDSPEAAGIKVLARTHKTMIWERTREVQRLRHQLLEYFPAALQAYGDLDAPDALELLGRAPDPGQARKLTRAQVSAALKRARRRNIPDKADAILAALRSGQLAQPPVLAAAYAVAVRSLIAVIIALNEQVSVLEGQVREHFGRHPDAEIYLSQPGIGAILGARVLAEFGDDPARYRTGKARRNYAGTSPITRSSGKRKVIAARFVHNDRLVDALNAQAFAALSASPGARACYDELRSRGIGHNDALRRLANRLVGILHGCLKTRTLYNEATAWSHRGNLPQSPAAA

SEQ ID NO: 288334 - protein, 366 aa, unidentified
MEMYVGLDAHSKRSVFVIEAEDGRVVARGDIPTTPAGFRQLRQEHELPAETPVALETGTVAFYAARELARVGLRPVVIDAHEVRVKAHRPRQKSDRRDAFELCEGLRRGQYRAIVHVPPAPIGALRETLSRRRHFVAVRVAEVNAVKRLLRAAGLGHLSKSLGTEAAWEKLLAALATEPALRTYVAQHHALWRCAREQIVALEETLAAQPTTIATAAARLQTVPGVGPLVSLTAVAVFSDVHRFPSAKHAASYAGLVPSTDQSGDRDRHGHITKRGSAALRTMLCEAAHHAQRPTHPLHPYFARVCASRGYTMAVVAVAHRVCRILFALLRDGAEFDLAKLAVEKGPFRRTTVQRYRLKRGAARRA

SEQ ID NO: 288335 - protein, 398 aa, unidentified
MDLPVYYELETNNGNRDYRIQIGGHYMNYNTVYVGMDVHKESFTLCSCKYEDEKASHYQRTPASYKNVLRYLAFLRTIYGEDTRFVCGYEAGCLGYSLYHQLENFNVECVILAPTTMLEQRSKRRIKTDKRDAEIIAKSLAQHNYSPVHIPTKMDNQTKEFIRMRDDHKAELKKIKQQILAFCLRQGYQYDGSGNWTAKHVKWLRSLKTEGLYKEILDEYLLTYTILTDKLNRLDQRIEELASKEEYKESVSKLTCFLGIKIHTALSVIVEVGDFQRFVSARKFAGYLGLVPGQHSSGDDRNGLGITKAGNTHVRRLLVESAQSYTRGKIGYKSRVLRSRQAGNSPQIINYADRANERLRRRYYQMVLKDGKKYNIAKTAIARELACFIWGMMTDNIY

SEQ ID NO: 288336 - protein, 410 aa, unidentified
MSYTIAGIDVHKSVLMVVVADVSEAELQFERRRFGATASELAALATWLRQRGVREAVMESTAQYWKPVWLALEPDLALHLAQAQSNRAPGGRKSDFRDAERLVRRLVADELFLSYVPDPEQRIWRTLTRSKLQLVRERVRLQSQVEALLEEGRIKLSSLISDLFGLSGQRILHALADGEADPQRLAGLGDRRLHASREQLADALNGTLGAAHRAILNLFLQRVELIDQQIAKLNQLAADRLQAHQDAVARLAAVPGLGVDSAQQILAEVGPTAQAFPTADQLCSWVGVCPGRNESAEQNRSGRCAKGNRYLRRILCQAAQAAVKSDGTYLQSVFRRLLPRLGYVKAIWAIAHRLSRIVWKILHQGVAFVEYGQLGTPEVQKRRARNLILALKRLGYTVQITPTTPAPAAG

SEQ ID NO: 288337 - protein, 332 aa, unidentified
MNKFTNTIGIDVAKDKLDTHDYILNKHHVFKNSLEGFVKLLSWVQANHANQEEATVFCFENTGIYSLNLAMFMEERKLAYSMLPALEIKRSMGITRGKNDKIDAYKIAEYAYLRRESLKPTKLASNNLIQLKELLTIREKMVKHRGAYQSHLKGLSRFYTPEKHPKIFQSQERMIQELNKEIEGIEKEMRKIIEEDPSLKENYHLATSVKGVGLIVGASLIVYSDNFTKFKTWRKMASYAGTAPFPYESGSSIKGRNKVNDMANKQIKALLSNAAASNIKHDPETRLYYEKKIKEGKNKMLVQNNVKNKIIARVFATVRRGTPYVNILAYAA

SEQ ID NO: 288338 - protein, 336 aa, unidentified
MKNYVLFTGIDVSKDKLDICYVDKNGNVLGSKVIDYKPKNIKSIVKDLERLGYNLTQTLICFENTGVYSIKLGEVLSELNAYYSEVSALEINKSKGITRGKDDKTDAKMIALYALRNIDKIVLSKVTDEAIQELKLLFAEREKIQKSITSLKMTQENEGRVNSKAYESVQKINQQTRVALKNSLKAIENEIERVFKEHPELKKNRDLLKSIKGIGTIISAYLVMITHNFTKFKNSRKFACYSGIAPFEHSSGKSVRGKTQVNHFANKKVKALLSMAVQSAKKYNSQIKAYFEKKKEQGKHILLISNNIKFKLVNIAFAVIKRGTPYVDIYKYATVG

SEQ ID NO: 288339 - protein, 321 aa, unidentified
MATADVVVGIDVAKEQLEVMVLGVAWTAQAFPNDPEGHTVLAAALAPLGVRLVVLEASGGYETAAACALQAAGLSVAVINARQARDFAKSLGRLAKTDRIDARTLADWAEVLLRQPDLARYIRPLPVEEQEHLAALVTRRRQLVAMLHSERLRLAQARRLPIRTSVEIMITTIKAQIDDVEAQMKRHIETHHAAAAKLLRSMMGIGFVSCANLIADLPELGRLTRRQISALVGVAPYAKDSGRMRGLRRIAGGRFELRRVLYMAALVAKRSNPIMKAYFERLVAAGKKPKVAIVACIRKMVTILNAMVRDQKLFTLEAAAA

SEQ ID NO: 288340 - protein, 323 aa, unidentified
MSQPNPLCVGIDVSKTTLDIATANNEFAQFTAGNDTDGFELIIAELRKHSVALVLMEATGGLEAAVACSLQAEGFDIAVINPRQARNFSRAMGYLAKTDRIDAKVLSQMAEVINRHPERERFIKAIPDAERQILAAMVVRRRQLITMLVAERNRLHPTHPQNRKSINTIIKALEDELSRIDEAMNNHIKTHFKELAARLSSIKGVGAMTVATLLSEVPELGSLSRREISALIGVAPVNRDSGTMRGRRTIFGGRAGVRTALYMAALVATRFNPVIKAFYTRLITAGKVRKVALVACMRKLLTILNAMIRKNEEWRDSYHEFSL

SEQ ID NO: 288341 - protein, 347 aa, unidentified
MDYFAGLDVSLETINVCIVSAAGDVLLEKKIAAEPAAIVNLLKSFGSPFKRIGLEAGPTSSWLYGELRAAGYGAICLECRHVKAGLSAMRNKTDRNDARGIAQLVRLGWFRQVHVKSEEAQRTRMLLVNRQQLLTKALDIENSVRGSLKVFGLRVGVVARRGFEARALELVADDPILLAITKPMLRVRQVLLEEFERLDRLCQQLARRDPVCRRLMTVPGVGVVVALTYRTGVDAPERFSRSRDVGAHFGLTPKRYSSGQTDYDGRISRCGDEMVRTALYQAANVLLHHGRWSSLRSWAMRIAKRGSVKGAKVALARRLAVVMHRMWTDGTDFRWSDTSRMTAPTAA

SEQ ID NO: 288342 - protein, 442 aa, unidentified
MRLMVKCGAGIDVHKKNVVVNCRRVEGKEVETETRSFGTTTPELLQMTDWLASWGVTDVAMESTGVYWHPVYNLLEGSYEVKVVNAKHIKHVPGRKTDVKDAEWIAELLSYGLLKASFVPEKPQRDMRDLTRYRTKLVQERAREANRVQKLLEGANIKLASVATDVLGVSGRLMLKALIEGNASEKEMAEMAKGRMRSKIPELEKALTGIVSDHHRFMLGEQLAHIDFMDGQIANISQEISVRLEKMSQNQQPPTPSEGANKTEAVEDVEKPLTWQAAVELLDTVPGINQRAAEAILAETGIDMGQFPEDKNLTAWAGLAPGNNESGGKRYSGRTRKGNQTLKTTMIQVAHAARRKKGSYASALYKRLVGRRGKKRAIVAVARSLLVSIYHMLTRQEAYKDLGSEYFQERRKENKVDYLTRQLSKLGYEVQLMPQLDPTPAE

SEQ ID NO: 288343 - protein, 397 aa, unidentified
MLRVIHERGAGLDIHKKTVVACVLVTKQDGQVQQEVRTFGTTTGEILALAEWLKSHGVESVAMESTGVYWIPVYNLLEGDFELVVVNAHHMKAVPGRKTDVSDAEWIAQLHRHGLLKGSFVPPKPQRQLRELVRHRTNVVERRSQSVNELQKVLETGNIKLASVVSEITGVSAMEMVHGLIAGQQEPQLLAELARGRLRDKKPQLAAALNGRLEKHHRFILSQLLADISFCEEQILELDLEIMIQMKDYQEVIIIAEMGTDTSRFGDAAHVVSWAGMCPGNNQSGSKRRTARVRQGNKSLKRVLVEAAHAAGRKKDSYFSAQYHRLAARRGKKRAKVAVGRSILETAFHMIQRQSTYNDLGSDYFDRRNPEKLAKRLAERITKLGFKVSYTPLVQAG

SEQ ID NO: 288344 - protein, 423 aa, unidentified
MEEIFGEEEEAEPVARVAALDIGKATLTACVRVPHEDKPGRRRQEVRTFATVTGSLLELRDWLTCQGVTLCVMEATSAYWKPPFYLLEDAIECWVVNARDVKNVPGRPKTDRLDAVWLAKLAERGMLRPSFVPPPWQRELRDLCRYRRTLIQERTREKQRAEKLLGDTQIKLSSVISDIFGKSGRDMLDALIAGQRDPHVLAELARGSMRGKKSVLQEALTGHFRDHHGYLLKMMLDRTDALTAQIEALTGRIDEAIALFAHQVTQLDEIPGIGKTGAQELIAEIGTDMTRFPTAGHLVSWAKYAPKARQSAGKNKPGTTGKGNPWIGGTLGEAGIGAARTKTFLGSRYHRLARRRGKPRALVAVGNSILIIAWHLLSDPDARFTDLGPNWHDRLAPLRRKRQLVAELERLSGKKVLLQEATA

SEQ ID NO: 288345 - protein, 423 aa, unidentified
MNHSTLCVGADVHLDEIVLCVVDKADGHQVIDRFRVTNNLPGAQAAATVIAETATRLGYGRIQIGWEATGMLWIPFHRYLCRCPQLQPFELELVCFNPQLITKFKDGLVLRRPKNDKLDASAVAARLRFGEWPLSYVPGDFWQGLRRLTRYRFHLSRALSREKMRFQAYAFLKCSDWKRVKVFSDVFGATSIALLTDFTVAQLKEMSHDQLVDLISRRGRGRFQDPSATSRKVRQALRSSYPIDPQMDDMVTAALATAWEHIRSIIRSMKRLDRLIAHYIDPLPNPIITVKGLGAVITAGLLAEIVDILRFAEHKHLAQYAGLTWEKRSTGRFVSQNTRLTKVGNKYLRYYFVLGADKLRLFNLEYKAFYWRKYNEVSKYQHKRALVLTARKLVRLVHALLTKNVPYVRPQMMTNLQEDDSLQ

SEQ ID NO: 288346 - protein, 355 aa, unidentified
MESVKYIGFDVHQTTISVAVLNAEGQLVMQSVLATHAAAILDFLHGLRGTLHLTFEEGTHSAWLYDLLVRQVARVVVCNPRKNALLIAGNKSDTIDARKLAELLRAGLLSPVYHGESSTMTVKQLGRSYAALTEDTTRVMSRLKALYRSQAIACAGKKPYGRRHRGAWLAQLREAGLHRRAERLYQQFDILQQLRREAKQELIVECRKHEAAKWLRTVPFLGPIRAALLIGRVQTPHRFRTKRQFWAYCGLALETRSSADYRFSDGQLMRTKKPVFIRGLNINHNHDLKNLFKGAATAASAMEGRFRLFYEGLLGKGMLPAMARLTLARKIAAIALHVWKKGEVFDAERLKPQAA

SEQ ID NO: 288347 - protein, 428 aa, unidentified
MPYKIAGIDVHKRMLAVVVSDVEVDGGYAFERRQFGSNPAQLRLLADWLLEQHVEEVVMESTAQYWQPVWGALERYWTPTCKKREGAGAMSGTQHLAQARSNRARQGRKNDFVDAERLVKRLVANELTLSFVPDPEQRLWRTVTRTKYQLTRNRGQLQNRLEALLEQAHIKLSSLVSDLLGVSARRMVQALADGETDPAALAALANYRLRATQEQLRDALGACQELNPVYRRLLKLALEELQLIEKQISQLDQEIADMLRPHQDQVQRLAEVPGLGVDSAQQIIAEVGPTAATFPSEGNLSSWVGACPGDDESAGVSHSHRSPKGNRQMRRLLNQAANAAVKYKGGIFEILYRRYVPRLGHKQTIGVIGHRLCRLIWKILHQGVRYEERGPDVRKKSQRYRAGRMIRELQSLGYRIEQANSQSAEIPA

SEQ ID NO: 288348 - protein, 327 aa, unidentified
MYVCILDTTGQVLLHRNVKSTPEAFLESVAPYREDLVVAAECMFTWYWLADVCAAEDITFVLGHALAMKAIHGGKAKNDKIDSHKIVGLLRGGLLPQAYVYPDAMRATRDLLRRRLHLVRKRGQLLAHIQNTRAQYNLPAFGRRLAYPANREGVREHFPDRSVRKSIEVDLTLIEQYDTLITDLELTIVREAKRHDGDAFHRLRSVPGIGKVLALTILYEIHDITRFDRVQEFASYARLVKCKKQSGGKILGTSGAKMGNVHLKWAFSEAAVLFLRHTKDGKKLLAAIEKKHVKGKALSILAHKIGRAVFYMLSRGTVFSTEKFLAA

SEQ ID NO: 288349 - protein, 424 aa, unidentified
MKHQLFIGIDRSDQCLDSCIIDTKNNIINQLNVSTNPRDLTSWCAEILKLKDSKNAESIAICIEQPCQNLTHFFKQYEEFTLYLINPVILKRYRETFNLSRSKDDKKDALHLALLISEHHEKLTPWKALEPNYQKLSMLTEKRRQLINARTALSNRLTQNLKEYYPQAIELLGRQLSSSISIAFLRRWTSLQKLQKSQLSTIKKFYYLNHCRSNTAIDKRLKIIPAAIPLCSDEVIIEVHSIMTIAYIDQLAALEKNIQRLDDLIEETHKQCDKHQIIESFPGAGQHLSPRITAFMGLHSEGWEKAEGLQCQSGVAPVTKQSGKTHFVHKRYACSTFVRQTFVEYAGQSYKYSTWAKAYYEQQKSKGKTHQIILRGLAYKWQRIILKYWKNGELYDEEKYLKALQKSGSDLTEIIRNQPSKKCA

SEQ ID NO: 288350 - protein, 349 aa, unidentified
MRKLYVGIDLGCKTCAGAVRDSKGKVLETCGFPTSAENLIDFVSNLKGEVRVLIEECELAGWVYRTLLPRVHSVEVSDPRHNAWIAKGKRKSDPVDAAKLSELLRGGFYRAVHHPEEEEMATFKIAVQHYDQMTKTTTRLQNQIRARFRQQGMVFEGKGLYGASGRQKAIARVKSEAIAEILLQDFRLLDDAQKERAMARALVTKLSRNFPVIKRLERIPGVATISASRFVAYVQNPHRFNTKGLVSFSRLAVVKKESGGSSIGREHLSKEGNGAMKALSRTVFNGAMRARRTNGIRDYYQGSLRRTKNETHARLNTQRKILAVMNAVWRDETEYSDYLVTGDGAKRPL

SEQ ID NO: 288351 - protein, 342 aa, unidentified
MQVTTIGLDIAKNVFQVHGIDANEKVVVRKQLRRSQVIAFFAALAPCLIGMEACATAHYWARELTKLGHKVRLMPAKDVKAYVKRNKNDAADAEAICEAVRRPTMRFVQIKSAEQQGQLMQHRTRDLLMRQRTQLINALRAHLAELGIVAAKGDSGVKELLAIVADDGEARLPIDARASVIVLAAQLEAVQTVIGAIEKRIKTQHRSNEASQRVETIPGIGVLGATAIVATVADPTVFRSGRDFAAWIGLVPRQDSTGGKQKLGPISKQGDQYLRRILIVGAISVLRRALQNPGKYPWLTQLLARRPFKVVAVALANKMARVAWALLAHGGTYRAPELAEAA

SEQ ID NO: 288352 - protein, 412 aa, unidentified
MEVVYPCCCGLDVHKKSITACVLWAEAKGKSRKQKKRFGTCTHDLLQLADWLVQCGVTHVAMESTGVYWKPVWNVLAEQFEALLVNAQHIKAVPGRKTDQKDSEWIADLLQHGLLRGSFVPPRPTSELRDLTRYRVSLVQEINRIANRIQKVLEDANIKLASVATDALGASGRAILEAMLAGEQDAARLAEMAPGKLRNKIPELQLALEGRMTEHHRFLLRQLFDHLRFTESKRSEIEQEIDKRMRPFQDEVIRLCTIPGVDRVTAWGMLAEMGMNMNQFPSSGHLASWACLCPGSFESAGKRLSGKMRKGNVSLRRCLSQAAWAISMMKNNYLSTLYRRIAARRGAKRAIMAVAHALLEIAYHMLKRKEDYRELGADHFDRIDVKRIRRSLVRRLERLGHKVTLEPLAQTA

SEQ ID NO: 288353 - protein, 434 aa, unidentified
MPNQTHSTTTSTLPVFGALVGLDWGDEKHALSLCAGTTTTIERATLEQTPEALAQWANALRGRFPNSKIAVCLEQARGPLISSLLAYEHIVLYPVNPKTLARFREALYPSRRKDDPIDGDLLLDLIVKHRDHLRPWQPDTVQTRQLALLNEQRRHFVDHRTGLTNELLSHLKAIFPQALDLAGADLASALATDFLKKWSTLQSVQKVKPAVLRKFYYGHNSRSEELMSQRLALVKNAVALTADPALLAAHSLAIQTLAAQLQALRPCIEQHEQQIGALFAAHPDAAIFESLPGAGPALAPRLLTSLGTDRSRFAQALAVSCYTGVAPVTEKSGKIQNWVHLRWSCPIFLRQTWHEFANSSRKFCPWAKACYDQCIERMDHHEAIRKLAYKWQRIVWRMWQDRQPYDEGRYLRSLQKRGLKTYAALPVEPVKLGE

SEQ ID NO: 288354 - protein, 331 aa, unidentified
MDEVRRFVGIDVAKAALDVFIGSAGTAFSVANDEVGVRELLRQMKPADFVILEATGGLETPVASALAAAGIAVAIVNPRQVRDFARATGKLAKTDRLDAEVLARFGEAVRPEARPLADEQAQALEALVTRRRQLVEMLTAEKNRRARAPKVLHRSIDEHIRWLKKRLSGFDDELGELIRNTPLWRERDELLRSVPGVGKVLSSTLLAQLPELGMLNRKQIAALAGLAPFNRDSGKLRGSRCIWGGRAQVRRVLYMATVAGVRSNPTIRTFYLRLRTNGKHAKPALIACMRKFLVILNAMLHDKTHWQTPALTSPTSPLSPLLAAVSEHGCC

SEQ ID NO: 288355 - protein, 411 aa, unidentified
MDKIYDNCCGIDVHKKLIVACFRKGNKQEIREFGAVTRELLEMADWLREGGCEIAAMESTASYWKPLFNILEASGLNAMVVNARHMKAVPGRKTDVKDAEWIADLLQHGLLQPSYIPNKDQRELRELVSYRKSLVGERTRELNRLQKMLEGANIKLSGTVSDINGKSARSILEYLLTGASVDSAKYDEMYEKNIIAHNLKATKEQIIDDLNGVMSSLQRRMMKELLSHLDELNTHIRNLDDEIDSFMKPEEKQASQAIQDVTGIGNTSAQAIISVIGTDMSRFPTDAHISSWAGLCPGDNESAKKRRSGKTRKGNALLRTTLITCAHGAVKNKKSYFYAQFMRVSAHRGKKRAYVAVAHSMLIAIYHILKDGVVFKDLGADYYNQFNKERKINAYLKKLKALGWEGPVVAA

SEQ ID NO: 288356 - protein, 342 aa, unidentified
MQITTIGLDIAKNVFQVHGIDAAEKVVVRKQLRRGKVIAFFEALPPCLVGMEACASAHYWARELRKLGHEVRLMPAKDVKAYVKRNKNDAVDAEASCEAVRRPTMRFVGVKSAEQQGRLMQHRTRDLLLRQRTQVINALRAHLAELGIVAAQGREGLKELLAVIADEKDDRLPIDARASLMVLAAQLQALQTMIGSIEKRIIAQHRASEESKRVATVPGIGTLGASAITATVTDPSAFRSGRDFAAWIGLVPRQDSTGGKQKLGPISKQGDRYLRRILVVGAIAVLRYAKQNPEKYPWLTQLLARRPFKVVAVALANKMARMAWALLAKGGTYRAPALAAAA

SEQ ID NO: 288357 - protein, 328 aa, unidentified
MFYLGMDVAKAKLDCCLLLDEASGRRKTKAVSNAKSGIVDLLAWVAKQNVSPGALHVVMEATGVYHEQAALALADAGISVSIVNPAQVKDFGRGLAVRTKTDGVDSFVLARYGALLKPSAWTPPAPEARMLQALLSRREAIAQDLQRERNRQEKADATDTPERIRQSLADSIEFLVKQLAELQQDIDKHIDRHPTLKDDMALLQSIPAVGPQVGGNLLSVMHSHEFSSAEQLAAYLGLVPVERQSGSSVLGRARLSKAGPARIRAVLYMAAVVATRYNPHVKAVYERLLARGKSKMSALGAAMRKLVHLCFGVLKTRKPYQHNYAKIA

SEQ ID NO: 288358 - protein, 393 aa, unidentified
MRISVGTDVAKETHWVVALTETGEVLLDHAVDNDPAAIEALIAELGALPGECTIGLDVLGGIATLLSAMLLAAGQRVVHVPGLAVNRARQGTTGGETKSDPRDARVIAEQVRSRRDLRSIAVEEEPLAELQLLVGRRRDLVAEQTRRLARLHDLLSRIHPGLERALDLTNKSGLCLLTRYVTPAEIRHAGRARLARHLRASGARHVEAIATAALEAAQRQQIALPGERVAAGLARELAREALAVRERLGEIDAELAQVLAVHPDSTLIRSLPGMGVILTAEFIAEVGIRDRFADADALAAAAGLAPVLRQSGKVRFLRRPLGGDKRLKRVFYQAAFCSLSCPASRAFYARKRREGKRHHQALLALARRRVNVLWAMLRDRRPYELQEPRCGAA

SEQ ID NO: 288359 - protein, 343 aa, unidentified
MQISTIGVDLAKNVFQVHGVDGQGKIVLVRQLRRHQIMEFFRRLPSCLVGMEACATAHHWARELMKLGHTVRLIPPSYVKAYVKRSKNDAADAAAICEAVTRPSMRFVPIKTAEQQATLTVHRTRDLLISQRTQLINALRAHLAELGFVTNQGRDGVTKLIAIVTAENNLQALPAMMREALRVVVAQLASLQQQIRELERSIHAQHRASDVSQRLESIPGIGVIGATAIAATITDPNVFTSGRDLAAWIGLVPRQSSTGGKERLGGISKQGDRYLRRLLVVGATAVVRHARRHPDKHPWITKLLAKKPAKLVAIAVANKTARIAWAIMNKGGIYRTPALAAAA

SEQ ID NO: 288360 - protein, 352 aa, unidentified
MNIDYVGVDYHTKFAVATRMNRDGNIISTDKIDNTKEDIRGYLSTLPSGTKVALESTGNWYAFVEWAHDLPLDIVLSHPQKTRVIAESRIKTDTINSKVLADLLRTNYLPQSYLAPADVRDIRELIRFRTTIVRMKALFETKIYNAVYKNGEKIMATRSDGRKARAEIAKMNLRPVYQDEINSCLAICDYFKTQIKQYDEEVERKATMDDDCKLLMTIPGISFFGALLITSELGDWRRFASSRKLASYAGLVPSTYSSGGRTRHGAITKQGSKNLRFILLQAITHLARRDARFGKMYTRIKIKHGAKTARIAVSRKLLCVIFAMLRSRQPFQITKDRQHLKAAQSVPTKRRE

SEQ ID NO: 288361 - protein, 336 aa, unidentified
MNNVPFRCGLDIAKQIFAVHAVNSNEKPVFQKLIPRRKVLSFFAQLPPCIIGIEACGGSHYWARELRKLGHEIKLISARFVIPYRRKAKNDLNDAEAICEAISRPSMNYVSIKSEEQQTILMAHRIRFQSIATRTALTNQIHGHLLEFGIVVSKGRKKMRRDLHEVLEREGIPALLCELIHDLLAAVDREEERIEALDRTIEQWVKRNEIASKLLQLDGVGSLTASAIVATAGDAKVFKNSRQFAAWLGLVPRQHSSGGKSRLGKITKAGDRYLRTLLIHGSRTVLLMSKNGRGKHSDWVESLRERRPDNVVAVAYAAKQARMAWAIMMGKEAEAV

SEQ ID NO: 288362 - protein, 378 aa, unidentified
MSDAITLVNKAADKLFIGMDLHNNTSTFVVKDKEGKLIDSAKVLTDKNDVTRHINAIKRNGDGKELSLVVEPVSQWYYYADLIENLGVDVRLAHPMEVKAIAQAHIKTDKIDAGVLADLLRTNFLPEAYFAPAEVRGWKEQCRFRASIMNLRTQTKNKIHAILFKHALKHNFSNLFGKGGRRRLAALELKEPFKSNLDKYLNLVDYLTGEINCAEERITNTVISCPQAKLLISIPGISYCSALTIMAEIGDINRFISAKHLQSYAGLIPSTYNSGDKQIHGRITERGSKWLRWIMIEAADHQVNGKRIPGFGAYYNTLKKRKGSKTAAVATARKLLAVAWRLLKDERPYEVIDPRCWKSGPLASKISSVSPVVSMTAD

SEQ ID NO: 288363 - protein, 355 aa, unidentified
MKRGHFIGVDTHCLSCEIAVINSSGEVQRRDVCPTGIPQLLKVIETVSRPRFLVIEEGPLANWLWRSLHHAVDRLVVSEPRRNRLITQEGDKDDDLDAEKLAQLLRGGYLKEVHQVGTLERALFKQQVALYHHRVRQRVRESLRISALFRQHGVMIREKDFVDLAERPSLLARVPATNNLPAMLELLWSSYDALVAAEEAWRKRLVAMAQEEEVVQRFVALPGISWVRAATLSAYLDTPWRFRSKAALWKYLGIGLLRRRSGKGPEYLGVPEQTHRLLKGTILGAALSAVVSGNNPFADLYGRWLAQGLSSKLARRNVARVQAATLWGMWKNGSAYRPEWVGVAAAAGPATKVSR

SEQ ID NO: 288364 - protein, 420 aa, unidentified
MKKRVYKATNVKKINMEKLCQEIDGKDIVLGVDVAKEDFMAAIMDADRKVIKTIKWKHPFESHLLLDLILSKLRWHSLEVAMEPSGTYGDSLRAQFLGNGISVFRVSPKRCHDAAEVFDGVPSMHDAKASAIIGRLHLDGASEEWPMAEDSQRELIAVIRTMEMYDDAYHRNINRLEGLTMRYWPELTKHLKLQSATLLELLMAFGSPEYVAQSSQAAMALMRKTGGSALKDDKIKAVLESAPVSLGVKCIEAEREQVRTLCHEIRRLQKSRNQARSQVEEMTQDIDCVKAMCPVIGKVTAAVLYMTLGNMAGYDNAGSVAKSLGLNLKERSSGKHKGQLRITKRGSGSARMYLYMAVLRLVKNNTIVKAWYQKKIIRDGGVKMKALVAIMRKLAGALWHVGKGAKFDASLLFDTSRLTV

SEQ ID NO: 288365 - protein, 347 aa, unidentified
MLHVGLDLSRTRVDVHAMDESGTSVLVTRAAPDAGGLASLVDRLGGFGQPVTAVIESMNGARFVHDQLELRGWTVEVADAVKVKGFGPLACKTDKIDAWVLAELSRRDLVPAIWLPSPGVRGDRERARWRLHLVRHRTALKNRIHATLMAFGHPCPVSDLFGVAGRRQLDHLELPEPWTGDVVAALRLIAVLDGEIDACEAALREAGADHRYVPTLMTAPGIGWVLGYTIAAEIGDITRFPTPKKLVGYTGLCPSVDQSGGHDWRGSLAKNGPKYLRWAMIEGAVHAARHPVYAGRYQRTKTRLGRQRGPSVARVDIARKLAEAIWHMLTTNKPFAPAGATTTALAG

SEQ ID NO: 288366 - protein, 451 aa, unidentified
MNTTQTPQLCHEPFGLVNPDAAGLDIGSAEIWACVPADRDPQPVRVFGTFTPDLEALADWLKACGIKTVAMESTGVYWIPPYELLEARGFEVYLVNARHVKNVPGRKSDVKDCQWIQQLHSFGLLSASFRPEAEMCALRAYLRHRANLVDYRAAHIQHMQKALQQMNVQLTQVLSDIAGETGLAIIRAIVAGERDPVKLAQMRNPRCAHSQNEIAKALTGHYRPEHVFALKQALALYDFYTAQIQECDLDIEQHYSVFKPVVDAEQNPLPPSRKKNTHSKNAPSFDVRTQLYRLTGVDLTAIEGLNEVTAQTILSEIGTDMSKWSTEKHFCSWLHLAPHNDITGGKVVRSRTLKGKNRAAQAFRLAAQAVGRTDTGLGALYRRQRAKFGPEAAIVATAHKLARIVYHLLKYREPYQEMGREEYERQVREREVAQLTRKAAKLGFTLTPQAA

SEQ ID NO: 288367 - protein, 437 aa, unidentified
MKNYTALEVGNSDYLGVVTRNRNPFDSKPAQISDHIDRNWKMALAHIQHLPCTARNLFHRLTIIENTACEGFVNGMVAPYILCHSGMINRHYLSGAAIMNVKTIGIDLAKEVFQVHGIDEHGKRLFNKQLKRAKMLSFFANIPPCLIGMEACASAHFWAGKLMSMGHNVKLMAPQFVKPYVKTNKHDAADAEAICEAVTRPNMRFVPVKPPEQQAVLALHRSRQSFIKQRTAQANQTRGLLAEFGIIVPRGIQQLHLPEILEDADNSLPSLFRVQLSLLQHHMVYLFDVIATLDKQIEQCYRQNALCQRISKIPGIGPITATALIATIGNASNFENGRQLAAWSGLVPRQHSSGGKHVLPGISKRGDIYLRTLLIHGARAVLQSVKRKQDAISGWASRLLARRNNNIASGALANKNARIVWALLAKDQEYYAPIMNV

SEQ ID NO: 288368 - protein, 268 aa, unidentified
MTRYVGVDLHRRRSVIVVLDSDGTELWTKRIDNDPLALGLEIEKAGPDPEVVLEATWGWYWAADVITEAGGSVHLAHPLGIKGFENRRVKNDRVDARLLADLLRMGRLPESWIAPEGIRHQRELVRYRRKLSQLRAGLKAQVHSVLGKEGLLAPINHLWGPGGSVWLDDTDMADAYEARVRSLRRLIKLYDTEITKLDACIADMFKGDEGYETIQQLNGVGPVFAAIFTAELGDVTRFKSAKQVTSWAGLTPRHRESDTTVHRWSITK

SEQ ID NO: 288369 - protein, 408 aa, unidentified
MDLTPMHKRVIALDVHQAKITACAIVEHEDGRVEVSKRDFGAFKRDRRALAQWSLEIRPEVVVMESTGVYWKSPYAALESVGIIAWVVNARHVKAVPGRKTDMADAQWLATLARSGLLRASFIPPVDLRELRLVARQRQKLVGMCSAEKNRLHKVLVDAGLRLNVVISDVHGPSARAMIKALIAGQTLHEVLDQKGRLRASREELFEAVSTERFSARHQFVADQIMQHIEYIEQRVAQMDQYLLEGLKAYEPQLRLLQTLPGIDLQGAAMLLVEIGADMGVFGSAERLASWVGICPGNNESAGKRKTGAIRKGNAWVRRLLCEFAQAAARTRCALRDKFDALKIRKGHNKSVIALAHKMLRTIYAMLTNGTPYQDRSVDYEALSVARNAPRWIKMLRKHGFMTITATA

SEQ ID NO: 288370 - protein, 370 aa, unidentified
MAKSTPLFVGLDVHKDSIAVAHAQGQSADPPVFLGEIGTRQADLAKLIRRLQAKTSKLVFAYEAGPCGYILHRDLTGQGFDCHVVAPSLIPKKPGDKVKTDRRNAVDLARLLRSGDLTRVYVPTVEDEAIRDLCRARDAARLTLKNAKLRLKAFLLRLGLHYVGRADWNDAHRRYLAKVVCPTPAQQIVFQESVRAVDEQVDRLARLETELRELAPAWRLYPVVQALQALRGVQWLVAITVVAELGDLTRFTSPRQLAAFVGLIPSEYSSGPSRRQGGITKAGNGRARRALIEGAWAYRHPAKVSQHIQTRIDALPKPIQDIGWKAQVRLCKRFRRLVARGKHPNVAVTAIARELIAFMWAIATEVPVTV

SEQ ID NO: 288371 - protein, 377 aa, unidentified
MVRKMVANKKRGTVKGCKMNSIVAGIDLGDRESLTTVLSPIGDVTDRFTFPMNEEGYAYFANRVPKEARVAFESTIMAYPIMRALKTHGYMDVTVAHPKELAWIVRSKKKNDRVDSLKIAKLHMVGMLPESHLLDREEQIVRDLLVQRVKLGVEIGRLKNSVIGYLKREGVYDGLPKSRDTFSLKRRQTIHSLRFNDNRDLILNTMLDRLEFLEKQCLPLEDNVRENARVNDDAKLLMSIPGVDCYLGSLISSFIGDVNRFPSDDHLASFFGIVPTSRDSADVKRRGKMTKDGSSIARWALSIMVDTVTQHNEPIKDYYQSVKKRTGSGKLAHVSTMRKLTRMLFHMLKTREHWKWENPLLTERKIARLEMPGGVGS

SEQ ID NO: 288372 - protein, 416 aa, unidentified
MEVIVSRCAGLDVHKNTVMACVRGPGPNGGRTSTVRQFRTFTAGLCQLRDWLVAEQVSQVVMEATGVYWKPVWHVLDPTPGLELMLVNAYAVKNMPGRKTDVADAVWLAELGECGLLRPSFVPPPVIAQLRDLTRYRKKLIEERARETQRIQKLLEDAGIKLDSVVSDILGVSARQMLEALIAGVRDVAALAELARTRMRPKIPQLRQALEGRFGAHHALMLRMHLEHVDQLSVSIDRLDSEVDRVIRPFSSALQRLITIPGVGRRTAEVIIAETGADMRRFRTAGHLASWAGMCPGNHESGGKRRSGRARKGNAALRAALCEAAWAASHARSGYLPAQYRHLLRTFGKKGQTRAVFAVGHSILVIAWHLMAHDRDYADLGGDHFTRATDAEARERYLVRQLEALGHKVTLEPAAA

SEQ ID NO: 288373 - protein, 358 aa, unidentified
MMNLKYSIGIDVSKKDFHCCLSVIDSSQKVTVKSSRKLSNSPSGFKEFLVWIKQHQKEELPLRMVMEATGVYHEQLAWFLHSKGLVLSILLPNKAKKYLQADGANSKNDSIDARGLAKIGAEKNLEPWAPGSEKLYDLRHYTRQHQNLKETINVIGNQLEALNHAQFQSREVIKQLNKTIKLLEQQVLEMEKAMEKLVKTDKVLNLHYENITAIKGVSLLSFCVIVAETNGFTLFKSSASLVKYSGYDVIENQSGKHIGKTKISKKGNSRIRRILFMPAFCAVRDDQTQFKNLYERVVERTGFKMKGYVAVQKKLLVMMYHLWKNEQRYNPQFNYSEKIIAPEKSRATHDKIPEGSFH

SEQ ID NO: 288374 - protein, 341 aa, unidentified
MKKFIRIGIDLAKNYFQIHALVSEGGPAVTRKVRRSKMHEFFSQIEPCLIGMEACGSAHYWARELKAMGHEVLLMPPAYTKPYVKRGKNDAVDADACCEAMSRPGMRFVPIKSAEQQATLMLHKTRELLVKQRTMSVNALRSHLSEFGIIAAKGIGRVDELLELAESDATLPNAARTGVKVLSQAFEGLDKAIDDLEDEITSAHAQNEMTRLLYKVPGIGKIISSVIAASVPDPSVFKSGRDFAAWLGLTPRQNSSGGKQTLGAITKQGNRYIRKLLVLGATSLLNVMGKRKGALRDWIVGLLSKKPARLVTVALANKLARILWAMMKTGESFRTEMFAKA

SEQ ID NO: 288375 - protein, 347 aa, unidentified
MNYYAGLDVSLEETAICVVDGSGLIVKEVRAASEPEALIAALKAIDVPLERIGLEACSLTAWLHDGLRGAGVPAICIETRQANAAMKTMPNKTDRNDARALAQIMRTGWFRQVHVKSRPCRLWRSLLVARRTVLNEMRAIENVVRAVLREAGLKLGTPARSAFAGRVRELAGDDRAVMPIVQPLLAILDTMLAELARLTKQVLGLARNEEVCRRLMTVPGVGPITALTFRATIDQPDRFRRSRDVGAHLGLTPARYQSGETDISGKISRCGDELARTALYEAAHTLLVRSRKWSSLRAWGMKIAKGRGMARARVAVARKLAVILHRMWSDQTEFRFGKEPGPSLAAA

SEQ ID NO: 288376 - protein, 337 aa, unidentified
MSEISILAIDLAKGSFQVCGVTADGAVVFNRSVSRPRLYHLLAEQAHCVVAMEACATSHHWGRVAQSYGHEARLIPAAYVKPFVKRQKNDRADAEAIAEAASRPSMRFVAVKSAEKQGRAVAFRTHQCFVRQRTQLINALRGHLAEFGLVAPKGPASLKLLERALAQPDVDLPSPVREMAALYLDQICRLTELIEQMADELDRASKTDEELRRLCTVPGIGPVTAGAIAAFAPDLSTFDSGRNFAAWLGLVPRQRSTEGKARLGAVSKMGQCDIRRLLIVGAMSVIRWVVRKGGSANRWLAGLVARKPRMVAAVALANKMARMIWAMTTKQENYRMA

SEQ ID NO: 288377 - protein, 369 aa, unidentified
MKGPIVSIDVSKGKSDYQAFKDLNVKYTGSRSIKHNKEGFDEIVNLVREMEKKLETEVCVVYEATGVYHRVLKKVLEDNNIKQFIINPLLSAKTRKNDSLRSPKTDKLDPKSIAKTYYSHSLHNSHKPETIYHELRELSRYYEDILVHLRKDKVAFRAQLDVVFPGYDTLYDDLYGPVALAVIEKYPHPEMLQKKKINTVSKVIQSKTCHRQAMSDTMADKAIEYSKTIYSGCDKDDIEVLILQRFIKKLNEDMAEAERTIGEMIKLAQELPDFNIIKSIPGIGDNLAARIIAELGDMTRFKKKNELVAFAGLDPRISESGQNDGDHMHITKKGNKRLRCLLYLAVTCSIRLKRDDNLSLIHISEPTRP

SEQ ID NO: 288378 - protein, 372 aa, unidentified
MKEFSTYVGLDTHKDSIAVAVAQAGRQRAQYWGEIANTPEAIGKLLNKLSPEGEVLAICYEAGPCGYGIWRQVSAMGHECTVVAPGLIPRKAAERVKTDRRDALTLARLHRAGELTAVWVPGVQQEAMRDLSRAREDMKAAERRMRQRLSAFLLRHGHVYRGKSRWTQAHWRWIEQLKMATPVQQIVLSEYADAVQHAQRREQSLVRQIEQALPGWSLAPVVHALMALRGISLINACTVLAELGDITRFDHPGQLMAYLGLVPSEHSSGGTRVQGGITKSGNTHVRRALVEAAWAYRFAARKSRTIQRRAERTSEQVQAIAWAAQKRLCARYRHLIEAGKNSKQACTAVARELAGFIWDIARHTPVQVAAGA

SEQ ID NO: 288379 - protein, 378 aa, unidentified
MNRIIKIGMDVHTTNYTLCIFEPSFEHDGTVHCITQVKPEIKKIIYVIETFKKKHENEELNIVCGYEAGCLGYSLYHELKEKGVECVILAPTTMKTEKGGRKLKNDYRDAKMIAECLAYGGYSAVHVPTELDNSVKEFIRMRDDIKENLKSIKQQIIAFLTRNGKQFEGKSYWTRKHIDWINTVSFSEPLLQDTLKEYMIEYNHLCDRVETLDRQIEEISLKEEYVEKVQQLQCLIGIKTHTALSLIVETSDFNRFKKGNMYSAYLGLIPGDDSSGGHEKKLGITKAGNNHLRRLLVEAAQGYTRGRVGFKSKDLKSRQEKCSSEVVAYADKANERLRRKYYRMILRGKKYNVAKTAIARELACFIWGIMTDHIDLCS

SEQ ID NO: 288380 - protein, 414 aa, unidentified
MELLHERCAALDIGKKDLKACVRTPSPKGKRSRRQEIRTFATTTNALLELRDWLVGERVSLVVMEATGDYWRGAFYLLEDDLEVILVNAAHAKGLPGRKTDVCDSSWLCQMGECGLLRASFVPPEPIRQLRDLTRYRTTLATERTREAQRLEKELEDAGIKLSSVATDILGVSGRAMLAALIDGERDAQVLAEMAKARMRPKIPRLVQALTGNFGEHHAFLCRLHLERIDQLTAAIGELSARIEEQMLPFARQLEHLATIPGVGQSVAEVIVAETGADMSRFPTAAHLASWAGVCPGQHESAGKRRSGKTRHGNRWLTSALGTAAMAAARTKDTTYLGARYQRLAHRLGKKKALVAVLHSILIAVWHMLANDVDYTDLGADYFARLDPDLAMRRIVRQANALGFTVRFDPIQAA

SEQ ID NO: 288381 - protein, 407 aa, unidentified
MNLNVGIDVSKLKLDYCGMDSNKQVCFQGEVTNTPKGAGHIRDEILKRSQQADQIIIGMEATSVYNFHPTLFFEQDDRLNQLNVTVVTLNPKVTHRYSKLFDDDKTDTVNAFHIADFLRIGRYQVPVTRDEKHIALQRLTRERYHLVHQINDCKNHFLNNLYYKVNTIDTVLPTSVFGSTMLSILSDEKYSLDDLVQIPLSALTDELNHLSHGRFGDAKSVAKALKKAIRSSYRLSKTVADSVDQVLAMYANQLRMLNQQLKLLNKSISDLCSVISGADSLQSIPGIGPVYAAGLLAEIGQIDRFPNDASLAGYAGLSWQRSQSGNHERQLTPRTKSGNQYLRYYLVEAANSVRRYDPTYARYYQKKFREVPKYQHRRACVLTARKLVRLIINLLTEHKLYTPPKLV

SEQ ID NO: 288382 - protein, 400 aa, unidentified
MSGLKGHFDCFVGIDISKDKFDTCGITGEEAKLFQFSATMDRKGFEKLKGHLAAVSISSVLIGMESTASYHVNLFSYLVSEGYNVLLINPLLISNYVKMQLRKTKTDKKDAVVIARFLLTNGDTLIQRATPSLISDLRDLSRQRESLVVEMTALKIEIKRLLNITFPELEHMTGIFTKAILKLLLSYPSARTLRGADRDQLTKMLIENSQGHKRDVFAESLLKASQFSIGTDSHAKEMILKQKIALLLHLEDALQEITDMLIEMSRKLMDEDINIMTSIKGIGDKAAANFLIEMGGDINQFERSGKIIAMAGLDPAVYQSGKHEGKGRITKRGNRHLRRIIWLMTTKVIQYTDIFKVYYLKRRKEGLPYKMAVLATAHKLIRVIYAMLTQRTTFCAQVNS

SEQ ID NO: 288383 - protein, 355 aa, unidentified
MDSKKYIGMDVHKESISIAVMNAAGKIVMECVIETKANMILDFIHGLRGDLHVTFEEGTWAAWLYDLLKPHVTKLVVCDPRKNRSMREGNQNDKIDARRLAELLRVDHLNPVYHRAHGLRTLKELVRSYLTITKDLGRVMSRVKAIYRSWAIPCTGKQVYSSRHRAAWLGKISEPGVRRRAEFYYQQLDALRLLRQEVRRDLLAESKKHQAWKRLCQIPSIGPIRSAELLGILQTPHRFRTKRQLWTYCGLGIEMHSSADHRVVEGQLQRAKKQVEVRGLNENCNHELKNLFKGAAIVAATKPGPFEEFYAKLLAKGMRSEMARLTLARKIATIVLIVWKREVCFDAQHLKPQTA

SEQ ID NO: 288384 - protein, 438 aa, unidentified
MSNKVIFNLDELFISVGIDVGADFSWMSIALPNQQFVGKPYKILHNSIDSLTTAVSKIKEAEELYSLESRIFLESTGIYHYPLFCYLRDKGFNCSVINPIITKNSTNINIRKVHNDRFDSKKAALVGLKPDLKVSLMPSDLALNCRNLCREYYDLMDNRSAYVNKLQGELRMAFPQYLGIFSKITINTSLTLLETYTSPSAFLEADKQEIIDIIKSTARFGLTYAQNKYNAIIQAATDANQFGYIIESNIKRIRLYISFIRKYDEEINNILESLHELVDANEDADFVKQIHLIETFKGAGFLSAVSIMGEIGDFSAFSKPKQLFAYFGLDPAVKQSGKFEGTKVQMSKRGSSIARRVIHTLALQSISISRNGKAKNPVLREYYLQKCDSKPKLVAMGAVSHKVCNMIFAILRDNKSFEIITPQEHIKQYNASKCDMAA

SEQ ID NO: 288385 - protein, 344 aa, unidentified
MDYFAGLDVSVKDTSICIVDDTGKIIREVKVASEPETLLAVLKKPSHRFKRIGLEAGPLSQWLFSALAEAELPVVCVETRHMQAALKAQINKTDRNDARGIAQMMRVGLFRPVHVKTLRSQKLRMLLTHRKLLQSKAIAIENDLRGTLRNFGLKVGMVGKVKFEARIKELVENLPDLVVLVEPLLIVRRVLREQIVVLHRRLLAIVRDDDVCQRLMTVPGVGPVVSLTYRATVDVPARFRKSKSVGAVFGLTCSKYQSGEVDWSGRISRCGDEMMRVMLYEAAQSMLYSKKWSWLKAWAMQIARRRGMKKAIVALARRLAVIMHRIWVDGTEFRWAREQAAAAA

SEQ ID NO: 288386 - protein, 338 aa, unidentified
MAILTIGIDLAKNVFAVHGVNEAGKPELGRPSVARAKLHALVAALPPCVIGMEACSGAHHWARLFAADGHTVKLMAPKLVAPYRMSGKRGKNDGADAAATCEAVQRPNMRFVPIKTEEQQSRLMVHRARQGFIAARTATVNRIRGLLSEFGIVLPLKAEIVRREAAAHLEDLPGYANTVIGDLLSEVHHLDERIKQYDAHIRTMARDCTAAQQLMQLMGIGETTATAIVAMVGNAREFDSGRQFAAWLGLVPGQYSSGGKARLGRITKAGDGYLRSLLVLGARAVLNAATDKTDSLSRWAVKLAERRGYWKAVVAIAAKNARMAWAVLAKGEAFKLPQ

SEQ ID NO: 288387 - protein, 406 aa, unidentified
MLDVHKAQVTACVRVPDGDGGHRQEVREFRTTTAGLITLADWLRSYAVTVVGMESTGVYWRAIYYLLEDEFECQLFNARHLRHVPGRKSDVQDAEWGCQLIEHGLIRTSFVPPRPQRELRDLVRYRKAKIQERTREVQRVEKTLQDAGIKLSSVASRVLGVSTRKMLDALISGTHDPDVLADLAKGALRKKIPALREALQGRFTGHHALLIGQMLAQIDFLDETIQTLSARIEELTRPFSREIELLDSIPGVDKRAAEMLLAEIGPDMSRFPTDAHLASWGGMCPGQRESAGKKHSAATRKGSKWLRGTLTECAKAVVRTKGTYLSARYQRIKSRRGHAKATVATAHKILTAAYHVLKQGAAYHELGEEFFYRRDTENTERYRRRLIRQLERLGHQVTLDAAPQPA

SEQ ID NO: 288388 - protein, 340 aa, unidentified
MNATTYGMDIAKNVFQVHWVDPAGGEICGRKLSRGKVSEFFARREPARVVMEACGGAHHWARVLAALGHQVELLPAHQVRAFVSRNKDDAADARGLWLAAQHQDIRRVQVKTAQQQAELSVHRMRSHWVQVRTASLNALRGLLYEFGIVLPKGKPAALRWLCEQRASIEAQLPPVMVRLLQAHLETLRQIEEHVHSLEQEIEAVQRSNTTAKRLRKVPGIGVLGATALAATLGDGSGWRNAREFACGLGLTPRHSGTGGKVRIGGITKRGDAYLRTLLIHGARNLVRVANPPEWIAQLLQRRPFNVAATAVAHKLARTAWAMASHGSAYEPRWGSSPASH

SEQ ID NO: 288389 - protein, 324 aa, unidentified
MQGKEASEQETKVESNVGIDISKCWLDAHVLPADEWLRVTNNCAGIRQLKRWLSHYQIALVAIEATGKWHRHLHRSLAASAIPVAVVDPYRVRMFAKAQGILAKTDQLDARVLALFAAMMAPPVRPVAPQTMAELAELVVARASAVEAQTALKNQFAAAESTFLKRQLDRRISRAGKDIAALDREILKRIKADASLARRYAILTSIPSFGFAVAATLIACLAEIGCATAKQIGMLAGLAPIADQSGDRDGVRVIWGGRPAVRRVLYLAALSATRFNADMKAFYKRLIDNGKPPKVALIAVARKLVVLANTLVTEDRTWRPSAPI

SEQ ID NO: 288390 - protein, 420 aa, unidentified
MKSFVPVAGVDVSKRFSDLCVLSPDNNVLLRQKIYHDMVSMKLAEKKLHEIELECGARPVVVMESTSHYHLILFQFFTDAGFEVVVVNPIQSGALKNINVRKVKNDRVDAYRIAMLYRLKVLRPSQIPTSSLRGLRLLTRQRSELKSDVARFKNRMTAYLDQIFPGYGEVFSDVGGSASRAVLHMCPTPEELLNADGSLLAKAICEAGNKGPKFVAEKAAKLREAAGSAQVIGVRSASNASLIKNVLDIIEGLLAAIQRIEGEIKELVTQDTRLDEDVKLLCSIPGIGFSSAVVIVAEMGDISLFRKPKQLAAYFGLDPGERQSGTFKGRKNKLSKRGSPQVRAALHMAAVSSVSRNRDGTYRNPVLAEYYERKCAEKPCKVARVAVMRKLSNIIYAVLRDRRPFELRTPQEHMALLAAA

SEQ ID NO: 288391 - protein, 419 aa, unidentified
MNESPNTWSKRTAFAGFDWASDHHDVVVVDRNGAVVEDLRIDDSAEGWQKLRARLSPYAGLAIAIETRSGAVVERLVEAGLAVYPVNPMAAKRYRERKRPSGTKTDRVDAWSLADALRTDGHAWRVLRPDDPLTVELRLLCRDEIELIAQRTALVNQLRAALREYYPAALQAFEDWTARSSWALVERFPTPAALVQAGKRQWEKFLHTHKLYRPQTYAQRLSVFASADQFCGSPAVTGAKSLLAKGLAVQLRVLEDQLDRYRTRIEELFAQHPDHDLFGSLPGAGPKLAPRLLAELGDDRARFDSAEGLQCYVGTAPVSYQSGQVRKARCRRGCNKVLRQTVHLWAGLSVRVCPWARAYYEQKRAEGKSYACALRCLAQRWLKILWKMWQTRTRYDAELHQRNQVRHGSWVIALQPVTS

SEQ ID NO: 288392 - protein, 418 aa, unidentified
MDIRPPFSYQVTVGIDWADQKHDVFVRFANGNSYRRKIDSRPEAIQEWLLELRSACAEGKIAIALEQRRGALFYQLCTHLDWIDLYPVNPHSLSSFRLTFFSSRAKDDPIDSQLLEELVRTHRDRLRPYQPEATTERKLYLYCRQRRSLLDLATKAELKLVSTLKQFFPVTVSLFAAIGMKSDIALDFLSRWPTLHDLRRTKVHTIRSFFYAHNSRSQSLIEKRLQQIGEAHEVTDDRALIDPLVLTAKCLVGQLRQFNETINEFDRKIRELFKSHPDHFLFEALPGAGEKLAPRLLSLFGSDRSRWTDATDLQRYSGIAPVTERSGKSLWVHRRLSRPIFICQTFHEFAQQSTRFSPWADQFYRRQREKGKSHHSAIRSLAFKWIRIVFACWKTNKPYDESLYINALAKRTPSPSST

SEQ ID NO: 288393 - protein, 314 aa, unidentified
MKSQEIKYVGIDCGKKTLEVIRIGDNSLHQRQQFSTTEIGISKLINWLNPNDVVGLEAGSQSFRIAKSILNKGVQVIVLNPGNLATIYQSLKKTDKEDSLKIARLIQRHPIEELPTVPIPNDEEEDNRRLCSEHENWTKQLTQGKNRLHSLFTQAGLTQITKKHLRTKANREISVALLPSRYQKEAERILKVLDLVEQNLKLIEEEIKEALKKNKAYAQTIMSMPGVGMITSLAIMSYMGNCKRFSSAKQAAYYVGLVPRVDISGDSAYYGRIVNRGCHSIRRVIVQAAWSLVRCQYGGKIKEFYQRLYPKKGS

SEQ ID NO: 288394 - protein, 343 aa, unidentified
MQDVATVGLDIAKQVFQAHGADASGETLFNTQIKRENVLEFFSKLKPCLIGMESCATSYYWARQLLEFGHDVRLIHTSYVKPFVKRGKTDANDAEAINVALTQKTMRFVPVKTLNQQAAITIFRTRSLFVSQRTQLVNALRGHLAEAGLVAAKGIQNYSKLVNLMETAADTVLPTVMKQALTDICDQIHRLNDLVTKLDKEIERRVRHDENACRLLTIPGVGPKTAMCVIATIPDIHRFPSGRHFSSWLGLTPRTHSSGGRSVLRRITKMGNSELRTMLYLGGTVIMMRDKKTPIGRWAARLRARRPYKVVVIAVANRIARIIWALLTNGGVYDPTYGREASA

SEQ ID NO: 288395 - protein, 318 aa, unidentified
MSVIGIDVGKSFLDLAAEPPIGALPRRVRNTADGVAGVIGALTGIAPELVVLEATGSYHRPLLAALVEAGIPTVLANPAQVAAFRQARLGREKTDRADAALLARFGVVHGAELRRATPADPLQARLRELVVYRDGQVAERTRLRNRRHAATFGGDDWVRERLAADLVEVEARLKAVTAEITRLLAELPEAAILLAMPGVGIAVAAAVLAYLPAAVWGNAKAAAAYAGVHPRRDQSGQRDRSRLSKQGHAGLRRYLYMAALVAIQRDPDLKTFYDRLCRRGKPKASALCAAMHKLLRRMMGRLRAHHTAQFAPELLMAA

SEQ ID NO: 288396 - protein, 315 aa, unidentified
MERLAASPAFVGIDVSKDRLDVHLCPSGEAFAVLRDGKGLEQLVNNLRKLGPALIVLEATGGFEITVAAALASAGLPLAVVNPRQIRDFARATGRLAKTDALDAKVIALFAERIRPEPRPLADAESQSLAELIARRRQVVEMIGMETNRLHQARNPRVQRMLKASLKTLRAQLAELDRDIDDTIKRSPIWRAADDLLTSVPGVGDVTAHTLIADLPELGQLDRRRVAALVGVAPINRDSGQMRGKRTIAGGRASVRNALYMATLSAIRWNAVISEHYKSLVERGRPKKVALVACMRRLLGILNAIIRTKTPWQCA

SEQ ID NO: 288397 - protein, 420 aa, unidentified
MKVVYQTCCGVDVHKSFLVATIIQTTSGVEPSYQKKRFSTFNNSILQFKHWLIENQCRDVCMESTGKYWIPVFNLLEDEINVTIANPKWVKAVKGNKDDTKDSKWIGDLFRLGLVPGSYIPCKPIRILREFTRYRYKLTSCRTSEKNRYQNALTVCNVALDSVVSDIFGKSATSVIDYLIEQSDNSINHEEIASRLFRSLKKKSDSVIESIEGYQMTDSQKYRMRLIRAHLDYITSTINDIDTMLDSLIAPYENAVQLLCTIPGVDRNSAITVISEIGTDMTPFSSSKRLCCWAGLTPGNNESVGKKKSVRITRAGVYLKPALVQVAHAAVKSDKSPYYKQKYERIMKRRGKKRAIIAIARMILTAIYQILSTGEVWNPTDLYKIDMPEPLKEKEKEKAIKQAKKLLIREGILSESQLAS

SEQ ID NO: 288398 - protein, 341 aa, unidentified
MQDVKLIGIDLGKHDFHLHGQDRHGKALLRRKFDRKHLITFLANFQPCTIVMEACAGSHWMARQLAVFGHEAKLISPQFVRPFVKGNKNDFIDAEAICEAASRPSMRFVTPKTEAQQCLSALHRTRDSLMRDRVKAINQVHGFLLEFGIGLPKGPAIIKRLPSVLAEHALPARLVSLIERLRSHIKYLDEQLDDIEKELGRQLQEDDLGQRLMTIPGVGPITASVLSAEMGDGKQYGCGRDFAASLGLVPQQHTTGGRANLLGISKRGDKNIRRLLVQCARSYMQHLERHTDRLAQWVKSMLLRRHSNVVACALANKLARTAWAMAAHHTEYKMLEAATSL

SEQ ID NO: 288399 - protein, 344 aa, unidentified
MKISTLSIDLAKNVFQVAGFNSNHKRECNKRLNRPKLNAFIANTPPCRVVMEACYSSHYWGRVFTSYGHTVDLIPAQHVTPFVRGNKNDSNDALAIYEASLRPNIKFVPIKTEAQQEILTLHKIRERLLQNRIAATNQLRGLLVDFGYVFPVGMKVFEQGLIALESDSELRPILRTMVSDIYTEYKTLVKRIKAIEAMLTAHVERDTNAKILHSIPGVGVLNASAYAASIGNGQAFKNAKELGVWLGLTPKQYASGDKSKMSGITKRGNSYLRKQLIHGARAIIARSHHKTDALSQWINQLREKKHFNCVVVATAHRLARLMWVLLTKQTLYSPQYVQNTRKDA

SEQ ID NO: 288400 - protein, 413 aa, unidentified
MIVGVDVGSEKHFFRAFNWRGIELTRKPVPFSNSMGGFNSFYNTVVELMQKNNLEEAMVGIEPTGHYWFDLGQFMSGKNIRFVMVNPHHVHKSKELDDNSPSKNDRKDPRIIAGLVKDGRYFYSYMPTGVYAELRNASNRRFVLVGEQTRAKNRLQKWIAVYFPEFKGIYTHIDSKGGLLVLKHAATPDEIVSLGVDGIIGIWKSKKLRGNGRKKAMQIVNAAVDSIGLKSGLTEARMEIQDLIEDYELNTKRLERVNDLIKELCLQIKHVDKLLEIKGIGITTVAGFIAEVGDITRFNDTKELQKLAGLELVADSSGKHKGKSRISKRGRKRLRYLLFEAAISVVGKNEEFRQIHEYYTTRDRNPLKKMQSLIAVSCKLIRVFHVILTKGTSYDASKMLGDIRHPGTQPKAA

SEQ ID NO: 288401 - protein, 392 aa, unidentified
MVCVGIDVAKDKHDCFILNSEGEVLADVFTVANNREGFETLLQRIRSCTTPADKIRVGLEATGHYSYNILGFLLDKGLPTFVLNPLHTNLYRKSLSLRQTKTDRVDARTIASMLMSDVDLKSYTDTAYHNEELKSLTRYRFDKVRERAKLKQSVSRLVVILFPELEKLVPSLHLASVYAMLSEFPGAKQIAGANLTHFKAVLSDASRGRYDRDKAIEIRETARRSIGSLMPAKSLELQHTIRLIRELDAEIEEIEGQIRSMMEVIQSPITTIPGIGVRMGAMILAEIGDFSRFDSPDKLLAYAGLSPSTYQSGKLNASGTYAHMEKRGSRYLRYALYNAAKYVCLWEPSFAAYLAKKRAEGKHYNVAISHAAKKLVRLIFALEKSGRVFRVA

SEQ ID NO: 288402 - protein, 468 aa, unidentified
MKLRNAIGIDPDSNGCQCAFVKLDGSQVQQRVYLATEDGMQSFIRWVKKQEDTIVAIEGSNGLSAPIEKALRDAEIVFYSFKPSDVDKFRKAVLGQNKNNKKDAESTARYAMALECQGKLENCKRVWKADEELQGLTRSYAQKRKEATREINRLWKLLRAASVDLYLALGGRHPDIEISENVVQNEGILALLAAKPDINEWKTLSEADFMHAMGNRNYKGRKQLLKEMQKVSKSFRPVSPAASLMIKNTAEQIMLLRQQLTEIKKMIESITKDNKVVRTLEQHRGIGILTAATLGAEIVDIRRFAKDNNLASYSGVVNREYKTGKNDKEIPNRYFNRRLKNAFMSAARNYVHFNPDTHLAGYYNNLVKGGMKKTEARKRVARALVRVFFRELSSVVELDESDAVEEIERGNESDMANGSSRSDKLHSNISFQSLTENNTGGEEKIKTEKQEKDADAETRPAAEKIPIF

SEQ ID NO: 288403 - protein, 344 aa, unidentified
MERYLGLDVHRDSTSVAVMSARGKRVRRDRVETNGQALVGYLKSLAGELHLCLEEGEWSQWLVEILSPHAKRVVVYRPQWNPGPKNDQIDAHNLADRLRTGRIGCPVYKAPQRWAKLRETVRVHTKLTQDVVRAKQRLKGLLRRRGVVPRSAELYDPSRRKGWVAKLPAGLRSSAELLGRELDCLEQLRAEAERAMLTEARRFKITRILETAPGIGPKRAALLLAVVVTPHRFRTKRQFWSYCGFAVVTRTSSDWVPSDGGWRRAPVIKTRGLNRSCNRSLKALFKGAAISAVEHSKPNPLREKYEQLLAAGTKPNLAKLTIARSIAAIVLAMWKTETQYKPVS

SEQ ID NO: 288404 - protein, 362 aa, unidentified
MVQSTPIVAFDQHAASLVAAVLLPGQATPAVHTLTPDLPTVRRFLQRIRRSGAVQCCYEAGPCGFDLQRALAAEGIACDVIAPALIPRRAGVRIKTDRRDATQLAILYRAGALTRIHVPTEQEEAVRDLLRCREDIRADLLRARHRLSKFLLRHGRRFTGTKKSWARDHLAWVRAQAWPLAAAAQTHTAYVRAVDEARARLEAVEKDLQACLTLEPLAARVGRLRCFRGVDDLTALTIAVELSDPRRFVSARHVMAYLGLVPSEHSSGRKRAQGGITKTGNAHLRRVVVEAAWHYRHHPFVGRALKKRQAEQPAEVIARAWTAQQRLNARYRRLTGRGKSRQVVVTAVGRELTGFLWAALTQ

SEQ ID NO: 288405 - protein, 412 aa, unidentified
METVVERPAALDVHKEQVTACVRVPGEGRSREQHVAEFPTTVAGLLTLRDWLAAFGVEQVVMEATGVYWKPVWAILEDEFECLLVNARHVKQVPGRKTDVKDAEWLCQLAEAGLLRASFVPPKPIRALRNLTRYRKTQIQERSREANRLHKALEDTGIKLDCVATDILGKSGRAMLDALVSGTTDPEVLANLAKGKLRAKIPALKEALEGRFDHLHAVWIGAILSHLDFLDEQIANLSDAIGEQIAPFEKAVELLCTIHGVQRRTAEVIIAEIGVDMQVFPTAKQLASWAGQCPGNDQSAGKRRSGKTRKGSKWLDWALEEAAMAAIRTKDSYLAAQYARLRPRRGHKKALGAVKHSIICICWHMLTTGELYTDLGGDYFRKRDPERLTKRLIAQLESLGHKVILEELPQAA

SEQ ID NO: 288406 - protein, 355 aa, unidentified
MKQQQAIQYLAFDVHQATIVANCRDAEGKVIMRATVATEARAILQLVKSCGPRVHIAFEEGTQAQWLHDLLVPHAEKVIVCNLRGQNEGGNKNDRIDVERLSLDLRNGTLKPVFHGTPSVLTLSELVRSYNNLVEDATRVMQRIKAMFRARAIATKGTAIYRPSEREQWLGQLQGGARVRAAALFKHLDVLVELRPPAKAAMLAEARKQSGWKVLRSIPYLGPVRVAQIMAIMRTPFRFRTKRNLWPYVGLAVVTRSSADQEIVEGRLRKRRRPPLTRGLNRNHNPTLKGVFKGAANAATARPGPLYDFYQASLARGVRDELAKVTLARKIVSVTLRLWKKGELWDPEKLTMQAT

SEQ ID NO: 288407 - protein, 340 aa, unidentified
MSITTYGLDIAKRVFQLYWVDIKSGEIHNRKFGKQELLEFLSQREAGLIALEACGSAHWWRRKLMALGHEVKLIHAKFVRPFVQTNKTDAADAKAIWTAIRQPGMRTVADKTEEQQAMLALHRMRMSLIKFRTVQVNQLRGLLYEFGVTLKGGRLAGLSEMQQRMAEIEETVPGILFEAMKEQLQRLADIEADIQDIERRIKAWQKQQEACRKISEIPGVGMLTATALVATMGEANGFKSGREFAAFVGLVPRQSGTGGKVKLLGISKNGDTYLRTLLIHGARAVMFKAKDKGEWCEELLKRRPTNVAIVALANKMARTAWAILAHGREYQKDYVSVMPA

SEQ ID NO: 288408 - protein, 343 aa, unidentified
MQVVRIGLDLAKYIFEVHGVDNHGKVVVRKRLRRDAVARFFANLPACLVGMEASNGAHYWARVLTELGHQVRLISPQFVTPYVKSNKNDRNDAEAICEAVGRPSMRFVPRKSTDQLAVQAVHRIRRRLVADRVRLVNQIRGLLSEHGIVIARDIAQLRRGLAIIAGNDNDGLSEMVRPLMRELQTELAELDRRIAIYDRRIREIFRASEQCQRLGKIEGIGPVTATALIAAVGDRTSFKNGRQFAAWLGLVPKQRSSGGRARLFGISKRGDRYLRTLMIHGARAALSRAGGKQDPRSLWLGKMRQRRHPNIAAVALANKNARIVWAMLSGDTAYEPGPSVKPT

SEQ ID NO: 288409 - protein, 423 aa, unidentified
MNCDQPELAAFIGLDWADEQHAVCLRVAATNEIRTFSIEQQAHKLHAWVASLHQEFGGLKIGIAIEKSRGGLIYALMGYDFLILYPINPKALAKYRESGCVSGAKDDPSDAALLMDLIYRHRDRYRPWVPDTVETRMIQLLSEHRRRIVNDQTALTNRLEALLKGYFPQALGWAGALDTLQACDFLTKWPSLQSVQSAKPAQLRKFYLDHGCRRTKLIEERLQEIRDARFLTEDDAVVRSSVLMVQATADALRPIIAAIKRFNQELEAAFQQHPDHELFESFPGAGEVMEPRLLAAMGSDRDRFATAIEIQQFSGIAPVTKRSGKMCYVHRRYACPKFVLQTFHEWSRITIRYSVWARAYYEHLRSIGKRHHAAIRALAYKWIRIVFRCWKDRVPYNESIYLAALWRTKPAWAVKAGMTAQAA

SEQ ID NO: 288410 - protein, 342 aa, unidentified
MDYYAGIDVSLELSSVCVVDAIGQIIREAKVASEPGALTTFLAGLGLPLTRVGLEAGPLSQWLHAGLQTAGYAVVLLETRHVKAALSAMIVKTDRKDARGIAQLLRMGWFRPVHCKSPPAQEVRALLVARKQLQAKMRDVEFSLRGLLRGFGLKVGEVSKGQFAARVRLLTAGHAMLEQIAEAMLRAREALHTEFNKLHRSMLAIVRSDEVCRRLMSVPGVGALIAVTFTSAVDQPERFSRSRAVGAHFGLTPKKYQSGETDITGAVSRVGDPMVRTALYEGAHIMLTRAVRFSSLKRWALEVAKRRGMKRAKVALARKLAVLLHRMWVDGSTFRWNREVTA

SEQ ID NO: 288411 - protein, 365 aa, unidentified
MRIIGCDFHTRQQTLAMLDTETGELVKMTLQHEGNNVREFYSALPRPVCVGIEATGSMQWFVNLMEELGIECQVGNPAVIRAAEPRKQKHDRRDAGLILKLLMEDRFPAIWLPSKELQDLRALVRHRHQWVRMRTRIQNALQSIALANGLRRGPALWSQAGQHMIASLPLAPHAAYRRSELQAMYEKFEAEIEKLNQRVEEQACQRAGARLLMTHPGVGPVTALATEVFLGDPARFADSKALASYVGMIPRIPREYSSGGRQRLGGLSKQGNPLLRFLWGEAGAHAVRRDPALQRFYRRKLVQKGLGKARVAVARKLGIRLWIMLRDQMEYNEFCRRGQKQQKDGGACAGMPETRNGATSYRAVD

SEQ ID NO: 288412 - protein, 433 aa, unidentified
MKVMYEHVAGIDVHKDMIKVAIRSPGDKPWTRKTEILEYRTFYGVLQEMARELRRRGVTHVVMEASGVCTEPVYYALCEQDFTEVAVINPVHAKALKGHKTDAKDCARLAELFECGLLRGSYIPPAEQKEVRDLTRYRIKTVQARTSEIQRLGKALESAGIKLGSVASEITGKASTAMIEALIDGERRGGVLADLAIGRMRSAGKLADLSMALTGRFTGHHATLCRLHLDRINVFDDAVDGLDDRIAAGAARWQREAGLLKSVPGFGDVVTCAWLAEIGPAPHKWFSRHEKLASWVTLCPGNNISAKKRKHGRTGDAGTYIKPMLIQAAWSAIRVRGRLQARYNRLVRRFGGDKNPAAKKKAITAIAHTLLKIAYQVLKSGTPYQDLGADFYTRRNSPEEQQKYLERQLQKLHPGCTITITISPPEAALPPGA

SEQ ID NO: 288413 - protein, 341 aa, unidentified
MNHIIRVGMDTSKHVFQLHGVNAAESVILRKKLRRKDMIAFFEKLTPTTIAIEACGGSHHWARLLSSFGHEVKLIAPQLAKPYVKRGKNDAADAEALCEAMGRPTMRFVPVKTAEQQAALMLVGLRDRLVRNRTQLSNAIRGYAAEFGLTAAKGEAHLNPLFVRIQADESLPALARELFAIQAEEYQQLRAQIDDVDARLMAWHRADECSRRLAKIPGVGPIGAALLIMKTPAPELFRSGRQFAAWIGLTPKDHSTAGKIKLGVITRAGDEILRSVLVVGATAVIQQVQRGGRGSPWLVDLLKRKPPKLAAVALANKMARVAWKLMVTGNNYAARSAPAAL

SEQ ID NO: 288414 - protein, 428 aa, unidentified
MERENCNRLAEFRQLRKDIRGSDKHLIVGIDVAKERHNAFFGTATGETLYRRLIFDNDKDGFERLLLQAEAMKVQHGLKKVVFGLEPTANYHKPLGEYLIKNGYAVVLVATDAVKKNRSLLDGRWDKNDKKDPANVADLISQGKCLFYEHPRHEVRDLRNLLSFQRKLKKLEHSTRMRIRNHLVAQYFPEMDTCCNWGVNEGLAIVKSCLDPAAISALQYDEFLRKIQTRGVTLAQQRRLSTVWQRAFKSMGCECGLSVEYEARMMVKILEQVRMSIADTQQQIKTICEKFFEYEYLLSIPGFGPDISAKALGAIGYPFRFDNASQVLKLVGLDLSASRSGKNSNNITPSISKKGKSELRYALYQAALIASSKDKHFIAYFTNKLRGREKEKGIKTKMRVKLSAKMMIIAWTLMKKKEFFDPKYLNME

SEQ ID NO: 288415 - protein, 344 aa, unidentified
MKITTIGIDLAKNVMQVHGVDERGKTVLRKQLKREQVASFFANLPTCLIGMEACGSAHYWARKLQSFGHTVKLMAPQFVKPYVKTNKNDVADAEGVCEAVARPNMRFVPIKTAAQQSVLSLHRARQGFVKARTAQANQIRGLLSEYGVVIPQGIGHIAKRLPQILEDGENGLPGQFRMLLERLGENLKEMDRQVGELEREIKMWHRENEASRKLEKIPGIGPITASALTATVGDVKCFEDGRQMAAWLGLVPRQHSTGGKQTLLGISKRGDTYLRTLLIHGARAVVRVCERKLETDTWLKRLMGRRNKNVAAVALANKNARIAWALLRYDREYASDYTPTPANE

SEQ ID NO: 288416 - protein, 343 aa, unidentified
MLRTNVIGIDLAKNVLQVCHISRQGELLSNKAVSRQKLKELLAKSKPSLVALEGCASCHYWGRYAESFGHEVRIINPKKVKAYVDGHKTDANDALAIANAALQIGIKYSKPKSMEQQTLMSLEANRQFLSKTIVSLGLHIRGIINEYGIVKAKGTKGLAELVTSTLYESDVLPASLVTTLSMLWQQYLNLKDELSKLQKSMNSTTRQIEPCKRLMALEGVGETTASMLYATLGNGTQFTNGRQASAFVGLTPKQYSSGGKVTMLGIDKFGGVKDLRSMLYLGAMAYIYRLPESPKNQKQAWLIKLVDRVGFKRACIALANKTVRTAWAMLHYETAYQPKPLSI

SEQ ID NO: 288417 - protein, 401 aa, unidentified
MGIDAAKERHHAFFGTATGRTLLKRLLFENSEAGFKRLVTRATQLQLEYGLDRVVYGLEPTGNYHKPLSSWLLAHEQMLVLVSSKTISDNRQTLDGRWDKNDTKDSANVADLIAQGKCQFFEMPDPELVELRNLLSLRRRLKRNEHAVRMQIRNGLVAKYFPELDRHWKSSLTENLAIVRWCLDPRKITAMGFDKFVRQVTRRDRGLPQRKRLERVYDAAAVSIGCPMGENAYFEAQLQVERFEKIHEEIEQTEAEIKSVCERFPAYRQLLSIPSFGPYVASIVLARIGDPHRFKSRRQVIRLAGLDLNANRSGKKSNAAVPVISKRGNAELRYALYQAGQIASCHDDRFRALFSRYLQGREKERGIKTKMRIKLAAKMLVIAWTLMKKGEVFRPDHLIID

SEQ ID NO: 288418 - protein, 294 aa, unidentified
MLGETKASQVSNDEKGIASLIKKMKILRLELIVVEATGGYQRAVVLGLYEARLPVAVVNPSRVRQYARACGLLAKTDKLDAFNLAEFGKQVRPRQFEAKSEAGRYISALLVRRRQVEEMLKAEKSRLRTVHVAMRGSLERMIEVLKEEIKRLEKDLDGFMKEHEDWQEQEQILCSAKGVGRVTAATLLAELPELGKLDRKKIAALVGLAPMNADSGKKRGYRKTKGGRIEVRSVLYMSTLVATRYNPLIKAQYQELLRRGKVKKVALTACMRKFLTILNAMMRDRVRFRQTVTA

SEQ ID NO: 288419 - protein, 426 aa, unidentified
MTTPAGDSLQPDQMHVAHPRAAGLDVHKLQITASLRLCQPGGGVDSATRQFSALPPGLSALTQWLASHRVTAASMEATGIFWQAPWEALEAAGIEPQLLHAQFVKQLQGRKSDVADSLWLARICQLGLCRPSYVPPRKFRQLRQLSRYRRKLVGERSRARNRIHKTLDHDGLRLGGALSDIFGLNGRKILAGLAEGLPPEEILASLSGHVRHKRELLEQVLEAQLDAHAVWKLGDLLRAHEAANQSIAELDARLAEGLAEMVEQVHLLETLPGIDRGSACAILVELGPDLTAFDKTANVAAWAGLAPGNNESAGKRRSGRLRRGNATLRATLAECAHGAVRTKGSQFHGYHNTLKARMPYKKAILATAHKLLRTIVAMLRDQSPYIDPGIDYDKLLVDRNAARWLRKLDEHGYLERIRSGGQPVAA

SEQ ID NO: 288420 - protein, 390 aa, unidentified
MNKGNGKRIVGLDMHPDVFSAAALAGSAELARTEWVDDRKSTRELEAWAKKRLSKEDVVVLEASGNSFEVASRLHALGFTAIVLESTQAGKIRAGLCQDDRHSAVKLARVYLSGLAKIVWQPDAQTREYREVLFAHRNAVKDATRCRNRIRSFLNEHCVRLKPGTSLIAPTGEAIALKAKVWTPLQEELLRERFGQLRENETRRVKLERLMVRELMSQPRWAQLWRLMGIRHRVAFALMAIIGDINRFPNAKKLVGYIGLAPRKEQSGNNAKGVDHGIGGSGRKDVRTLLLQSAQNALVQRDSPLHKWGWKLLIKKHRNEAAAAIARKLAVSIWYLLKGHFTPLVEANTHLTTKLLKLATVLGKEQLRALGYINRDDFVVAQIKKIQLAT

SEQ ID NO: 288421 - protein, 413 aa, unidentified
MSVTDEPGSRRPTAGVDWATADHAVAIVDPDGEQTGRFPVIHDAAGLRTLVRKLLAAGVAEVGIERPDGPVVDALRAAGLVVYVIPPGQLKNLRSRYGSAGNKDDRFDAYVLADVVRTDRRRLRPLLIDQPVTTALRQTVRARRDLVAHRVAVANQLRAHLQICFPGAVGLFADIDSDISLRFLERFPTQDRADWLSPKRWAAWLASVGYSGRTLPETLHTRLRDAPRGATGTTADTAAAVTAAFVAVLRTITVQIEALAARIAEQLDLHPDAPIFTSLPRSGRVRAARLLAEIGDARGRFPTADSLACLAGVAPSTRQSGKVEVVSFRWGADKQLRDAICDFAGDSRHANPWAADLYTRARARGHDHPHAVRVLARAWVDIIWACWTTNTPYDPAKHRALQRILNQDQPTAA

SEQ ID NO: 288422 - protein, 327 aa, unidentified
MILPILGIDIAKLKFNVCLINTSGKLKHKVFANTADGFQQLAAWLIKQGAQRAHACMEATGAYGEALALHLHTAGHTVSVVNPAAIKAFAGSRLSRTKTDKVDAELIARFCVAHQPLAWMPPAPEVRQLQALVRRLESLVEMRTMESNRLEAIITIDVVKSSVEDHLAYLDRQIKQTETLIRTHINNHPRLKQQSELLDSIPGIGETTAATLLAEITDITQYENARQVAAFAGLVPRERQSGSSVRGRTRLSKIGNARLRKALYFPAITALRCSAFFKQWAEGLRQRGKCKMSVIGAAMRKLIHLAYGVLKTGKPFDPEWAQSAKTA

SEQ ID NO: 288423 - protein, 408 aa, unidentified
MEPIYRSCCGLDVHKRSTQACVRRLRENGSLYQETRSFGTMTRDILEMADWLAAEGVTHVALESTGVYWKPIYNLLEGRFTLLLVNAKHVKHVPGRKTDVKDCQWLAQLLQAGLLRGSFIPDRPQRELRDLTRHRSQLVAEKTRAANRIQKILEDANIKLASVASDILGASGRDMLRALIAGGKMPQEMAELARRQLRAKLPQLSLALEGQVTDHHRFMLQGLMDHLEYLEHQIEHFSRRIEEVSRPFAPALEAVASLPGFDTRSAQNVIAEMGADMAPFPSEHHLSSWAGVCPGSNESGGKRKSGKTTKGNRWLRTALVQGAWAASRKKGSYFQAQYRRLAPRRGKKRAALAIAHSLLVVIFHMLKTGSSYKELGGDYFDKLNQKRLVPYFLKRLTDLGYQVSLKAA

SEQ ID NO: 288424 - protein, 409 aa, unidentified
MEQQQPGHGQVWVGIDVGKHVHHAAAVTADGQLVWSRRVANDQAAIQGLIGQATASAAAGVCWAVDSTCSSAMLLLALLATADQPVVYVPGRVVNRMAGAFAGEAKTDPKDALVIAQTARMRQDLLAARPKDELVAELAVLVGHRTDLMADWVRSVSRLRGLLTASFPGLERCFDFTSRSALVLVRRYQTPEALRALGRRRLVTWLRRQVPAQLSDAQVAQMADVAMAAAAAQTIRLSAQEVTARLIAQLASDLLGLDRRIKDLDKTIGQRLANHPQAKVICSLPGMGPLLAAELLVAVGDLGSFPDAGHLAAYAGLAPVPRDSGRRINNLHPPKRYNRRLRRVFYLSALSSLSSPGPNRDYYRRKRAQGRRHQQALIALARRRVDVLWALLRDNRCFELSAPIKTTTA

SEQ ID NO: 288425 - protein, 340 aa, unidentified
MQITTIGLDIAKNVFQVHGIDAAEKVVVRKQLRRGHVMKFFAALPPCLVGMEACATAHHWARELTKLGHEVRLMPAKDVKAYVKRNKNDAADAEAICEAVRRPTMRFVQPKSAEQQGRLMQHRARDLLMRQQTQVINALRAHLAELGVVAAQGREGLKQLLAIIADKKDARLPIDARASLIVLAAQLQALHTMIGSIEKRLMVQHRANEASKRLQSIHGIGMIGASAIAATVTDPKVFRSGRDFAAWIGLVPRQASTGGKQKLGPISKQGDRYLRRILVVGAHSVLRRAKQNPEKYPWLTQLLARRPFKVVAIALANKLARIAWALLASGGHYRPRLAAA

SEQ ID NO: 288426 - protein, 356 aa, unidentified
MNKIIRVGVDLAKHVIQVHAVDAAGKVVTNRALKREKFLLWCADLPVGCLIAMEACSGAHHWCRKLTERGFEARMIPASSVMPYRIQGRTGKNDANDAAAVCEAASRPHINFVPPKTLAQQGMLCVHRLREGFKEERTSCINRIRGLLAEFGVVLPQSSDVLRHHLSDVIEDASNDIASISRLVLQRAQDHWRELDAHIKWCDQRIADHQKTDEQVQRAAELMGVGSITASAVVATVGDFRQFKNGAQFAAWLGLTPKQNSSGGKSSLGSITKRGSIYLRTLLIQGSKAIALTRQYDNPIFLWVQKLRERAGWQKAVVALANKNARILWAVMTREKRYDAHHISSYPAPVPIMTPA

SEQ ID NO: 288427 - protein, 337 aa, unidentified
MKYSGIDLHSNNSVVTVTDEEDRVVAEKRLPNDLAKILGLLKPWQEDLVGVVVESTFNWYWLVDGLQAAGFKVHLANATAIKKYEGLKHSGDETDARYLAHLLRLGILPTGTILPPEQRAVRDLARKRMQLVRSRTAQILAVENITARQRGARISSNQVKRLSAETVDQMGFPEEVAWAVKANVAVIQTLGAQIDLLEKRLQEKVGGRAEYALLTSVPGIGKVLATTILLEAGPIDRFAAAGNFASYARCVDSVRTSNGKKKGAGNTKNGNKYLAWAFVEAANFALRYCAEAKRFYERKKAKTNNVVAIKALAHKLSRACFHILKERKPFDVTRCFV

SEQ ID NO: 288428 - protein, 358 aa, unidentified
MQRNKKTFKGQNIYIGIDVHKKNWQVAVITESGYTERISTAADAKALFKFLKSHYPDGNYRAVYESGFSGFATHYALSELGVSCVVAHAADIPSSQYELTMKSDRIDAEKLARALRAGLIRGIYVRPKDNLDDRGVLRIRKTIQIQVGGYKTRIKHLLHSNGVELPERFSRSGTHWSRAFIAWLREEVRLLSDTRRSLDLLLLQVETLRANLLEATRRVRALSMTDRYREDCALLMGIPGIGLTVAMTILTEVCDIGRFGNERQFASYLGLVPTSHSSGERVSHGEMTFRGNKHIGPLLVEASWVLIVRDRELGRMYTEYRWRMAGQKAIIKIARKLSNIIFAVLKTRKAYEPYRRDA

SEQ ID NO: 288429 - protein, 346 aa, unidentified
MLHVGLDLCRKRVDVHVLDDSGKTVEVTAVLPDRDGLRSLARRLEPHGQAVRAAIESMTGSRFVHDELEMCGWEVDVADAQRVKGLAPLACKTDKIDARVLAELCRRDLVPAIWLPTPGVRGERERARWRIHLVRHRSALKYRIHSTLMTFGHQCPVTDLFGAAGRALLDRLELPEPWKEVVATSLELIDDLDRRIDDCERELRERGASHPYVPLLMTAPGIGWILASTIASEIGDIARFSSPKKLCGYTGLCPRVYQSGNKDRRGALAKNGPSHLRWALIEASTHAARHPAFRAHYEATAKRLGKQRGARVARVEVARKLTEAIWYMLTRNQAFSPAGPPLCLAA

SEQ ID NO: 288430 - protein, 377 aa, unidentified
MSTIRFLGLDVHADTIAVAVAEPDGEVHSLGLIPNRLESVRKLVAKLGPAKQLKACYEAGPCGYALYWQLTALGVACEVVAPTLVPVKAGDRVKTDRRDAAKLARSFRAGDLTAVWVPDADHEALRELVRAREDARQDQHRARHRLSKFLLRHGRRPPEEVRKSWTLKYMTWIKGQVHFDQPALEATLLDYVHEVDHMAERIERLDKAIGEAIQKAPPAMRAVVEALQALRGVAQVTAVTVVAELGTLSRFDSPRKLMGYSGLVSSEYSSGNRIQRGSITKTGNAHLRRVIIESAWAYQYRPWLGGYLLKRQQGLDQEVKAIAWKAQHRLHSRYKKLAASGKNKPQIVTAVGRELLGFIWAIAVQTEAKFQAEQKAA

SEQ ID NO: 288431 - protein, 429 aa, unidentified
MKLETDRQAIFRELKSTIRGSEKYLLIGVDVAKNDHHAFFGTPNGKTLRKNLVFDNSVKGFEALRSLASDIRNQHGLVEVVYGLEPTASYHKPLAEYLIRQDEHVVYVSNVAVAKNRALLDGRWDKNDKKDAANVADLVGQGRCLYYDVPEESLRELRSLIAFRIRLKKEEHALRMRLRNNVFAQFFPELDKLYIKAGQPDDLVLSIAEHCLDPREIAGMEFDAFLKLITQRKIRIEQERRLRELWESAKKSAGCLVHDAARWEARSLVSKLKAVRETVKGNEQRMKAAAQNFPEYECLLSIPGFGPIVSAMVLAAIGNPSRFNSRKQVVRLAGLDLSAERSGKDSDKAKPVISKQGKAALRYALVQAAMVASALNPDIRGYFSNLLKGRELERGIKLKMKVKLAAKLLVVAWTLMKRREQFKPSCFSG

SEQ ID NO: 288432 - protein, 400 aa, unidentified
MFVGWDWASTTHDITVIDATGAVVDRWAPPHTEHGLTQTITRLARHGHPADLPVAIERPSGLVVDRLLAAGHPVVPIHAAAFHAARPRWGAASAKSDPGDSYKLADYLRTDGHRLRRLQPLDDATRHLQALIRLREDHIKAKTAASNQLNALLDAAWPGAAAIFSRLASDIALAFLQAYPTPQAAARLSQARLAAFCRRHSYRGGRSPAELLQRLWAAPTPPVGLDPETLTELVNAQVRLLRTLLATIADLDRAIGAALLGHTKAKLLAPMPYIGEINLGQIVAEVGPILDRASSAEHAIAECGAAPVTRASGKTRTVGFRWAANRHARTALHAFADNSRHGSPWAARLYADARRRGKRHPHAIRILARAWLRVMWACWHTNTAYNPTKHRAEQRLAAGT

SEQ ID NO: 288433 - protein, 458 aa, unidentified
MAPQFKGNPPKAKSTSPRSLHVLQPHAAGIDLGARDIYVAVPPGSCADNVRSFPTFTADLHALRDWVQACGVTTVAMESTGVYWIPLFQILEAAGIAVCLVNARHCKNLPGRKTDVQDCQWLQYLHSVGLLRGSFRPAAQVCAVRTILRHRDALVRGAGRCVSHLHKSLTQMNVQLHHVISDLTGVTGQAILTAILAGERDPQKLAALKDHRIKASRDVIAKSLRGDWRSEHLFTLQQTHALWHQHQTLIAACDTQIEAMLQAFEAKADVVAAPLPPAKTSHKKAQRNEPQFHAREECYRVLGVDLTTVPGFAAPTVLVLLCELGPEFAAKFPTAKHFGSWLGLCPDNRITGGKIYSVKTRDVKSRVAEALRLAAQSLWQAKNYFGELFRRWKARLGSPKAITAMAHKLARVLWHLLKYKQPFNPEVFAKEEAKMKRQKLQRLQTLAASLNYQLIPQP

SEQ ID NO: 288434 - protein, 421 aa, unidentified
MKVTYQTCCGVDVHKTFLVATIIKTTSGVEPSYEKKRFSTFNSDIRHFKQWLLDNNCLDVCMESTGKYWIPVFNLLEDRINVTIANPKWVKAVKGNKDDVKDSKWIGDLFRLGLVCGSFIPCKEIRIIREYTRYRFKLVSCKTSEKNRFQNAFTVCNVALDSVVSDMFGVSASAITDYLITTDEFDEEICKSFLKGTLKAKADTVVESIEGYQMTQDQKERMLLIRSHLEFVQMELNAIDAKLDDLVAPYEEAIALLCTIPGVDRASAVTIISEIGTDMSQFDSSKRLCSWAGLTPGSNASAGKKKSVRITRAGVYLKPALVQCAHAAVKSIDSPYYKSKYERLLKRRGKKRAIIAIARMILTAVYHMLSTGETWNPCDLFKIDMPQEMQDKQKAKAIKQALKFLMLEGVISQSDTLISSG

SEQ ID NO: 288435 - protein, 312 aa, unidentified
MTKIICGVDVSSRRLDARVGRQGAVERFERTPAGIEALAGFCKKHGVELVVMEATGGYEKLPFGLLWGQGVPTAIVNPRAVRRFAEAMGVLEKTDAIDAGVMAWFAKVKRIVAHPPAEAAQERLQALVRRLSQLTELRTMQLNQRRLVSDRETLASIAEILAVVARQIRALEAKIAALIDTDELWQKLNATFRSIKGVADRAVARMIAEVPEVGTLSNKAIAKLVGLAPIARDSGKISGRRPIRGGRSAVRSTLFVVAEIVRRHDPDFADFHRRLSKAGKPKLVIRIALARKLLVRLNAKARDIRRELALAA

SEQ ID NO: 288436 - protein, 501 aa, unidentified
MKTKRRKAKVQAGIRSISVTSNEAEQKLEILRPDAAGIDCGAQEHYVAVPVDRVSAGQPTVRCFSAFTEGLDAAVDWLKECRVTTVAMESTGVYWIPLHQKLEAAGIEVYLVNARHVRCVPGRKTDVKDSQWLRQLHRFGLLNASFRPEDITCRLRSLHRHRDNLVSSSSSEIQHMQKALQQMNLHLHHVVSDITGLTGLRIIDAILSGQRDPQELVKLRDKRVFKSTPQQMQAALVGDYRAEHLFVLSQSLQAYRFHQARIEECDRQTEPLLQKLAQQVEAASAQLKPLKGAQQEETLPVPGDEPKTGTGASSPLNKAKRKHKPVANEPKIELAGLLERICGIDLTQVVGLNVLSVLLIVSEIGIDMSKWRSAKAFCSWLGLCPGNKISGGKVLDSRTRQVVNRVADALRLAAQSAGRTETCLGIFYRRKHAHLGAPKATTATARKLACLIYHLLKYKEPYQRLDPAMYQLRLQKSALLKLQNQATTLGYKLVPTAPVPV

SEQ ID NO: 288437 - protein, 326 aa, unidentified
MPLQSEKEILGIDVGKEELVIFNTALAKTVCLPNTQTALEQTLQETQWSPTQYVVGLESTGDFSLLPAKFFLKKGFRVKLLNPIVVKKFIHATIRQKKTDKSDAEVIAEVIHYGEGQEITEKELDLAKKTNLRLERKLTKIRSDPKRIQGSLKIKSAQGISLEKTQREIDRLIRTVDKARERIWQIAQEEPADRQEEIISSHPGCGQKLSVIISTEAGDIKRFPSAKQLKAYAGIDPRVIQSGKMDKRGRMTKRGNPFLRQALFLAAFVASNHDPELKEYYQKKRAEGKSHIHAVCTVARKLCERIYATVSQDRLYEVRGLSTWYS

SEQ ID NO: 288438 - protein, 389 aa, unidentified
MYFVGIDISKYKHDCFIATEAGEIIRQNLTFQNNHEGFAQLLRILDSLDHSQEIRIGFEATGHYGLNLKLCLEKAHYSFMEVNPSLLSKFLKSQTLRKTKTDAIDSRSIAHWLMSVEYKPHPKEFYHMYSLKSLTRLRDSLVKQRSFYLVKITNVLDHIFPEFKPFFNNRFSVTALYILNKYHSPKAIARIRSGSYDELRRMSRGKFTMSHFFQLRDLAGSSVGESNEILESQLSSLLGLYFSLDAEIEKLESQITQLVSRLDRPTMSIVGVGPLSAAVILAEFGSISRFDSPAQMLSYAGLEPSYFQSGTSEHGGRMVKRGSSHLRFTLMNVCVPLIRHNVVFAEYYHKKRSEGKPHRVAMSHVAKKLVRIVYTLETRNMLFDPKQLR

SEQ ID NO: 288439 - protein, 343 aa, unidentified
MSISMIGLDTAKSVFQIHGVNETGKVVLRHKLRRSELIAFFEKQESCTVVMEACGAAHHWARMLTGLGHTVKLIAPEAVKPFVKKGKKNDAADAAAICEAASRPNVKFVPVKNLEQQGILALHAARSLLVKQQTMLANAMRGLATEFGITVPKGMQKLDELMTLVNTDESIPKQAKQAITGLHDYGKELNEGIETFEAEIVAHARHDETARRLATIPGIGPITAPLIAATVVDISLFKTARPFAAWLGLVPRQNSTGGKTRLGRITKAGNREIRKLLVLGATSMVGRADGWNSAVGAWLRDILQRRPARLVTVALANKMARIAWAVMTRKEVYRPKGGIAVAA

SEQ ID NO: 288440 - protein, 340 aa, unidentified
MRGLYAGSDLHGNNNLLGIIDEQGRRIFKKRLANDSDLIKDVLKPYKEEIVGIVVESTYNWYWLVDALMEEGYKVHLANPSAIQQYAGLKHEDDKHDAFWLAEMLRLGILPQGYIYPKEERPVRDLLRKWGHLVRLRTSLMLSLQNILSRNLGKKVSVNDLKRLGEDRVTPLLGKSEDLALAGRVSKEAIDFLTYQIHTIEKVVQKRIMLKEEYRYLLTLYGVGKILALTIMVETGPIGRFPTVGDYVSYCRKVPSRWTSNGKRKGAGNAKNGNRYLAWAYAEASEFSRRDYPEPRAYYQRKMEKTNAAVAHSALAHKLARAAYYVMRDQVPFQPKKLFG

SEQ ID NO: 288441 - protein, 423 aa, unidentified
MFKIIKFNCCGLDVHKTWIYACIGITDANFRTEYFEARFSSFPKDLRRLAAWLQEHKCEEVCMESAGKYWIPVFNVLEETCKVTLAHPKYTKPQKGNKTDRKDARWICDLFMCGMIKPSFIPPPAIRHLRDLIRYRIKLTNMLTGEKNRAQNCLTVSNLKLDDVFADVFGKSARSITEYILSHPGEKFDVAPFVDKRCKTPIDQIQAAVDGAISPEQTIKLRECLNHIDELNAHRDRIETEILQLVESFSAQLALIRTVPGMDKDPMTAILILSEIGSDMSVFPTAKNLVSWAGCCPRNDKSAKHVKSTRIAQSGCYLKPLLVQVANALLHSNKHPEFTERYRRIKSHRGHKKAMIAICKMLLTAIWNILSTGEVYNPSGYLIQTPRPTNETKVLTQKQALELLRLRGFVIKDDPVEPEPLPA

SEQ ID NO: 288442 - protein, 387 aa, unidentified
MTVLSTRRRQCQTNDNRRKDKHTMASTSSIHIPSIPPAISGHIVVGVDTHKHIHVAAILDATGGIQATMTIATDTGGFQQLLAWAQSFGQIIAFGIEGTGSYGASLTSFVRRKGYKVIEVNRADRRMRRLVGKSDTLDAQNAARAVLSGFATAEPKTADGTVEMIRQLKVAHDTAVKNRSAAMITLKAMLVHAPEQLRLEMARKTQIMLARHLASLRPRELKTPEDSIRHTLRALARRWQYLDTEIKELQTMIEELVMKCAPQLVAPFGIGIDTAAEILIVVGDNPERIKSEAALAKLAGISPIPASSGMSTGRYRINRGGHRQLNAVIYRAVIVRMRFHEPTIKYVTRRTAEGKTKKDIIRCLKRYVIREVYHLINPAENTAQIAA

SEQ ID NO: 288443 - protein, 344 aa, unidentified
MVTFGVDAHKRTHTIVAVNDRGTPLGQTTVGTTSQDHLVLLRWAARFGAERRWAVEDCRHLSRRLERDLLAAGESIMRVPPKLMAHVRDSARTYGKSDPIDALAVARAAQREPNLPLARLDGPDREVRLLVDHRESLISERTRLICRLRWHLHELDPAWEPKARSLDAQRTLDEVRGRLQDHVGVVARLAVELTERCAELTITIKALEKEITELTTQLAPALLELPGCGALTAAKIIGETAGVDRFKSRDAYARFNGTAPLPVWSSNKARHRLSRTGNRQLNAALHRIALTQARWHPPAKEMIERRKSGGNSGREALRVLKRRLSDAVFQALLHDQTAGLTLAA

SEQ ID NO: 288444 - protein, 407 aa, unidentified
MRVVHERCAGLDVHKKTVVACVLTPQGREVRTFSTVTEELLALVDWLQEWGCRAVAMESTGVYWKPVYNLLEAAEMEPMVVNAQHIKAVPGRKTDVRDAEWIADLLCHGLLRASFIPDRPERELRELVRYRRSLVEERTREANRLQKVLEGANVKLSSVASDVLGRSGRDMLTAISQGQEDPVELAGLARGRLKEKSDQLQRALRGVVGPHQRFLLHEQLSHIEELEARIHRLSAEIEARLAPFEAALQRLQTIPGVGRRVAEDLLAEIGTDMSRFPTHRHLASWAKICPGNHRSAGKSKPEHIGRGNRWLRSILVEAARAAGRSKNTFLAAQYHRLAGRRGNKRAAVAVAHSILVIAYHILKEGTSYQELGATFHDQRSSKAVARRLTQRLEALGFEVTLQLKEAA

SEQ ID NO: 288445 - protein, 349 aa, unidentified
MSAKLNAGIAVIGIDIGKNWFHVVGLDRRGAIVLRQKWSRGQVATRLATMPPCLIGMEACVGAHHLSRKLTSLGHDARLMPAKYVRPYSRGQKNDFRDAEAIAEAVQRPTMKFVATKTAEQLDLQALHRVRERLVSQRTGIINQIRAFLLERGVAVRQGLRFLRAELPRILAASCDGLSPRMVRVLEDLACDWRRLDERIERLSSEIEVLARQDAGCERLMSVPGIGPIVSSAMVAAIGSGDAFTKGRDFAAWLGLVPKQISTGDRTILGKISKRGNRYLRVLFVQAAWVVLIRPQSWDRHGLKPWLEAAKKRLHHNVLAIALANKLARIAWSVLARGRAFEASKIQVA

SEQ ID NO: 288446 - protein, 416 aa, unidentified
MLFIGDDWAEEHHDVEIEDEDGRRLARARLPEGLDGITRLHALVAEHAPASWAQLEPEQAAAQVVVGIETDRGPWVSALRAAGYQVFAINPLSAAQYRQRHSTSGAKSDAGDAHVLAEIVRLDRDHHRTVAGDSDLADSLKLVARAHQTAVWERTRHVLRLRSTLLEYFPAAVHAFEDLAASDALSLLARAPTPGRAAKLTQHQLVAALRAAHRHHVETKAQELLKLLRASALRQPVTTEAAYGAVVAGQVGIITALNTQIAGLEQVVGEHFHRHPAADIYLSQPGLGMILAARVLGEFGDDTGRFTHARSRKNYSGQSPITRASGKKKVVLARYATNRRLGAALHQQAFCALNASPGARAYYDALRARKIAHHAALRQLANRLVGILHGCLKTSTLYDENTAWQHHHTDIQPLAA

SEQ ID NO: 288447 - protein, 341 aa, unidentified
MHQATIIGIDLAKRTFQAHGATSDGKVAFRKKLSRSQLLAFLTQQPRCVVAMEACATAHEWGRAARELGHEVRLIPPAYVKPFVKRQKNDAADAEAIAEAASRPTMRFVAVKSEAQQARAMVFRTRDLLIRQRTQLINALRGHLAEHGIVAPQGPANLKLLADAISDTKISLLPIVRDLGLLYLEQIKGLGEKIAALDRTLRRESKSATTACLQTMPGVGPITAVAIEAFAPAMTTFKRGRDFAAWVGLVPIQHSTGGKQRLGRTSKMGQRDIRRLLIIGAMTIVRWASRKGAREGSWLARMMASKPRMLVAMALANKMARAVWAMLTKQENYRDPAAALA

SEQ ID NO: 288448 - protein, 418 aa, unidentified
MADEAMAEETIRWFAGIDWGSAKHQACLLDGAGKVVGEREFAHGGAGLAALCDWLVSMAGDPGSVAVAIEVPHGPVVDALLDRGFAVYAINPKQLERLRDRISVAGAKDDRRDARVAAAGLRTDRHLFRRVLAGDPSVVELREWSRLAEELQHERVRLGNRVRQQLWRYYPQLLELSDDVTAEWVLALWSMAPTPAKAARLREAMLARLLRQHRIRKLDAQAALGILRQPAITVGAGVTEAAVLHLRSLVARLRLANQELHQAARKLDELCTALSETDPAAQDSGPGDATILRSLPGVGPVTLATLLTEAAGPLARRDYAALRTLSGVAPVTKRSGKSCIVVMRYAAQVRLRNAVFHWARVAVLNDRRCRGRYEALRARGHSYGRALRGVGDRLLGVACVLLRRGMLFDPDYGSSASA

SEQ ID NO: 288449 - protein, 341 aa, unidentified
MFNLPLFVGIDYHTHVLQVCVMDQQRKILVNQSVPNDPEAVFRLVAPFGTNVFAAIEASTGVADFAEKLIAQYHWHVELAHPGYVARMKQTPDKSDWTDAKLLADLTRTGYLPRVWLAPRYLRDLRELVRHRHGLVQQRTQVKLRLRAALRNHRIVCKDSPWTVKGKKWLLDKENILNETLRYLLQEHYDTIEYLDKKITAVTERMATHVADDAVVKQLLKQPGVGIITAITLRALVGRFDRFRTGKQLAHFCAVCPRNNSSAGKTTTGGLIKAGDDLLRQVLVEAAHRLIRYDTRWKSMAERLRSNGKKTCVIVAAVANRWMRWLFRQMMVAKPLDATAT

SEQ ID NO: 288450 - protein, 316 aa, unidentified
MTEAAVFIGIDISKARLDVALRPTGIPFTVPHDETGIATVVQRLRTLLPAGIVLEATGGLEVLLSGALATAGLPVAVVNPRQVRDFARATGRLAKTDALDAQILAQFAEAVRPACRPLPDASTQQLAALITRRRQLVEMLTAEKNRRGSAPRAMRSQIQQHIDWLQQHVVQLDQELTTAVQASPIWREHDELLQSVPGIGPVVTRTLLAELPELGTLTRRQIAALVGVAPLNRDSGTFRGKRTVWGGRATVRAALYMGALVAARHNRVLKAFYQRLRQAGKAPKVALTACMRKLLTMVNAMLKQRTPWRDTSAQTT

SEQ ID NO: 288451 - protein, 410 aa, unidentified
MDVLIPRCCGLDVHQKTVVASVRILGPTGEVTRETRTFGTTTRELEALAAWLRPFQITHIAMEATGVLWKPVWHVLEPEWQLLLVNPLHLKRVPGRKSDVQDAEWIAQLLQCGLLRGSFVPPVAIRELRDLTRTRTTMEDEVTAVVNRIHKVLEDANIKLSTVASDIMGVSGRAMLQALADGETDPQRLADLARRSLRRKRAALAEAVYGRVTDHHRFLLRRFLMQVQFLEQEIATFDRRIAELTAPFAPTLVRLDGIPGINRRTAETVIAEEGIDMAPFPSAPELVSWAGVCPGKRESAGKSHGARIRKGNRWLTRALSQAAWAARNKKGCYLAAQFRRIARHRGEKRAVIAVANSILTATYFIIRDGVEYRDLGPAHFQRLAPEKLTRDLVRRLEKLGHKVTLEKLAA

SEQ ID NO: 288452 - protein, 481 aa, unidentified
MSKPKQPVSTVNQKKTAAVDGKRGGGKRKGMCLEDRPLLEANAAGIDIGAREIFVAVPPDRDEHPVQKFSTFTEDLEGMAKWLVGCRVTTVAMESTGVYWIPVYDILERNGLKVCLVDAHGMKNVPGRRTDWHECQWIQYLHSVGLLRAAFRPDGEVCAVRSLMRHRGDLVQMCNQHIQHMHKALTQMNVQVHHRINDITGVTGLAIVDAITAGERDPRKLAQLRDRRIRATEETIVKSLAGNWRAEHLFTLQQSRQMFGHYQEKIAACDAEIEKLLVKFEPRVEPQEKPMPPDRKQKQRRRQKKNANPTGFDLRTESYKLFGVDLTQIPGLMVLVLRLFCELGRDMSRWKSAREFVSWLGLCPDNDITGGRVAWRGRRRVQNRAGELFRMAAYSLHHDTTPLGGYLRRMKSKLGPAGATTATAHKIAIIFYTMVKKQVEYDETLWAERDAQREKRFEAKLKRQAQQLGYQLVPIEEKPAA

SEQ ID NO: 288453 - protein, 355 aa, unidentified
MNDAKYIGLDVHQATISAAVLDSTGKLVMESILETKAATILQFVHGLRGSLHMAFEEGTCAAWLHDLLKPHVTKVLVCDPRKNSLLKAGNKNDRIDARKLADLLRTGLLSAVYHGENGLRTLRELARSYLAITRDLTRVMNRLKALYRSWAIPCAGQQVYAPRYRSEWLGKIREAGVRRRAELYYQQLDALAILRQEVRRELLAESRKHAAMKWLRQIPSIGPIRAALLIALIQTPHRFRTKRQLWAYSGLALQTYSSGEYRFVQGQLQRSKRLLAIRGLNTNHNHDLKNIFKSAAIRAAAVPGPFQEFYAALIARGMKPSMARLTLARKIAAITLLVWKKGVRFDAEHLKPQAA

SEQ ID NO: 288454 - protein, 342 aa, unidentified
MQVTTIGLDIAKNVFQVHGIDANEKVVVRKQLRRSQVIAFFAALAPCLIGMEACATAHYWARELTKLGHKVRLMPAKDVKAYVKRNKNDAADAEAICEAVRRPTMRFVQIKSAEQQGQLMQHRTRDLLMRQRTQLINALRAHLAELGIVAAKGDSGLKELLAIVADDGEARLPIDARASVIVLAAQLEAVQTVIGAIEKRIKMQHRSNEASQRVETIPGIGVLGATAIVATVADPTVFRSGRDFAAWIGLVPRQDSTGGKQKLGPISKQGDQYLRRILIVGAISVLRRALQNPGKYPWLTQLLARRPFKVVAVALANKMARVAWALLAHGGTYRAPELPEAA

SEQ ID NO: 288455 - protein, 316 aa, unidentified
MISYFVGLDVSKATLDVGFLPESIPQFQVRNDPEGFAQLIACLNELEVERVLLEATGGYERAVLKALRLEGLNVVRVNPRRCRDYASAMGKIAKTDKIDAQMLARFARDFEDLPQIEPNQDRDELGELIKLRGNLVQHRDDDKRRMKQTTSATAITVYTEHVAYLNDQIKALDKAIERASNVLDRTTAMRLRSVKGIGVISCGTFMAYLPELGSVTGREIAALAGLAPYNKDSGKKSGPRKIEGGRYRVRKAAYMSIWSMIQHVPEVRTRYEALIARGKRAKVAAVACMRVLLVRLNAMLRDGTEWKELKPQVPAP

SEQ ID NO: 288456 - protein, 323 aa, unidentified
MQGKVSFEEDAMPVVYAGVDVSKEWLDVHLHPLGESRRFCNDKTGIRQLKRLLARHRLASIVMEATGKFHRPAHRSLWLDGFAVAVIDPLRARMFARACGYLAKTDRLDARFLALLAESLRPPADTPPSPHIEALQELVNARSVAKCDITALQNRSKTATTAFLRGELNRLVRRLEQYVERLDKEIERRVGEDPQLSRRAEILTSIPGIGRVTALALMAGMGELGTCSGKQAAMLAGLAPIANDSGARTGRRSIRAGRPAPRRALYMAALSACRYNPALARFADTLKAAGKPAKVILVAVMRKLLVLANCLLSQDRLWTPTPP

SEQ ID NO: 288457 - protein, 465 aa, unidentified
MKHNPRRHRRTPRVSPSILERININVAGIDCGSAEHFVAVPPDRDPTPVQSFNTFTSDLYRLADWLAACRVTSVAMEATGVYWIPLYEILEGRGFDVVLVNARHVKNVPGRKSDVLDCEWLRELHSVGLLRGSFRPVDGIVALRAYLRHRETLVQSAGTHVQRMQKALVQMNLQLPLVVSDISGVTGLRILRDIVAGQRDPQALAHHRDGRCQATHAEIVAALTGNYRPEHLFVLTQNLELFDACQTHIAACDTAIEAHVQTLIATVDPPAAPLPAARVTRKPRQHEPRFEIRTPLHQLTGVDLTQIDGIASYTALKLVSEIGTDMRRWPSEKHFTSWLTLAPNNKVSGGRLLSSKTQPSANRAAAILRMAAMTLGRTQTALGAFYRRLAFRVGKPKAITATARKLAVLVYRTLKGEMVYCDLGADAYNAHQRTRVLRRLRQRAATLGFALVNRETGKVLGAAVS

SEQ ID NO: 288458 - protein, 410 aa, unidentified
MKKHNYRTKKVNEINWPELAQQLGGEAVTFAVDVAKAQQYALLTNDTQSLSIIVKWELLETKGLIHELKQLNCPVTVVMESTGTYGDAMRHQFRQAGFILYQASAKRVHDAKEIFDGVPSLHDAKAACLIAKLHKEGLTKPWHELDEAGRELNAVRREYDMHQSQYERNQNRLEAYLSRHWPEVLGLFDLDSVTLEKLLITYGSPQAITADAEQAAKDMKAWGRHFLSAEKIACVIDSAVGTIGQPCINAERRYLQALATEMQHSRCQRQAAKQLLEASVEADAGLKEMAALIGKLTTAILIGLHLDPRNFSSAHSFLKALGLNLTEKSSGQYHGQLKLSKRGSATARKYLYLAALRLIQKDPVIGEWYRAKADPKVKMKTVIACLRKLAKALWHVARGERFDARKLVTI

SEQ ID NO: 288459 - protein, 398 aa, unidentified
MTYVGVDVGKRRHAVGAVDECGKVLAAARWVPQTAGGFAALADLLDSLGGPDQVVVVMEATGHYWKVLRHSLSRDGYRVDVINPLISSREASADVRGRKTDKQDAIAIARAALRAEHHPAPPEDAAFDALKAYGRQRQYLVARRSDAKRRLAASLDVIFPEVGEGFDDLDSRAARGVLHAFPSARLLAQADRRRLVAILSKTLGKTRAQASADRIRTLAAGSLARTLISEGDEFVVSQLIDEIRSLDARIEQVEQRILASPLPESARWLQSIKGAGPIHPRIVAAEIGELSRFAASDMSSRLLAYAGAEPRIRESGRWKGHAKMSKRGSRTFRHSLYVMATTIRLHTPYFNHIYARHIARGKHHTVALSHVMRKIIDVLCGMYKTQTPFRPPEFEAVA

SEQ ID NO: 288460 - protein, 346 aa, unidentified
MLIVGCDYHPRWQQVAWLDTETGETGEQKLVNGDGEAERWYRQLPVPSLIGLESTGNSQWFIDLLRQLGHEVWIGDAAEIRASYVRKQKNDRRDAGHILKLLREDRFPRLWVPSREQRDLRQLLIHRHKLVQIRTRVKNGLQHLAMNQGMQKQSRLWSVKGQQAFLQLPLAGWTQCRRHDLLELLVFLDAQIAPLDRAAQQAAEQDPQARLLLSQPGVGPITALAFVLTIGDVTRFARSKQVASYVGLIPREHSSGGRQRLGAITKQGNGFLRMLLVEAAQSVVRLDEGFRKQYAHRCHSKPKGIAKVAAARRLAIRLYWMLRTPTRYPEIVRIESSPRVPLAGKS

SEQ ID NO: 288461 - protein, 319 aa, unidentified
METVQFEQLISVGCGIDVHKDIIVATIRKSNKDYQTKSYNAFTSSLIDLRDWCKSEGVTHIAMESTGIYWKPLFNILEEDFEIILVNARHIKNVPGHKTDKKDSVWISKLLLSGLLKGSFIPPVEIRELRDLIRYRKKKTQFIASEKNRMIKFLEDCNIKLSSVVSDTQGASATKIINDIIDGKGDITSLLIHAHGRIKASKEDIAKALTGRVTPHHRFMLKMIRETIDENEKLISKLDQQIDLSIEKYQVELQLLQTIDGVGRDTAITIISEIGTDMSRFADEHHLASWSGLSPGTNESAGKKKAPESSTETNTSNLA

SEQ ID NO: 288462 - protein, 412 aa, unidentified
MEVVLECCCGLDVHKATVAACVWRRDAGGQGHKETQTFGTMTGDLLVLADWLKAQGVTHVAMESTGVLWQPVYNLLEADFEVLLVNAEHIKRVPGRKTDVTDCEWIADLLAHGLLRGSFIPPAPIRELRELTRYRKALIDERVREVNRLHKLLQTANLKLSSVASDVLGLSGRRMLDALLTGTTDPGVLADLALGKLRTKLPALQRALQGRFSPHHRVLLAHILAHLDFLDGAIAELSAEVQARTAPFEAVLAYLDTIPGVDRKAAEGTLAELGVDMERFPTHRHLAAWTGLCPGNHESAGKRRSGKARKGDPWFRRYAIEMALAASRTKDTYLSALYHRLVRRKGHKKAIVAVAHAIVVIMYHVIKHRVPYRDLGADYFDRLNVTAIKRHHVRRLEGLGFKVTLEPLEAAA

SEQ ID NO: 288463 - protein, 418 aa, unidentified
MFKIFRKNCCGLDVHKTWIYACIGITDVNSRTSYHEARFSSFSKGLRELSLWLQMYDCKEVCMESAGKYWIPVYNILEQSCFVTLAHPKYTKPQRGNKTDRKDAKWICDLFMCDMIKPSFIPPAEIRHLRDLVRYHDKLTNTLTGEKNRVRNCLTVSNLKLDDVFSDVFGKSARSITEFILAHPGESFDVSPFIDHRCKTPITEIQAAVDGAVSHEQAVKLRECLDHIDQLELHKSRIESEIMRIAEPYSVFLDLLRSVPSFNADPFTAIAILSEIGCDMSVFPSAKHLCSWAGCCPRNDQSGGKIKSTRISRAGTYLKPRLVQIANALIRSKQHPEFGERYRRIKSRRGHRKAIIAVCKMLLTAIYSILSKLVPYSPDGFLPVARPINESKVLTRAQGLQLLRLRGYTFKDDPSLTV

SEQ ID NO: 288464 - protein, 399 aa, unidentified
MLFTGWDWASASHAVTILDAAGEVVDRWVFAHTEQDLDTMLARLASHGSPAELPVAIERADGLVVDRLLAAGHPVVAIDPGAFHAARPRWGAAGAKTDPGDSYKLADYLRTDGHRLRRLEPVDAVTRELQALARLRDDHVAAKTAASNQLGALLDAHWPGAKQLFFRLASKITLAFLAEFPTPQAAAQLDQAELAAFCRRHAYRGGRHPAELLERLRSAPRPPVGLDPTVLAQVVGAQVQLLATLLVTIAELDQAIGKRLGKHPKVGLLARLPRVGQLSHAQLLAELGPILDRASSAEHAAAQAGAAPVTRASGKTSSVHFRLAANHRARQALHIFADNARHSSPWAGKLYADARARGKRHPQAVRVLGRAWLRVIWACWHTNTAYDPAKHRAEQRLAA

SEQ ID NO: 288465 - protein, 430 aa, unidentified
MKSNTQNAKIEAITEKTLVLGIDVGSETHYARAFDYRVIEYSKKPFKFSNTEAGFATFKEWILDLKERHEKDKVVPGMEPTGHYWFNLGKFLQDNEMKPVLVNPHHVKKSKELDDNNPTKNDRKDPKVIAGLVREGRYMIPYLPDGVYADLRTASNIRFQLQAELTRIQNRISRWFNIYFPEYKTVYGKPDAKSGMLILKAAPLPEDILTLGIDGVNQIWRDAKLRAVGRARAKTLIKAAEHSIGSKEGTMSARMEIRMLLEDYESKNMRLQEVMVLIEELVKEIPMAEKLLEIKGVGIRTVSGFLAEVGDISRFNNPKELQKLAGLALVENSSGKHKGKTTISRRGRKRLRYLLFEVAMSLVAKNPEFRELHNYYTTRRLNPLKKMQSLMAIAAKLIRVFYAMLTKGVDYDPKKMVSDIKRPAVYLQAA

SEQ ID NO: 288466 - protein, 326 aa, unidentified
MQGKDASEQEATVKCNAGIDVSKNYLDVHVLPGGQSVRVVNTDDGIRKLKRWFARFDLALVVVEATGKWHRRLQRSLHASGFAAAVVDPYRVRMFAKAQGIFAKTDRLDARVLALFATVMTPTVRPPASEALQNLAELVAARDSAVAEGTALKNQLAATNGKFLQRHLERRIARNAKDVATIEREIMACIKADDGLARRYAILTSIPGFGPVVAATLVACLTELGSCSRTQIAALAGLAPIADDSGKREGVRVIWGGRPTVRRALYLAALSAARFNAALKPFFERLIAKGKSPKAVLIAVARKLVVLANTLISENRTWEPHAPKHA

SEQ ID NO: 288467 - protein, 313 aa, unidentified
MDVSLKTLDARIGHDGPSRSFSNDSKGIAKLAQFCREHKASLVAMEATGGYEKKPFALLWAEGIEVTIVNPRAVRDFAKAMGLLEKTDKIDAGIIAWYAKTKGCVALKPSSAQQQQLKALVVRLRQLTEMKSAQGNQRRLVEDKLVLKSFRQMLKLLQQQISELADKIAQLIAADPLWKELGQRFRTIKGVADRTVARLMAEMPEIGVLSNKRIAKLAGLAPLAHDSGQHKGKRTVRGGRRSIRDILFVIAGGVARQNPDFGAFQKRLTEAGKAKKVIRIALAHKLLVRLNAKAREVRQSMATDAHPGLVSCS

SEQ ID NO: 288468 - protein, 420 aa, unidentified
MVYLERGYNLKELPWSKTVSNSFLFKEACMILVGVDVAKDKHDCYIMTSEGEVLFKSFTIANNMEGFNQLYEKILSVIDNFDNVKIGLEATGHYSYNILGYLLDKGLTPYVINPLHSNLYRKSLSLRKTKTDKVDSRIIASMLMSDVSLKPYSNTLYHNEELKSLTRYRFTKVQERAKLKISISRLVTILFPELEKLVPTLQMNSIYALLYEFPSAHAISKAHLTRLTNLLNTTSKGHYTKDKAVLIREAVKNSIGSNMPAKSLELKHTIKLIKELTSEINEIEEEIKIIMNKINSPILTIPGIGLSTGAQILAEIGDFKNFSSPDKLLAFAGLSPSTYQSGNMYSSNAKMEKRGSKYLRFALFNAAIYVSYWEPTFSQYLKKKRVEGKHYYVAISHVVKKLVRVIFHLEKTNERYSTVV

SEQ ID NO: 288469 - protein, 351 aa, unidentified
MTMVGGFDVHRKQITFDYVDDDGLVRVGEIRPATRTTLRHWLGEHCPAGDAEFALEGCTGWRYVVDELATAGVVAHLGDPAEIATLRGPKKRAKTDRADARLLRTLLLEGRFPESWIPPAHVVEVRTLGRLYCTLMDERRAWQQRIHAPLFHQGCPPIRALLSVAGRDALAQAELSAAGRQYVDTALRRIDELTVEIGPVRGQLVSFARRQVACQALQARQYGVGWLCAAIMWAEIGDARRFSSSDQLVRFAGLDVTVYSSAGKRSPGHLSRQGSPELRWATFEAAKCAARHGSPDHAYYQRLATKHDGHNGKNPTLAVERKILRRSYHTLRELGDAALAMPVPEEQGVAA

SEQ ID NO: 288470 - protein, 325 aa, unidentified
MMAQNDLVVAGIDVAKDKVDVCIRSLSLRRTFASTAEGRRELACWLRRKKVGKAVMEASGGYEREWAKALREKDVEVRIVDPKRVRSFAQSAGRLAKNDAIDAEMIAWFAETFGEANGQAYDAARENLVQIVRARQGLLDLQTSLQNRSEHAAPEVVQKMQGRLLKKIALELAGLEAAIAAMIKATAHFAKLAEIIESVPGLGEVTAAGLIAAMPELGQVSNQAISALLGVAPYDDDSGKRRGERQIKGGRRKIRNLFYMACLGAATRHNPMLKAFYQRLLAKGKPKKVALVACMRKLIVILNTMIARRQKWDTSHYAVSRSSAP

SEQ ID NO: 288471 - protein, 416 aa, unidentified
MNSSEYAALVALDWGDQEHVFALRSGGKKETGTIAAAAESIHPWLESLGQRHGYRPIALAIEAGKNALLHALTAYPWLTIYPVHPATSERFRQAFTPSGAKADGPDAEVLLTVLDQHRTQLRALNLDTPQTRALAALTEVRRNAVDHRSQLSNELRSTLKLYFPQALELFGDDLWTPLALDFLARWPELAAVQRAKPATVQTFYTAHNSRRQTVIAERIALIQQARPMTTDRAVIAPAILQVQLLIAVLRPLQQHLLAIEAQIAEAFAAHEEVDLYRNLPGAGPALAPRLLVAFGTVRSRYPNASSMQKYTGVAPVTERSGRQIWIHWRWNAPKFLRQTFVEWAGQTIPKCAWAKAYYLQQKRAGKHHQTILCALAFKWIRILWRCWQDRTPYDESRYIQSLIRQNSPLIKYLLAA

SEQ ID NO: 288472 - protein, 391 aa, unidentified
MIYVGIDVAKDKHDCFITNSNGEVLFKAFTISNNQDGFNVLYQRIESVMEDVTKVKVGLEATGHYNYNLLGYLIDKGLTTYVINPLHSNLYRKSLSLRLTKTDKVDARTIAYMLMSDVNLKSYSDTSYHNEELKSLTRYRFDKVKERAKLKTSVSRLVCILFPELEKLVSTLHMASVYALLSEFPGAKHIAGAHLTRLTNLLSDASKGRYGKDTAITFREAARASIGSNMPAKSLELKHTIQLILELGSEIEEIENEIKIIMDEINSPILSIPGINYRMGAMIIAEIGDFSRFDSPDKILAYAGFSPSTYQSGQLDSAYSHMEKRGSKYLRYALYNAAKYVCHWDSTFAGYLAKKRAEGKHYNVAISHSVKKLVRVIYHLVKSNQQYIKVA

SEQ ID NO: 288473 - protein, 382 aa, unidentified
MQASTEITPTAGHIGTIFVAIELSQKTWLVTLHSPDRDRISRHKLEGGDHVELLAQIEKVKARAAEKLGSAPRVVSCYEAGYDGFWLHRLLQAAGITNLVFDAASIAVEQRSRRAKTDRIDGELMLRTLMAYLRGEPRVVRIVRAPSVAEEDARRASRERDRLVREQTAHGNRIKALLRLFGVAVGNPRRRNWLGFLEQQRDWQGQPLPPHLLAEVKREHARLMLVREQLAALEQAQAAQACPVPAPMAERRASLQRLKALGPAFTTTLVDELFYKDFRNRREVASYCGLAPSPWKSGGIDREQGISKAGNRRARHKAIELAWLWLRHQGDSALSRWFRTRTANAGKRAKRIAIVALARKLIVALWRYLTTGLIPEQATMKA

SEQ ID NO: 288474 - protein, 410 aa, unidentified
MRVIGLDVHRSFGRIAILEDGECQDAGRVAMEREAVLVFGRSLRPSDDVVLEETGNTAILVRLLAPFVHRVVVANPLQVRAIAEAKVKTDKIDARMLAKLHASGFLPEVWVADEATESSRRRMAERTQLVSHLTRLKNRVQSVLHANLIPRYEGKLFTKGGRRWLEEAPLPADQKRVVSRHLSEHDRLAAELAVVDRELAKEALGDPRVRRLMTIGGVNAIVAGSVLAAIGDITRFSSPEKLVRYFGLNPRVRQSGDRPAFHGRIAKQGRGHARAMLVEAAWSIAMAPGPLRAFFRRIQEKRGMQVAAVATARKLTVLVWHMLTKGKDYVWQRPALMSWKIRELELKAGQPSRRGGNKKGPAADYSLKSVRDKECQWLGLAEEEYRRFVCAWKAHPPAERSGAAIEARRL

SEQ ID NO: 288475 - protein, 344 aa, unidentified
MEPMYYIGLDVHKRKISYCVKDSGGKIYAEGSLSATRMDLDHWMKTLPQPWTAAMEATMFTGWIYDHLKPHAAALKVAHPLMLRAIAAAKKKNDRIDASKICDCLRCDFLPECHMAPTAIRERRRTLRYRNLLVRQMVQMKIKISSLLMEAGVSYNKQRLHKAGYFRELLATNPDINEELRSLLRLCREIVVRLEKTESALVRSLERDSLLIDRVERLMTIPAVGPITALTWALEIGDVRRFSSIKKAISYCGLCGAEKSSGTIVQRTPLSKQRNKHLQTMLIEAAKMAPRNSPELAMIYDREKQKGNANRATLAVARKLVAYLMAVDRGQRNFQVAETNGIAA

SEQ ID NO: 288476 - protein, 354 aa, unidentified
MAITKQSMGIDISKSTFTVCLCQRSEDGKLTFSKTLDFSNDTKGFNQFLRWTKGVITLGTELVFLMEATGVYYENLAYHLHKIKKMVHVVLPNTSKHYFSSLNIKTKTDAVDARVLGQFGVERVHKQWSPPPSALLQLRNLTRYYVQLQEQKTALGNIKHSKDCSHDIQSFIIKSNKKLIAEIDKEIARCVKEINNLVKADLELNRRIEKLATIKGIGMITMVTVLAETMGFEQFSSAKQLVSYAGYDIVQRESGTSIKGKTRISKKGNRYIRNALYFPAMVACRYNVSLKETYMRIIQKKSSKMIGQVAIQRKLLILMYTLWKNDTLFIENYKVSSPDPETETTLDSSEAELL

SEQ ID NO: 288477 - protein, 345 aa, unidentified
MALYVGLDVSLRMTSICVVEADGSSVWEGKAESEPVPLVKVLSPWRDKIALVGIEACPLSEWLHGALVESGFQIVCIETRHAQRFLSSRPNKTDRSDARGIAEMMRLGHYRSVHVKSKASQLLRTTLIARKKFVDHMLAIEDTIRGLMKVHGLKLGAVHRSRFPARVETLLADAPDLRMAIEPLLEARNMMRKHKALMDRQLSQMARKDHVCKRLMTVSGVGPLVSLSFKATIDDPNRFKDSKAVAAHLGLTPRVYQSGEIDRSGNISKCGDKLMRHALYEAANSHMRISKKWSTLRAWGVKLAKRIGSRKACVAVARKLAIIMHRMWVEETDFRFGKPPVTQPT

SEQ ID NO: 288478 - protein, 395 aa, unidentified
MFSHRYCLTPFYLFEFEQNVRNTLRVYIQNIQPGDKTKRDFSLLSFKILVMRKIVKQVLGIDVAQKELVVSLGRMHDDWIPELYASKTFQNTQKGFITLVSWVKKLTEVGHGVRYVMEATGVYHESLAYFLEEKGYEVTIVLPNKIRNYFKTLTVKSITDKTSAEAIALFGLEKSLGSWKRPKKIFRSLRQLARERDQIVQERTMVKNQLHAEQAEAEPNLSSIQRIKKRIQFLNKQEKEIKTEITALAKTDEQVDKSVKVTSSVTGIGVLTAVTVLAETNGFELIRNKRQVSSYAGFDVIQKESGTSVKGKSRISKRGNKYLRKAMHLPALAAIRHDERFKAIYARLIARHGIKMKAVVAVQRKLLEIMYTVYKTNTPYDKNYLKRIETVNAEA

SEQ ID NO: 288479 - protein, 418 aa, unidentified
MQAETDEGEVIERVAALDVGKAEVVCCARVPGPGGQRMQEVRTISTMTAALLGLGDWLASLGVSRVVMEATSDYWRAPFYLLEDRFETWLVNAHDVKHLPGRPKTDRLDAVWLCKVAERQMLRPSFVPPPAIRQLRDLTRYRVDLLAVRTAEKQRVDKLLEDALIKLSVVVSDPFGVSGRAIMAALIAGERDPAVLADLARGSLRSKTARLTEALTGRFTEHHAFLLTQMLNRIDGITADIATVQERIETQLGELAPAVTRLDAIPGVGPVAAQMILAEIGTDMTRFPTPAHLTSWARFAPGVSESAGRPKGNAGTGHGNPYLARVIGEAAVSAARTDTFLGERYRRIARRRGKKRAIVAVGRSILVIVWALLSDEQAQFVDLGPDYYANRTNPERRVRHHVRELQALGYTVTLNPAA

SEQ ID NO: 288480 - protein, 356 aa, unidentified
MLQKLNSEIAVIGIDIGKNSFHIAGQDQRGAIVLRQKWSRGQVESRLANLLPCLIGMEACVGAHHLSRKLTALGHDARLMPGKYVRPYSKGQKNDYRDAEAIAEAVQRPTMKFVATKTAEQLDLQAMHRVRERLVGQRTGVINQIRAFLLERGIAVRQGLRFLRAELPGILATRTDVLSPRILRIVEDLMGDWHRLDERIEGLSGEIETLARQDQGCARLMSVPGIGPIISSAMVAAIGSGDAFSKGRDFGAWLGLVPKQMSTGDRTILGSISKRGNRYLRALFVQAAWVVLVKLGPKQWDRYGLKSWIEAAKKRLHHNVLAIALANKLARIAWAVLHNGRAFECVRTNETASQPA

SEQ ID NO: 288481 - protein, 449 aa, unidentified
MEEPQEIEDEEHEQVLERVAAVDVAKATGMVCTRVPHQSRPGKRRTRVWQVTATTGAVLELADHLAAEGIEKVTLESTSDYWRIWFYLLEAAGLNVQLVRAQDVKQAPGRPKTDKLDAVWLAKLTERGMLRPSFVPPAEIRQLRDYTRLRTDLTRERTRHYARLEKLLEDALIKVSAVASSLDTLSVRDMLEALIAGERDPAVLAGLARGRMRAKHDRLVQALTGKFDGHHAELARMLLDQIDALSAQISRLTTRIEELIAEIPAARGIDADGSTGPAAGHGAGAPVLPAIDRLDEVTGIGREAAQAVIAEIGLTMSVFPTPAHLVSWAKISPQTIQSGARSRGGRTGKGNPYLKGILGEAAAAAARTDTFLGERYRRLVKRRGKLKALVAVARSILVIVWHLLADPATRYRDLGADYYASRIDKDRKTRSHIRQLEALGYTVTLNQAA

SEQ ID NO: 288482 - protein, 412 aa, unidentified
MEVVHASCAGMDVSKTDAKVCVRVAGAGRRKTVETVTTWGAMTASILDLREHLAAVQVTCVVMEATGDYWKPFYYLLQDLPGVEVMLVNARHVKNLPGRKTDVADATWLAQLGAHGLVRGSFVPPAPIRRLRDLTRTRTAITRERGREAQRLEKLLEDAGIKVSVVASDILGVSGRAMLEALIGGQRDPGVLADLAKRRLRSKIPELTQALQGRFEEHHAFMARVHLDLIDQHTAAIEALTARIEQVIEPFRGFRDLICTIPGISTLTAEVIVAEIGDDMSRFPTAAHLASWAGTTPGSNESAGKVKSAKTRPGNPYLQGALGAAAMSCAQHPGTYLNAKYRRVATRRGPQKANVAVQHAMLVAIWNMGTNGTLYDDPGADYFTRLNPERARTRAVQQLESLGYAVTLAHAS

SEQ ID NO: 288483 - protein, 357 aa, unidentified
MGKSIKNLSSVTVVGLDIAKNVFQVHGVDAAGALVVAKPVRRGQVLNFFSSLPRCLVGMEACSSAHHWARSLSELGHEVKLIPPAYVKPYVRRNKNDAVDAAAICEAVGRPAMRFVPVRSVENQAQLMRHRARELLAGNRTRMLNALRGHLAEIGIVAAQGAQNAYALKRLVADGLDDNGEIIVPDCVRRALAPLVHQIDVVDEEIAAIDEELKALVKSDETARRLMTIPGVGPVTAQAIVATVRDTSAFSSGREFAAFLGLTPRQSSSGGKERLGRITKMGDRYLRKLLVIGACATLSHRKGHNDALRVWASSLLERKAVKYKFKLTAVALANKVARIVFTILTRGGEYDERPIAV

SEQ ID NO: 288484 - protein, 453 aa, unidentified
MARKRKKDAKQKNAMLPVMRPDAAGIDIGATEIFVAVPADRAAENVRSFPTFTQDLYALADWLTECGVKTVAMESTGVYWIPLFQILEDRGFEVCLVNARHVKNVPGRRTDVSDCQWLQFLHSVGLLRASYRPEQEVCAVRALLRHRESLVQMAATHVNHMQKALDQMNLQLHHVISDITGQTGLAIVDAILAGKRDPFELAKLRNERIKASEEVIAKSLVGDYRAEHLFTLRQSLAAYRSYQKLIDDCDREIRRSLEEFESPRQPDASAGDNSKTQPKTPSTESVLRSELKRVFGIDLTKIPGIRVGIAQTLFGEIGPDFTKFRSASAFASWMGLCPDNDISGGKVLWVGTRKVNCRAATALRMAAQSLHHSKSALGDFCRRMRAKLGAPKAITAAAHKLARIIFHLITTRQEFDDSRFAADQLRYQKRQEAKLRAKAKAMGFELSPLPQAG

SEQ ID NO: 288485 - protein, 344 aa, unidentified
MVLGREVVCGADIHKRFLLAAILSSGGHKIQNRFDSDLEGLISFRSWLKEHGCQKVAVESTANYWLPVYSVMADDVEFVLANAYQIKHIPGRKTDTLDSEWIAELCLKDLVSPSRIFSGKDRDLRSLTRSRENYVNMRSQVKNRIHHELESASIKLSSVLSDIFGKSGQHIIRGILRGVSFEEIFDSIPAKNLKAKKEEIRDAIVANLSPVQIYLIGQLLDSVEFLNSQIVLIDQQIQVLLQMRKEDLKIAMSIPGMGLVSASTILAEIGNFADFKTGDQLASYCGLVPSVYQSAGKLITGHITKRGSPHVRRMLIEVAHAISRMRGDSKLKQILSQDQSEKWS

SEQ ID NO: 288486 - protein, 325 aa, unidentified
MILSMGVDISKKKADIIIYNDVVKKNYVITNSVSSIKRFLKKHSDVDRIVMEATGTYYLKFATIANELGFYVSVVNPYIIKKYGEYKFKRSKTDKIDAELIAKYGYENNPKKYKITDKLRSKLKSLLTTITGLKKQITQNTNRIEALSQFPNNETKYSIKALQKVIKAIKREKSNIEKEIQSIIKNNFKKTYELLDGIKGLGPGCNAAIIAYYGDFSDFDSAKKAVAFAGMDPIKHESGSSVRKKSKISKRGNKVLRALLYMGGMSAIQYNKQCIKLNKRLKDKGKIGKVRIMASAHKLLRLAYGVVTSGVKYDPDYLKKSAWQS

SEQ ID NO: 288487 - protein, 314 aa, unidentified
MTPGRFVGIDVAKRRLDVAERPHGARWDAANDAAGIAGLVERLNAGGPISLIVLEATGGYEIPLVAALTAAGLPVVVTNARQVRDFARAVGKLAKTDAIDATVLAHFADAVRPELRALPDDLTQTLQGWLARRRQLLEMLQAEEQRLAIAARGIRPQIQQHVEWLRQQLRDVDTALQSLIRQSPVWREQEDLLRSVPGVGPVLATTLLADLPELGRLNRRQIAALVGLAPLNWDSGQQRGTRHIWGGRAPVRPTLYMATLSAVRCNPIIRGFFERLSAAGKPRKVALVACMRKLLTILNAMMQRRTGWQPILLA

SEQ ID NO: 288488 - protein, 420 aa, unidentified
MKTNDYAAYLALDWGDSHHAFALQMADTQKTEKGQFAARPEAIHDWLKELGSRCSHGRVACAIEAGGDALVSALLEHKWIEIYPVNAAMSARFRKALVPSGAKDDVPDANVLLTLLLRHGDQLKPLQLDSAKTRELAALVLARRGAVDRRSQLGNQLRAVLKGYFPQALALVGDDIHGVMALDFLERWPDLATLQKARAATVQSFYVLHRVRRPELIKSRLELVAQAQPLTQDSAVIGPAVLQVQMLTAMIKTLQRHIARFDESIQERFAAHAESALFRQLPGAGPQLAPRLLVAFGDNRQRYPDATSLQKYAGLAPVKEKSGRQLWVHWRWNAPIFVRQTFVEWAGQTVVYCDWAGVYYARQKRAGKGHHAIIRALAFKWIRVLWRCWHRQEAYDEARYLTALRQRRSPLIQDLDLALS

SEQ ID NO: 288489 - protein, 348 aa, unidentified
MRTHPRNAATYGIDIGKTTYHVVGTDAAGKPIQRAKFTRSTIFAFFSNAPAALIGMEACPGSQWLARKLTVLGHTVRIIPAQFVKPYLKSNKNDALDAEAIAEAVRRPTMRFVQIRRCEQVDMQALHRVRDQLVYSRTRLICQMRAFLLEYGIPMRNGAGAFKAELPKILDDEANDLTPAMRHILFDMRADLHALENRIDTVSDEIKAAASRDDVSRRLMTVPGIGALGASALVAAVGDGKQFNKARDMAAWLGLVPGQYSTGGKAHLLGISKRGNPYLRRLLIHGARSCIIHLDRNRDRLGSWLDALQARLHPNKMAVALANKLARIAWVILTRPGATYERRDPRFA

SEQ ID NO: 288490 - protein, 370 aa, unidentified
MAQSSTLFVGLDVHKDSIAVAYAPEKHGTEVIFLGPIGTRQADLDKLIRRLQSKASRLAFAYEAGPCGYGLYRYLTEKHLACRVVAPSRIPKKPGDRVKTDRRDAVQLARLLRSGDLDPVYVPSVEDEALRDLSRAREDTLHDLKAVKLRLKSFLLRLGLHYTGRADWNEAHLRYLAKVVCPTPDQQIVFQESLRAVTEQTERLQRLEAELAERIPTWRLHPHVNALQALRGVQQIVAVTTVAELGDLTRFDHPRQLAAYLGLVPSEHTSGAKRRQGSITKTGNGHARRALIEGAWAYRFPAKVSAHLQKRLERLPKRLQDISWKAQVRLCKRYRRLIAHGKHPNVAVTAIARELSAFMWAIAREVPLTK

SEQ ID NO: 288491 - protein, 414 aa, unidentified
MFAVGIDVSNGRSTVAVLQSKTSALMKPFEIPHTAEGFASLAGKLAGLDGEVRIVMEHTGRYYESFAKAMHSAGFFVSTINPLAIKNYQDGINIRKVKTDKADAMKIARFALDKWEILPQYTPMDTIRYDLKTMHRQFQLSSKTKTALSSNLVALLEQSYPGANRYFDSPVRPNGSQKWVDYVDTFWHVDCVAKVSQNAFVERYRKWCKRHGYNFSQQTAIDLHTDARQKFPLVPKSDTCKLLVREAVSQLNAVSRTVETYRTEMDRLASQLPEYGTVMAMTGVGKSMGPQLMAEIGDIRRFAHQKSIVGFAGTDPIKDDSGDKVSGSKPSSKRGSPYLRKTLFLIMSILLQLHPQDDPVYQFLDKKRSEGKPYYVYMTAGMTKFLRIYYGKVRDCLKEQGLWEQTPDEPGRAD

SEQ ID NO: 288492 - protein, 413 aa, unidentified
MTYRICGIDVHKKMLAVVVAAITEDGEIRFERRKFDNHEAGLKSLEEWLVECGVSEAVMESTAQYWRSVWLKLEGKYRLHLAQAMSNRAPRGRKSDFAHAERLVRRLVAGELVLSYVPDREQRLWRMLAREKYLARRARVQQINALEALLEQVRIKLSSVVSDLSGVSSGRILRALTRGVQDPAELAAMADRGVKCTPEQMRIALAAAPQLRTEERAMLKQMLDRIDLLAQQIAETDHLLATCLSQHQDAVTRLSAIAGLGADSAQQMIAEIGPQAAAFSSAAQLASWIGVCPGREESAGVSKSDRSPKGNRSMRRLLAQCANAAVHAKGSAFELFYRRKVAHLGHYKALWAVAHKLCKVIWKVLHDGVSYQERGPRWSSPHAAKQIQRLKRSLRLLGYDPNSLRKLDQAASV

SEQ ID NO: 288493 - protein, 342 aa, unidentified
MESAVTIGLDLGKSVFQVHGVDAAGAIVVQRRLTRGKLLHFFGKQPACLVGMEACAAAPHWGRELRKLGHTVRLMPPRYVKPYVKRQKNDASDAEAICEAVTRPSMRFVEIKTCEQQGTLVLHRVRLMLMRQRVQLSNAIRGHMAEYGLVAPVGRNGLQRLIAILGNPDDDRVPAVARASLAPLVCQFDLINGQVLENDRRVRASARATELGCRLMEVPGVGPVLASAIVATVPDPAAFKSGRNLAAWIGLVPRQNSSGGKEKLGGITKQGDRYLRQLLVAGALAVIRYAQRHGTKRPWLVQLLARRTPKIAAVALANKMARMIWAMMMTGQRYREPTVAAA

SEQ ID NO: 288494 - protein, 457 aa, unidentified
MRIVYKRCCGMDVHKDSVTTCVLLIDEYGEWRSEKRKFRTMTRDLREMATWLASLRVEAIAMEATGIYWKPVWNILEAEKKFHLLLVNAHHIKQVPGRKTDQKDSEWIADLLQHGLLKASFVPPQTIRRLRDLTRMRVKIRQMLATFANRIQKVLEDANIKLGSVASDVLGVSGRHMLHALVEGQQDPEQLAALAQGRLREKRAELQLALEGHITDHHRFQLKFLLEFVQFGEKQLSKLEAEIRCLLAQVDPASVPPEDTVTAELAAPGAKPEAPATAQKSPLQTVVELWDTIPGVDELTATTLVAEMGANMDQFPSAGHAAKWAGMCPGNKESAGKRLSGKTPKGSVWLRRALCQAAWAASRTKNTYLAAQYHHLIVRKGKKRTIVAVAHTMLAMAYYMAKRQCTYQELGGDYFDRRNADTMQHRLVKKLKNLGYEVTLTPINAPPTAQEPSAQCC

SEQ ID NO: 288495 - protein, 426 aa, unidentified
MRCIGLDVHQTFCEVAIWEAGELRSAGRVKSARAALEIFAQSLAPTDRVAMEATGPAMEIARILEPHVAQVIVANAQELRAISHARVKSDNYDARTLAQLLHAGMLESVWVPDADTQALRRRIARRSALVRQRTRAKNEVHATLARCLLGRAPVSDLFGKGGRAWLARQELPEEEAETVSGCLRQIEFLDSEVAAIDAKLCEWVLASPEARRLMTIPGVGVPVAATLMAAIGDVSRFQTPRKLVAYLGLDAKVRQSGEEAAKHGRISKRGNAQARAVLVEAAWIAVRSPGPLRAFSERLRARKHAGVAAVAVARKIACLCWALLTKEEDYAYGRPSLVRAKLRRAELASGAPRLSNRHGGQRVSATPQEREAERELVERAEAAYRRLVADWHSSGAKGAGVTKGRASSGPSTGQAARQASAPDPAL

SEQ ID NO: 288496 - protein, 432 aa, unidentified
MAVRETHPQPLAFRAAAVTARHVRGGPGFVDKDEAFGFEIDLAIEPMPALPQDVGTVLLDRVPGLYGMARPFSPASDMMLVLEEERSGPMSIVILGVDLGKNACSVVGVDAAGAVVVRRSMRRQTLVDYVAKLPVCVVAMEACCGAHYLGRLFAAHGHEIRLMSPEYVRPYVKAQKNDDRDAEGIAEAASRPTMRFVELKTQEQLDIQTLHRVRSRLVAERRSLTNQLRAILLERGTIFPVGRRKLELGIDALLADEDTTLSPRLRQLVAELRAEWRELDTRVETLNGEFVELARNDAAARRLTSIPGVGVLNATALIAAVGDASSFAKARDLGAWLGLVPRQHTTGGKPRLLGISKRGNTYLRTLLIHGARAALPSLAQSETPLGRWLTGMIERGVHRNAIVVALANKLARIAWAALRKDATFERGYPVAA

SEQ ID NO: 288497 - protein, 342 aa, unidentified
MEHYAGIDVSLEWSSVCVVDSSGRIIREAKVASEPEALVGFFGQLGLPVVRIGLEAGPLSQWLYAGLAKAGFEAVLLETRHVKAALSAMIVKTDRKDARGIAQLLRMGWFRPVHCKSPAAQEVRALLVGRKLLQAKLRDVELSIRGILRGFGLKVGEVSKGQFAARVKELVAGHEMLETVIGAMLQARDGLQIEFMRLHRRMLAIVRGDAVCRRLMTAPGVGALVAVTFKTAVDDPERFRTAKAVGAHFGLTPKRYQSGETDVSGGISKVGDAMVRTALYEAANAMLTRTVRISALKRWALEVARRRGMKRAKVALARKLAGVLHRMWANGTDFRWGKEAAA

SEQ ID NO: 288498 - protein, 343 aa, unidentified
MVRSVVGGVDTHADTHVAAAVDGNGGLLGIESFPASETGYEELLGWLVGFGPVEQVGVEGTGSWGVGLTRFLHDQEVVVVEVDRPNRQKRRKEGKSDPTDALAAARAALSGEATVTPKARNGPVEQIRVLMVARRSAREQRIQTLNQLRHLVFCAPEPIRDRFKDRPKTGLVSETANMRPRKGSDPITYRTNLVIKSLAQRIKSLDAEMRTIDQTLRSLIEETAPALLEMYGVGVDTAAGLLVTAGDNPERLHAEGSWAHLCGVTPLPANSGRVTTRFRLSRGGDRQANAALYRIVLTRMSSHQETRTYVARRRDEGLNTAEIMRCLKRYVARQTYKHLPHMI

SEQ ID NO: 288499 - protein, 332 aa, unidentified
MSVYVGIDVHRKRSQVAVIDEGGKVLANRNVPNGVKPVLSVIGELPAGTPAAYEAAFGWGWLLELLEDYGFEPHMVHPLQCKAIASARLKNDKVDAATLAQLLRADLLPEAWIAPPEVRQLRAMLRHRAQLVRLRTLLRNRVHAVLADHGHGRPAGCWSGVGRRWLASLELPPVSREVIDDGLALMDALQQPIDRLDAEVRQRAKTDPRVKVLTQLPGVGMFTALVLLAEIGDITRFGSARKLASWAGLTPTVRGSDRTVHHGHISKQGPTWVRWVLCEAAQTAKRHPDFAPGYEALARRRGKKIATTAVARKLITRAYHLLTDASATGEPR

SEQ ID NO: 288500 - protein, 340 aa, unidentified
MNIVYLGIDLAKNVFQLCGLNQAGKPLYTKRVDRKILLQTVANIPACLIGIEASTGAFFWQREFEKLGHKVKVISPQYVKPFVRGQKNDGNDALAIAIALMQPTMKFVPPKSPEQQDNQALHRARQRIVNHRTATVCQIRGLLLDRGIPMGISVTRARRAIPLILEDAENGLSARMRRTIAELYDLFLDLERRIGFFDKEIDTVFKQSEACQRIAKVKGIGPKTATAVIAAIGKGTEFKNGRHFAAWLGLVPRQHSSGDRQVLMNMTKKGDKHLRTLLIHGARAVVRVATNNNDGYLNQWVNQLKERRGFNKTTVAVANKNARIIWSILHNETEYRPAVI

SEQ ID NO: 288501 - protein, 374 aa, unidentified
MEKSSTVFVGMDVHKESIDITLAEQAGEVRRLGAIGGDRGSLLKMVRKLTSQGKALVFVYEAGPCGFWIYRELRGLGHRCMVVSPSLIPRRSGDHVKTDRRDSERLASLARAEELEAIHVPDIRDEAIRDLVRARDDTIISQRRSRQQLKALLLRNEIRDEGKSSWTQAHRRWLSLLKLPQAAQQIAFEEYIGAIESATERIERLTRGIQNEVLSWRFAPVVAALQGMRGIQFVHAVTLIAELGDLTRFPSPRQLMGYLGLVTREDSSGPSRRQGSITKAGNSYARRALIEAAWAYRHPARVTAIIARRQSGVPEACRIIAWRAQLRLAGRYRRLNARHLHHNKIVVALARELSGFVWAIAQTVKPTEALPEAH

SEQ ID NO: 288502 - protein, 350 aa, unidentified
MEISVFSVDLAKNKFQVHGFDARGEKRVAKTLKRGQFLPFFAAHGQRGEVVMEACGGAHFWGRRLREMGYRVRLLPAQFVKPFVVGNKTDANDADAIFEASRRSSIRAVPVKRIAQQDALLAHATREQWIKMRTALVNQIRGELAERGVVFGKGIAVLRRELQALLAAEVSGDITPAFQAWLRQRQQDWAVFDARIKDCERLIQRHYQDAAACEQIGQVNGVGLLTATATVALVDDGQQFQSARHFGAWMGLTPKEHSSGERRMLGSLTKRGNLYLRKLFIHGARSVITASLRKRKSGQALNDRDRWIHALVDRRGFNKTCVAVAHKNARIVWALLTSGECYRPPAMIAA

SEQ ID NO: 288503 - protein, 338 aa, unidentified
MTIYAGLDVGDKTTHVCVVDAGGGFVWRGECATDPDVLAKALRKHAPGLARVVLETGPLSTFLYHGLVERGVPVTCICARHAKGVLSVRSNKSDVHDAEGLAQLARTGWFKAVRIKQEATHLDRAQLKIREQLICAHRSMANQLRGLLKLFGLRMGKVTTPNKRAERLRALFAQKPEIEAIMQPLIESLEALEAQIRRSTKLLAATAEADPITARLMTVPGVGPITALTFKSSIEDPGRFDRGRDAGAFAGLVPRRNQSGERDYKGRISKAGDPMLRSALYEAANNLLARVKRPCALQAWGRRIAETRGGKRARVAVARKLAILLHKLWQSETEFCWH

SEQ ID NO: 288504 - protein, 353 aa, unidentified
MNSRGCLYVPGIIVGVDTHKDEHVAVVVDKLGVRIGQRSLPTTNMGYVSLERWASGLGEIDAFGVEGTGSYGAGLARFLRGQGHKVVEVNRPDRSTRRRLGKSDPTDAEMAARSVLAGVARDQPKSGIDKVEMIRMLKRTKDSAMKSRIQAINQMKALIVTAPVELRAVLRGLITNQVVARCARWRHGQLGTPTAAAKYTLRSLARRHIQLTQEIEALDAQLARLTTAFAPALMESFGIGPDTAAALLITAGSNPERLKSEAAFAALCGVSPVPASSGKTNRHRLNRGGDRKANAALYRIVIVRLRYHDRTKTYFQRRMEEGKTKTEVIRCLKRYVAREVFSILHDIGKRCMA

SEQ ID NO: 288505 - protein, 333 aa, unidentified
MSKNFIGVDLHKRFCVFAELDANGNVIRRGKFGNNFKEISDFASSLKQNTKLTVEPVLNYLWFLDQVKPYIDSVHPANPQKVRVIAEAKTKTDKYDSLVLAELLRTNFLPESYYVPEHIRKLRDLVRQRCHLVGARTGFKCRIRHLLFLNGSKVEASDISSPKARKQLKELCLADTIKKSVYQCLGIIKELNKEIEALELEIEKNSPKNEDIALLMTIPGIGILRATIIYVETGDINRFKSKKAFSSYTGLVPIVRASGEKIYTGKITKAGSRALRTVLIEAAIEASRKSEHLHRMNSRLTYRGNNKKARTAVAHKLAIIIYVMLKKREPFRK

SEQ ID NO: 288506 - protein, 461 aa, unidentified
MQIIHRCCCGLDVHKKLIVACLISLNEAGEFQKEIRHFPTMTKDILALADWLTSAGCTHVAMESTGVYWRPIWNLLEGQFELLLVNAQHIKAVPGRKTDIKDAEWIADLLQHGLLRPSFVPPAPQRHLRELTRYRSTLLAERARLVNRLHKVLEDTNLKLTAVVTNIMGLSARDMLDALLQGETNPEVLAKLARGKLRKKREDLEQALVGRVDDHHRFLLTSLLTHIDFLDEQVADCNGKIEQFLSAPSDEKAELVSSASDDQRQEQALVSSTPVGTGSMLAQDQVPEEGPKVPLSYQQAIALLDSIPGVNQRIAEIFLAEVGTDMQRFPTAGHLASWVGICPGNHQSAGKQIRGTTRKGDRWLRHALIEAAQGAMRTKGTYLSAQGRRLTHRRGKKRAVVAVAHSILIIAYHVLQRQQPYQDLGSNYFDERERSAVERQSVHRLEQLGFKVTLEAAGEAA

SEQ ID NO: 288507 - protein, 322 aa, unidentified
MSYEVAGIDIHKKVRMVVVATAAEEVADSASEALELECRRFGAGASERKHLCSWLRERNVREVVMESTAQYWKPVWLDREPHFGKLHLAQAHSNRAPKGRKNDFRDGKRLARRWLADELRLSFVPPGEQRAWRSLTRGKQQLVRDRVRLQNQLEALLEAARIKLSSVISDLLGVRGRRILQAMAEGQSDPEHWAALGDDRLRCNQQELMDALHGSLEPIHRQLWKLYLKRLELLDEQIGTLDRMVATALQQHQDAVIRVAEIPGFGVDSAQQLIAEMGIDAEAFPSARQCASWAGLCPGTEGSSEQNHSSALPKGTALSGVS

SEQ ID NO: 288508 - protein, 314 aa, unidentified
MSSLPCVVGIDVAKATLDLAVRPTGATWQVPNDDRILPDLVARLQALAPTRIVLEATGGFEHAVVAALAAAGLPVIVANPRQVRDFGRSCGQLAKTDRIDAALLALFAERVQPELRPLPSEAAQVLDAFLTRRRQILEMLGAARNRLGFAKRPIRRDIDQHIRWLEKRLKDVDRELEAAIQASPVWRATEDLLRTVPGIGPVISRTLLGELPELGHLNRKQIASLVGVAPHARDSGTLRGKRMVWGGRAPVRAVLYMGAIVAAKFNPVIRGFYQRLRAAGKPAKVALTACMRKLLIILNAMVRTGTPWTVAKTA

SEQ ID NO: 288509 - protein, 343 aa, unidentified
MESIYYIGLDVHKKTIAYCIKTVRGEIVRQGVVGAQRKALQQWLKEIPGAWMGALEATIFTGWIYDFLKPHARELKVAHPEMLKAITAAKKKNDRADAEKLADLLRVNLLPECTMMSEELRELRRILRYRNMVVRTATQMKNKMSGLLMEVGAIYDKQRLHGRKYFGELLERVEDMPDSVKELLQLSRSNLELFTAIQKKLVKTLRENDLIRERVQCLMSIAGIGEITALTWVLEIGDPARFHSSREAISYCGLCSAQRESAGKEQRGPLSKKRNKYLQTALIEAAKLAPYWNPQLAALHEKELTKGNRNRATLAIARKLVEYMLAVDRRGTPFVVESPSQVA

SEQ ID NO: 288510 - protein, 338 aa, unidentified
MNQCFVGIDVSKKQIHVCVLGEKPHPYPNCLTGFRKMMKSLREKKPHGEETLFLIGMEATGVYHLKLATFLKDEPDVAVYVLNPAQVKSFFKASFHRTKTDAIDACGIASCTEFLVNRDKVRAFETPDNEVERLRQLCRRRDEILSMAQMEKNRIEALKEVPSHSGEVESSLLEHLEYLEQRLKDIEEKIKGHIRNSPGLKEQVDLLKSIPGISDTAAAGLISEIRCAERFDNVKELVAFAGLAPAERTSGTSVKGKTSICKTGSSRLRKHLYMPALVGIRYNPLLKEFYERLTNRNKPKKAALIACMRKLLHIIYGVLKNRTAFDPLWAKNRFAMAC

SEQ ID NO: 288511 - protein, 364 aa, unidentified
MFIERTSVGLDVHARSIAAAAIDGVTGELVKRRLAPAHDAVLEWMTRLPGPVAATYEAGPTGFGLARAIRASGVRCEVAAPSKIRRAAGERVKTDARDAVLLARLLRMDEIVSVRVPTVTQEAARDLVRAREDTRLDLMRVRHRISKLLLRHGHVYYGGKAWTGAHERWLRGIRFDPAGEGGGTRAAFDADLEAVDFAVARRDRLERAIGQLAADSEFTPVVARLCCLRGVSTLTGLALAVEIGDWTRFTGASIGAYLGLVPSEHSSGEARRQGGITKTGNPHARRLLIEAAWHHKPRYVVGATMRRRWDAAPPAARTRGHEGNQRLHHRWTRLAARNKTHTVANTAIARELAGWCWSLATLTD

SEQ ID NO: 288512 - protein, 417 aa, unidentified
MSRNRSFKKQNVNPELPVVGIDVAKHVHFATILFSDGSERRFSFENTQAGFLSLVQWLQESRTTSGIQQSIVGLESTGHYWKPLAYFLAKLSDVILVQVNPAHVKKAKELYDNSPGKTDHKDASVIAMLIKMGRFQHLHLLQGAYADLRISAKLREQKILELGMQRNILHSLIDTIFPEYGKMFSKLETKTSLYLLQRYTTPDRLLSLGRYRLTKVIQKASRGKLAEEKANELLEAAKTSIGIKAGQESITLAIRETVRGLQRILKELQVIDERLSQILQGIPYASQLLSVKGIGSVTLAVILGETGDLRRYRKADEIIKLAGLNLYEISSGQHRGRRRITKRGRPLLRKTLFFAALRLVKQGGIFRKDYLRLTENNQMQKVKALVALAKKVLRVIFALARDGAYYQEKEAPLPLAA

SEQ ID NO: 288513 - protein, 341 aa, unidentified
MSETKSIELRVSVDVGYRSHSVAIGLPNGEVLEEFEIAHRPEGFQEFFTRIEKHRKAQDGGVAVAMEGYNGYARPLDSLVRSRGYRLYNINNLKLARFKEIFPGAAKKDRIDARKGLELFQLSDHLPLAKEVLQEVRGTPKENEVLKRLTRRRRRLVNERVRVVNNLQADLQAVCPGLLEITSEASNQWFLNFLLSADSLPQLPRLRKATLLKIPAVGRKYAGLIQEWQKRAHFSVEAEWVSEMIQEDAKRCLELEEKIKTLETKIEQVAKDSKIAKLLLSIPGFGPVCTTELAGEIGTVERFSKEGSLALYLGMSTLDNSSGKYQGTKAPSTSTPGRKQR

SEQ ID NO: 288514 - protein, 408 aa, unidentified
MEILYARCAGLDVHKESVAACVLTPGSGTEPNREIREFGTTTGELKLLREWLQQNGITHAAMESTGVYWKPVFNILESACQLIVVNARHIKQVPGRKTDKADCAWIASLLRHGLLEASFVPETEIRQLRDLCRTRTTLVRECVQVGNRLRKVLEDANIKLDSVASDALGVSGREMIQALVSGKTDPAELAALARGRLRAKLPELEKALEGQVTAHHRFLLRELMRQLAFLEGQVERFDKQIARQMRPFEWAAGLPITMPGVDRTAACGLIAEIGTDMSRFPTSRHLASWAGLCPGNNESAGKRRSGKSHRGNRWIRGLMTEIAWAASRTKESYSSAQYRRLTGHRGKKRALVAVANSLLQAAWHILSQRQGYIELGAQYLETLHRKEIERNLIRRLEKLGHKVILELV

SEQ ID NO: 288515 - protein, 331 aa, unidentified
MKKMVLVGIDISADELVVAVERDGESLPVACFGNDAAGHRKLIRWLTKSTRSVRVCLEATGVYGLDLSLALHRTKGVEVMVANPRSIKDFARAFLQRSKTDALDAAVILEFVKRMPFQVWQAPPVEIQQLRAISRRITALTKNMAMEKNRLHASDHSEELTKFTRDDIASHIQYLAQSIRRLGKEAVAMIRLSPELSREFDHLISVKGIAEASATQILAELAVLPGDMTSRQWVAHAGLDPRHHDSGTSIHRPARISKAGNKHLRSALYMPALVAVRHEPNVRAFYEKLLARGKKPLQAIVAVMRKLLHAIYGMLRHDRDFEGEKFFAMGA

SEQ ID NO: 288516 - protein, 340 aa, unidentified
MGRVIGVDLHKNSFTSCSYKSEDDYKLKTHSVSPKGLAAFKESLARGDELAVESTGNTAFFVREIESKVKRVRIVNPIQFKVISNSVKKTDEADALTIARFLSKDMIPEVRMRTKEQSQIASLIGTRDKFVKLRTALKNKIHNILNANGIVTKPEMFSSEKDFEKIAAIELEDSYRFEVDLIVGQIRNLNEAVDKINDELKSRGQNIEGHKNLTSIKGISDIGATIFLNTIGDINDFKSDKQLAAYFGIVPRVYVSNNTAHYGRITKMGNKIARTALVQSTLVAIRYSPYLRRFYDKLKTKKGSGKAIIATSRKMLGIIYNTLKNNWVFEDFTQFKLVGA

SEQ ID NO: 288517 - protein, 418 aa, unidentified
MKSTKTKKVTKINEKTVIATVDIGKNVQYGYFRAPNGNDLKPFAFYNSKKSYNEFWQKLCQFQNQQGLEQIVIGFESTGPYAEPLFHFLRKKPVALVQVNPVHTKRVKELTGNSPNKTDKKDPRVIADVICLGHALTLVVPKGPAAQLRRLTQARQRAIKTRTSMINQLQHLIFVIFPEFLQVLKIATKTARYLIKHYTTPEKISDLGLESISEIVKKLSRGKLGQDRAKQLYEAAKNSIGISEGQQSIVFEIEHLIGRIEAEDQFIDSLEKQMRVYLQQIPYSQNILSIKGLGQVTVAGLIGEVADFNKFDTISEIMKLAGLDLYEISSGNRRGQRRISKRGRPLMRRLLFFAAINAVKSKGIMHAKYQQMLDRGMPKMKALIAISRKLLGLIFAIVRDNTKYLENYSDNHHYKLAA

SEQ ID NO: 288518 - protein, 393 aa, unidentified
MILVGIDVASKKHDIVIMNHLGEVFNKHFTIPNSMEGYKKLLEQIKAAKEFFKDDLIRIGLESTGHYSRNILHFLILKGYSVMFINPLLTNMDRKASSVRKTKTDKIDARAICMFLIRNQKTIKPYTLSSYHIDELKVLVRSRKSLKKQLNRTINQLHTYIDQSFPEYYQVFKKITSKASLTLLSTYASISEFKRTRVNTLAELIRISSKGHHGIKEAELIKSLIKDSIGIDSDSMSLSIKQAVQTIQIINNQVDSINTLIEHHLNESKTTLLTIPGIGIQTGAIILAEIGDINRFKTDDALLAFAGLDPSVYQSGKYEGNFKISKRGSSMLRWAIFQAAKITVLHDPVFNKYYLKKQAQGKHYLTIIGHVTKKLLRVIRSILKNNSVYTVSH

SEQ ID NO: 288519 - protein, 391 aa, unidentified
MTYVGIDVAKDKHDCYIVNSDGEVLAEVFTIPNDQIGFNLLFQKLQSVAPDLSKVKVGLEATGHYSYNILGFLLDKGLHTYVINPLHTNLYRKADSLRRTKTDPIDAHTIAGMIMSNVDLTSYTAKSYHNEKLKSLTRYRFDKVQERAKLKTSVARLVNILFPELEKLVPTLHLNSVYAMLSEFPGAKQIASCHLTRLVHLLSGSSQGHYNRTKAVEIREAARSSIGSFLPAKSLELKHTIHLIKVLSEEIAEIEALIREIMDECSPPILSIPGISYRMGAMILAEIGDFSRFNSPDQILAYAGLSPSTYQSGKLANAYPHMEKRGSRYLRYALFNATRYVCKWDPTFATYLAMKRAEGKHYYVAISHAAKKLVRVICAIQKSGKPYCPAT

SEQ ID NO: 288520 - protein, 370 aa, unidentified
MGKHRLAFVAFDSAKNKHAVAIADGGRGAEVRYLGEIDNSPDAVRKLVAKLTRQYERLHFCYEAGPTGYGLHRQLTELGHVCDVVAPTMIPKRSGDRVKTNRRDSVALVKLLRAGELRAIWVPDNVHEAVRDLTRARETAMVDLKTKRQQLLSFLLRHGRSFPDRNWTKTYERWLAKQTFAHPAQQIVFQDQLEAITTAQARLAALEQQLREIVPTWTMAPVVAAYQALRGVSFLVAITFVAEVGDVRRFATPQQLMAFLGLVPSERTSGDTVRRGSITKTGNRRARRVLIEGAWTYRFSARVGETLRTRLKDLPLSVRAIAWKAQVRLCARYRRLIARGKKAPVVTTAIARELSAFLWAIGQQVAPQTG

SEQ ID NO: 288521 - protein, 400 aa, unidentified
MKGFLHMKLIGIDIGKNKHFFCIMDQQTGEIVSLPVSFSNDKEGFDFLLQKIKSYQKESVLIGMEDTGHYHFALLKYLLDLQYTVALINPKTTDFNRKMQGGITKNDKLDTINICDVLDTPERKKQYRISKVNSFDLYEQKQLTRHHHNLKEQLNVYGNRLQKCIDIVFPEFNSLFKSKYGTVYMNLLKTFGSAEAIVDTDIRTIRKCFDINGRGNRIALTPEQLKQCAKSSIGISSTAEIIQIKHLVNQIELINKQIAEIDKKIEEFSLKTNSPILSIPGISHFSGTSILAELGDISNYKKPSQIIKFAGVAPLHYESSQFTAQHTSITKKGSKYLRKTLYQIILPVIRYNPVFKAYYQKKISQGKGHRCAQGHCVRKLLRIIYHLLSTNQKFDPVLLR

SEQ ID NO: 288522 - protein, 367 aa, unidentified
MKEVYLGIDAHKEENVFGSAVEGRSKEELIGKCSADMNRTLTFIRKFMKQRSLVKGQLHICYEAGPTGFVLARRLIELGFDCQVIAPSKIPEKSGDKVKTDRIDARKLARLHRAGELTAVHIPNVEDEVIRDVCRGRTDAVDEVKRTKQQLQGFMLRNGYRYKGVANWTEAHMRYLRELVMPHRAQKMVMEEYLLRIDTATTQVARIDNQMELLLQSWSRRPFVEATMGFKGFKTTSAMVLTAEVGDYLRFGHPKKLMGFLGMVPKENSSGNKRRQGGITKCGNSHARWMLIESAGSYRYPPKVSKALSKRQEGLSREVKALSWHAQNRLNNRWYKLMFRNIHPNKIKVAIARELSSYLWDLAHIVR

SEQ ID NO: 288523 - protein, 355 aa, unidentified
MTIIGVDFHPEFQQIASVDTDTGEFQEKRLAHCEEAEKFYRALAASGQKVRVGMEASGHGRWFERLLAELQIELWIGDAAEIRTKRVRKQKTDRQDAQLILRLLLEDRFPQIWVPSWENRDLRQLLWHRHRMVQARTRIMNQLQAVALNEGVRCKKRLWRERGRQQLESFRLAPWASRRRRDLLELLDRLNPMIVELTQAIEQEVEKCPEARRLMTYPGVGPLTALAFVLILGDAERFQCGKQVASYLGLVPLEDSSGNRRRLGHITKQGSSMLRFLLVEAAQVTARSLPQWRSKYLHLMMRRGRKTAKVAMARRLAVHLYWMVRQGLDYQQWIKFGSQGRKLSFHTVLTKGSTR

SEQ ID NO: 288524 - protein, 347 aa, unidentified
MTIVGNPDAVVGGVDTHADVHVAAVVNHLGGVLGVESFSTTSHGYRQLVSWLRSHGELVLVGVEGTGSYGVGVSRYLQREGVTVVEVDRPNRQTRHRKGKSDPVDALAAARAALSGSATGSPKSRNGNVEAIRVLMIARRSAVDTRIETLNQLRHVVFTATPEIRAKFSGLSAIALVNKAAALRPREEEDHVRYTTLVTIRALGHRIQYLREETKRLNRMLRPLIRQTAPTLLEVYGVGYDTAAKLLVAAGDNPERIRTESAWANLCGVAPIPASSGKTRRHRLNRGGDRQANSALYHIVITRMRHDQDTRDYIARRLTEGKTMGEIARILKRYAAREVFKHLPRPV

SEQ ID NO: 288525 - protein, 341 aa, unidentified
MNKVSTIGLDLAKEVFQVHGADAAGAVVFRKRLRRSNVVQFFATQAPCRVAMEACASSHYWGRELSRLGHEVRLIPPSYVKPFVKRQKNDAADAEAICEASQRPTMRFVQIKSEAAQAAAVVFRARDLLVRQRTQIINALRGHLAEFGLVVAKGPAHVGRLVAQAEDYARSLPQTVRPIFSVLIEALHSLDEKIVVLNAEISRRAEEDEDARRLKTIPGVGPVTAAAISALAPPAQTFARGRDFAAWLGLTPLQRSTGGKQRLGETSKRGERTLRRLLIIGASAVVRWAARKGAPAGSWLERMLRRKPRMLIAVALANKMARIIWALLAKGGIYRASIVAA

SEQ ID NO: 288526 - protein, 341 aa, unidentified
MKIIGCDFHPSYQQIATVNTETGELWEGRLEHEQGEARRFYQALVGQGVRVGMESVGNSQWFERMLAEMGHELWIGDAAKIRSSEVRKQKTDRRDARLILDLMLADKFPKLWVPSAEIRDTRQLLRHRHKLVEMRTTVKNQLQHLALNQGVRLKSRLWTKQGRRVLEQLPLQGWTARRRSDLLTMLDQLNEQVGELDLAVRAEADKRPEVRLLMTHPGVGIVVGLSFVLTLGPVSRFERGKNVASYFGLIPGEHSSGGRQKFGPITKQGNTMMRTLLVEAAQTAVRFDEELRRAYSRLKAKKHSAPAKVMVARKLAVRLYWMLRENKTYAELYGQRPGARM

SEQ ID NO: 288527 - protein, 352 aa, unidentified
MSMLADQVDVVIGVDTHKHTHSAAVVVAGTGAVVAQATVTADPDGYLALFDLAEAHGSLRAWSIEGTGGYGAGLTRFLQEAGELVVELDRPKRVHRRGGEKSDPLDAVRAAREALGRDQLAQPRARGERAALSVLLAARRSAVDGATIAQRQIHALVIAAPEELRAKFRSKSTLQMVDRAARMRVDERWDVETRSTAAVLRRLAKRSRALAEEAREHEADILAIVRTWRPDLLEPVGVGPIVAATVLCAWSHPGRCRNEGAFAKLGGVAPIPALSGMTVRYRLNPYGDRQLNRALHTVVVTRMRFDPATKAYAEARTKEGKTPKEIKRCLKRYVARQLFRQLENPPVALDSP

SEQ ID NO: 288528 - protein, 411 aa, unidentified
MEQIHDRVAGLDVHRDQVAACVRTPGPRGGVQTEKARFDTTTGGLAALAQWLAGHAVALAAMEATGVYWKPVYYALEGRFLVWLCNAHHVKNVPGRKTDMSDAEWLADVAAHGMVRPSFVPPPPIRELRELTRYRKTQIDVRAAEIARLEKVLQDAGIKLTSVASKVLTQSGRAIIEALIAGQRDPRALAGLAKGKLRPKIPQLTAALRGQLGAHHAIVAARILAHLDFLDETIGALDAQIAARVAERCQPAARLLADVPGLERRSIEVIIAETGADMSRFPGPAHLASWAGLCPGNHESAGKRRRVATTPGNQWLRRTLIESARAAARTKGSYFGAQYRQIARRRGPDKAAVAVAHSLLDVIWHLLTTGEVFTDLGADYFTSRQDKEHQARRLISQLEKLGFTVQLTDAG

SEQ ID NO: 288529 - protein, 341 aa, unidentified
MLKIVYRICCGMDVHKSFLVACIASTNEQGVTTYKSKRFSTFTGDLRRCGAWLSENNCKDVCMESTGKYWIPVYNILEPTCSIVLAHPKYVKAIRGKKTDKRDAKWIADIFKHDLVSGSFIPPADIRQLRDLMRYRWKLTNFTTGEKNRAQNCLTVSNIKLDDVFSDVFGKAASAITSRLLESNESFDVTPFLNKRVKTPAEKIQAAVDGEICVEQAEKLRIIRSHMNSLDLCKANLESLILTTAEKHLPQLDLVMTAPGIQSFAAIGIISEIGVDMSVFPTSKHLCSWLGLRRRTTRVPGRKKQPGSAGQEPTSSHCSFNALSTLSEPSNSRKSVVATSP

SEQ ID NO: 288530 - protein, 368 aa, unidentified
MLYLAIDQHAKQLTICVRNEAGDTVLRRQVSTRSEKIEAFFEQFTERDPDFMAILEVCGFNDWLVEDLRRRKCRQIVLIHPEKPSKKKTDRRDAQKLADLLWLNRQRLAAGQVVRGLRRVYMVTQQEREDRQLTSLRKNLGQRRIRVVNKIRRIVNRYNLIWHYPTKTFQTRAGRRWLVDVQLPPIDRLEMDMLLKEWEICDEQIAQVDNEIAERASRTASDCLLNATQILMTIPGVSHYSGLTLASRIGPIQRFPRPRSLANYFGLTPGCRNSGNAQDRLGSITKQGSKTARFILGQLVVHLLKHDPKMREWYRRIKLRRGSKIGRVAVMRRMTTIIWHMLTYREPYTIGGPPPRLRKDGASAAPAA

SEQ ID NO: 288531 - protein, 392 aa, unidentified
MVVSVGIDVSKDKHDCFILSSEGEVLVDVFTIPNTMDGFNCLLQRIQDCTTPQDKMKVGLEATGHYSYNLLGFLLDNGLATYVLNPLRTNLYRKSLSLRKTKTDRVDARTIASMLLSDAGLKPYTDTAYHNEELKSLTRYRFDKVKERAKLKSSISRLVCILFPELEKLVPSLHIASVYALLAEFPGAKQIAAAHLTRLKALLETASKGHYKRDMALEIRDAARNSIGSWMPAKSLELQHTIRLIRELDDEIVEIEEQIQAIMDELNSPITTIPGLGFRMAAMIFAEVGDFNRFDSPDKLLAYAGMSPSTYQSGQLKNCYPHMEKRGSRYLRYALYNATKYVCHWDPTFAAYLAKKRAEGKHYNVALSHAAKKLVRLIFAMEKSRRPYCLAA

SEQ ID NO: 288532 - protein, 355 aa, unidentified
MTDKRQKIIIGIDTHKDFHHVAVISALGESLTDRKFDATPDGYANLIEWITEQGDVLRAGVEGTGSYGAGLTDRLRRAGITVVDVLAPDKQERRLRGKTDQIDAYSAARAVLARRATTVPKTRDGDVEAMRVFRTTRRMVVKQRTETMNQLHSLLVSAPEGLRVKLAGLKAKELAKASSRLRDLPGDDVVTAATKDAARSLGRRFIDLTVESDRLERRIRTLVTAYAPELMTVYGVGPDVAATLLTVAGENVDRITSEGALAHLAGTAPIPASSGKTNRHRLNRGGNRQGNAAFHRIVLVRMKRHPETRAYVEKTLARGKTKRDTMRLLKRYVAREIFPILIAVQQRHATTQIAA

SEQ ID NO: 288533 - protein, 358 aa, unidentified
MKRKIKELDFSSQLISVGIDVHKKSWTVTIQIAGQQVRNFRMNPDPVELSKYLHRNYPGGIYLSVYEAGFCGYWIDRQLQALGIKNIIVNPADVPTSNKEKARKTDSVDSRKLARELSSENLCGIYIPTEDEEAERILSRLRIQLTKDQTRLKNRIKSLLNYLGVHLPENIELKHWSGGFISYLHKLEFKYDTIKQTLEQLLKQLSDLRRQLTEVLKLLRKSVKQNERAQKIVTHLLTVPGVGFVTAVTLYTEIMNINRFRRFDELSSYVGLAPSTHSSGEKEIVMGMSQRQNVHLRNILIESAWVAVRKDPAIIMAFGKLSKRMKKQEAIIRIAKKLLSRIMHVWKYEEDYVLAVVE

SEQ ID NO: 288534 - protein, 347 aa, unidentified
MLIIGCDFHPGFQQVAIFDNLTGEIQEQRLSHRGEAEQFYRGLQGQGVRVGMEACGHYPWFERLLGECGHELWLGDAAKIRATVVRQQKTDRRDAEQLLKLLLEDRFPRLWVPTLEERDARQLLVHRHKQVQARTRVKNQLQAMALSQGVQQKRKLWTQRGRAELEKLELLPYAAVRRTRLLAMLDELEAEIGELNRQVEEEVKRRPAAGKLMTHPGVGPVTALAVVLTLGPAERFQNGRQVGSYCGLIPSEHSSGGRQQMGRITKQGSSFLRFLLVEAGQSAVRKDPELGRFYRRLAARKHRALAKVAVARKLAMRLYWMLREDWTYAQLLRQVVQASPSHSVVES

SEQ ID NO: 288535 - protein, 360 aa, unidentified
MEECPKISGCMIIGGVDTHKDLHVAAVVDEQDRVLGSHCFATTRQGYRQMLAWMRSFGVVKRIGIESTGTYGAGLLRYLQGAGIEVLEVTTPDKFDRRRRGKDDDKDAQNAAHAAFAGKRTVTPKSRDGMIESLRVLKACRKTAVAARRIALQMIHNTIVCAPDELRDSLRKLTRMQLIRLLAAWRPDLSDYRNVVSAYRITLKSLGRRYLELHDEIAGLDTMIGAIVDELAPELVARNSIGYESAAQLLLTAGDNSERIKSEASFAALCGVSPVPASSGKVVRHRLNRGGDRAANSALHITAIGRLRTDPRTKDYVARRIAEGHSKLEAIRCLKRYIAREVFALISQRRRDIRQTQIAP

SEQ ID NO: 288536 - protein, 390 aa, unidentified
MLIGMDVHKHSVFVTEMEEEGNVKDQYEMSNDDESWESFLSRYSVYGNEIALEISTTGKFIARKLRNMGFSVHIADPVKLDLIFNTTKKNDREDSYKLAKLLRLGELPEVHLPSKESDDLRSITRYRKSIGEEITMLKNRIHALLSSYGISIEATDIFGKKGTAEIDKVSKILSESDRFILSSILDRIASLFHQERSVEDQISRMVLNNRNVARIMTIPGINVYSAAVVISEIDDISRFATKEKLASYAGLVPRQDQSGNRDIKGHITKHGPSMLRFILVNAAHIVIKYSKRLRSKYLSLVRRLGKNRSIVAIARILLEMIYTMLKNGEDFVDEIDSLTERKMISMQIRAKNPSPVRKLEELMKSIKKNKDTMKFINEKMIRGAPKELFS

SEQ ID NO: 288537 - protein, 354 aa, unidentified
MLAEMVDHVVGIDPDRDWITAAVLEAGTTGVVATGRFPANAVGYRDVVAWADEYSTDTERAWAIEGTASYGRGLTAALGRCGEWVIEFDRAKEKPSKDGSKTDELDAIRAGRETLGRAKLASPRAHQGLREALRVHAVARDTAVRARTAAINELKAFVVTADDTLRSELRGLRTPALVKRCAGFRHSTNRSVDQACTRAAMRAVAQRITHLNEEITTHERARASLVDQAAPQLVAEIGIGPITAAAFYIAWSHPGRCRNEAAYARLAGASPIPVTSGQTQQRHRLNRRGDRQLNKALHQVAVTRLRCHPPTQAYKKRRSSDGKTDREIRRCLKRYIARKVWRLLEHQTPPETAT

SEQ ID NO: 288538 - protein, 394 aa, unidentified
MVVFIGIDVAKEVHWACAMDRDARVLFSHAVDNDPAAIGALIDEIEALEARATRTAIDMLGGAASLLCAMFAEAGLPLVHTPGLAVNRARQGIRGGERKSDPKDAAVIAELARTRPDLRAVEPSDRLDAEIRLLVGRRRELVTEQTRRAARLRDLLSGLFPALERRIDPTTGTGLMFLSHYAAPEDIRAAGAKRIVRRLTKAATGLRGLEALAEDAVRAAQAQTVAIPGGRLQAEIIADIAREALVALDRLKATDQAIRERLANHPDAALILSMPGMGATLTAEFIALVGRIGRFDSADALAAAAGLAPVLRQSGKTSFLRRAAGGDKALKRLFYQAAFTSLGRPDSRAFYDRKRAEGKRHHQAVIALARRRVNVLWAILRSREPFRENFKLAA

SEQ ID NO: 288539 - protein, 323 aa, unidentified
MNKFVGIDISKETFDIYFEQEDKGCHVKLQQTQEDYKVLLHLLGKEAICIMEATGNYHLKLANYLHQEDIKVVAENPLKIKRFSQMSLQRTKTDKADAQLIYEYGRIILSSTEPHFWQPDKTEIGHLKQYDTVRHQLIKQRTALSNSEEALSALTHLNDEVTQVLNDMVAAIDKAIKQLDKGMFKLVKEHHSETFDLVTSVPGVGPKTATLMICLTDGFNKFSHDQVKQFISYIGMSPRTFESGTSVKGRAHISKVGNSRMRSMLYMCSWAAKRKNKQCVTLYERLSEKGKPEKVIKVAIAHKLVRQVFGVIKNGEPFSKEYV

SEQ ID NO: 288540 - protein, 356 aa, unidentified
MESMPAPATSVTVGVDTHLELHVAAVIDQAGRLLGTQAFPASTRGYVALVTWAERFGPVERIGVEGAGTFGAGLTQFVRAYGLAVVEVARPDRSTRRRHGKSDPIDAQAAARATLAGVAVTTPKTRDGQVEMIRLLRVARRGAMKARVAAAEQLYGVLYSAPEELRQPLLGLTTKALVRACAAMRPGPLTSPTAATKTTLRTLARRWQQLQAELNQLDTQLQALVAAAAPTLVALPGVGTETAGQLLVTAGDNPQRLGSEAAFAHLCGAAPIPASSGRTDRHRLNRGGDRRANNALWRIALVRMRCHPPTRAYVERRTKQGLSKLDIMRCLKRYIAREIYHQLTSPPLITPTACPK

SEQ ID NO: 288541 - protein, 359 aa, unidentified
MQDHLEFQALRPIKGFSTATINQLKTKVMKFAEVIGIDVSKSTLDVWIYTNDAYKVFDNTRKGYHSLLSWVRKNTECLLDQVLFCFEHTGIYSYALSKYMSEKQFHFAIISGLEIKRSMGIRRGKDDKIDARQIALYGYRRKAEIKCSQLPEEEITQLRQLFSLRERLVRQKAGYQATMKEQVRFLKRSDNTLLFSVPSHLIKELDKEINRIELQMETIVEESSELNRLYKLITSITGIGSQTALYLIIITNGFLLFDDPRKLASYAGVAPFPYRSGSSVRGRTRVSKMANKKLKSLLNSCARSAIQYDPELRLYYERRTKAGKDKMNTLNAVRNKLLYRVFAVVKRGTPFVNKHAYAA

SEQ ID NO: 288542 - protein, 400 aa, unidentified
MLSIGIDVSKGKSTVCGMKPGGEIVYAPFEVQHTIEGMSELVSLLRSSGEEVRAVLESTGSYHCPVVAALLENGIFVSVVNSLRMKRFCSQSIRKVKTDRIDAMQIALYGLAYWQELQPARLPEDTYRELQLLARQYYQMTSLLIKAKVDFNAICDQVLPGMQELMNDHAGRHKLSDFVLRYRHTTHILEMGETRFRKDYCKWAEKKGYRNCERMAALIFATAQNGIPVLPNAPSTQIVITEAIRVLHTVEASRDAILTQMQALAKTLPEYSLVREMPCIGDTLAPRLIAEIGDVRRFHSKRALIAYAGIDAPPYQSGKFCANNRHISKRGNRYLRKTGYEVMQSYVMHKPTNDPIFTFIEKKRGEGKSGKLAMVAGLNKFLRVYYGKVTELYRSLPAIE

SEQ ID NO: 288543 - protein, 351 aa, unidentified
MKDYTGKKIYLGIDVHKKTYAVTAICEKIVVKRATLPASPEGLLVFCKKFFPGAVIESAYEAGFSGFHLHRVLEKNGIKNLVVHAAGIEVATGDRVKTDKRDSLKIATQLEANRLKGIHVPSEEREEKRALTRLRDTIVEHRMTTANQIKALLHQHGLISPTAKKKICPKWIKSLNTLPMRAGIRYALDQLVDLWKQLTAKIKEINIEMLKQADEDNALEMVYRSTPGIGPVGARILANEVEDMSYFDNERQLFSYTGLTPSEHSSGGHIRKGHISRQGKTVIRRVLVLASWKAIQRDAQLRAIYDRIAIRAGGKKAIVAVARRLIGHIRACFRKKCFYRKEVKTAVVAAA

SEQ ID NO: 288544 - protein, 410 aa, unidentified
MPLIFVGHDWSEDHHDVVVLDVEGRRVTSARLEEGVDGVARFHALVVDLVSDPGEVVVRTETDRGLFIGALVAAGYEVYAVNPRAVDRYRDRHRMAGGKSDASDAKVLADLVRTDRHLHRPVAADSELGEGIKILGRAHKDLIWQRQDQVNRLRSSLREYYPGALAAFGADLAHPDAVAVLSSAPTPGDGRRLSRARIATTLRRGGRQRNIERRASEIHAALQETQLAAPAGVSAAFGAATKAAVAVLVTLNEQITALETELAHGFEQHPDVEIYRSLPGLGVVLAARVLGEFGDDPNRYQSAKSRKNYAGTPPVTRQSGKLRIVSARRARNQRLADACYRWAFCSLHASPGARAYYDELRARGKGHHGALWQLANRWVGILHGCLHSRTVYNEATAWSHHLPETKADAA

SEQ ID NO: 288545 - protein, 351 aa, unidentified
MKSMTKQVQGEELFIGIDLHKRRWHVTIRTADVEIFSNSIVGRWEDLRRVINRYKGCRIHAVYEAGYFGFSLYDHLTQYGVECIVTPPSLIPQEHGNRVKTDRLDSRKLARLLAKGLLKSIWVPSAKERFHRQVIRRRRQLVGDRVRTQNRIKSELCFYGIDLPTPRSKWSQVYFANLQRIKFQNHWMQKSFNQLLEQYEFLSTQIDKQTQLLKQLSQLPLYCDRVKILCSIPGIGVLTAMEILLELQDFSRFRRAEQLAAYVGLTPSQYSSADKIRMGRITGAGKNTVRSALVESCWILIRKDKAMRKKYETIKARAGGKRAIVAVSRKLILCIRRLLIDNRPYVYESVS

SEQ ID NO: 288546 - protein, 473 aa, unidentified
MARKKGKDPAGIGGPGLTGEPAGVSDEPAEVIARAAAIDVAKGSGMVCTRVPHESGPRRRVQRIWQVSARYSEIAALMAELAKLGIQRLVLESTSDYWRIWYYLAEAAGLEVWLVNARDAKHLPGRPKTDKLDCVWLCKLNERGMLRRSFVPPEAVRDLRALTRLRSRLAQDQARHQSRIEKILEDALLKISSVISDLMGASGRRFLAALVAGERAPDKLAALGDRRLKASPAQLEEALAGRFRDIHALEIGMLLELIDDITAKMARLDAEITARLARIPGLAPACAGCGEIGGGHAPSCPQAGAPVLSVIERLDELTGIGIDAAQVIVAELGTGKTTFPTPGHAAAWAKLASRTIQSGSTSKDGRTGKGNPYLRAVLGRAAMTAAKTDTYLGERYRRIARRRGKQKAIVAVSRTICEIAWMIITDPSVRFSELGPDYYARLDAGRQTRNKIRELERLNPGMKVTLTPAATAA

SEQ ID NO: 288547 - protein, 354 aa, unidentified
MIIVGCDYHPGFQQIAFVDTDTGELQERRLEHREAAEKFYRDLGAQGMRVRVGMEASGQARWFERLLAELNFELWIGDAAVIRTKRVRKQKTDRQDAQLILQLMLENRFPQIWVPSWENRDLRQLLWHRHRMVQARTRIMNQLQAVALNEGLRCKKRLWREHGREQLESFRLAPWASRRRQDLLALLDRLNPTIAELSQAIEQEAEKFPEARWLMTHPGVGSLTALAFVLIIGRADRFQCGKQIASYLGLVPLEDSSGNRRRLGHITKQGSSMLRFLLVEAAQVTVRSLPEWRSKYFHLMMRRGRKIAKVAMARRLAIRLYWMWRKGWEYEQVKKFGSHAGKLEPGHGVQYNTE

SEQ ID NO: 288548 - protein, 410 aa, unidentified
MEVMFDRVAGLDVGKDSVTVCVRTPGPRSGRRSETRTFKTMFGSLRVMRDWLIEAGVTIAAMESTSTYWKPPFYCLEEQMTVWLLNAAHMKAVPGRKSDVRDAEWIAQLLEHGLLRPSFVPPPDIRRLRMLTRYRMQLMGDRTRETVRLELMLEDASIKLSSIASSLRTVSARAMLTAMIAGETDPVQLADLAKGRMRRKIPDLAQALTGTFDVHHAQLARSMLRRLELVELALAELDAVIVEACRPWQHQIELLQTIPGVGDTVAQVIVAETGADMSRFPTAAHLTAWAGLAPAMHESAGRQTPAGKRHGNKWLTAMLVEAAGSVGRMKGKNYLAAQHARLTRRRGMGRAQVAVAHSMLVSAYWMLKRDEPYHDLGADWHSRRSNEAHTKRLIAQLERLGHTVIIDPAA

SEQ ID NO: 288549 - protein, 417 aa, unidentified
MTQNTPPFAAFVGLDWAEAKHAGCLQAAGSAKRECFQLAHTPEAIDAWVTTLRTRLRGQPVALGLELTKGPLVFALRKYDFLVLLPINPLTVARYRAAFTPSRAKDDPTDAALQLALLLMHRDKLPPLPPQSLTRRALEQLVAHRRRVVGDTVRLTNRLTSTLKNYFPQVLQWFQDKDTLIFCDFLRRWPTLKAAQLARRTTLEAFFRAHHVRSTDVIAQRLHAIKAATPLTTDDGVIAPNALLVQTLVAQLRVTLQAIADFDTAIAPRAQSPPDFPLFQALPGAGPVFAPRLLVAFGEQRTRYAAAALQKYAGMAPVTERSGKKSWVHWRLQCPKFLRQTFVEGAAASLRHAFWAQRYSQQQRDQGKAHQAAIRVLAFTWIRILYRCWQDHTLDDESTSLHALTRRGSSLMHNLAK

SEQ ID NO: 288550 - protein, 339 aa, unidentified
MKYTPIGVDIAKHLIQVHFINEHTGEVVDKQLRSKDFLTFFSNREPCLIGMEACGGSQHWARELTKQGHKVRLLQARFVKAFVMGNKNDVMDARAIWMAVQQPSKEIAVKTEEQQSVLVLHRSRRQLVKFRTAQINALHGTLLEFGETIHKGRAAMERELPAALERMKVKLPPYLITVLEDQYNRLSELDSLIDGLEKQLNSVARQNEACKRLMEIPGVGPLIATAAVATMGEASAFKSGREFAAYVGLVPKQTGSGGKVRMLGISKRGDTYLRTLFIHGARAAALLTKEPGPWITELKKRRPTGVAIVAMANKLARTVWAIAAHDRKYDKNHVSIRPY

SEQ ID NO: 288551 - protein, 353 aa, unidentified
MSHHSEAFVAFDTSKLRNAVAIAETGRAGEVRFVGEVDSTGIATAKLVKKLAAKYDRLTFCYEAGSTGYGLYRQIRTLGHDCIVAAPSLIPQKPGDRVKTNRRDALSLAKLLRAGELTAVWVPDERHEAMRDLSRARGAAVEDLRGKRQQVSSFLLRHGLHYPGKKTWTKARTVWLASLKLAHAEQRIAFEEMLLAVRQAQERIGRLEQAIRAAVADWSLAEVVTALMAMRGLDLISATTFLAEIGDLSRFQTPRELMAYLGLVPSEASTGDTVRRGPITKTGNRRARRILVECSWSYQHAPRVGEEEAREGGGGTIGRARDRLEGAMPTVCALSGVDQEGKAQERRRHGDRA

SEQ ID NO: 288552 - protein, 396 aa, unidentified
MFAGIDVASERHMLARLDATGVPLGKPVPITEDREGYDTLLRLLGPPPVLVAMEATGHYWKNLYAALVAAGHSVVLLNPLKTRRFQDSALERTKTDAIDATGVARFAFEKRPEATQLHDTAAEALRELVRHRDRIRQDFDDRVRQLHRLVDLGFPEFTRYVRGLDSMLATTLLSECPTAHDFARATPKRLAKLRYDGRHLVEAERAIQLIEAAKRSIGQHHGPAYRLQARHICQDLDMWRRRLVEIERDIDGLLERNEVGQLPLSIDGIGPQTAARIVEPKGSPDIAAVGDPAHFKSAAAFAAYVGVVPGLKQSGKNGSRRAACAPIGNARLRRALWMPVVGAVRRNAWLKLFYDGFIARGKPPKLALVAAMRKLLHAAYSVTKNRKPFTIKLADT

SEQ ID NO: 288553 - protein, 462 aa, unidentified
MCAGQGRTSGGVSESDPALSNTKGDDEHTMKTRLYVGLDVHKETVTIAVAEAGARGEVREVCTTTNDLQVLERHLRRIAAAARIEPGQLSVVYEAGPCGFVIWRRLRQLGIPCAVVAPSLVPSRSGDRVKTDRRDAAKLARLHRAGDLVAVHVPDAGDETMRDLCRARSDAVRDQRRARQQLGAFLLRNGYRYGGKSHWTAAHMRYLRELDAAHPAQKVILEEYLIAVEAAAARVGRTEAQMRSLLESWARRPLVEALMAFRGFQLVSAMVIVGEIGDFGRFRHARQLMAYLGLTPSEYSSGPSRSQGRITKTGNGHARWMLVECARHYWTPPKVSKQLSVRQQGQPESVRRISWAAQNRLHARARHLSGRLLNRNKITVALARELCAFIWDALRAIAPAPGTPSDENPAGLPATAEAYDRRYRGRPSRPPEKYSPRSQRGGTDRHIEPQTRCTAAGRVAPG

SEQ ID NO: 288554 - protein, 451 aa, unidentified
MAKRGEKRERRSMVLEPDAAGIDIGAEEMYVAVPPDRDEESTRRFSSFTGDLHALADWLGRCRIQSVAMESTGVYWIPLFQILEERGFKVYLVNAHYLKSVPGRKSDVSDCQWIQYLHSVGLLRASFRPPEAICALRTLWRHRGSLLEMAAEHILHMQKALSQMNLQLHHVLSDITGTSGQAILDAILSGKRDPVELAALCHRRVKSPRDKVAQALVGDYRPEHLFTLKQSLAGYRYYQELILELDQETARLMQTLPSATEDPMPPRTKPTAYHRKGNDPYFDLRSELYRITGVDLTDIPGVSAATAQVILTEIGTDVSRFRNASAFASWLGLCPEKRISGGKVLSCKTRKVKHRAATALRMGANSLCRAKGYFGEFFRRMRAKLGTAQAITATAHKIARILYHVLLTKQPYAETVFHRCDEQAHQRAEMRLRKQAAQLGFQLLLISAEGE

SEQ ID NO: 288555 - protein, 355 aa, unidentified
MPSKADTAVARTIGIDTGKNTLHMIGLDEKGAIVLREKVSRTRIAGRFVNLPPCLVGIEAGMASHHVARELVALGHEVKQVPPAYSKPFRQGHKNDFRDAHAVAEAVERPSTRCVPIKTDGQLDLQALHRVRSRLIGNRTAVINQIRGFLLEHGIPVRQGYRFLRQQLPQILATRTDVLSPRMIRIVGDLMADWKYLDERIEGVTDEIEALAHADEGCQQLITVPGIGPIISSAMVAAIGNGAAFCKGRDFAAWLGLVPKQMSTGDRTILGRITKRGNRYLRMLFIQGARAVLLRPASWAKHSFGSWLTAATRRLHRNVLTVALANKLSRIAWTVLAQGRRYEARVEPRVEPAAA

SEQ ID NO: 288556 - protein, 358 aa, unidentified
MRFYRGVHQYYCGIDLHARTMYLCITDNHGTILLHESLPCQPAAFFTAIRPYMDDLVVTAECIFCWYWLADLCQQHSIKFVLAHALYLKAIHGGKTKNDRLDSEKLAVLLRGGVIPQAYVYPPELRPTRDLLRRRLFFTRKRAELLSHIQNTFHQYNLSVPAAPLLRRKHRDGVAERFTDPIVRKTVEADLLLCASYDERIKDLEKTVEREARDQEPHALFLLQTIHGVGRILALTILCEIHTIDRFPRVQDFSSYCRLVKATKTSAGKPLGTSGAKIGNAHLKWAFSEAAVCFLHNNPRGLQYKRRLQRRYGKGKSLSVLAARLGRATWFMLNRNDHSTWIAFSFPPEPGGEGEPGV

SEQ ID NO: 288557 - protein, 402 aa, unidentified
MIFINCLGIDIGKSESVVAHYKDEVLVKEMVIQNNQNGYRYLKNYIKHLDSLFILFESTGIYSRGMKRFCEIHKIDYLEMNPLEAKFKTSSLRSWKTDKSDAHKLALLAFRMKDSKVQRQSEEIYFELRERARFHLEMEINQNRLKVELVETLHQTFPGLEKLFTNRYSKIALSIAKAFPHPDFVSTLTHDELVEKVLHSTDKGISVNKAHKYVQKLIEIQINSFPNVDKSSFLLQKVQYLCDKLLIGIEEMKEFDQEMIDLAKNTTEFENIISIPGIGELTAALLIGELGNIREFKTNKQLNAFVGIDIKRYQSGTSKSRDTINKRGNKKARRLLYLIIMNIIRGRNHYQSHIVDYYYKLREQPHGKSHKTAVIASINRLLKTIHYLIVNNKLYDYQKAPH

SEQ ID NO: 288558 - protein, 431 aa, unidentified
MKKSPQGQPVLPRGRAVVGIDIGKGKHAATALSPQGEVIAQLASFPNTRQGVDLLEQEALRKVGGPGKVLVGMEATGHYWMCQYHELVRRGYACVVFNPLQTNARSRARIRKTRNDKIDSKTIAQLVLSGEAKATRVPDPKLTELRLLVRHRHRLLQAAGNMERYAHALVDRIFPEYAAVFSKPFLPTARKLIRQIGIAPDKLVKNAEQVRELLRIASRKKITDEKIEQLLQAAKESIGTRQAEGVIEAQLCSIFDYLDTVRQQIADIEMQLDERMQPLDSPLYSLGITSPLVATIHAESDPISDFATPDQYVAYTGLDPSRHDSGDTIQWRGKISKRGSPLLRCTLYLAAFVVCRRHDYFARIYRKHRAKGKKHTNALVIVARRLARVIWRLLTDDRGFTKRAPKPAPPPDKPRNSANSSRTRKATTARV

SEQ ID NO: 288559 - protein, 436 aa, unidentified
MRGCRCSMIMGFTKPIEHFNLQRKKVITMNTLYVGIDVSSKSNVVYLMLPNGDKHSNFSVANSHEGSTQLVKRILSALTSHSLDTVLIGLEATSVYGDNLVYFLREDATLAPFNRKIHVLNPKQVKKFHDAYNDLSKNDYVDSFVIADCLRFGRINKEVYMGDYRYKALQNLTRARFFAVQNLVKEKQRFMNVLFKKYSTMTQEKVFSDTFSTTALAVYDEFESAEALANMDLHELTDFIIEKGKNRFPDPDAVAKAIQKAARSSYRLPKTVNDSVNQVLSISITSMKALEFQIKEFDKAIKAQMELLPNVLISIPGIGPVYSAGIMAEIGDINRFNSQAALAKYAGLAWKQHQSGGFESEVTRLIPSGNRFLKYYLCEAAFSLVRCDKEYSDFYHLKYKEVNRCQHKRALALTARKFVRLVFRLLKDNRLYCPAK

SEQ ID NO: 288560 - protein, 423 aa, unidentified
MEILHERVAGLDVHKEMVVACVRLTAAGKVSRECRTFDTTTAGLEALLAWIAECGCTHVAMEATGVYWKPIWNVLSDGNFDLVLANAAHIKNVPGRKTDMNDAMWIADLMACGLIKASFVPEAEIQELRALLRARKQLTREQSSQVQRIQKTLEEANIKLDSVISDIVGLSGRRMIEAMIAGQRNPFKLAELADRRIKATPKALYDALHGRLTDHHRFMLRLYLGQYDALAAAIVQIDDAVEAAIARMDEEAAAGEAPFRTLIALLCTIPGIGPLAATVILAEIGRDMSRFPTAGHLVAWAGLCPGQNESAGKRKSSRLRKGAPWLKTTLVQCAWAASRKKDSYYKAQFMRLRAKRGPKKAICAVAASMLTAIYHMLKDGTEHHDLGANHFDRRSAEVKASRLVAQLTKLGYQVELQPMAKAA

SEQ ID NO: 288561 - protein, 358 aa, unidentified
MAVTGGTRRIVGGVDTHKDLHVAAVVDEQDRVIGTRSFATTRQGYRQMLAWMRSFGELQRIGIESTGSYGAGLLRFMQQAKVAVLEVTTPDKQDRRRRGKNDDLDAQNAAHAAFAGQRTVTPRSRDGMIESLRILMACRKTAVSARRVALQMIHNTIVCAPDGLRDQLRSLTRMQLVRTLASWRPDLTAYRDLDSAYRIGLKSLARRYLELHDEIADLDVMIAAIVDELAANLIARNSIGHIGAAQLLLTAGDNPERLRSEASFASLCGVSPVPASSGKTVRHRLNRGGDRAANSALHIIAIGRLRTDQRTKDYVARRIAEGHSKLDAIRALKRYLAREVFTLITQRRKEINATRIAA

SEQ ID NO: 288562 - protein, 406 aa, unidentified
MNEFIAEGVKDAGPVTGQAGVKRVLEQASNVYGAYIGLDVHKETIAVAVAECGRGAPEYYGEIANTPKKVAQLIERLSARYGGERLLWVYEAGPCGYGLYRQIIATGHDCEVVAPSLIPQKAGDRRKTDRRDALGLARLSRSGELTAVWVPAPEQEAIRDLTRAREDMKKLELKARQTLGAFLLRHGKVYDAGKSRWTQAHFRWLETVTFDSPIQQIVLQEYIEAVKAAQRQVAGLEQQMREALPQWSLASVAEGLMALRGISLISAMTILAELGDISRFDSPRQLMAYLGLVPSEDSSGPRRRQGAITKTGNGHVRRVLVEAGWNYRFPARKTRDIEKRAEKTPEAVQAIAWEAQKRLCGRYQHLLKAGKIKQQVTTAVGRELAGFIWAIACEVMGKNHGSRATA

SEQ ID NO: 288563 - protein, 429 aa, unidentified
MNIKPIAGIDVGKFFSEMVIISPSNELFARMRIHHDSNADMRRAIELLKKAEKDFASRPFIVMESTGHYHKILFHFLQKSGFEVSTINPIQTNCIKNFGIRKVKNDKVDARKIALLYRFHELKPTSISNEDIDCLRSLCRQYYKLSDELTAYKNRFISIVDQLMLNFKEVFPNVYSKTAIAVLEECPTPTAIIEADRDKLISIIQNNSRKSLEWATKKYELLVSKAREFEPLSINNAANVTMLGIHIAMIKTLQENLDKVLKAIHQLIADDLSKDLPAMALTIQLLQSIPGVGFLSAATIVAEIGDFNAFSKPKKLVAYFGIDPSVRQSGEFTGTHNKMSKRGSRLLRRVLYTIALANIRTKRNNEPCNPVLMEFYKKKSQNKPKKVAIGAIMHKLVFIIFAVLRDRKPFELRSPEQHAKILAKNRTVA

SEQ ID NO: 288564 - protein, 387 aa, unidentified
MNTALKTASTNTILAIDLGKYKSVGCVHDEAGGEFRFTGFETTRFELRQLIDKHRPTVVIIEACLLAGWVHDLCVELGSRCLIANTASEAWKFKHLKRKTDRDDALRLAQLYLLDQLPTVNLPPTAVRQWRSLIANRQTLVGRRIAVQNHIRALFVAQGLPAPRGAKAWAATGLAGMANWAKPLADCAADELWKGLLELSLTEYRQLCELIAQAETKLDALGKQNADVILLQTAPGLGPRTAETVAAYLHDAPRFKTGKQVSAYSGLVPRQHQSGEMDRRGRITKRGPALLRKMLVECAWCMIRYNAWARAFYLRLTGGGQRRKKQAIVALARKILVRCWAMLRDRKPWHDPQTAPKQKLPPSKQRRQAEAQQRRQAKAATLPAPRS

SEQ ID NO: 288565 - protein, 412 aa, unidentified
METIYRSCCGLDVHSKSIAACVRRVDERRRVREEVRSFGTVTRDLLALRDWLEQEQVTHVAMESTGVFWKPVFNILESGFTVLLVNARDVKHVPGRKTDVKDCQWLAQLLQCGLLKASFVPPAPQRDLRDLTRHRAQLTGEHTRVTNRVHKTLEDANVQLGDVASDILGVSGRAMLRALAAGQTDPRRLAELARGQLREKIPQLCLALEGHMRDHHRFMLQSLLDHLKYLEDQIERFDRCIEELMGPFEKELRLLKALPGFGDRTAQNVLAEIGVNMGQFPSHDHLSSWAGMCPGNHESAGKRKSGRTTKGSRWLRQTLVQAAWAASRKKKSYFQSQYRRLVGRRGKKRALVAVGHSLLVVIYHVLKTGMPYAELGADYFNRLDSKRLTRYHVKRLESLGYQVTLAEAEAAA

SEQ ID NO: 288566 - protein, 354 aa, unidentified
MTLTTTRPVRAVTIGVDTHQLVHHAAAVDQDGRKLGDRKFPSDRAGYQQLLDWAASFGIINAFGVECTGSYGAGLTRHLLAAGIDVVEVNKGHSQVRHRIGKSDAVDAEAAARKVLSGECTDPAKDTTGTVEAIRNLHLVRDSAIKARSAASVQLRDVLLTAPDHLRSRLTAKTLEGKATQARALRPDLSRIHEPEQAVKYALRDLGRRIQELTHEINEADKHLNQLVSAVAPNTLALPQVGPVSVAQLLITAGENFERFRNEAAFARLCGVAPIPVSSGKSNRMRLHRGGNRQANRVIYLIAICRLRYDPRSQAYRDRKRAQGHSSSDAIRCLKRFIAREIYYSLKRDLSRTG

SEQ ID NO: 288567 - protein, 342 aa, unidentified
MKLTTIGIDLAKNVFQVHGVDEKGKAVLKKQLKRAQMLAFFANLTPCRIGMEACGSAHYWARKLQALGHTVQLIAPQYVKPFVKRNKNDATDAEAICEAMMRPNMPTVPIKNASQQAILSVHRARQGFVKARTAQANQIRGLLAEYGIVIPKGIGHITKRVPEILEDGENDLPGSFRLLIERLADHLKALDRQVGELETQIQLWHRDNSASRKLAKIPGIGPITASATVASVGDARNFKNGRQLAAWLGIVPRQHSTGGKSTLLGISKRGDSYLRTLLIHGARAVIRVAERKPNADPWLKNLLARRHKNVAAVALANKNVRTIWALLAHDRDYEAGYVRPAA

SEQ ID NO: 288568 - protein, 327 aa, unidentified
MEQYIGVDLHKQFFQACAVNPIGERVWEMRVPRTDGGMTLFRARCHSQTAVAVEACGPTWAFVDAIVATGTRVCVVDPRKTRLKAGFAAKTDRLDARRLADALRRDSVVSVYVPPPAIRELREVCRGRHQVIRLRTRLAQRIRALLVRSGVADVPVRRMFSPRGLAWLETVALPPDAAASLTRLRHVLTAIQAEAADAEARVTARAQGDPVAQALDALVGIGPVLALTIRAEIGDVTRFRRGSELASYAGLVPRVDASADRYWSGRITREGSPWLRWALVEAAMHAVRRPDAIGHWARQLAVRKGAFKARIALARRLCDDVVRVWPH

SEQ ID NO: 288569 - protein, 343 aa, unidentified
MSAEYDGQQIVGIDLHRRRSVIVRMTEIGERLDSVRIDNDPMTLAAEIAKAGEHPQVVLEATYGWYWAVDVLQDAGADVHLAHPLGVKGFAYRRVKNDVRDAADLADLLRMGRLPEGWIAPPPVRELRELVRHRAKLVAWRSALKASVHAVLAKQGLHLGVTDLFGVGGRRLLAQAPLDAAYRLRVNALCRLIDAMDFEIRAVAGPLRVALAGHPGFHAVQAVPGVGPVLAAIFVAEIGDVARFAGPARLASWAGLTPKHRESDTVVHRGPITKQGSALVRWAAVEAAQGASNAGWLEQTRTRIAERRGRNIATVAVARKLLTLVYYGLRDGNIRALADKAAA

SEQ ID NO: 288570 - protein, 461 aa, unidentified
MSNGNGRLSRGDRRRNDRLAALRAVVTRESVVLAFDLAADKQVCALTDQDSRVLGRRTVKAKAWQLAEAVTWGLAQAAAAGFSSVVIACEPTGHRWRVLDQIAERAGVRLVCVQPLLVHRARESEDFTHNKSDETDAMIIARLVTELRCYLPERADPTWARLRHLGARRAALVTNATAAKQQIIDLLECAWPGALEASGKPMKSKSWLAAMTVALDRVGASGDLGLIRRCGWTRFAAVVRRELPRHGATRWYSKIVRAVFEAATDPAQVAAGVADQRAGGLERARFALADLAHARAETAVVEACMVQVLDELGLTGLATSIPGLSAVGAAAILAETGDPTRFTSARAMVKHAGLCPRDNASGSYQGKTGISGRGRPQLRLAAWRAVWAALRNNPVLAARYAHLTGRADNKLTKTQARVAVAGSLLRQLHAVITTGTAWDPAIAGGLNPQTPATARGAAVAA

SEQ ID NO: 288571 - protein, 345 aa, unidentified
MKITTVGIDLAKNVFQVHGIDERGKAVLRKQLRRAQVAVFFGNMPPCVIGMEACASAHHWARTLQDFGHTVRLMAPQFVKPYVKTNKNDVADAEAICEAVGRANMRFVPIKSIEQQAILSVHRVRQGFVKARTAQANQIRGLLGEFGLVIPQGIINVSKRVPEILEDASNELPAPFRHLIDRLTEHLKELDRRVKEFEQEIIAWHRSSELSCKLEKIPGIGPLAASALVASIADARSFDNGRQVSAWLGLVPRQSSSGGKPTLLGMSKRGNVYLRTLLIHGARSAILAAKNKVDNTNGWLTNLLQRRHPNIAAVALANKNVRTVWAILAHGGEYRPDYVPTRMAA

SEQ ID NO: 288572 - protein, 370 aa, unidentified
MQQPTTLFVGLDVHKASISVAHAQALSTEPPHFVGAIGTRETDIVKLIRRLQGKASRLVFAYEAGPCGYVLHRYLTRKGFDCQVVAPSLIPKRPGDKVKTDRRDAVELARLLRSGDLTPVYVPSIEDEAVRDLCRARDAARVTLKAAKLRLKSFLLRLGLNYTGRANWTPAHRRYLARVVCPTPAQQIVFQESIRSVDEQVERVERIESELLELAPKWRLWPVVEALQALRGVQWIVALTVVAELGDLTRFDNPRQLAAFVGLIPSEHSSGEKRRQGSITKTGNGRARRVLVEGAWAYRYPAKISEHIQKRIERLPKVAQDIGWKAQVRLCKRFRRLCARGKHSNLVITAIARELLAFMWAIAREVPISA

SEQ ID NO: 288573 - protein, 440 aa, unidentified
MVWKLGLDIELRAVAVAIQCGRGVIGPAVKWSREQLLQWVKEKRARGEAVHTVYESCGFGYTLHEQLSAAGANSLVSTPMRLNLERRRKNDRLDARELCVRLSRYLDGQSHELRPIRIPSRCEQQRRELGRQREFWKREVRRLENHGRALRIEHEHETLEAGWAGPRKWKRLAPQCSQFVREQLTPVVAQIRSAKAQLERLSEQIESLVKKEQIPTGLGALTVSLIEGEVCQWERFAHRKAVGSYTGCCPSEHSSGPIQRFGAIDRHGNKHLRVLLVEAVWRLLRWQPHWHARQKYLLKLRHGAKKKIAVALARQLAIDLWRWRTGRASAQELGWSLPTFPLSEQPKPALVFTKPQPPRQSVPQGGTLLDAAADPKGSSLRMGAFHPQALPQVQARHHGRRSPLATARIGAGDREKPPHVNGKPPIAEQTDPWEKPQKQK

SEQ ID NO: 288574 - protein, 429 aa, unidentified
MNAVTDRLELFRQIRSSVRGSEKYLLVGVDVAKNNHHAFFGTPNGRTLRKNMVFDNSTKGFESLRSLARDLQNQHGLFEVVYGLEPTASYHKPLAEYLIRQDEHVVYVSNVAVAKNRAMLDGRWDKNDKKDAANVADLVGQGRCLYYDVPEESLRELRSLIAFRSRLKKEEHALRMRLRNNVFAQYFPELDKLYIRAGQPDDLVLSIAQHCLDPREIAGMEYEAFLKLITTRKIRIESEKRLRELWEAAKESAGCQVHDAARWEAQSLVSKLKAVRETVRDTEKLMEKVAQQFPEYESLLSIPGFGPIVSAMVLAAIGNAFRFENRKQVLRLAGLDLSAERSGKNSDSVKPVISKQGKAALRYALVQAAMVASSLNPDIRSYYSKWLKGRELERGIKLKMKVKLAAKLLVVAWTLMKSREQFNPSCFIG

SEQ ID NO: 288575 - protein, 346 aa, unidentified
MKKIVKQVVGIDVAQKELVVCLGRMYDDWTPELYASKTFANTVKGFAALTLWIKKQTEGTNPVRYVMEATGVYHESLAYFLEGKEFEVSVVLPNKISNYFRTLEVKTITDKTASEAITRFGLERKLDRWKRPAEIFRKLKQKTRERDQLVGERTSVKNQLHAEQTEAYPGKESIARMKTRINLLNKQVAQIKGEIEALVKQNKDVNKSVELISSIQGVGLLTTVTVLAETNGFELIRNKRQLTSYAGFDVREKLSGTSVKGKPRISKKGNRYLRKAMYMPSLVAIRSEGRFKDLFTRLVSRHGIKMKAAVAVQRKLLEMIYTIYKTNTAFDKDYLREELVALSTQA

SEQ ID NO: 288576 - protein, 416 aa, unidentified
MELLHKRCAGLDVHKDTVVACVRLVSKTRIRRMVETFSTTTEGLLKLGDWLAEHEVTHAVMESTGVYWKPVWHVLEGSVELTLANANEVKNLPGRKSDVNDAQWLADLLAHGLLKRSFVPEREVEELRQLTRTRTQLVREAARHAQRLDKVLQDANIKLRSVLTKVLGKTGRAILRAMIKGESDPKKLADLAKGVARKKLPQLEKALRGFVNDHHRFLLRQHLDLVESLETSIKEIEARIDEVLRPFAEEEAELLETIPGISTTAARIIIAEIGPDMSRFPDAGHLVSWAGLCPRSDESAGKKRSTKIRKGNPWLKTTLVQCAWAAIRSPGYLRSLYHRIRSRAGKMKAIVAVAHAMLVAVFHMLADKQTYRDLGARYFEQRDAERLKQSLTRRLERLGFEVELRRRAVAEPVAVQ

SEQ ID NO: 288577 - protein, 360 aa, unidentified
MTGTMTYVGLDVHARSTQACALDPLSGELRRRGFGPGIDAVLAWLQGLPQPLRACYEAGPTGFALYRAAQAAGIAVEVVAPSKTPRAAGDRVKTDRKDAELLCRLLLAGQLTAIAVPSPTFEAARDLTRAREQVRVDLCRARHRVSKLLLRYGRVYAEKSTWTQKHRRWLAGQRFESVNTELAYLDALAAVDGLLARRVALDERLSRLALEPEWAATVARLRCFRGLDTLSALVLCLEVGEFARFRRAIQLPAWLGLTPSRNQSGESDVSGPITKTGSRYARRILVEAAWHYGRPPRVGVTLGRRQQGQPDHVLQIAWRCQHRLHRLHRRLHERRKPPNVVTVALARELACFLWAAAVAA

SEQ ID NO: 288578 - protein, 385 aa, unidentified
MRTTTAPEKATARETQYLAVSLELGASEWKFAFSPGLAQQPRHRVVAAGDVEAVVKEIAAAKARFKLPADVRVVSCYEAGRDGFWIHRALRMLGVENHVVDSASIEVSRHSRRAKTDRLDAAKLLGQLLRWLSGEKRALKIVRVPTEEEEDRRHLHRELKTVKRARTAVTNRIKGLLATVGVRVKDIMELPQVLERARLWNGEPLPRWLKARVEREWEERERVGQRIAALEKQRRELLRKGTDSGSECARQLYQLRGMGPNASWLYALEFFAWRSFRNRRQIGGLAGLTPTPHQSGADRREQGISKAGNRWMRSLAIEIAWGWLRYQPESDLSRWYQERYGHGSPRLKKIGIVALARKLLIELWKYLQTGAPPAGAVLKKQAQAA

SEQ ID NO: 288579 - protein, 423 aa, unidentified
MNTPKDNTSLQSLPVAWIGLDWGDKEHAFAIQDVAGASETGTLPHSAENLHAWLKTLGGRYGARPVALAIEASRGPVIHALLEYPWLRIYPINPITSARYRSAFTPSGAKDDLPDAKVLLELARDHAAKLRVLEPQDSATVKLAGLVEARRKLVDRRTQLILQVQSLLKSYYPQALVVAGDLKSDVALAFLNRWPDLISLKAARPATIKRLYYLHQVRSQDLIKQRLALIAQAKALTSEAARVEVAVLHLRALLDQLKVFHQHIPRLNDAINQAFASHADHALFNNLPGAGRQLAPRLCVAFGTLRSLYPDPASLQKYAGVAPVREKSGNQTWTHWRWHAPTFLRQTFVEWAGQTVHYSEWAKVYYQRMLKKGKKHAVILRALAFKWIRVLWKCWQDRQPYDEARYLKQLLSRKSPNAVPAKL

SEQ ID NO: 288580 - protein, 355 aa, unidentified
MNAIKYIGMDVHLATISIAVLDAAGKLIMELTLATQAGALLDFIRGLSGTLYVTLEEGTSAHWLYTLLAPHVAKVVVCDPRQNPRRLGEKKSDRLDARKLADGLRLGTLKPVYHGNALGPALKELVRSYRTLVGDTGRVMSRLKSVYRARAIRCGGTRVYSPRYRDQWLAQLLEPGVRGRTERLYKQLDLLMPLRQEARAAMLAESRKHPAHKILCSIPGLGPVRVALLIALLQTPHRFRGKRQLWTYAGLALVTRTSADYQVVDGALKRARKPPLVLGLNANHNHALKGLFKDAAVTVLTRPGPFQDFYTLRIAQGMEPQLARLTLARKIAAIALTLWKKGECFNAEHVKAQAA

SEQ ID NO: 288581 - protein, 408 aa, unidentified
MKRYYLGVDWSDEFHQVCAIDPVGKKVIEKKVLENVDGLAEFGRWLDECRAQGIELWAAIEKPAGRIVDYLLDHGVVVYPVNPKALDRVRDRFRMSQSKSDSFDAYVLAEFVRTDHGHLRALEPSSEQAQELKLLTRDHHRLVRHKTRIHNLLDRTLKEYYPRPLEVFADLESKIALDFLTQYPTPEALSNLNRRQWNRFAKRDHHLGEARCKELWDKLNQPQLGIPPHVVRAKAQLLVVLVAQLRSLSQAVESYSERVQSFFASMPASELLHSLPGGKSGTILPMLWAELGDTKSRWQSFRHLQAEAGGVPVTKSSGKSHVVLFRYACNKLLRYASYWFSFVSLNRSEWANKYYRDQRARGKSHHQALRALAAKWLKIIFVMWRDHKPYDENYHLADIARQVIRQAA

SEQ ID NO: 288582 - protein, 366 aa, unidentified
MKKSSTVRVNGNMIFKGHKLTIGVDLGDHWSCYCVLDEAGRIILEQKVATTPEAVKQAFAKIPRSLIALETGTHSPWVSRLLTELGYKVIVAHAQKVQLITKSSRKDDRHDARTLARLARIDPELLGPVRHRSAQAQIHLTVIRARAELVRARTALVNAARGLVKSYGQRLPKCGTQQVSRELGAGLHAELREVLEPLLKEIESLNECIQEYEVRMEKIAKESYPQVEQLKQVKGVGTQIALTYVLTLEDPHRFPKSREVGCFLGLRPGRRDSGESQPQMHISKEGDRYLRTMLVQGAHYILGPFGADSDLRRWGLKLAARGGKSAKKRAVVAVARKLAVLLHRLWVSGEVYEPLRNSDKALRAVA

SEQ ID NO: 288583 - protein, 334 aa, unidentified
MENIALIGIDLGKNSFHVHCQDRHGKEVYRKKFTRPKLIEFLAACPTTTVTMEACGGSHFMARKLVELGHFPKLISPQFVRPFVKTNKNDFVDAEAICEAASRPSMRFVQPKTESQQAMRTLHRVRESFVQDKVKTTNQMHAFLLEFGISVPRGPTIISRLSIILEDNSLPLYLSQLLQRLQQHYYYLLEQIKDLEAQLKQKLNEDEVGQRLLTIPCVGTMTASTISTELGDGKHYASSRDFAAATGLVPRQYSTGGRTTLLGISKRGNKKIRTLLVQCARVFIQKLEHQKGKLADWVRELLCRKSNFVVTCALANKLARIAWALTTRQQTFAS

SEQ ID NO: 288584 - protein, 412 aa, unidentified
MSAVLPSAQLFAGLDWAAEVHAVCVMDHAGKIMDRFTITHSADGIAMLIHRLAKLADAGDVQVGIERPNGRLVDLLLEAGHPVVPVSPNAIKAWRDGEVLSGAKSDAGDAAVIAEYLRLRQHRLRVAVPYSDDTRALRTVVRTRTDLVDMRVAATNQLAALLDDHWPGAKATFADVESPISLEFLTRYPTPVSARHLGEKRMAAFCVKHGYSGRRPAAVLLERLRAAPAGATGEALTEALRDAVLALVTVLKALNSATKDLDRSTVAHLGEHPDGAIFTSLPRSGQINAAQILAEWGDCRQAYATPDSVAALAGCTPVTKESGKHRAVHFRWACNKRFRVALTTFADNSRHSSPWAAHIYNHARAAGKDHPHAVRVLARAWIRVIWRCWLDEVPYDPAKHGAATTLNQPITT

SEQ ID NO: 288585 - protein, 315 aa, unidentified
MNEHNTHVGVDLAKHSFDAVVLETGEHRTFKTTRGETTKAVRWIAKHARPMVVMEATGNYEADLVNALHEARIDLAVMNPRWIRKFAESLGQLAKTDKIDATLLAEYAKRMQPHRQEPTSKALKTLRELVTRRSQIVQIRTQEAGHREHVRSKEVQRSIQTLTKQLDKQQAEIEKKIHEHINADPDFKGRTKLMQTVPGIGETTAMMLAVELPELGRCNRQEIAALVGVAPINRDSGQLKGRRKIRAGRKKVRTGLYMAAVSASRYNPPLREFYKRLRAAGKPGLVALIAVMRKLLVILNSMLAKNEPWREIKIA

SEQ ID NO: 288586 - protein, 320 aa, unidentified
MTILNSPTVIGADVAKAEVVTYREDIQAIEIIANDRNALSLWLKTLPANSSIALEATSTYHLDMAELAHEMGHQVYLVDAYRLSHYRESIGQRAKTDPCDARLLARYLTSEQARLRLWNPPPQAYKVLKSLLRRRAELVNLRVSLKLSWSSEPLLKDELAQQLKSFKQAEQAIQKLLHKVSKEAGIIGNIKRCKAIEGVGELTATGLATAFMRGHFASGDAFIAFLGMDLKAKDSGKKNGTRRLSKKGDSELRRLAHNAAMAASRSPTWKPFYESYLARGLAKTEALVILARKLCRVAFALMKHQSEYQPNLRLQGSHAT

SEQ ID NO: 288587 - protein, 350 aa, unidentified
MVVVGADVHKRTHTFVAVDEVGRKVGEKVVEATTVGHHQAIRWARAQFGVELVWAIEDCRHLSARLERDLLSAGQKVVRVPPKLMAHARASARTRGKSDPIDALAVARAYLREPDLPVASHDEVSRELKLLVDRREDLVGQRTSTVNRLLWRVHELDPSRAPKPASLDLTKHRRILGDWLSAQPGLVAELAREELADITRLTEAINALAKRISERVRAIAPALLAMPGCGELTAAKIIGETAGVTRFKSEAAFARHSGVAPIPVWSGNTAGRVRMTRTGNRQLNAALHRIAVTQIRLDGLGQAYYRSRLAAGDSTIEALRCLKRRLARVVFHHLHTDHHTRTKPCQPAAA

SEQ ID NO: 288588 - protein, 374 aa, unidentified
MKERGLRSSCPFRAHMLGVLTLLRRRRPLVSEFYEGRQFVGMDLHRRRSMLVRMTEFGEHLETVRILNDRDSLAEVMSRAGESPEVVLEATYGWYWAVDALAELGATVHLAHPLGVKAFSYRRVKNDQRDAFDLADLLRMGRLPHAWIAPPATRELRELVRHRAKLVAMRSQCKAHVHAVLAKGGIWVPMTDLFGVEGNLLLDKVTMPAPYRERIASLRRFIEGFDAEIDLFTGLVQRRLAHDAGYTAIQQIPGIGPVLAAVFVAEIGDVHRFAGPAQLTCWAGLTPSHHESDTTVHRGRITKQGSRLVRWAAIESVKILPGTSRIGAIREQVAHRRGNRNIGAVAAARRQLELVFYGLRDHHVRALHRSPRAA

SEQ ID NO: 288589 - protein, 344 aa, unidentified
MTTVYIGVDFHPHQQTVCWCDPATGEVKIQTLHHQNGEVQRFYQQLPPAMIGMEATTQAVWFEQLLFDNHHQLRIGNPKLIRARATSRHKSDARDAELLFDLLRRDEFPTLWRRPRASTEVLEMLRLRHTLVRQRTQTYNRLQALAHAVGLPKGRMHTSAYQIRLQQAEMPSVMRFHRQHLLDLLAHLHQQIHGLDTWLEQQAARHEQVQLLCTQRGVGPLTALAVVHTLGDVQRFTSARQSTAFVGLDPLERSTGGKQRFGAISKAGSPLTRFLLGQAAHLAARHDPYFKAFYQRLAKKKPKAVAKTATARKLLVKLTIMLRDHLTAQEFAERGRTLAHARKR

SEQ ID NO: 288590 - protein, 392 aa, unidentified
MHKDIHVAVVIDCWTNILGEITFENRPSKFDKFMQDVKKIYKDLTPCFGLEDTRGFGRNFASYLLGHKYTVKHVNPAYTDSMRSSAPMSKKNDAFDAFCVAKVLRDMVDTLPDEEHNDLHWTIRQLVKRRNNLVKGIVIAKNQLNSNLTTVYPSYKKYFCDVDNKTALLFWEKYPHPQYLKRVTPELLLEELRVIHKGMKQEQAESILLLSEQNSPKEKEFQTERDLIIKSLVREIRFKKQENEDIDNELERLVELTGYKLKTMPGINLITAANIISEIGNVERFPNSDKLAQFCGISPVNFSSAGKGKDQRSRQGNRVLNAIFHFLAIQLVQISPSGKPRHPVFREYFEKKVKEGKTKPQALVCVSRRAVRIIYGMMRTKTVYKPFEKLEE

SEQ ID NO: 288591 - protein, 352 aa, unidentified
MKYYIGCDAHKKYSVFSIVNESGQAATPERVQHDKELYRKYLNILPAGSPIAIESVGNWYWMIEAMEQAGHIPKLVNPKKAKLLMGNINKTDKLDARGLAMLNLNGSLPEVWIPPAELRDQRELSRMRMSMVGVRTQFKNRIHATLAKYAIEIREVSDIFGKTGRALLQKAIRELPPETKNSVEEQLKLLDQVTSQIEELENHIREVVKETPMMQLIKSLPGVGDILAIVIALEIGDIDRFRSPQHLASYSGTVPRVSSSGDKIRYGRVRPDVNHNLKWAYIEAANCVALQQERQVGRHVVQLLKRIQKQKGYPKAAVAVARHLAEATYCMLKKNQPYQEPNLKKTVLSSQG

SEQ ID NO: 288592 - protein, 400 aa, unidentified
MSTSGRRIWVGVDAGKGHHWAVALDADGETLFSTKVINDETQILTLIETAREKADDVRWAVDISGRASTLLVALLVAHGQKVVYVPGRTVNRMTGAYKGEGKTDAKDARVIADQARMRRDFAPLDTPPELVSNLRVLTNYRADLIADRVRLINRLRDLLVGICPALERAFDYSAAKGPVVMLTEYQTPAALRRIGVKRLTTWLERRKVRGAGTVAAKAVEAAQSQQIALPGEKRVAKLVCDLAHQLLALDERIKDNDREIRETFRTDDRAEIIESMPGMGPILGAEFVAIVGDLSGYRDAGRLASHAGLAPVARDSGRRTGNYHRPKRYNRRLRHIFYMAAQTAMMRPGPSRDYYLKKRGEGLLHTQALLALARRRIDVLWAMLRDGRLFTSAPPVTQAA

SEQ ID NO: 288593 - protein, 343 aa, unidentified
MQTITTIGLDIAKSVFQVHGVDTGGEVVIRRQLKRRSVLAFFEKLPPCLVGIEACASSHYWSRELQALGHTVRLMPPAYVKPYVKRQKNDSTDAEAICEAVTRPNMRFVPTKTVEQQSCLMLHRARHLFIRQQTAVINSIRAYLAEFGIVAPVGRRGVEQLLEVVANTADRRLPEVARMCLAALGSQLRALKAQILEFDRRIMAWHRSNATSKRLDAIPGVGPALATALVASVADPMAFRSGRDFSAWVGLVPKQNSSGGKDRLGSISKQGDRYLRSLFTAGALAVIRYAKIHGTGHRPWLAGLLARRPTKVAAIALANKLARMVWAMMVRGERYKEPAALMA

SEQ ID NO: 288594 - protein, 317 aa, unidentified
MQTFPNIGVDIAKDAVVVACAAQSFPVRSIANQRAPLLDWLKSLPAGSRIGLESTGCYHELLADLAHAQGHTVFLLNPLDTRHYAKAMGNRAKTDRVDAELIARLIEQEHTRLRPYTPPTANQRKLDRLIRRRAKIVRIKSSLKLTMLNLSGFATELKAVLGKLDSLIAKIDAAMSAIAACSPEHVEAQQQLQTIVGVGPVVGMALTNTLERVPFHNADAFVAFTGFDPRANDSGRKAGRRRLSKRGPAELRRLLFNAAMSAAKTKVWKPIYEHYRTQGWSTTASLVIIARKIARAAWSIHHYHSTFNPDRITKCLT

SEQ ID NO: 288595 - protein, 406 aa, unidentified
MEGPIITVDVSKGSCHYQPFIENGHPMRKPKQLSATIDGFQKLGQTIKDLEAKTEREDIPVIFEATGVYHRPLQKYLEDHKIRYYIISPLLSATYRKTDLHSNKTDALDCAHIAKAYYCEKELRQYQAQPQEYKRLYQLSRIYESELVHLRKRKVSLRSMLDIIYPRIDKTFKGNQNLYDPIPMEILKRYPHPSLLLSHREDTIVKTVGHRTGHLKGYTERIVHKIYEKAKECYSGCDIDDIEVVKLPSLIENVQEQKKKCDSLLKEMIEIARTCPYFAPIVSIVGIGENLAARIIAELRDVSRFDNRAAIVAYAGLNPKIQQSGDIDGLHLKISKKGNKHLRCLLYLGAQCNYRLRKEDPLYEFTKKKRQQTQCPLSSKAAYTASAHKLLVIIYSLCKNGTLYHS

SEQ ID NO: 288596 - protein, 340 aa, unidentified
MEHIAAVDLHSDNGYYGIIEADGKRVYQKRLPNDLPMVLKELEPYRETLRCIVIESTYNWYWLGDGLMEQGYRVKLANPAKFEKYNDLKYSDDKSDTFFLTEMERLNILPTGHLYPREERGIRDLLRRRMLLVQQKTSHILSFQSLISRQTGGSINSNAIKQLEPEDVEKVLAGQDRQVVFAGQSNIAVIGFLQERIRLLEKTVLASARLRTEYEKLQSIPGIGKILALVIMYETGAIARFKAAGNYVSYCRCVKSNHLSNGKKKGEGNRKNGNKYLSWAYVEAANYARRYCEEAKRYYQRKLAKGNSVIATKSLAAKLCRAAYFILRDQVEFDVARMFG

SEQ ID NO: 288597 - protein, 389 aa, unidentified
MIYVGIDVAKDKHDCCILESEADKLYPVFTIPNNKAGFDELYEKIFTVTDDKTIIKVGLEATGHYSLNLLGSLIDKGLPTCVINPLHTNLYRKGLSLRKTKTDKVDARSIAMMLMTNKTLKPYSDTSYHSEELKSLTRYRFDKVQERAKLKSSVARLVNILFPELEKLVPSLHMASMYALLSKLPGASYITECHLTHLKNLLETASKGHYGRDMAITLRNTARDSIGSVIPAKSMELKHTIHLIEVMTEEIDEIEDSIKSIMDTCNSPIMTIPGISYRMGAMILAEIGDFTRFNYADQILAFAGLSPSTYQSGQLDSSYSHMEKRGSRYLRYALFNAAKFVCKWDENFGAYLSKKIGEGKHYNVAIGHATKKLVRTIYQMELTGEAYRR

SEQ ID NO: 288598 - protein, 343 aa, unidentified
MNEVTTIGLDLAKNVFQVHGIDASGQVVACRQLRRSQLLPFFEKQAACVVGLEACATSHHWAREIAKLGHDVRLMPARYVKPYVKRNKNDAADAEAICEAVTRPTMRFVAVKTEEQQSVLMLHRTRQLFVRQRTTLINAIRAHMAEFGIVAGVGRNGVERLLRLIDEGADGRVPPVARECLQALRAQLVLVKRQILEADRRIFAWHRSNELSRRLETIPGVGPLIATALVASIPDPHAFGSARDVPAWIGLVPKQNSTGGKERLGGISKAGNRYLRSLLVVGALSVIRRAKQVGYTRRAWLAELMARRPVKVAAIALANKIARIAWALMVNGTRYEEPVPQAV

SEQ ID NO: 288599 - protein, 412 aa, unidentified
MRRVIGIDIHRTFGEVVIWDKGVLRHAGRVDMTRTALEGFGKSLQATDEVVIEATGNSMAVFRVLSPFVARVIIANPLQVKAIAHSHVKTDKIDAGTLASLHAAGYLPEVWMPDAATERKRRLATRRDQVVRHRTRIKNEVHSILFAHLIPKCPHADLFSKRGRDWLARQPLPDDERIAIDRHVRELDRLGEDLAVLDREIAETAIDDPAVKRLMTITGVNLTVAAGIVAAIGEISRFKSPQKLVSYFGLNPRVRQSGLGVAHHGRISKVGRSHARAMLVEAAWAAAKAPGPLHSFFVRIRAKRGHQVAAVAVARKLTVLCWHLLTKSEDYRWARPALVANKTRAMELQAGRPQQKGNRRGVAYAYNIKALRDQEMQIAKQAERSYEHFVAQWKPRPPKDKVRGRLNPAGQE

SEQ ID NO: 288600 - protein, 462 aa, unidentified
MAGHSKRRPHKPATVSPTALPAVRPRVAGLDVGSSQHWVCGPARDDDPPYVRSFGTTTDQLNALADWLLTQHVESVAMESTSVYWIPIYEILESRGIEVVLANARQLHHVPGRKTDVSDCQWLQALHSCGRLRGSFRPSEAITRLRALQRQLGNLVAERTRCVQWMQKALDQMNVQVHRAVSDLTGATGLTIVRAIVAGERDPARLATYRDRRCRHSADEIARYLTGTWRDEHLFNLASALRLFDALDAEIAAYDARLLQELEALHPPDRHEAPVPPHPNPAKEKAIKARGEQPARAPLWRFAGVDLTRVDGIGAGAARVILTEVGPQLTAFPSEDHFVSWLRLCPRTPISGGKPLKKRRNGLGANRIAGVLRMAATSLHRSKSALGASFRRIARHKGGAVAVFATARQLARLIYRMLRYGHDCVDIGEQAYDRRFQVRRLAALTDTAKTLGYALVPNVATG

SEQ ID NO: 288601 - protein, 400 aa, unidentified
MQQQAERIVIGMDPHKRSATIEVMRADESIADDGRFDTDETGFAEMTGYVNRIQPDRDRRVWAVEGCNGIGHHIAVRLLAAGEQVLDVPPKMSARMRVFATGQGRKTDATDAHSVALVGTRMAGLRPVVDDQQLSVLRVLADRRRSLGEDHTRIVSQLHQQLLELIPGGAKRDLSAAQAKALLAKVRPRDTAGKTRRRVAAEMISDLERIYQRKKAADKELTELVAATGSNLMKLHGIGPSGAAQLLVDVGDITRFPDRGHFASWNGTAPIDASSGDQVRHRLSRLGNRQINRTLHIMATVQLRNQTEGRAYYDRRKSEGKTSKEAMRALKRRLSDIVYRTMLDDAIGHTFNGQRTGPGGQRGNDSDSSAAGSHPHTSSSDKSLPGPATTNPRTPLPAAS

SEQ ID NO: 288602 - protein, 351 aa, unidentified
MLIIGCDFHPGFQQVAIFDNRTGEIQERRLPHREEAEQFYRSLSGPVRVGMEACGHYPWFERLLEELGFELWLGDAAEVRASVVRKQKTDRRDAEHLLHLLLENRFPKIWVPSLEVRDVRQLLVHRHKQVQARTRTKNQLQAMALSQGVQKKWKLWTKLGRAELEQLPLLPYAAERRQRLLEALDGLEADLVELNRRVDEEVRKRPEAMRLRTHPGVGPVTALAMVLTLGPAERFASGKDVGSYFGLIPREDSSGGKQRLGKISKQGSSFLRFLLVEAGQTAARYDPQLKRFYRRLAMRKNRGVAKVAVARKLATRLYLMLREQWTYPQLCQAVMQVSPSHSVVEPEKPTA

SEQ ID NO: 288603 - protein, 317 aa, unidentified
MTKGTAQFVGIDVSKQHLDVGFYPAGRHWEEQYDEAGILRLTKQLSEQPVELIVVEATGGLQIPLVASLVAASLPVVVVNPRQVRDFAKALGQLAKTDRLDALVLARFAEAVRPELRPVRDELSQHLAALMARRRQLMEMLVAEKNRLHSALKPLRKPIKTHIAWLQRQLKQIDSDLDSAIRASAHWRTQEDIIRSVPGAGQGLARTLIIDLPELGQLNRRQISALVGLAPYNKDSGHSRGRRAIWGGRAHVRAALYMAALSASRCNPVIRPFYQRLRQQGKPFKVAITACMRKLLVTINTMVKNQTPWQAVAADQA

SEQ ID NO: 288604 - protein, 373 aa, unidentified
MENIITYVGMDTHKKEHIVALHYPGKEVIENMTVRNIASEILKMVKKILKKAPGTVQFCYEAGVCGFDLKRKIESLGCKCAVIAPTLTPVKPGERIKTDRRDALKLLAMFKAGLLTEVYAPEPDQEAARELTRLHQTARENLMRIHHQLLKFLTRYGYIYHEGDHWTQKHLRWLRSLEFSEPILKEVFDSYFTEMQHCMQRLESLARQVEQLAESEPYKEIVGLLKCFHGIKTLTAISIITEIFNFGRFASPRDLMSYLGLTPSESSSGEKQKKGSITKSGNKRVRRLLTEVAWHYRHPCNISKELKRRRKDQPLWAVEIADRAGQRLRKRYWYLVNRGKMPCKAITAVARELVGFIWSVMREHELRKAKKVA

SEQ ID NO: 288605 - protein, 350 aa, unidentified
MIIIGCDYHPSFQQIAFVDTETGELQERRLQHREEAEKFYRDLAAQGMKVRVGMEASGHARWFERLLAELQLELWIGDATVIRAKRGRKSKTDRQDAQHILKLMLKDDFPKIWVPSGENRDLRQLLWHRHRMVQARTRMMNQLQAVALNEGLRYKKRLWREAGREQLEAIRLAPWASQRRRDLLELLDRMNPTIAKLTQAIDLEVEKCPEARRLQTHPGVGPLTALAFVLIIGKADRFQCGKQIAAYLGLVPLEDSSGERRRLGHITKQGNSLLRFLLVEAAQVTARSLPEWRSKYCHLTMRRGRKIAKVALARKLAVRLYWMLRKEWDYEQLRKFGSHAGKPGSGDGVK

SEQ ID NO: 288606 - protein, 356 aa, unidentified
MPQTLNSKIAVIGIDIGKNSFHIVGQDRRGALVLRQKWSRGQVEARLANLPPCLIGMEACTGAHHLSRKLQALGHDARLMPAKYVRPYSKGEKNDYRDAEAIGEAVQRPTMKFVATKTADQLDLQALHRVRARLVSQRTGIINQIRAFLLERGIAVRQGLHFLRAELPGILGKRTDVLSPRMLRIIEDLCGDWRRLDERIDSLSDEIAALARQDKGCERLMTVPGIGPIISSAIVAAIGSGDAFSKGRDFGAWLGLVPKQMSTGDRTILGSISRRGNRYLRALFVQAAWVVLVKITPEGWERYGLRSWIEAAKQRLHHNVLAIALANKLARIAWAVLHKGRAFECVKANATASRSA

SEQ ID NO: 288607 - protein, 331 aa, unidentified
MWHVGIDLHRRDLVVAAINDDGTVLEPVRLQSRDRDKILEHFTSLQPFRCVVEATETYYWLYELLKPLGTVLLANTVKFRALMSRRSKTDKHDAILLAHCLRLDAIPLASIPSPKYKRLRSIMRHRIGLGRSQSKLKIQLKALAARRNVEPPYKSCFGPRGLRWFQQQDFGFACNLERDALLQTLTLIATQIRSIEEMYESLAEEYPEVQALTDIHGIGIYSALVIVGEICDPSRFRHAGQVGAYAGLTPRVRQSGEHCYHGHITKQGSSWLRWILIEAAIKVVRKDERLATFYTRLRKRSSGNIARVAVARKLAEICWKRLKRFQQINTA

SEQ ID NO: 288608 - protein, 389 aa, unidentified
MLCVGIDVAKRKHDCCIIDSDALKTVESFTFPNSREGFDMLLSKISELGIPKDKIRVGLEATGHYSSNLAHFISEHDIPLLTFNPLLTNRYKQGFSLRKTKTDKVDACAIAQMIVSGKGSQTYSSSLYHNEEMKSLSRYRSQTMQKCSKLKISVSRLVTILFPELEGLTSSIHLASIYALLKAYPGHEQIAHCSMKRLTHLLSDASQGRFDKSKALEIHQAACRSIGKVSLSASMELVHTITDIEVLKQHIAEIDEKLKEMVDQEESSIIDIPGIGYTLCASILGEVGDFKRFPDVDKLLAYAGMSPSKHDSGDYHSKHNKMEKRGSPYLRKTLYLAARLVAQNVPKFKEYLEKKLSEHKPYKVALSHVAKKLIRLIYRLGISGCPYLA

SEQ ID NO: 288609 - protein, 417 aa, unidentified
METTETQYKVAGIDVHKSMLAVVVADAGREGEFQFDRRKFGTTESELRQLSTWLDEERVREAVMESTAQYWKPVWQQLEGQCELYLAQAHSNRAPRGRKRDFADAERLLRRHVAGELILSFVPNPEQRLWRTLTRTKHQLTRDRVRLHNQLEALLEDARIKLSACVSDLLGLSSRRMLQALAKGETDAAQLAAMADPNLRATAERLRDALHAAATLSALHRQILRLFLKRLELMEEQIEVLDKSIGEALHNYHAAVLRLAEVPGFGIDSAQPVIAEIGPTAATFPSAEQLSSWVGTCPGREESAEVSKNNRSPKGNKMMRRVLNQVANAAVKTNGSIFQSVYRRLVARLGHNKAIWAIAHRLCRLAWKILHQGVRYIEYGNQRNPKAVKTRMKKLIRELQSLGYQVQVEPLKNPPTP

SEQ ID NO: 288610 - protein, 340 aa, unidentified
MDHIGIDVHKMESQLCILSESGEILERRIRTQRERFAAVLGERPPARILIEASTESEWVARCLEQLGHEVIVADPNFAAMYATRSRRVKTDRRDARTLAEACRLGAYRAAHRTWDRQRHVRTQLAVREALLQTRNRYISLVGAALRREGFRVATGNAEGFVKRVEKLALPGQLKSEIAPLFTVLLSVNHQLEWLDCRLERLAQSDETVARLCTAPSVGPVTAAAFASTIDEVSRFSNAHQVEAYLGLTPSEMSSGEAQHKGHITKAGNSRMRRLLVQVAVSILRLRSPRTEGLRDWASKLAVRRGKKIATVALARRMAGILYAMMRDGTCYLVAQPRKAT

SEQ ID NO: 288611 - protein, 443 aa, unidentified
MTRKNQKRFEVIHPDCAAVDVGGSEHLAAVDPTKCDDPVKRFSTFTDDLHAMADWFESMGVKVVAMEATGVYWIPLFEILDRRGFEVYLVNSRATRQITGRKSDVLDCQWILQLMTHGLLRGAFRPSDDVCSLRSLVRQRGNKVRDQAKALNRMQKALVQMNIQLAQVISNIAGVTGMSILRAIVDGERDPEVLAMLRDKRVKADQATVARSLRGNWRAEHLHALSQELAAYDFLEKQIGECDLAIAFALERLPVLQDEVVLPAKTLRNPHRSTEQQLTLHRALNKVMGVDLTAIPTIGIDTALVLASELGSDLSRFPTSQHFCSWLGLAPPTRISGGKPLPGKSLKVINRAAQALKQAASIARNDKSFIGASHRARLTRMDTCCAIKATAHQLARLIYAMLTKGQPYVEKGIEEFEEKSRDRQMRALERKARKLGMQLVKAA

SEQ ID NO: 288612 - protein, 394 aa, unidentified
MRFAGVDIASETHVVALVDEGGAVLVKPTAFTEDAAGYGKLFEQLGASAELLVAMEATGHYWKNLFAALAARGFSVALLNPVRTHRFAEEDLQRTKTDAIDALGIARFAAQKRPPATRLPDPATEELRELVRLRERLLQDFGDRVRQLHRLVDLGFPEFTRYVRSLDSELASAILHDYPTAAAFRGVSAKRLAALRYDGRHQVGAELAGLLIAAAQRSVGHHHGEAYRVQVRYACEDLDILRRRLRQLDRDIAGTLGAHEVGTLLTSIQGIGPNTAARLIAELGDPAHFRGPGALAAYVGVVPALSQSGKRKHMRAATTPIGNARLRAALWMPTLTAVRKNPWLRAHYQRLLARGKLPKVALVACMHKLLFAVYSVAKHRRPFVAQLPTAETTT

SEQ ID NO: 288613 - protein, 371 aa, unidentified
MKKSSMFVGLDIHKSSIEIAIADAGRNGEVRSYGGIDGTLDALDKVVRKLVSKGSDLHFVYEAGPCGYEVYRHLTTQGFDCVVVAPSKIPRQSGNRIKNDRRDAQMLARLHRSGELTAVYVPCIEDEAMRDLTRAREDAKAMERNAKQRILAFLLRHGHCYSGKSPWSRAHFRWISILKMPHPAQQIVLQESLDTLAECTRRVDRLTEQIQTLSPQWRLFPVTQALQAMRGVSLIVATTTIAEIGDLTRFKKPTELMSYLGLVPSEHSSGRTTRRGSITKTGNGHVRRVLVEAAWAYRLPARVSRKLLIRQEGVSQEVCAISWKAQLRLCARYKRFTTKGKPHQLVVTAIARELCAFMWAIANEVQGPVKV

SEQ ID NO: 288614 - protein, 315 aa, unidentified
MELLPTAPSFVGIDVSKDRLDVHVRPSGQTLTAARDSTGLQQLVGSLRKLAPALIVLEATGGFEITVAAALASAGLPLAVVNPRQIRDFARATGRLAKTDALDAQVIALFAERVRPEPRPLADADSQNLAELIARRRQVVEMIGMETNRLYQVRNARVQRMLRTTVNTLTAQLAELDRDIDDTIKRSPVWRAADNLLTSVPGIGDVTAHTLIADLPELGQLDRRRLAALVGVAPINRDSGQMRGKRTIAGGRSDVRNALYMATLSAIRWNPIISQHYKSLVERGRPKKVALVACMRRLLGILNAIMRTNTPWQCA

SEQ ID NO: 288615 - protein, 339 aa, unidentified
MSKLLKNFVGIDISKTYFDVVVVKTQPTEEMIHHQFPQKQEGFLKMLEWLQQHNVTLNEATLFCMEYTGLYNTGLVNYLVKNKAQLWVEMPLRIKKAGGFERGSNDKTAAVKIALYALRYQDRMQLWQPIDSNIEKIKSLIAQRDRILNAINQLRVPVDELKEYGNIAEAKEIEKLQAPALKGLQKARLSVEHQITKTVQSDEKISKKVQQVQSIKGIGPITAVALLAYTKGFTSFNNGKQLACYCGVVPFKKESGTSVRFKATISPFANKKLKKLLHLCALSAIKNDNEIKLYFERKVAEGKNKMSVINAVRNKLVHRVFAVVRDERLFEENYVRKCA

SEQ ID NO: 288616 - protein, 301 aa, unidentified
MQRPRQGQVVIGVDTHKEIHVAAAVDWQGTLVGEECFPTTRQGYRLLESWGRSLGDVLRVGVECSGSYGSGLTRHLAKNGFTVLEVAFPDKTVRRKRGKDDFIDAEMAAEAAFTGARTVTPKSRDGMVEALRMLQKARSTAVAARRAALQMIRADIISAPEELRDQLRGMTRMQLIRHLVATRPDSTDFKTPLGATKIALKRLAKRYVDLDDEVSELDDMIDAILADAAPLLVRLKCVGAQSAAQLMVTVGDNPERLRSEASFAMLCGVAPVPVSSGMTYRHRLNRGGDNPHHRHREAQNR

SEQ ID NO: 288617 - protein, 343 aa, unidentified
MQVSTIGLDLAKNVFQAHGVSAEGKVVLKKQLRRGQVLSTFAKLPPCLVGMEACAGAHYWARELRKLGHDVRLMPARDVKAYVKRDKTDAADAAAICEAVSRPSMRFVALKTPEQQGRLMQHRVRDLLLRQRTQTINALRAHMAELGLVAATGRQGLCLLLGIVADAKDARLPQDARASLKLLASQITALQAQIDTLDKRLHAQHRQCPASRRLETIPGIGVIGATALAATITDPKAFKSGRDLAAFIGLVPRNNSSGGKQRLGPISKQGDRYLRRILVVGAHSILKQARARPDKHPWLARLMARKPGKLAAVALANKTARIAWAVLARGESYRAPTAPAAAG

SEQ ID NO: 288618 - protein, 402 aa, unidentified
MPKHRSYRRFCGLDVGKNTHTLCIIDAQQNTLVPARSFHNDHRGFQQLLESLQHTGRKHTVLIGMEATGHYWYSLHHTLTQEGYTVTVLNPIQTARQAKREIRKRKTDKLDAFRIAVLLKNGNYRSALIPGELAMTCRLVTRLRYRLVRQRTRLKQLIQAHVHPVWPEYETLFADPFSVTSRKLLAENPVPADVLQWDEDRLSEFLRKTSRGKHGPQQARNIRQAAQDSVGMQRGLPGMRLAIQVLLEQMDNTQPLLQKLKEQIESLGQQIPAYLHTLPGSTTASVVSLYGEVEPIETFQAPSQLVAFAGLDPQVHQSGQYDAPQRRISKRGSPFLRQTVWQMAFRAIYQEGDLRWFWLHKRAQHKHHLAAVTAVAGKLCHIIWRIMTDERDYVPEHRPSTS

SEQ ID NO: 288619 - protein, 341 aa, unidentified
MNEVTTIGLDIAKRVFHVHGVAGSGGVVFSRKVTRAKLIGFFAAQPRCVVAMEACGGAHHWGRELERLGHEVRLIAPAYVKPFVKRQKNDARDAEAICEAAQRPGMRFVAVKPEAQQASAALFRARDLLVRQRTQLINALRGLTAEHGWVVPQGRWKAAQLMADIEDPACTLPHAARDVFLVLIDTVRALDTRIDAFDREIAKRARQDEDASRLMAIPGVGPLIATAMLALAPPSASFRRGRDFAAWLGLTPRQRSTGGKQRLGSITKAGERSLRRLLIVGAAAVVRHASRQGAPQGSWLANLLARKPRMLAIVALANKTARIIWALLAKGGVYQAPVAAA

SEQ ID NO: 288620 - protein, 344 aa, unidentified
MAIVGGLDIHRRQITYDWIDTTTGETRRGQLSPATRLELRGWLARFTGQQADFALEATTGWRFVAEELECAGFRAHLAEPADTRALRGPKRRAKTDRTDARHLRELLRAGTLPESWMPPAHIADARTQVRLRRGLVGERTGWQQRIHAILFHHGLPERSQLLTADGRAWLARAELPAVARQAVELALRMIDHLEVELDTLDAQLAGIARVQPGCQALQRRYGIGWLTAVAIWAEFGDVRRFANSRQAVRFTGLDITIAESDGKRARGHLARQGSPVLRWALHEAAMCAARPSSPDHTYYLQVKQRLGGKRAALSVARKLAREAYHTLRELGDQALVPADLPTAA

SEQ ID NO: 288621 - protein, 365 aa, unidentified
MKSLFYVGMDVHKDSVRIAVLKGTEKQTVYEATVKNDISKIVKIVSGYKTKGTVVAGYEAGCMGYTLQRSLAAAKVDCRVIPPNKIPRLGSERIKTDARDAVLIARMLKNNEGESIYIPTADDEAARDLLRCREDIRAELHRTKQQLQKQLLRTGFIFDGGKQLWSKAHRDWMAKLQFPHELQKETFTQYYCHIQELENRLERIDAKIVTVAEAEPYRESVARLRCFKGIDYITALAFVCEIGDFRRFASAASFMAYLGLVPSERSSGAKRRQGGITKTGNTHLRKLLVESSWHYRYRGAASAALQARRAGMDEKVIVYADKALHRLQSKFAHLLFKGKSSKTAVAATARELAGFVWGTMVGAYC

SEQ ID NO: 288622 - protein, 323 aa, unidentified
MPPSIGIDVSKKKFDVALITAQGKYRCKVFDNNASGFKAFLDWIQAHVPGGQAQACMEATGVYHEALANFLFDNQVTVFVVNPLRVKRFVESEGLRNKTDEGDAKALARFASKNELDAWEAPSKSVRELQALVVRLESLQTMRQAELNRLDIAHTSVRGSIEAVVAALDKEIEAVRSLIRKTIDDDPELRQRNDLLDTIPGLGDRTIPSLLAYIGRPERFKTVKALIAYAGLTPAIRQSGTSLDRKKGLHPAGHRDLRQALFYPAMAAGRFNPIVAAFWQRLKAQNKPGKVIVVACMHKLLAIAYGVLKSRQPFNPDLALKGT

SEQ ID NO: 288623 - protein, 350 aa, unidentified
MKRATEKLYAGIDLHSNNVVIGVINQDGKRIAQRKLDCHLEQVVSFLQPFKPRLHAMAVESTFNWYWLVDGLRARGYAVDLANPAQIQQYSGIKHADDQHDAFHLAELQRLNILPKAHIYDARLRPVRDLLRRRTNLVHQRTALMLSFKSLYARTTGQSLPLKELKELTPKAAVGFYQHPANQLIARVQVEHMEALAASISRVEKAVLACAREIPLYDRLLTIPGIGKILGMTITMEVGDIGRFQTDGDFASYCRTVDARRLSNGKQKGDNNAKCGNQYLSWAFVEAANFAKRYDENCRRWYDRKAAKTCAVLATKAWACKLAKAAWHLMARQTNYDEKRMFPELAMKRT

SEQ ID NO: 288624 - protein, 361 aa, unidentified
MLCNCGSTIPIEEEPMDYFAGLDVSLETVNVCIVDGDGTVLLEEKVGAEPKEIVALLKRFGRPLKRAGLEAGPTSSWLFSELRAAGYPALCLECRHVKAGLSAMRNKTDRNDARGIAQLVRLGWFRLVHVKSEEAQQIRMLLVNRNLLLGKLQDIENSVRGSLKVFGLRLGHVTKHSFEARVLELVEGHSVVAAITEPMLRVRRVLMDEFVSLDRMAQKLARKDPVCRRLMTVPGVGVVVALTYRTGVDIPERFPRSRDVGAHFGLTPRRYSSGQVDYDGHISRCGDEMVRTALYQAAHVLMHHGRWSCLRGWAMRIAKRSGVKLAKVALARKLAVVLHRIWIDGTDFRWTTRDQVHALAA

SEQ ID NO: 288625 - protein, 331 aa, unidentified
MKINETAGIDVGKMKNEIRIHTSQKYKSFDNTVKGITSMVKWTISKSNYRKEEILFAFEHTGIYSQQLSVYLTENGYNYVMLPGLEIRRSMGITRGKDDKVDAKKIALYAYRRKDELEPYKLPEKNVVEIKKLLLLREKLVKQRSGYKATLGEYKSFLKRKENSMLFSVHEKMIKELTKQIDKIDNGLMDIVNKDEKLKKLYKLITSIKGIGAQTALFMIAYTGGFTRFETWRKFASYCGIAPFPNTSGTSLRGRTKVSNLANKKIKSLLDLCAKSSIQWNSEMKVYYEKRIAEGKSKMGTINIIRNKLLSRIFATVKRGTPYVNTLNYCS

SEQ ID NO: 288626 - protein, 348 aa, unidentified
MLTIGIDPHKQTHTGVAVDQLGVQIAQRSVAARGEGFGQLLEWARKLDGERVWVIEDVRHVSGALERFLIDRGETVVRLPPRLMANARQGVRERGKSDPIDAVAIARAALREGIDTLPMARLAGAELEIRLLALHRERLVNIRTRLINELRWQLHDLWPDWEIPKRVLIHPGWQTKIARRLSRAARTVQIQIARDMIARVRELTRTITELYEQLADLVKQVAPQLLAEKGLGVLIAAKLIGEIAGIDRFTSDAQLARISGCAPIPVSSGRTDRHRLDPGGNRQLNHAFHMLAYAKILHDPRTGVYLAKQRHNGKTNREAIRSLKRHLVRRVYHLLRDPSTVPITVCLT

SEQ ID NO: 288627 - protein, 461 aa, unidentified
MNRKKPTGKQNGSVQKRVDWKALEIVHPDAAGIDVGGSEHWVAISPDRDPEPVRRFGCFTADLREMGRWLVEKGVRSVAMQSTGVYWMPVFEVLEQQGLEVYLVNAQHTKNVPGRKSDVQECQWLLKLHAFGLLNNSFQPTDEIRIARTLWRQRSNLVAEASSVIQRMQKVLTEMNVQLSNVLSDVSGMSGMKIIGAILEGERDPWKLATSVEPEVKAKPEDIAKSLEGNWREELLFVLRQHVELYRIYQEKITDCDLQLRKHLESLGSKVDLRTQPIGNRPKGKKKSKNAPGFNLRTELYRITGIDWTQINGIDVLTAQTVIAEAGADLSAFPSEKQFASWLGLCPTNEQSGGKILNRRTRKVVNRATVAFRNAALTLLRSQSYLGAQYRRLRTRLGAPKAITAMARKLACLFYRLIKHGQPYVDKGTEYYEAKYREQQIRSLAKRAQKLGLQLVIPKTA

SEQ ID NO: 288628 - protein, 363 aa, unidentified
MKAEKQAEPRYVGIDLGKRTYEVAIVGKSGVQKSNGKTCTAGRQALYKKLRPEDKVALEAGNLAFNIAKELEAAAGCKVYVLNPSHLPLIYGSMKKTDKEDALKLAHIVEYFPEERLPVVPVPSDKEMARRKLLACYRRAQQSRSREINKLHGLFLAQGITTMKKQDLSTGESRKESIRALSGIEREEAKYLVTCLDLHEQRIEALNCKIKEESAGDEVIQRLQSVPGVGPKVAFAFVSHVAAERFENAGQVSNYLGLVPKVYMSGDTVKYGRITKRGNGYIRALLVQAAWSLTRTKKGGKLKERYEYMTIEKSMSKKKAIVAIARRIAELLYTLMRDGTRHEARPFIREKMAEELAQLAMSA

SEQ ID NO: 288629 - protein, 353 aa, unidentified
MTEYVGIDWAYRKAAWCAKSPGGTITAEGFTPADEDGLARLVLQLGVEVKACVEMMSGAVWVRDRLRSAGWEVDVADPRRVKGLAPLACKTDRVDARVLAELCRRDLVPALWIPSLEERELRERLRRRAHLVRLRTSAMNRVYGLGTQWGQRLSADRLRRKDGPELLARSGIPPVWQRSIGEALAIIDLLDRRVAALENELTPIARASRDVQLLATIPGVGDLLALTLAAEIGDVSRFPSPRKLVSYAGMAPGVRQSGDRTKTGLPLTKAGSRTLRWAAVEAAQHAWRESNPWHQLYTDLSNRSAKNDAKSAVARKVLTAAWHILSRQQPFKPSRPRGGTSTAPASSVSVLAA

SEQ ID NO: 288630 - protein, 356 aa, unidentified
MNEGSCVGLDVHARSVVAGVIDMGSGEVRSLRVPPGNEGTVAWLKTLPAPVRVVYEAGPTGYGLARGCAEAGISCVVAAPSKIRPAADRVKTDRRDAERLARLLRLGEITPVRVPGPEEEAARDLVRAREDARGDLMRARHRLSKLLLRHGVVYEATAWTRAHDAWLRRNRFGGGPLAIVFDECYARMLDAKTRRDSLDAAIAELAASEPYVDVVERLVCLRGVSTLTAFALTVELGDWNRFRPESLGAFLGLTPSENSSGERRRQGGITKAGNSHARRLLIEAAWHQRSAPRLSVTLERRRTGKSLAVRAQADRSARRLHGRWGALEARGKPRLIVVVAVARELAGHCWALATME

SEQ ID NO: 288631 - protein, 346 aa, unidentified
MHYIGMDSHINTLDFAVVNEAGQLVKANSVATSVNGFMEFVKTVPPPRAIYMEEGTLAAWVLETCVRFREKLVITDAKKNHWIGSSGQKGDSIDALKLAQLARGGYIKEIHHPVGQRRRFRELMIAYHDTVRSTTRIKNKIKAKFRQNGIQCTGVTVYSETYREEWKGKLPQEATLLLILEGLWRQLEQSEQTEKELLAAARAQAKHYPEIRHFEALPGIGFISAATISAILETPYRFADKRKVWMYAGLGIMTRSSGSKIYSEKLTTDYNRLLKYTLKQAAEAAIQAKDNPFRRKYLDMTLLHGIAPHRAKLTIARDMLATMWAMWKKGEKYDPEIREKAAYKQG

SEQ ID NO: 288632 - protein, 400 aa, unidentified
MLSIGIDVSKGKSTVCGMKPGGEIVYTPFEVQHTREGMSELLSLLRGSGEEVRVVLESTGSYHCPVVAALLENGIFVSVVNSLRMKRFCSQSIRRVKTDQIDAMQIALYGLAYWQELQPTRLPENTYRELQLLARQYYQMTSLLIKAKVDFNALCDQVLPGMQELMNDHAGRHKLSDFVLRYHHTAHILKMGETRFRKDYCKWAEKKGYRNRERMAALIFATAQNGIPVLPNAPSTQIVITEAIRVLHTVEASRDAILTQMQALAKTLPEYSLVREMPCIGDTLAPRLIAEIGDVRRFHSKRALIAYAGIDAPPYQSGKFSANNRHISKRGNRYLRKTGYEVMQSYVMHKPANDPIFTFIEKKRGEGKSGKLAMVAGLNKFLRVYYGKVTELYRSLPAIE

SEQ ID NO: 288633 - protein, 360 aa, unidentified
MNKIKPLDFTGDTIFCGLDVHKLSWRVNIRDKDMELKDFTQPPDAFTLHKHLSKNYPGAHYKVGYEAWFCGFSIQRELAALGIECLVLNAADIPKGDKDRKQKNDKRDARSISQHLSNKRDVKALYIPSTQWEHARSLVRNRQQQISDSTRCKCRIWQFLYFSSLPIPDKAETGQYWSGKFITKLQQMDCNNSAELKAALDIKLQDYLHKRKLLLESTRAIRKMYRQSSFWPLMKLILTIPGIGEINAAIILFELQDIFRFKTFDNLCSYAGLIPDTDDSGDTRRSKGLTHRRNNFLREAIIESSWVLAKKDPAMLMKYKDYCKRMHKNKAIIKIARHLMARINYVLRKQTSYVSGLIAG

SEQ ID NO: 288634 - protein, 475 aa, unidentified
MKPKKSKSSASKTIQPAAEMPVIHPHAAGIDVGSVEHFVCVPPDSVPEGEPSVRSFGGFSGELDKLVEWLQSCGVKTAAMESTGVYWIPLAQKLETAGIEVVLVNARHLRQVPGRKTDVKDCQWLQQLHSYGLLQGSFRPAQDICCVRSLMRHRQNLTQSCGQQVQHMQKALQQMNVHLHHVVSDLDGETGLRILDAILAGERDAGKLVLLRDALCRKSTPEEMVAALQGDWRSEHLLVLRQALETYRHLLAQMSVCDGEVQAALAQIILPVVEEPAEPAPPNPPASPEPRKKKRFHQRKAGTGLRRDVSAELARICGVDLTQVTGLNALGVMIILSEIGLDMSRWRDSKAFSSWLGLCPGNKISGGKVLSSRTPHVVNRVAILLRTVAPSVGRSETWLGSFHRRMRARLGPAAANTATAHKLATLIYHLLKYKEEYIDVDRLLYEEKLRGKRLARLRKQADELGFEMVQKTQAA

SEQ ID NO: 288635 - protein, 410 aa, unidentified
MRLFVGDDWAEDHHDVEVMDGAGRRLAKARLPEGVAGMARLHAMVGELVGDQLDQADEVEVLVGIETDRGPWVAALVAAGYLVLAVNPLQAARFRDRLGVSGAKSDAGDAHVLADMVRTHAHELRSVAGDSPLIEAVKVVARTHKTMIWERTRHVQRLRHALLDYFPAALTAFEDLDAADTLELLGKAPTPAQAARLTITQISAALKRARRRDVAAKAATIQAALRAQHLGQPQVVTAAYAVSVQALIAVLTVLNTQVKTLQGQVEAHFGQHPAAEIVTSQPGLGVVCGARVLAEFGDDPDRYHSAKARKNYAGTSPITRASGKKTVALARFVHNDRLIDALLTQAFSALRTSPGARAYYDRQRARGAGHNAALRQLANRLVGILHGCLKTGTLYNETTAWSHHITTAAA

SEQ ID NO: 288636 - protein, 358 aa, unidentified
MVDKVTEAAVVGGVDTHKDLHVAAVVDQNNKVLGTQYFSTTRQGYRQMLAWMTSFGTLKRIGVECTGTYGSGLLRYFQNAGLEVLEVTAPDRMERRKRGKSDTIDAECAAHAAFSGIRTVTPKTRDGMIESLRVLKTCRKTAISARRVALQIIHSNIISAPDELREQLRNMTRMQLIRTLGSWRPDASEYRNVTNVYRISLKSLARRYLELHDEIADLDVMIAAIVDELAPELIKRNAIGYESASQLLITAGDNPQRLRSESGFAALCGVSPVPVSSGKTNRYRLNRGGDRAANSALHIIAIGRLRTDAKTKEYVAWRVAEGHTKMEAIRCLKRYISREVYTLLRNQNRRINSIPITA

SEQ ID NO: 288637 - protein, 349 aa, unidentified
MGEVSTIGVDIAKSVFQVHGIDASGTVVIRRRIGRAKVLDFFADLPPCLVGMEACATAHQWARELKKLGHDTRLMPPTYVKAYVKRGKNDAADAAAICEAVTRPSMRFVPIKSVEQQSALMLHRTRDLLIRQRTQLINALRAHLAELGLVAAKGHEGLHQQVTAVAESSDEQLPSNARFACEAIVAQLSAVQTQINGLDKRITQAHRANADSKRLEAIPGFGVILSTAVVATMTDPKAFKTGREFAAWIGLVPRQNSSGGKERLGSISKQGDRYLRRLLVLGAISIVGTARMRPDKYPWVTELLGRRPAKVVAVALANKMARTAWAVLARGETYRAPTRSSGAAIAAAA

SEQ ID NO: 288638 - protein, 345 aa, unidentified
MEAAYDGRQIVGIDLHRRRSVIVRMTEAGQRLETVRIDNDPVALGLEIAKAGPDPEVVLEATYGWYWAVDVLQAAGARVHLAHPLGVKGFAYRRVKNDARDAADLADLLRMGRLPEAYVAPPAVRELRELVRHRAKLVALRSGLKAGVHAVLAKQGVRIPVSDLFGVGGRQLLAAAALDAPYRARVGAYCRLIDAYGFEIDAVASQLRGRLCRHTGYLALQALPGVGPTLAAVFVAEIGEVHRFADPTRLVSWAGLTPRHRESDTTVRRGPITKQGSGLVRWAAVEAAQKIPASAGWLVSTRARLAERRGRNIATVAVARKLLTLVYYGLRDGHIRVLGQAAAAA

SEQ ID NO: 288639 - protein, 403 aa, unidentified
MFYLGIDVSQKTSSCLILNAEGRKGKAFTFENCPEAFQSLVQRLEEQSIPPQDLLIGFEATGNFWENLYAYLKEKGFAVVLLNPFHVKRYREALAKKAKTDNIDALVIAQFLRTGEYVQSQVAEEAIQSLREVTRLRYELLKEKKNYQRQVCSMLAVVFPEYDQTILKNPFTVSALAVFQKFPTAKDLAQAKPRQIEKIIRSIPGNNFGPQEIDTLISTAQQSIYSGRAQEARAVSLRILLTHIAHLVRSLEQLEEEIEKMLSPQEPHDSFPGENLLGIPGIGPNTVAAVLSYLGADGANFPSSARAVGYVGYYPKIYQSGESKRDNTISKRGPKMLRWALYMAAVASIRHNPQMKTLYHRKRSQGKTKKQALICVAKKLLHIMLAMLKSGEPYKPEMVFVQS

SEQ ID NO: 288640 - protein, 408 aa, unidentified
MEVVHPRCCGIDVHQASLAVCVTIKEEGKSEKYKLRCGTTSAELLRLADWLHGYQVTQVAMEATGVYWKPVWHILEGQFELLLANPTQVQALRGRKTDLKEGERIGDFLQHGLLQGSFVPPRPIQELRDLTRSRTTLKQEQVRIGNRIRKVLEDANMKLSSVMSDVMGVSGREMLRAIVGGQFDPAALAQLARKRLRGKIPVLQQAAAGTLNQHHRFLIEQWLALWDELAVRIAKFEERIEEQMRPFATAVETWTSIPGIDRITAWTIVAEMGPDMASFPTAAHAASWAGLCPGQEESAGKRKSGRTRQGNVWLRRALTQAAWGASMKKGSYFKAFYHRLAARKGKKRAIVAVAHALLTTGYMLLWTGKSFADLGEDYFDRLDRDRLTKRLVKRLERLGHRVSLQPAA

SEQ ID NO: 288641 - protein, 392 aa, unidentified
MLFVGIDIAKRNHEASVIAQDGHVVRKAMRFANSQAGYNKFMDMVRSLSEPVVFGMETTGHYWLTLYTHLRNDGFTVHVINPTQSDALRGMYIRKTKTDSVDSVIIADVIRFGRYCETSVDPGDLQAMRELCRQRFYIIDMASDLKRKVIALLDQVFPEYEKLFSDSFGLSSMELLSQYTTPEEMLSVSSQQLAEVLKKASRGRLGAEKAAEIQDAARNSFGIVLASSSFSLIIRQYIEQIRSLEASVDVFDAEIARLLSGFDTQLTTITGIGPTLAAVILSEIGGDIRRFSSPAKLAAYAGVDPTVKQSGDFSGTRIKMSKRGSPYLRRAIWLASTVAAFKDPVIHALYERKRAEGKDHMTVIGHVCRKMISIIFAVLRDNTPYVPAGISD

SEQ ID NO: 288642 - protein, 340 aa, unidentified
MRALYAGSDLHSNNNFLGIIDEQGKQVFKKRLSNDPRVVLDNLKPFRKEIVGIVVESTFNWYWLVDELMEEGYQVHLANPAAIQQYSGLKHADDKHDAFWLAEMLRLGILPEGYIYPKEDRPIRDLLRKRGHLVRLRTSLILSLQNIISRNCGVHLSGNQIKRFKTNNVAPLLEGQEDLALSGLVSKETIDFLSRQITQVENFVQNKVQVKDQYQYLQTICGVGKILSLTIMLETGPVERFTKVGNYVSYCRKVPSKWTSNQKTKGKGNKKNGNKYLAWAFSEAAELARRFDTQARAYYNKKSAKTNFMTAHTALANKLARAAYYVMRDQVPFDPARVFG

SEQ ID NO: 288643 - protein, 430 aa, unidentified
MSYRISGIDVHKKMLAVVVSDVEVDGEFRFERRMFGSNPEQLRSLAAWLLEQEAEEVVMESTAQYWKPVWEALERYWKPIREKREGARRKSGTLHLALAQSNRGRRGRKRDFPDAERLVKRLVARELTLSFVPDPEQRLWRTVTRRKYQLTRDHVRQQNQLESLLEEAHIKLSSLVSDLLGASARRMLKALAEGETDPAALAALADERLRATPEQLCDALGACTDLKPVYRRLLKMALEQLQFLEQQIGQLDKEMASLLSQHQDAVERLAEVPGLGVDSAQQIIAEVGPTAVTFPSEKQLSSWVGACPGDDESAGVNYSHRSPHGNRYMRRLLNQAANAAARTKGSIFEIVYRRSVPRLGHNQTIGAIAHRQCRLIWLILHQGVRYEERGPAVTKQSKQRRTAKMIRQLRSLGYRIEPPNPQQPSPAQAT

SEQ ID NO: 288644 - protein, 366 aa, unidentified
MASLPSGPETVYVGMDTSMREIVCGVLRPGREVPAVDRVPNDEESVRRLIGKLGDRRLLSVCYEAGPSGYELHRLITSMGVACEVIAPSLVPKGASDRVKTDRRDAVRLTLALRAGMLTPVRVPSPSEEAVRDLVRARGDLLDDRKRMQQRLNALLLRHGRTWGGGAKWTYAHRTWVDRQRFGEPALQDVLDAYRGALESREAELRAAEARLSAWAAREPLAPAVAKLSAYRGIAELTALTLAAEVVDWHRFATARAFMGFTGLIPSEYSSGTRTRRGSITKAGPEGVRTALAESAWSYRYRPAIGALLRRRQADADPGTLARSWKAQQRLNATWKKMTARGKPSGVAVTAVARELSGFVWAEMTS

SEQ ID NO: 288645 - protein, 336 aa, unidentified
MAFYCGIDLHSNNHVVVIINDEDQRVYERRLSNDLALTLSALEPYQADLVGVAVESTFNWYWLVDGLQAEGYPMQLVNTTAVQQYSGLKYTDDRYDAYWLAHLMRLKILPTGYIYPKEQRGIRDLARRRMFLVQTASKQLISLQSQIWRQTGVKISSSKLKQASFAVDLPDEMERLSAEATLSVYRSIQAELEKIESQLIKVVKPRADYKVLTSIPGVGAILGMTIALETGNIQRFAEVGDYASYCRCVKSERVSNAKKKGEGNAKSGNKYLSWAFSEAAHFAIRYEPLAKRFFERKQRKTNGIIAIRAVAHKLARAAYYMMKNKTAFDAQKLFAS

SEQ ID NO: 288646 - protein, 354 aa, unidentified
MNVTHYIGFDVHKKTVQYCVKAADGGIVVEGKLRAERGVLVSWAKQRAEPWHGAMEATLFSGWIYDTLQPYAAELNMAHPLMMKAIGAAKKKSDRIDARKIADMVRCNWLPVCYVAPAELRELRRLLRYRNLVVRQAVRMKNKIAGLLMEVGEPYNKRRLHGKKYFNELLGTLAETPESVKDLLRLTRGALEMFETTQRQLLARLRAAPELRERVERLTSIAGVGEVTALTWALEIAEPHRFPSIGQAQSYCGLTTALRSSAGKEQRGPISKQRNAHLQTTLIEAAKLAPRWNPQLAEVHAREVERGHRNRATLAVARKLVAYLLAVDKSGRPFEERGQAETETEVEKEKQTAA

SEQ ID NO: 288647 - protein, 336 aa, unidentified
MSHYCGIDLHSNNHVVVIIDEEDKRVFEKRLINDLSLTLKALFPYRKSLQGIAVESTFNWYWLVDGLQEQGYDLQLVNTAAVKQYDGLKYSGDHQDAFHLAHLMRLGILPTGYIYPKEQRAIRDLLRRRLSLVRTASTQLISAQSQIWRSTGIRIKSGELRKPAFVTPSVDRYTLQAVHAVLAVYQSLQREIDGLEESVYQAVKLTDDFAILQTVTGIGKILGLTIMLETGDIHRFASAGNFASYCRCVDNTRTSNGKKKGEGNAKAGNKYLSWAFSEAAHFAVRFEPLAQRFYERKKAKTNGIIAIRAVARKLARASWMMLKHQVPYDARRMFPG

SEQ ID NO: 288648 - protein, 341 aa, unidentified
MSAIGIDTHKDSLAACAVDELGTMLAEAEFANDPAGHAALAAWTRTVAAGATIGVEGSSSYGAAAARYLDGRGLPVREVPPHLSRRERRRTRRAGKSDPGDALAIARVTAREADLPPIRRVDPTTDLGLLLAARDDLVGEATRVRNRLHADLVVLVPGYGGKVANLVSERHLVTAGRSLRGRPGVHAELARERLAELRRLQARVRSLASRIERLVVGHPLLALPGVGALTAAALIAETGDITRFRSADAFANLAGVAPIPASSGQVQRMRLNRGGNRQLNRAFHVIALVQARTHEPAKVYVARKRANGQSWRDAIRALKRKLVRAVFQLLLEGAARQTAAA

SEQ ID NO: 288649 - protein, 358 aa, unidentified
MAQHVGVQVLAFVGNPNSYLNSFRMLQGRDMTNADVRELTSLAFVGVDMAKESFDWAVHGEASRHTLPNDDKGFEGLLVALKAYRVGLVVLEATGGWEKRLARFLLGYGLLVAVVNPRAAREFARSMGHLAKTDAIDAMALAHLAQTLAAKADQAGVAFAPPPAEVERLQLLVTRRAQLIDMRTAETNRLSGAGRALQRSITAVVKTLDKEIARVEGDIDAHLKSHFEEQARRFDAIKGIGPITCAVMLAFMPELGRVSNARAAKLAGLAPLNRDSGKERGQRHIFGGRSIVRSTLYMAMCSAVRFNPVMKIFHDRLIAAGKPKKVVLTACAHKMLRILNAMARKGQPWNEDLHPVAS

SEQ ID NO: 288650 - protein, 319 aa, unidentified
MAQDDLVVVGIDVAKDKVDACIRRVKLRQTFPNTLQGRRKLTVWLRKYQVGKAVMEASGGYEREWRNVLHSAGIEVRIVDPRRVRNFALSAGRLAKNDPIDAEMIAWFAETFSQAPGQVPDAAREELAALAKARKALVDVKIRLQAQNEHAAPEPARKAHARILKSLAAEIDKLEAALSAKVKATPEFAERAEIIQSVPGLAQTTSAILIAGMPELGQVSDEVAAALIGLAPYDDDSGKQRGERHIKGGRRWVRNAIYMPCLGAATQNNPVLKAFYQRLIAKGKEPKVALVACMRKLIIVLNTMLARRQKWNPGCHAVA

SEQ ID NO: 288651 - protein, 391 aa, unidentified
MSMYFAGIDISKYKHDCCIIAAADQSVIAKFTFKNNKEGFEQLLTSINSFSSPEDIRIGFESTSHYALNLELFLENASLTFMEINPVLISEYKKSTTLRRTKTDSVDCESIARWLMTVEYKPHSKGFYHSYSLKSLTRLRDRLVRQRSLYLVKLTNVLDHTFPEFKPFFNESFSKTAIYLLENYGSAENMSAMNETDYNELRRISRGKFSPQQFLELKRLAADTVGINNSIFDVELESLLSLYKSLVKEINTLEGEIIRLINEVHPHFMSIPGIGPISAAVIYAEYGDISNFSSPAQMLAFAGIEPSVNDSGTESNGGKMVRHGSSQLRYVLLNCCIPLIRFDMTFATYYAKKRHEGKPHRVAITHVAKKLIRVIFALEKQNIDFNFQKLR

SEQ ID NO: 288652 - protein, 367 aa, unidentified
MKKVSTVAVKQSRNISQPKLTIGLDLGDRNSWYCMVDEAGQIRLEQRVRTNGKALQEVFGTLPRCRIALETGTHSPWISRLLHGLGHEVIVANARRVRLIGESRKKDDRLDAQTLARLARIDPKLLCPVKHRSAQAQADLTVIRARAGLVRARTGLVNTVRGLAKSYGERLRGCNVRNMNPEKAEGLSPELRAALQPLLVALESLSEQIAEYNERIEQLALESYPQVALLKQIKGVGTLIALTYMLTLEDPHRFRQSRDVGCYLGLQPGRRNSGQSEPQMHISKEGDPYLRTLLVQGAQHILGPFGVDCDLRRWGLRLAERGGRSGKKRAIVATARKLAVLLHRLWVSGEVYEPLHNNNQRALPAAA

SEQ ID NO: 288653 - protein, 361 aa, unidentified
MVRHIFVGIDLGDKNSVARIAVDREKSVRFGFVNSSRGRQRLFREVKRWSEQFGGAKIVMAYEASSCGFILKDEATRQQITCWVLPPTKMEKSPEQRKHKNDDRDADDVLEKLRGHILAGNRLPTVWIPDLQIRDDRELVRTRLELGEKQTQVKAQIQMLLKRQGLEKPEGLGSTWTQKYRAWLATLCQLTQHGQGMRYALGSLLRQLNALEMEILQIDGQIEALAKEERNKPIVEELRKERGVGLLTALVYRTEIGYAGRFRRGRQVGKFHGLTPTSHESGQQNDRKGHISRQGPPRLRKILCQASWVHIRLDKSSRLLYDRLVHRNPKKKKIALVAVMRRLAVRLWHRMRKAELELTHA

SEQ ID NO: 288654 - protein, 402 aa, unidentified
MNSVGIDISKGRSTVAVMRPFGEVVISPFEVRHTDSELSELAKQLKSLDGETRVVMEATGNYHAPVAKLLHDAGLYVSVVNAKLVHGYGNNDLRRVKTDRKDAVKLANYGLDRWLTLPRYVPEEDTRLLLKNCYRQYRQYSKVQTVLKNNLISLLDTVFPNANRLFSSPIRGDGSEKWVDFVAEFWHCHCVSEKSEKAFTNKYQRWCKKHGYNFSEAKAHTIHCEASGHIGVLPKSETTKLLVEQAVAQLRATSAALTALKREMLTLAAQLPEYPVVMGMFGVGPTLGPQLIAEIGDVRRFYSKKALVAYAGLDAPPNDSGDVTGRHKSMSKIGASSLRRTLFLVMSIYLQNAPLDEPVYQFMDRKRAEGKPYRVYMMASANKFLRIYYATVKAYLESLEQV

SEQ ID NO: 288655 - protein, 443 aa, unidentified
METVSDRETIFARCAFLDVHKKTVEATVRLLQGQQVQAETRRWGTMTGQIQALAEWLETQGVTHVGMESTGVFWKPIYNILETRFTVVLTNPGHMKQVPGRKSDVRDSQWGAYLLQYGLLRGSFIPARWQRELRDFTRYRAQLEAERTRVANRLHKHLEDANIKLGSVATDILGMSGRAMIKALMEGEQDAAQLADMAQGKLRTKLPELQLALEGKVTPHHRLMLRLLWKELEAVEELMAEVDRQVQEVTRPYTPQIEQMDPVPGVDRRVAEVVLAEVGPNVDPFPSDQHLSSWAGMCPGNEESAGKRRTGRTTKGNRWLRADLVQAAWAASHTKRSYLGAQYRRLAGRRGKKRALVAVGHSILVILYHLLKDSRPYSDLGRDFFDRMNHDRLIRYYSRRLAELSQKVTVEPLPEVIPGEGMVNVHPLAKAKGMTDGGICNDP

SEQ ID NO: 288656 - protein, 407 aa, unidentified
MICVGIDVSKRKSTVCFMAPGDKIIRRPFDVKHTKEELQPLVDEIRVQAKYDEIKVVMESTGVYHLSIAYFLQQNGIFVSVVNALKVANFNKAENFRHTKTDSIDSTNIARYGIAYWAKLPQFDLNGDKYFLLKRLCDAYLNFSEERSRILLQLQSQLEQTMPGIFDLFGGFDINSGKDKLLDFLERYCHIEDIIAKSEAEFVASYREWAKEKGYRSNESKAATIYAQAKNGIPSIPNNPIVRETIMWYVGLLRRADEALMASLTRMEDIARDLPEYELVGEMGGVGRVTRVALIAQIGDVRRFKNKHSLICFAGLTPSIHESGKFRASQNHIVKKGPARLRKVLYQVMMSLVMHKIPKDDAVYRFIKKKEAEGKYKKVAKVAGMAKFLRIYYGRVMHLYRDLGLAA

SEQ ID NO: 288657 - protein, 316 aa, unidentified
MSLQPCFVGIDVSQASLDIAVRPTAETWQVSNDEAGITTLVTQLQALAPTLLVLEATGGYHGPVTAALATASLPVVVVHPRQVRAVAQAVGILAKTDRIDARVIAHFADAVRPTPRPFPDAETQELRALVLRRRQVIAMLTAERNRLGTAPARIQPAIQQHMAWLEGQLAALNDDLTATIERSAVWQAKADVLRSIPGVGPVLSRTMLAQVPELGTVGHKQVAALLGVAPFNRDSGTLRGRRTVYGGRGEVRAVLYMGTLVATKHNPVIKAFYTRLLAAGKCKKAALTACMHKLLTMMNAMVRDLTPWQPREVAIA

SEQ ID NO: 288658 - protein, 392 aa, unidentified
METITDRPAELNAIRTDLGAIFVSLELSRSNWVVTALLPGGGEKMSRHTVPGGDIASLRVRFSQLQEKAQARAGRHFPIIVIQEAGLDGFWIHRALMGEGIESHIVDPASIATSRRRRRAKTDRLDGETLVRTLLAFKRGEPRVCAMLKAPSPEDEDRRRITRERKVLISERVEHVNRIKGLLFAQGISGYQPLRRDRRARLDELRTGDGRNLPPHLRTQILRELDRLELLLTQIKAVEAERDAVLAEELQDRETPATAKMLLDIKGIGPEFAALLWSEGLFRHFDNRRQVAAYAGLAPTPWQSGAVQREQGVSKAGNSRLRSTMIQLAWLWLNHQPQSALTRWFRERVELNGGRLRKTAIVALARKLLVALWKYVTSGVVIEGAAMKARAA

SEQ ID NO: 288659 - protein, 331 aa, unidentified
MKFNDVIGIDVSKKTLDAFIYSSQAKNCFENNKIGFKNMVSWIKNNSTFSQIRSVFVFEFTGIYSNNLALYLDSNNFKFCMVPGLDIKRSIGIARGKDDQIDAKRIAIYGYRLKEELIPMELPQKDISKLKSLMTLKKQLIRQRAAFKAKLKEQKLVFNSKEYKLIFNIQEQLINYLSKKIIMLENEILTIIKNNEHLKNNFKLIKSIKGIGDQSAITLIIVTNNFKKFKSWRKFAAYCGTAPFPYQSGTSLKGRTRVSNLANKDIKSIMHMCAMAAIQHNPEMKEYFQKRTLEGKNKMSTINIIRNKLLARIFATIKRQTPYVNTMKFVA

SEQ ID NO: 288660 - protein, 355 aa, unidentified
MAGKTVLARERRLSAGLDIDQRGAVIALLDQTSGELIFEGKLGHDAEAWRSFLDRLPGCRIQAFYEAGPMGFVLCRRLVALGVECRVVAPSQVPKASNLQQTKTDRRDAFTLAQLCFHPPRSFVRVPTEQEEVRRQIVRLREQLLEDKQRVMRRIKSLLLNYGIMPPADSGPSWSKTYRQWLREFEPGFEELRFTLDVMLDELEGLEQQLERINERIRELSRHPDYRAASQRLMKIPGVGPLLAMTFLLELFRPKDFTSAETLAAHVGLTPCEYSSGGKQRRGHITHWGSPALRRLLVEATWVWTYKDHRAQQRFHTIRAGKSPKIAVVGMARRLAVAMWAMTVRQQEFAYHWAV

SEQ ID NO: 288661 - protein, 510 aa, unidentified
MTATARTDIGAHFEARREAWVRGRVQFCDDVRHQRRSRLGVCFLSHLGHPTGKIWEDPMATKRKKRVQDLPVLHPDGAGIDVGASEVYVAVPADRDTEPVRSFATFTRDLHTLADWLQRCGIKSIAMESTSVYWIPLHQILEERGFEVCLVNAQHVKNVPGRKTDVSDCQWLQYLHSVGLLRSSFRPSAEICAIRSLWRHRASLIQMAAEHVMHIQKALDQMNLQVHRVLSDITGLSGLRILDAILAGERDPFTLARLCHSRVKTSHDTVAKSLEGDYRSEHVFALRQSLAGYRYYQGLIADVDKEIQRHLADLKTVADTDAEPPQRTKKAAYQRRHYEPKTFDLRSELYRIFGVDLTDIPGISAVTAHTILCEIGTDVSQFRNASAFASWMGLCPDRQISGGRVLYTKSRRVRNRIALALRMGANSLHHAHNYLGEFFRRISRRLGKPQAITATAHKLARIVFHLLSVREPYNESVFHQCDQDAQRRAEIRLRKHAAQLGFQVVAATNT

SEQ ID NO: 288662 - protein, 348 aa, unidentified
MVIIGVDSHKRTHTAVAVDRNGRKLAEKTVATTADGHLELVRWSRRWRERSFAVEDCRHLTRRLEGDLLRGGERVVRVPPKLMASTRRSAREPGKSDPIDAQSVARAALRERDLPIARLDGPEREVRLLVDHRVSLVSDRTRLQSRLRWFLVELGIPEPQPRTLGQPTVLARLERDLGGRSEPSARIGRDLLTRIRELTTAINALGREIQALTDLLAPSLLALHGCGHLTAGKLLGETGGIARFRSRAAFATHNGTAPIPVWSGNTVRHRLNRGGNRQLNLAVHRIAVTQLQKAGPGRDYVAKRMVAGDTKVEAIRALKRRISDEVFRRMNADEAARAALIQPARAAA

SEQ ID NO: 288663 - protein, 377 aa, unidentified
MHSENIAAYIGLDVHKETLAVAIAAPERLGEVRYYGTINNEAQAVRRLFQKLQGLYGNILSCYEAGPCGFGLYHQLTAMNIKCQVIAPSRIPKSPTDRIKNDHRDAISLARLLRAGELTPVWIPDLTHEAMRDLIRARAAAKRDSRVARQRILSMLLRTDKRYAGKHWTGKHRTWLANQSFSQPSQQIAFQHYCQSLEQIEDRILQLDQEISRLLPEWSLCNLVCQLQALKGVGQLTAITLVAELGDFSRFSSPKQLMAFLGLVPGEYSSGNSIRPRGITKVGNSELRRLLYEAAWFYRTPAKVGAWLIYYRPDSVTQYSKDIAWKAQQRLCSRYRSLTAKGKKSQVAITAVARELTGFMWDIALAAQSSFSQQKQN

SEQ ID NO: 288664 - protein, 414 aa, unidentified
MAVMDVVHGRCAGLDISKKDAKVCVRVAGTGRRKTTETVTTWGATTNQVLALREHLMTEQVTCVVMEATGDYWKPFFYLLEDAGFEVLLVNARHVQNVPGRKTDVADATWLAQLGAHGLVRGSFVPPEPIRVLRDLTRARTAITRERSREVQRLEKLLEDAGIKLSSVASDIMGVSGRLMLQALIEGQHDPAVLADLAKRRLRSKIPALTEALTGRFTEHHGFLARVHLDLIDQHTHAIEELTSRIEVVIEPFQAFRDLITTIPGIATLSADVIVAETGADMSRFPTAGHLASWAGTTPGHNESAGRVKSTKTRPGNPYLQGVLGAAAMSCAQHPGTFLGARYRRIASRRGPMKANVAIQHSMLIAIWHMGRNGTLYDDPGGDYFQRLHPERAKNRALHQLEAMGYQVTLDRVG

SEQ ID NO: 288665 - protein, 461 aa, unidentified
MSKKAAAARQEKSARKSVDWKALEIVHPDAAGIDVGGDEHWVAISPERDAQPVRSFRCFTADLREMAQWLVEKGVRSVAMQSTGVYWMPVLEVLEQQGLEVYLVNARHTKNLPGRKSDVQECQWLLKLHAFGLLNNSFQPTDEIRVARHLWRQRGNLTALAGSTIQRMQKALTEMNLQLGAVLSDLSGVSGMKIIRTILAGERNPWKLAALVDPGVKAKPADIAKSLEGNWREELLFILRQEVEMYEFYQQKIAGCDVQLRRHLETFGSKVDLMAQPIGPKPKGKKGSKNAPQFDLRSELYRITGIDWAQVNGIDVLTAQTVITEAGADLKAFPSEKQFASWLGLCPANETSGGKVLNRRSRKVVNRAATALRNAASTLLRSQSYLGAQYRRLRTRLGAPKAITAMARKLACLFYRLIKHGQQYVDQGTEHYEARYREQQIRALTKRAQKLGLQLVTLAAA

SEQ ID NO: 288666 - protein, 419 aa, unidentified
MSFKILKNNCCGLDVHKTWIYACIGITDSLKRTEYKEARFSSFTKGLQELCDWLSKYNCTDVCMESTGKYWIPVFNILEKNNIWVTLSHPKYTKPQKGNKTDRKDAKWICDLYMCGMVKPSFIPPADIRELRDLVRYRFKLTCMITGEKNRAHNCLTVSNLKLDDVFSDIFGKSSRSITEQILQHPGETFDVSPFVDRRCKTPIEEIQAAVDGAISNEQTVKLRQCLNHIDELEMHKAEIEREIFRLSDKYESVLNLIRTVPGFDKNPLTAIQVLSEIGGDMSVFPTAKNLVSWAGCCPINDQSNHKIKSTRISRAGSYFKPVLVQVANALIKSKKHPEFTTRYRRIKAHRGHKKAIIAICRMILTAIWHILSDLKPYTSEGFLESRPVNKSKILTTSQALNLLKQRGYIIKDDVVPVT

SEQ ID NO: 288667 - protein, 322 aa, unidentified
MRYIGIDVSKATFVVAYSSDKGGEIRTFNNTTTGIKQFIGALPKDSSIHCVMEATGNYSAMLLYLLNVAGIAVSMENPLKIKNFARAMLSTVKTDKIDARLIALYGEKMNPQPFKIQGEAILRLRQKRTVIRQLTKQITAMSNLRGSLACLPVPDKGATHTVDETIEFLEKRRDRLQSELTDLVEVEFSRQLALLTTIKGIGITLATALIITTGGFTYFQNAKQVSRYIGICPTYEQSGTSVNIRGHINRNGDAYTRGLLYVAAWTASRFNTKCGETYTRLRQNGKPGKLAMIAVANKLVRQAFAVVTHDKEYVDGFVSNRP

SEQ ID NO: 288668 - protein, 409 aa, unidentified
MTAYRFYVGIDWATEAHRVVVLDADRRSLHDRTVRHEGVALETFAHWLAQDVAAGVASDGDVALDVPRGAVVDTLLARGFHVFALNPKQLDRFRDRYTVAGAKDDRRDAQVLASALATDQPAFRRLEPEDPLIVELRELSRLEDDLRQELGRLTNRLREQLHRYFPQLLQLVPAANEPWLWALLERAPTPSAAQHLPRATLRTLLTRHRIRRVDAETVRTLLRTPALAVAPGTVQAALRHLAVLLPRLRLVHQQQAECATLIDGLLERLAESQEHRDVPILRSVVGVGRVVAATMLAEASRLLAARDYHGLRAQAGVAPVTRQSGRRTLVAMRHACNPRLRHAAYHWGQSAARHDPVSRAHYAQLRARGHSHARALRGIVDRLLRVLIAMLTAGTLYDPTRRRVVADAA

SEQ ID NO: 288669 - protein, 352 aa, unidentified
MEKITTVGLDLAEQVMAVHAVCADGRRVLRKALRREQLLNWSEALSPCVIAMEACGGAHYWARELARQGHTVRIIAAEFVRPFRKSGKNDANDAEAICTAARQANMRFVAMKSVEQQAALCAHRLRQGLVEERTALINRLRGLLTEFGVVAPLSPEKLRRELARCQDPEDPRLPATVRELVSDQLTALDQLEERMSVYAEQIAAQACGSEVAKRLQTIAGVGPTTAAALVATVGEPQEFRNGRQFAAWLGLTPKQHSTGGKTRLGRITKRGDAYLRTLLILGAKSALQAALRKPPAVRHRLQQWIVTVLDRIGYHKTLVAIANKHARIIWALLVKGEDFVVQHLTPKVVAGA

SEQ ID NO: 288670 - protein, 344 aa, unidentified
MDHFAGLDVSVKEISVCIVDDTGRITKEVKVASEPEALLKVLGNPAYRFKRIGLEAGPLSQWLFSALAEAELPVVCVETRHMQAVLKAQINKTDRNDARGIAQMMRVGLYRPVHVKTLRSQKLRMLLTHRKLLQSKAIAIENDLRGTLRNFGLKVGMVGKVRFEARIQELVENIPDMSVLVESLLIVRRALREQIVILHRRLLAIVRDDEVCRRLMTTPGVGPVVALTYRAAVDVPARFRKSKSVGAVFGLTCSRHQSGEIDWSGKISRCGDEMMRVMLYEAAQSMMHSKKWSWLKAWAMQIARRRGMKKAIVALARRLAVIMHRIWVDGTEFRWSREQAATAA

SEQ ID NO: 288671 - protein, 352 aa, unidentified
MAATAQSAIAVIGIDIGKNSFHVVGLDGRGAIVLRQKWSRGQVEARFANMSPCLIGMEACVGAHHLSRKLKALGHDARLMPARYVRPYSKGQKNDFRDAEAIAEAVQRPTMKFVVTKTADQLDLQALHRVRERLVSQRTGIINQIRAFLLERGIAVRQGQRFLRVELPRILATPPDVLSPRMVRVIEGLASDWHRLDERIEGLSSEIEELAKQDAGCERLMSVPGIGPIISSAMVAAIGTGDSFSKGRDFAAWLGLVPRQISTGDRTILGKISKRGNRYLRVLFVQAAWVVLVKVKPTRWEGHGLRHWIEAAKKRLHRNVLAIALANKLARIAWSVLAHGRAFETNKLQTAA

SEQ ID NO: 288672 - protein, 342 aa, unidentified
MQVTTIGLDIAKNMFQVHGIDAAERVVVRKQVRRRQVLEFFKALPPCLVGMEACATAHYWARELTKLGHQVLLMPAKDVKAYVKRNKNDAADAEAICEAVRRPTMRFVQIKSTEQQGRLMLHRARDLLMRQRTQVINAMRAHLAELGIVAAQGRDGIKELLKIIANEEDARLPVDAHASLVVLAAGLQAVQTMIGSIEKRIMVQHRSNEASQRLESIPGIGVIGATAIAATVPDPKVFGSGRDFAAWIGLVPREDSTGGKQKLGPISKRGDRYLRRILVVGACAVLRYARHKPEKYPWLTRLLARKPFKVVAVALANKMARIAWALLAKGDTYRVPVLAAAA

SEQ ID NO: 288673 - protein, 424 aa, unidentified
MHHRKANRMKNWKDLTHYAGFDWAKDHHAVVIVDREGRIVADFEFAHSLEGWKSFAEKTSAWPHLAVAIETSQGAAVDQLLQREYSVFPVHPVAAHSYRQRKAPSGTKTDHLDAWGLADALRVDGHQWRPLQPLDPMTQQLRLLCRDEVVLIEQRTALVNQLQQALAEYYPAALEAFDDWTDAFTWEFVLAFPTPAALVRAGKRRWEKFLHAHKLWRPETAEKRLKLFAQADQFKASEAIVRAKSQLAVSLCKLLCTLRQQLKLYRKQIEALFREHPDHDLFGSLPGAKEVLAPRLLGAVGNDPDRYGDHAVLRCIAGTAPVSYQSGRINKVRIRWSCDKFLRHTIHLWADCFRKASAWGQAYYHKKREEGMSHACALRCLGQRLLKILFRMLQDRKPYDAELHARNQQKHGSWVLKLVNEPAA

SEQ ID NO: 288674 - protein, 320 aa, unidentified
MTRIICGVDVSSESLEARIGRQGAAASFPNHAEGIAALAAFCAEHQAELVAMEATGGYEQQAFIQLSEHGLSVAIINPRAVRQFAQAMGLLEKTDKIDAGVIAWYAQTKKSQPVCLAPQTQLELRARVTRLRQLTEVRTTQLNQQRLVTNRTVQKGFKKMLAFLAEQIAELEQAIAALIEDDPLWRELNQAFRTIKGVADRTVARIMAEMPEIGTLSNKTVSKLAGVAPLANDSGKHQGKRAIRGGRAAVRDLLFIVASVVGRHEPDFILFQQRLRAAGKPPKVVRIAVAHKLLVRLNAKAREVRQRMTESQASKQVVLA

SEQ ID NO: 288675 - protein, 404 aa, unidentified
MWYVGLDWADTHHDVEVLDEAGKRVGARRFAHSHEGLNELKQFVLSIAASPDQLACIVETNHGLLITFLLEAGIPMYAVNPKMANQLRKAAGAKTDQIDAHLLAKLGRLDLAELRRLEPDSPTVQELKTLTRDQDALIQTQTRLVNQLTACLKEYYPAALHLFAKLQQRSTLVFLQAYPTPQTAQAASLEEITATLRTGKHTNPSKAAPKIFEELHCPQLVTTAVIVRAKQRLMLSLVKQLLVVIQEIASYDEAMRTLFLTHNDQQIWRSLPRAGKRLAPRLLAEWGDDRARYADANSVQTLAGTAPVPFQSGNYAKAHKRFACLKPLRNALHQFAWQSTRQEAWAASYYRRKRAEGKTHSMAVRALANVWVRIIYRMWVSNTCYQTATFEAAQLTHAPRQHVA

SEQ ID NO: 288676 - protein, 401 aa, unidentified
MQVTRIGIDVAKSIFHLVAMDDRGKVLWRKALSRRRLLESLAQLKPALIGMEACATAHHWAREFQQLGHQVKLIHPAFVAAYRKSGKNDFNDAEAIGEAMSRPTMRFVEVKSLAQQDMQSLHRSRRLVIKQRTQVAHQLRGLLAEYGIVVRQSIAALRREAAELAGEPQRLTGAMRQVVANNLEQLSLLERQLRELDRDIASAGRADERCRRAAEVLGVGPLTATALVAKVGNARQFPNGRALSAYLGLVPRQNSTGGKTVLLGISKKGDRYLRTLLIHGARAALRVASRHTDRRSQWALGLRRKSGPNVAAVALANKNARVLWKLLSTGEQFRPQPPATEAERAHAAHRLASDQPAGQRAAVRPAHDCRISEQDFSASPPEAIERAGGKIHRFLKRQSSD

SEQ ID NO: 288677 - protein, 422 aa, unidentified
MINSTKTYPIHPRMTRTYGGVDSHKDSHTIVFLNCFHDKLGEITIGSAPSEFSKFIKRAKKYLQPNTTWAFGFEDTSAFGRAFVKYLVEKGYHVKHVEASKVATERGQTLHKTDSYDAECACRVLINQFDSLPDANPQDKYWILTNLVTRRNAIVKINVMVKNSLHGALADNYPHYKQFFSTVTRGSALAFYDAYPSPHHLEDVSLEELTEFIKTASKGILGAKKAELILNHVQRDNVPKLEYQEIQDFTVRSLVRQVKNNLEELQAIDCEIEKLLQEFNYPLTSIKGIDNLTCAKIIAEIGDISRFKSAKHLAKYSGVAPVTFASGMTNLQRANARGNRKLNEIFFKIALVSVTPIGKNNVLVNPIFYHYFQKKLSEGKTKTQALKCVQRRLVNIIFNIMKHQRPYNNPERGHAPQDKQVA

SEQ ID NO: 288678 - protein, 423 aa, unidentified
MEVLNERVAGLDVHQATIVACVRVTAGRKVCRECRSFETTTAGLLALLAWLTEARCTHVAMEATGVYWKPVWNILSDGDFELMVANAAHIKNVPGRKTDMNDAMWIADLVACGLIRASFVPAESLQELRSLMRTRKQLTREQTRHVQRIQKTLEEANIKLASVISEVMGVSGRRMIEAMIAGVRDPRKLAALAHRQIKATPKELYDALHGRLTDHHRFILQLHIGQYDALNLAIEQIDRQVDAAVAKLDEEVADGQATFRALIAVLCTIPGVSTLAATSILAEIGREMSRFPTAGHLVAWAGLCPGQNESAGKRKRTRLRKGAPWLKTMLVQCAWAAKRKKDSYYRAQFFRLSHRRGPQKAICAVAASILTAIYHMLRDGTAHQDLGIDHFDHRSTETKARRLVAQLAKLGYQVQLQPLPEAA

SEQ ID NO: 288679 - protein, 372 aa, unidentified
MNYNTVYVGMDVHKESFSLCAYTIEAEKASHYQRTEADYKKVLNYLEFLRTIYGDDANFICGYEAGCFGYTLYHQLTANNVKCIILAPTTMLEQRSKKRIKTDRRDAEIIAKCLAQHNYSPVHIPTAKDEETKEFLRMRDDHKLALKKVKQQILAFCLRHNYRYDGKSHWTAAHLKWLKALTPEALYKEILDEYLLTYQTLSDKIERLDKRIEELATQDEYKEAVKKLCCFIGVKTHTALSVLVEVDDFKRFASAQHFASYLGLVPGEDSSGDDQNRLGITKAGNRHVRLLLTEASQCYARGQVGFKSKELKSRQSGNTPAVIAYADKANERLRRRYYKMVLNKYKKHNVAKTAIARELACFMWGMMTDNIA

SEQ ID NO: 288680 - protein, 369 aa, unidentified
MPYKRRSRFWWTFSIPRLGQFFQKRGFSTATGDYTSLRCLFAKPRSIREEAEKFYRDLAAQEMRVRVGMEASGHARWFERLLAELQFELWIGDAAEIRTKRVRKQKTDRQDAQLILKLMLKDDFPRIWVPSWENRDLRQLLWHRHRMVQARTRMMNQLQAVALNEGLRCKKRLWREQGRVQLESFRLAPWASRRRHDLLELLDRLNPTIAELSQAVEQEAEKCPEAQRLMTHPGVGPLTALAFVLIIGRAERFQCGKQIASYLGLVPLEDSSGNRRRLGHITKQGNSLLRFLLVEAAQVTVRSLPEWRSKYFHLAMRRGRKIAKVAMARRLAVRMYWMMRKGWNYEQLKKFGSHAGQPGHRDGVRLNTE

SEQ ID NO: 288681 - protein, 311 aa, unidentified
MTLPHNYIGVDVAKDWIDVFDPIRSRHERIPTDSRSLRRFALAAGQSIVVLEASGGYERPIMAALSEAGGQAACVNPRQAREFARATGRLAKSDRVDAQVLAEMGRALQLVPAHPRSAERQRLSDLTAHRNDITAMIVAQKNRLRTTQDQWIRRSLLQHIRALLGSLAKVEAEMETVIQSQDELRDQAVRLRSVKGIGPVVSATLIAQLPELGQLDRRRVAALAGLAPHANDSGHRRGKRSIWGGRGSLRRCLYLAALTASRFDPVFRAFKERLIAAGKPRKLVIVACARKLLTVLNAMTKARTPYRDAPA

SEQ ID NO: 288682 - protein, 384 aa, unidentified
MRYSKVKQIRPNTLIVGIDIAKQTHWAQIMLQGRLIGKAFSIQNTREGFENLVRTLKAYQQKLGATNIVVGMEPTGHYFKPLAYYLHGTGMCEVVIVNPYHVNRSKELDDNSPSKNDRKDARLIAKLISQGTYFNLPLIFNTWAELRTANVSRMQLTQKRWQLKCQLITILDQYFPEFPDVFKNVLGKGAMYVLTHCPFPVDILELGEQTLCEGLRGATHNRVGQKRAQKLWEAAPNSIGIKEGAKGARLQLTHLVEELNLIHKQLEETEKMMSQLLKQTGLGDYLTSIPGVGMVTAAAFLAEIGNPDEYESYKQIQKKAGLNLKENSSGKHKGKTTISKRGRPSLRQLMYQIAYVSVAKNAEMKAFYEYLKTGKRIRWPGNRL

SEQ ID NO: 288683 - protein, 418 aa, unidentified
MEDKEFDVWVGIDWGSESHQVCVLGVDGAPLAEKSIPHSGPGMAALVAWLTEMGTPTRIAVAIEVPRGPVVETLLDHAFSVFAVNPKQLDRFRDRFSAAGAKDDRRDALVLASALRTDLVAFHRVKLDDPLIVRLREVSRMTEELSRELRQRTNQLRDLLPRYFPQPLRLSAGADEPWLWSLLSVAPTPTGAARLTRAKLERLLKHHRIRRFSPDELHATLREAPLTVAPGVVEAAAEHVTLLVKRIELAAEQQRQCERRLAELLDELEADAGHSAEHRDVQVLRSLPGAGNHVVATMLGEASDLLRDRNYHALRCIAGAAPVTRQSGKRKQVVMRRGCSRRLRNAVHFLGAAHAQYDPHGRERYEQLRGRGHSHARAVRAIADRLLDVLMVMLRTGTTYDPELRRRHASPLSRKMPC

SEQ ID NO: 288684 - protein, 370 aa, unidentified
MKKHSTTPKSPKQASACKGGPITIGLDLGDKTSRYCVLGANGEVMSEGSVATTRKAMAEKFAKMRRCRVAIEVGTHSPWLSRWLSSLGFEVIVANARQVQLISASSRKNDRLNARLLARLARVDPQLLRPIRHRSETAQADLMRIRVRAALVEARTRLVNAARGFAKAMGERLPACDTDSMGVERMESLPEGLRDTLKPLLEQVESLTEKIKESDAKIEQIARTQYPETELLRQVSGVGTLIALTFVLTLEDRERFRKSRDVGCYVGLRPKQSESGQSQPQLRITKEGDVYLRTLLVQAAHCILSRRGPDTDLKRWGLKLASRGGKNAKKRAVVAVARKLAVLLHRLWVCGEVYEPLRNSQASGSSKKAA

SEQ ID NO: 288685 - protein, 368 aa, unidentified
MAQSHGNTGGVVLIAIDVAKKQNAVLVQFPDGARKKFMVINNLAGYRELSDYLKKLKASCKIGFEATGNYHRALAYYLRQRGFDLELISSVAASRTREAMFNSWDKNDPKDAQVILHMLQTGLTQTYYDPLVHQTNDIQELSKTYCQVSLRKTRVQHSIMTHYLPLYFPEASKYFHTSRAEWFTSLLMTFPNPAAVLKYSREGFIRMRRAIEARAELYLKDNPDYLRLRTIPGIGAVIALIILAEAGNLRRFTHYKKFLKYCGLSLSTQQSGNFRGMSKLSKHGNSRLRYAFWIAGTSAIRMRENTFRKKYENYIKADPQNPDLKRKAYTAVAVKIARVAYGLVKAGCDYRCYHESSIPSGIILSASR

SEQ ID NO: 288686 - protein, 361 aa, unidentified
MRIIGCDLHARQQTLAMLDTKTGEVVNHTLMHEGNEVREFYAELPRPVLVGIEAIGPMQWFLNLLEELGIECQVGDATKIRAAEPRKQKHDRRDAELILKLLVENRFPAIWMPSKELLDLRALLLHRHHWVRLRTQIKNALQAIALANGLRHGPGLWSYDGQAKIAFLPLPPHTSYRRSMLQALYRKMEEEIENLTKQVAEQAGQRCGAQRLMTHPGVGPITALATDVFLGDPQRFPDGKAVASYVGLIPREYSSGERQRFGRLTKQGSPLLRFLWGEAAAHTVRRDPELQRFYRRKLVQKGLGKARVAVARKLGIRLWIMLRDQIDYEEFCRRGQKQQSGDACAGMLEVGYGANRHRPVD

SEQ ID NO: 288687 - protein, 344 aa, unidentified
MENYAGIDVSLELSSVCVVDSQGKILKEAKVASEPDALVEFFETLGFAVNRIGLEAGPLSQWLHAGLQRAGFETVLLETRHVKAALSAMTVKTDRKDARGIAQLIRMGWFRAVHAKSIGAQEIRALLVARKQLLGRLIDVELSIRGILRGFGLKVGPVTRQNFEARIRELVAGQATLERIAIAMLSARSALKAEYGRLHKAVLAIVRDDAVCRRLMTVPGVGPLVAITYKSAIDDPHRIVKSKAAGALFGLTPKKYQSGEKDVTGGITLAGDEIVRTVLYEAANVLLSRITRFSKLKRWGMDVAKRRGSKRAKVALARKLAVILHRIWVDGTTYRWTDAGPIAA

SEQ ID NO: 288688 - protein, 315 aa, unidentified
MVEQVVVGIDVSKAKLDVALLPGGEQFTVSNDRHGIGELLRRVSPLAPSRVVLEATGKLEQLAVSELAAAGLPVVVINPAQVRHYAKARGKWAKTDPIDARLIAEFAPDLEPELRPLPDAETQALAALCQRRNQLLEMEQMEKSRLQRAPRANQKSIKAMLRFVRRQVEQVEKQIEHSIRHSPLWQAKRELLESMPAIGKVNSSTLLARLPELGQFTRQKICALVGVAPYNDDSGQWHGRRHIAGGRAGVRQVLYMATLSAVRCNPALRDYYQRLLGRGVEPKAALIAVLRKMLTILNAMVRDNTPWRPPCPTPA

SEQ ID NO: 288689 - protein, 456 aa, unidentified
MSRLSRPNVGLEEARPFVGMSQVNPNAAGVDIGAHEIMICVGGEDGNQIVRAFGSYTVDLQASGKWLKEHGVKTVAMESTGVYWIPLFEELEREGFHCHLISSRSLRRVPGRKTDVVDCQWIQTLHSYGLLESSFRPEADLVALRTLLRHRAQLIQHRAPHILHMQKALLQMNIQLSQALSDVTGKTGQTIIRAIVNGERDPHKLAELRNYRCKKDEEEIANALTGTWREEHLFILGQSLEFYDFYTRQIESCDAQIERTYSLVRPENGVNEARVLGPNKRNSHSKNAPKDVDARRHLKRICGVDLTAVHGISASLAQTIVIEVGTDMNKFPNEKHFSSWLGLAPKNEITGGKILKSRTIKTRNRAGQAFRMAAGSVMRADCAFGAFYRRQKARLGPAQAAVATAHLIARVVYKMMKYKVEYEPLSVADYEARYRELQIKYLHKKASKLGFQLAPI

SEQ ID NO: 288690 - protein, 367 aa, unidentified
MSDITRGEIVRVGVDLAKRVIQVHAVDATGRVVAAKALARDKFMQWCAQLPPGCLVAMEACSGAHHWARRLQAMGFDARLIAAHFVWPYRMQGKSGKNDANDLAAVCEAASRPNMRFVPIKTLDQQGQLVVHRLREGYKEERTACINRIRGLLAEFGLVYPQCPEQLRRALPEALEDATNEIPAVARMALKQAYLHWTEIDSQIAWCDERIAAHVRSDQQAKAAAQLCGIGPISASALVASVGDFTQFKSAAQFGAWLGLVPTQHSSGGKTNLGGITKRGDDYLRTLLIHGAKAAVHTAHKRKDRISQWVVQLMKRVGWQKAAVALANKNARIVWAVLTKGRAFDPEHVPVHPANALPGVPASSMAT

SEQ ID NO: 288691 - protein, 336 aa, unidentified
MSELATVGIDLAKSLFQIHGIDENGRVLVRRQLRRSQLLAFFEKLPRCLIGMEACGGAHDWARKLQGLGHDVRLMPPSYVKPYVKRGKTDAADAAAICEAVTRPSMRFVAVKSEACSSVLVIHRTRDLLVRQRTQICNAIRAHMTEFGVIAAKGAQNVDRLRTQMHQLPETARLPVSLLFEQLVDTDTRIERLTREIEAAHAQSETSQRLVTIPGVGKLSATIIAATTPDVGNFDCARDYAAWLGLTPKPHSTGGKQRIGRISKMGNRYIRRLLYLGAMSQIMVRHRCGPRQDWLSDMLARKKTKVAAIALAHRMARTIFAVLRDGSRYQPQATAA

SEQ ID NO: 288692 - protein, 328 aa, unidentified
MDTSILGIDISKAKFDVVLLHQGRSVHAVFANTRQGFGKLRHWLKKQAVHQLHACLEATGTYGDDLAGYLHGQGYAVSVVNPSRIKKYAESQMQRNKTDKSDAMVIADFCRTQPVDLWSPPDPALRELRELVRRLEDLHQMRTQEQNRLKAEPDNRAVTRILRKHITFLDNQIQEIEDLICQHIDQHPDLKHQKDLLTSIPGLGDISASALLAEIGDVHSFEAARQLAAFAGVTPRQRQSGSSVHGRSRLVKIGNPHLRRILFMPALSARRCNPIIKPFCDNLALHHKPKMVVIGAAMRKLLHIAFGVLKSDTPFDPHFIPQKACLTP

SEQ ID NO: 288693 - protein, 353 aa, unidentified
MYYSGIDLHKDMSVITTINCYGAILSQRKVPNHEAHIITYFNQVSPIGTDHKAVVESTANWYWLSDLLTSQGVDLTLAHAKYLKAISYAKVKTDKVDSHTLANLLRLDMVPEAHQISQDLRPIRDLMRARLSLVVKKTSCRNSMHRLLAKYNLKLPRYPRPSDFALLKSQLLPEPKLQLSILEEQLNLIVRQIKSLEQSIQPKLIPNPDIQRLLYIPGIGKILAFTIYLEVDGIERFASVNRFFSYCRLVPGANNSNKTIKHKTSKDGNKYLKMAFMEASVRAVQYFKEIKSFHQSKARKKHKNIAKALVAQELARITYHVLKTQTDFNHMFRGVPLSRHKTTKWPRLASPDA

SEQ ID NO: 288694 - protein, 417 aa, unidentified
MAEEIEWFVGIDWASQSHQVCLIDAHGECLGERAVAHGGAGIEELCDWLIARTGATPEVIGVAIEMTQGPVVEALLERGFCVYGINPKQLDRFRDRFTVAGAKDDRRDAHVLGDSLRTDRHAFRRLSNDEPVIVKLREWSRMADDLQQERARLASRMREQLWRYYPQMLELADDLAADWFLDLWNQAPTPAKAARLRQTTIERFVKAHRLRRWQAPEVLRILKQKPLSVAPGVVEAASDHIRTLTVRIRLVNQQLKAAHRKLDELCAQLIPSEENEPGQQCEQRDVVILRSMPGLGRIILAVLLAEVWQPLRRRDYHALRSLSGVAPVTRRSGKTCVVVRRYACNKRLANALYHWARLATQHDALSRRRYAALRQRGHSHGRALRTVADRLLSVACTLLEQQTVFDPTYKVHEAAGA

SEQ ID NO: 288695 - protein, 417 aa, unidentified
MNPALFDIVIGLDRSDKTADLHLLHLRDGRAEHQRIGTTPEALQQWVQRLQQAFPGHRIAICLEQPAHNLIVFLQHFEFISLYPINPITLQKFREAFVTSRAKSDAQDAFYLARLLATHHATLKPWMPDDAATRRLQRLVTDRRAVVDHRTLLSNRLKSLLKDCFPQALELAGDDLWRPLGCAFLLKWPTLMQLQKARPETIRRFYYLHGSRSQTLIQRRLDLIAKAVPLTQDGHLLESFTLRIELIVGELQLVTRTIAEYDRLIAQAFAEHSDAHIFASFPGAGPTLGPRLLAAVGSQRERYGSAQRLQCFSGIAPVLKQSGNSHYVHRRYRCSKFLRQSIHEYAGESIRHSTWARAFYSQQKSRGHKHHTIVRALAYKWIRIIFRCWQNFESYDENRYLRALETNGSQLLRITSQ

SEQ ID NO: 288696 - protein, 408 aa, unidentified
MNAVGIDVSKGKSMVAALRPMGEVALLPQEFLHTGVGLEQMAYAILALGEDTRVVMEATGRYHEPVAAALHEYGIYVCVLNPLYIKQSGGGSIRKVKTDKADAMKIAKYGLDNWVNLREYTPMDTVRQQLKLCSRQYNLYMKTVVSLQNNLISLTDKTFPGVSELFSSPERTDGHQKWVDFVMTFWLCDCICRVSEKAFTERYQKWCKRKGYHCSVEKALDIYASSCGHFTTLPKNDNTKLLIVTAAQQLLAGKTTLAALRAEMTRLASQLPEYETVRAMYGVGETTAAQLMAEIGDVRRFPRRSSIVGFAGVDPAVDQSGKHETQSTPTTKRGSPHLRKTLYQIVCTYLRKAPADEPVYQFLDKKRAEGKPYFVYMTAAQNKFLRIYYARVKESLEAFDAQQSTSQG

SEQ ID NO: 288697 - protein, 341 aa, unidentified
MKKNIFFIGLDIAEANFAASICQTPGQPIVTKEAIPNNPEGFALLLLWLKEHRIDKTNSHICMEATGVYSQAIAYYLLFAGFPVSVEPPLKVKRAFDPIGHKTDPVDSKQIAEYAYRFRDELTSWQPRDEILEKIRQLLSVREQFTKQKTALKNAMHAYSKQRVQVTLIKKAHQETLAQIEKQIARIDKELSKLIKQDPQILQKANHLKSIPGYGMLLAAHLLVITENFTKIQKSKRLASFVGIVPYQNKSGASVFKRAKIRHFGPGPSRKLLRLAAQSVATHDVTFRGYYLRKLAQGKAKALVLNNIANKLLKVACAMVRNNTRYIKEHRSIHPMYLKSA

SEQ ID NO: 288698 - protein, 326 aa, unidentified
MEKFDVNFVDQNGNEKNKTVNNGVKAISKFLEDIPSGSILCAENTGVYGDLLLCLSNQMGVSISFIPGYNIKHSLGLRKGKTDKVDAMRIREYGERFYDKLVPTMYEDETVKELQELYTLRVQLIKTRKALLTSETGRKHQPMRSIYAHTHVHSVLGNLDTEIESIDAEIKKIIISNQEMKENYELATSIKGIGPVITTDLIIKTGNFKVIDTARKAASYAGVCPFPNSSGKMVGKAKTSPFADKKLKSLLYMGAKSAVKHNKEYRLYYQKKKLEGKPHYLIMNNVSNKMLRTIYSIIKNKLPYNEGFICLDPREKKINSSTKKVA

SEQ ID NO: 288699 - protein, 324 aa, unidentified
MNTTVVGIDIGKSTCHICVIAPDGTQASRTAQREHVAALLLPTIPADPPAIIALELTGSLALPVLTGLEESPHSIMIAQHTDSAALRQLLRQRKKTDKLDAKLIARLAAMLTSPETAPLVSAHLIPWQTIRVAILGRSQARHLQALIKDRVRVILKRQYATSAQAVAHYTRQIEFLTQLIAEAETLLIETASPAARLLATIPGVSLRRACILDAAIGEISRFPSCNHLVNYLGLVPPHRPQSGISTGRPVRRKGLDLLHTELHMGALTIARYPVKHGVLGETYLRVKARTGSGKAGMWAVKRKLARIAWGVLTSGQPHQQKGVL

SEQ ID NO: 288700 - protein, 313 aa, unidentified
MMIIGCDFHPSWQQISWVDSETGDCGEQKLVHAAGDARLFYQRLAAPVLIGMEATGNSQWFIELVEDLGHEIWIGDAAQIRASYVRKQKTDKRDAAHILKLVVEGRFPRLWTPDREQRDLRQLVLHRHKLVIIRSRVKNELQHLSLNKGVQRKHKLWSQAGQKMLRELPLKPWAACRREDLLGLLAMLNQQVGTLDDAVQQAAEENPQAKLLMTQPGVGPNTALAYVLTIGDVGRFRRGKQVASYLGLIPREESSGGRQKLGAITKQGNRMLRALLVEAAQVAVQHDPGLRNSICIAVTRSRRAWPRWQRRAS

SEQ ID NO: 288701 - protein, 374 aa, unidentified
MVKENFIYVGIDLHKETHTAVMIDCYNQKLGEITFPNRPADFPKLVAKVKKCNTDGKTIVFGLENAYGYGRALAVWLIDKGYLVKDVNTAISHRQAKHRGAMYRKSDSDDAKAIALATLNMLDKLPDACPNDAYWSLGQLVHRRDNIMKQRTRLVNQLHEQLCIAYPSYKQFFNDISRPTALYFWEHYPSRKYLKGKSVEDLRKELVPVSHNRCSTKNCEKILDAAASDKVKNNAYQDARDMVTLSIVSDLQHYDSQLAEVDKMLEQMYKMLGCTLTTIPGVNVITAVKILAEIGDIKRFSNANKLAQFAGIAPLHLSSSGKGKDVATKQGNRRLQATIYFLAIQMVHISSKGTPRNPVVRAYYEKRKAEGKTS

SEQ ID NO: 288702 - protein, 412 aa, unidentified
METVVERPAALDVHKEQVTGCVRVPVEGGGREQHIAEFPTTVRGLLALRDWLAAHGVGQVTMEATGVYWKPVWAILEDDFECVLVNARHVKNVPGRKTDVSDAAWICQLAEAGLLRASFVPPKPIRRLRNLTRYRKTQIQERQREANRLHKALEDTGIKLDCVASDILGVSGRAMLAALCQGTTDPEVLAELAKGKMRKKIPALREVLEGRFDRHHAVWIGAILNHIDFLDEQIDALSELIEEEIRPFAPVVELLCSHVGIQARSAQCILAEIGVEMTVFPSEKHLASWAGQCPGNDKSAGKRRSGTTRKGSKWLDWTLEEAALATVRANNSYLAAQYQRLRPRRGHKKALGAVKHTILTNIWHMLTTGQLYNDLGVEYFRQRDPERATKRLVAQLERLGHKVTLEELPQAA

SEQ ID NO: 288703 - protein, 348 aa, unidentified
MQYIGLDLGKTSSQVCILTEDGEVIERRIKTARESFAKLFGQRPPARLVIEASTESEWVARCLEALGHEVIVADPNFAPMYATRSKKVKTDKRDARALCEASRLGAYRQAYRTSPAQRHTRAQLSVREALVGTRTKYIVLVKSLLSREGWRITGGSSQTFGERVKALSLSAFLLAEIEPLLVLLETLNEQIAQADRKLEEMVESDARVKLLTSVPGVGKVTATAFVAAIDEVERFASAKQVRAYFGLVPREFSSGEKQRRGHVSKAGSKRIRSLLVEVAWGIICRKSGAATAGLRMWAMQIAQRRGRKIAAVALARKLAGMLYAMLRDGTQFSLKRSRPSAGQMLVAA

SEQ ID NO: 288704 - protein, 335 aa, unidentified
MGKRHKGQAWAGGDISAKEIVVALERADGERERSTFENTSAGRKSMVSWLNKRGSDVQVVIEATGIYSLDVAFALYRASGITVMVANPRAISDFARALMQRSKTDKLDAEAILEFSRRMPFVPWAPPSASRLDLRAITRRIDSLKLQAQQEGNRLHAAQHAEEITPLIRRDIEAHLKQLDRHIEKLQAQALDLITADAELTRCFKRLTSVRGIARVSALHILGELVILPADMTARQWVAHAGLDPRAFDSGTSIHKPARISRRGNSHLRAALYMPALVAAHHEPHIKAFYEKLVAKGKTKMQAIVAIMRKLLHTIHGMLRHNSDFLGEKFFVLEG

SEQ ID NO: 288705 - protein, 317 aa, unidentified
MISTAKIFVGVDVSKATLDVYRPDTKEVFKIENSDEAIALLCSQLEKKKRKVMVVMEGTGGYEYLLLKHLASHKLDAAVINPRRVRDFAKGIGLDAKTDPIDAKVISKYAEVVVPQPMATKSDHELKHGALVARRNQLLELVNQENNRLKQSWDDDAKQSIRDVLEVLKKQLKSIASQLAKMIQADTENQRAIEVLQSVKGVGPVMISTVLAELPELGKLNRGEIAKLVGVAPINRDSGKKSGKRFIGGGRGQVRRVLYMATLVAIRHNPAIKAFYAHLKSKGKEFKVAIVACMRKFITILNLLVKTNQLWENKMSV

SEQ ID NO: 288706 - protein, 405 aa, unidentified
MNAVGIDASKGKSMVTILRPFGEIVSSPHEVRHTSDQIDDLIREIRSLEGDTRVVMEYTGRYHEPMARWLSDAGLFVSLVNPKLIKDFDNDSLRKVKTDKADSVKIARYTLDKWHKLKQYGAMDELRNQLKTMNRQFGYYTKLKTAMKNNLISLLDQTFPGANTFFDSPAKSDGSQKWVDFVDTYWHVDRIRSMSLAAFAEHYQKWCKRKGYNFQPDKPEEIYDSICNIIPVLPKDDVTKFIVRQAVTQVNTASAAVEELRTRMNDIASQLPEYPVVLAMKGVGTSLGPQLMAEIGDVTRFEHKGALTAFAGVDPGKNESGSYAQKSVHTSKRGSAPLRKTLFQVMDCLIKTMPQGDPVYEFMNKKRSQGKPYYVYMTAGANKFLRVYYGRVKEYLSEHLEIAEN

SEQ ID NO: 288707 - protein, 340 aa, unidentified
MKASLKNYLGIDVSKLWFDVSLLAVVDHVKQPIVTERFNNTASGMKAWKAWLKVQHVAYDQNSLLVIENTGVYHRLIWSFCSSYHLPLHIGNAAHIKWSLGITRGKNDVIDSKRLSLYCCKQADELKATPPLNPVFMKLKDLMTSRSRLLAQLNSTKNYINEIQCTNDKELLTMLDKAHKAAIEGIKKSMTQVEALIKKIIQQDKNIYQNYELIKSVPGIGHLTAIYIICCTNNFASKISGKQLGSYAGVVPFANTSGTSVKGKNKVHKMANKELKKMLHLCALTAIKYYPEFRQYYERKKAEGKNGMVVINAIRNKLLLRVVAVVNKQQPYVDNTKIAA

SEQ ID NO: 288708 - protein, 333 aa, unidentified
MKSDTVHIGVDVSKGKLDIYVPAKKEGSRPLTKEVDNDINGFRELRDLARKARATVCVEPTGGYELELIAFLHKFEVPVAYTDALRVRQFARAEGCLSKNDTIDAALISRFADKIGVRVLEAQEVEAVELKRKAKFRQTMVDSRTAMINRLETEIDPEMKALLKEQIRLAGRIIDKAERLCLDTVKKNDRMNSLKERFTAIGGVGDITAISILSSLPEIGTLSDGKLNRLVGIAPEEKQSGTKEWQRRIWGGRKDVRNALYMAAVASIKWNAILGGYYHKKRAEGHPHKWAIVPTMRKLLSLLNRIARDPSFPPMPEPESTKQNANVGRKKAA

SEQ ID NO: 288709 - protein, 342 aa, unidentified
MVYIGCDQHKQFCQPAVLNESGTLVEEKKFYHSDPNALREYFASLPPNSQMAIEASGFESWLADFAQELGIRVTLSHPLKTRAIAEAKIKTDKVDARTLAKLLQTDFLPPAYLAPPEIRRRRYFLRFRLCLNRYRSSLKNRVHSLLHHLGIQPPAVTDLFGVCGRQFLDSLELEEGYREALHGYLALLDMTEARVNCLKKRLAAYVKESPEAQLLQTIPGIGVLLAQVILAEIGTLARFSSPGKLSSYAGLVPSLHQSGQTLYHGPCPQQGNKFLRWALVEAAQTAVRKDPLLKAFYDRIKRKKGSQKAVVAAARKMSVIVFHILSKKEPYRYSAFPQVSPA

SEQ ID NO: 288710 - protein, 423 aa, unidentified
MMKLKYSICCGLDVHKNVIVATIVTTNKDGISKYLQKSFSTINSDIQRFHNWLIENNCYHVCMESTGKYWIPIFNYLENDIDVCLTHPKYVKAIKGKKTDKKDSKWIADLYKFDLVRCSFIPPKDFRQLRELSRYRFKLVCMKSSEKNRIQNCMTISNVGIASVLSDPFGKTATEIISYLLEHTADSMDEKAVRKLIKKGAKSKSDEIIEAIKGYTIETDQAKKLELARGHLEYLDDMITQTEVELYVRIKPYYEFVEFVSTMPGMTELSSTIVLAETGVDMDIFDDAKHLCSWCGLSPANNESAGKKKSVRIAKAGDYLKPMMVQCALAAIKSKKQPYFAIKYGRIKKRRGHKKAIIAIARMMMVCIYHMVSEKKPFTPTDYEELMDPQNHVESVVLNENNVFAYLESLGYDSSKLVKRNDN

SEQ ID NO: 288711 - protein, 419 aa, unidentified
MAFKIFRKNCCGLDVHKTWIYACMGITDTNGRTEYKQARFSSFTKGLQKLADWLAKYDCNDVCMESTGKFWIPVFNILEKTCWVTLAYPKYTKPQKGNKTDHKDAKWICDLYMCDMVNPSFIPPPDIRQLRDLMRYRSKLTNIMTSEKNRALNCLTVSNLKLDDVFSDVFGKSSRSVIRYILEHPGETFQVAPFIDRRCKHPVEEIQAVIDGTISHQQAVKLRECLQHLDELEVHKTNVEKEILCLVQQYPYQLELLQTVPGFSGNIMTAIALISEIGADMSVFPSAKHLVSWAGCCPRNDQSSKKVKSTRISRAGVYLKPLLVQVANAVIKSDKCPECKERYRRIKARRGHKKAIIAVCRMLLTAIWNILSKLEPYSAAGYLEDKLTDHSVVISKAKGLELLRKRGYISRDEVDPAPA

SEQ ID NO: 288712 - protein, 421 aa, unidentified
MTHGSHEEFAAFVGIDWADAQHDVCLQAAGSEKRASCMVAHTPETIDAWVSMLRTRFHGQPIALCLELNKGPIVSALRTYDFLVLFPINPLTLARYREALTPSRAKDDPTDAALQLELLLTHRDKLQPLKPQSPAMRALEQLVEHRRRVVNDRVRITNRLTSTLKNYFPHVLPWFQEKDTAVFCDVLRRWPTLKAAPLARRSPLETFFRDHHVRSADIIEKRIQAIKTATPLTSDEGVIAPNVLFVQALVSQLRVTLDAIETFDHAIAQRAQSHPDFPLFQALPGAGPVFAPRLLVAFGEQRARYASAAELQQYAGIAPVTERSGKKSWVHWRLQCPQFVRQTFVEWAAESIRHSFWAQIYYQQQRDKGKAHQAAVRALAFKWLRILYRCWQDRTPYDEATYLQALTRRGSALLQNLAKVS

SEQ ID NO: 288713 - protein, 343 aa, unidentified
MTRVLYVGLDVSLEMTSICVVDAEGGMILETKAVSDPADIGEMLAGIDGTFERVGFEAGPLSQWLYNGLTSAGLPAVCIEARHAKAAMVAMNRNKNDRNDARSLAQLIRSGWFKAVHVKSTESQEMRTLLMSREFFVNKLRDHENEIRGLLRPFGLKVGRVATRDFEARVRELVEGHPNLELCMSALLRGRAEMQTQLAELHRALLRLTANDELCRRFMTIPGVGPVTALAFKATIDDPGRFRRSSDVGAHLGLTPRQYQSGETDVRGRISRSGDAFTRTALFTAAHVMLTRSRQWTSIRAWGLRIAKRSSLKKAKIAVARKLAVVMHRMWRDDAPFHWGAAA

SEQ ID NO: 288714 - protein, 347 aa, unidentified
MSITMIGLDTAKAVFQVHAIDGAGKAVMRRKLRRSELIPFFEQQEACTVVVEACGAAHHWARLLGGLGHEVRLIAPEAVKPFVKKGKKNDAADAAAICAAASRPEAKFVPVKSLEQQGTLALHSARSLLVKQQTMLANALRSLATEFGLAVPQGIGRLDELSALVAADETVPEPARQVFARLLEHCRATAEGVEALEAGIVAHARQDDTARRLATIPGIGPITASLIAATVGDIGAFESARHFAAWLGLVPRQRSTGGRTRLGRITKTGNREIRRLLVLGATSMVYRAEHWSSAAGAWTRGLLERRPVRLVTVALANKMARIAWALMTRKEVYRAKGRAAAAAEVAA

SEQ ID NO: 288715 - protein, 399 aa, unidentified
MHDRQAHIWVGIDAGKAHHWVTAIDDQGAMLWSRKVSNDESAILDPLAEVLTLGENFTWAVDIVGTTSALLLALLASHGQSALYVPGRIVNRMAGAYRGEAKTDARDAYVIAETARHRHDLTPIRLPVEIIADLKLLIAHRGDLVADRVRMLNRLRDVLTGIFPRLDRAFDYAKHKGALTLLTGYQTPTALRRMGQVRLTKWLARRGVQGAPAVAEAALEAASGQQTQIGNETIAAQIIADIATQILALDKRLRTLENQITTMFHAHPQAEIIESMPGMGPILGAEFLAAAGPLDNYADDGHLAAAAGLIPVPRDSGRRTGNMHRPKRYNRHLRRSLYLSAQTSVIREGPNRVFYLKKRGEGYKHTQALLALSRRRVSVLWAPLRDNRTFSEAPPIRAA

SEQ ID NO: 288716 - protein, 391 aa, unidentified
MILVGIDVAKDKHDCFIRTSEGEVLFKSFTIANTKDGFNELYEKILTVTKDFSKLKVGLEATGHYSYNILGYLLDKGLIPFVINPLHTNLYRKSHSLRKTKTDKVDSQTIASILMSDVDLKPYSNILYQNEELKSLTRYRFDKVKQRAKLKTSISRLVTILFPELEKLVPTLHMKSVYALLYEFPSAEAIAKAHLTKLTNLLYASSKGHYAKETAILIRETASNSIGSHMSAKSLELKHTVKLIEELTSEIKEVEQEIKSIMDKINSPILTIPGIGYSMGAQIVAEIGDFKNFDSPDKILAFAGVSPSTYQSGKLYSSNAKMEKRGSRYLRFALFNAAVYVCHWEPTFALYLAKKRAEGKHYYVALSHAIKKLVRVIFHLEKTGENYVVLK

SEQ ID NO: 288717 - protein, 358 aa, unidentified
MQSNKINFKGQNIFIGIDVHLNSWSVTTITPSGYKRQTSHRADAVELYAYLTKNFPGGIYHAVYESGFCGYSCCYELRELGIDCVIVHAADVPSTQKSRLSKTDSNDSMRLAMSLSNGELNTIYIPPKEVLGDRDILRYRSIVQKGMSRTRSRIKHLLHTNGVSYPQEFREPYKHWTRRFIKWLREDVRLLSGKRLELDFLLEDLEHQRSQLLKATGKVRELSRTSRYAEDYGNLISIPGVGLITAMTMLTEVTDIHRFSSQKKFMSYVGLIPVMKDSGETIRQNEITPRGNQRIRRMLIESAWSAVRYDAQMAAAFGAFCRRMKKNRAIVRIARILASRTYHILKTRTKYDTALCTA

SEQ ID NO: 288718 - protein, 340 aa, unidentified
MKLSVIGIDVGKTVLHVHGADAQGKPVLRKKFGRSALVEWLAQQAPCLIGMEACGGAHHLARVLTGCGHAVRLIHPGFVKAYVKSNKNDFRDAEAIAEAVTRPTMRFVAIKTVAQQELQAIHRLRSGAVAQRTAVINQIRGLLLEFGITVPQGPTALRRRLPEILETADGGLDALGRELVAELQQEWVRSDERIAALEQRLKQHTQTSEPCRRLQTIPGIGLLGASAFVAAFGDGRQFASGRDCAAALGLVPRQHSTGGRSQLGGISKRGDAYLRTLFIHGARAVLRYADRHDDPRSRWIQAVKARRGIRVAAVALANKMARTAWAVLTRETPYQVPAAA

SEQ ID NO: 288719 - protein, 344 aa, unidentified
MEYFVGLDVSLRSCALCVVDTRGKVVLERELACEVDDIAECLSHFQYPIERVGFEAGTMSQHLYFGLKAANFDVVCMEARQVNAALSAMRNKTDKNDARGIAQVLRTGWFSPVHMKSREAHGLRALLSTRKALLKKTMDLANEARGLLKIFGIRLPKTVKHGSFDGVVRPMIEMDDVLAHALVPLLDARVVLYQHFLELDRRVKRAASHDEVCMRLMTVPGVGPIAALTFKGAIDDPTRFKRSRTVAAHFGLTPRRYQSGEHDNPGRISKAGDRDVRATLYAAANALLMRTMAGSRIKSWGMRLMRTKGRRRAVVAVARKLAVLLHRMWIDGTEFRQEQVGGMA

SEQ ID NO: 288720 - protein, 418 aa, unidentified
MKHSKTEKIGTINKKTLIAALDIGKKVHYGYFRAPSGKDFQPFAFHNTRNGFDKFWERLCNFKEKQMLEEIIIGFESTGPYAEPICHYLRHKSVKLVQVNPMHTKRIKELTGNSPNKTDKKDPRVIADVMSLGHSLTVIVPEGAAAHLRRLTQARERAIERRTAMSNQLQHLVFLIFPELVHIIKPSTKTGMYLIKHYSDPKKLLFVGIDKLNAIIKKVSRGRLGNDRAEQLHGAAKKSVGITEGKESILFEIAHLVSKIESENHYVEDLEKQMGEYLQKIPYSHSILSITGIGRVTAAGLIGEVGDFRKFKTISEVLKLAGLDLYEISSGAHQGCRRISKRGRALMRKLLYFAAINTTRKNGILHGPYQRHLAKGMPRIKALMAIARKLIGIIFALVRDHSNYIADYSSQLVFKKAA

SEQ ID NO: 288721 - protein, 341 aa, unidentified
MPTITIGLDLAKHVFQVHGVDPTGQVVIRKKLRRSELLEFFKELPPCLVGMEACGTAHHWGRELTALGHDARLMPAGYVKPYVKRGKNDAVDAEAICEAVTRPTMRFVAIKSVEQQSVLMLHRTRELLVRQRTALINSLRGQLAEFGLIAPQGVWRIPQLHALARGATSSVLPDAMRACVELIMGQIEDLQMRIGTIGKSILACHRASEMSQRLQTIPGIGVITATAIAATVANANVFKSGRHFAAWIGLVPRQTGTGGRMHLGPISKKGDPYLRKLLVLGATAVIRYAKSKPELAAWINALLERRPARVVTVAVANKLARIAWAVMSRGETFRQASSAIA

SEQ ID NO: 288722 - protein, 336 aa, unidentified
MVQIYGIDLGMSSFDVSFLNASGTPRHLSCVKNTVQGIGKFLLSLPSNAVLCAEYTGVYGDLLLRLCSLHDVPLCFVPGYEIKHALGLQRGKSDPLDACRIREYGERFYDRLRPCFYPSEEISELQELYRTRSILVESRKRLSTFDKGDNCKSSVSLTAARSRGSVLSELDAQIANLEHEIETLIQSSPELSRNYQILTSIVGVGPVTGCELIIKTENFRKLDTARKCASYAGIAPYPNESGTKKHKHRISPMGDKQLKTLLFLCARSAKDHNKEMRLYFLKKYEVEKKHFFVVMNNIANKLLRLIYSLIRKQQSYDRDYIQKDPRCVVISEASKC

SEQ ID NO: 288723 - protein, 385 aa, unidentified
MRSVGLDLGARHIAWCEVVDGAVVRRGSVRRLEELEPVLGAVTAPARVAFEASREAWHVHDVMAGWKKEPVLLDTTRIRRIGVGQHGRKNDSIDAEAIAMAMDAGRVPVAHVLSPERRVLRAKLSVRSELVDMRARQVTVLRGLARAAGVLISSSSTDGFLQKLQQAPLGESTRALMAPLVATLTIAQEQLADVDAQIAQVAKADPIIRLCATAPGVAVIVAATFVSVVDEAKRFRNAHAVSAYLGLVPGESTTGGKQRLGSITKHGNAHARAMLVQSAWLILRAKDSDDPLGRWATDLARTRGKKIAAVALARRLAGVLWAMWRDGTVYDRAFQARESAKGLHVAAQSGELRAQAMALVAKKIQRRERTPRRGSRAKTSRVAAM

SEQ ID NO: 288724 - protein, 436 aa, unidentified
MRGCRCSMIMGFTKPIEHFNLQRKKVITMNTLYVGIDVSSKSNVVYLMLPNGDKHSNFSVANSHEGSTLLVKKIYSALTSHSLDTVLIGLEATSVYGDNLVYFLREDATLAPFNRKIHVLNPKQVKKFHDTYNDLPKNDYVDSFVIADCLRFGKINKEVYMGEYRYKALQNLTRARFFAVQNLVKEKQRFMNVLFKKYSTMTQEKVFSDAFSTTALAVYDEFESAEALANMDLHELTDFIIEKGKNRFPDPDAVAKAIQKAARSSYRLPKTVNDSVNQVLSISITSMKALESQIKEFDKAIIALMELLPNVLISIPGIGPVYSAGIMAEIGDINRFDNQASLAKYAGLAWKQHQSGGFEAEVTRLIPSGNRFLKYYLCEAAFSLVRCDKEYSDFYHLKYKEVNRCQHKRALALTARKFVRLVFRLLKDNRLYCPAK

SEQ ID NO: 288725 - protein, 345 aa, unidentified
MPIVGGLDIHRKQLTFDYLDTVTGEVKRGQIAPADRAHLRAWLGRFGGRDDVAFAMEGCTGWRYVAEELAAAGIAAHVGEPADTAAARGRKRHPKTDKTDSRHLRTLLAEGRLPGCWVPPAHILEYRALLETYHDLRTAHTAWVQRIHAVFFHQGAPALGEGALRTEADLARLRAAAAAHLSAAGQLQVATALEMIAAVEARMDVPRHQLAQAARQLRGAKVLAERLYGVGPLTALALTCWLGGEGRFSSSRKAVRFTGLDITVWSSDRKGPPGRLSRQGPPVLRWAVYEAGKTHARASAPDHGYYAQVKDRKNGKRAALSEARKIVRQACHILAELGDDALTST

SEQ ID NO: 288726 - protein, 311 aa, unidentified
MDAVYVGIDVSKDRLDVHTLPQGAAFTVGRNGEGVARLVERLKGLSPTLIALEATGGFETVVAAALAAASLPVVVVNPAQVRHFAQALGQRAKTDPIDAAIIARFTQATQPVVRPLPDETTQLLADLVARRRQIVEMMAAEGQRERRADKRLKKSIARLRKALEKELAELDGEIDEHMRGTPAWAEKEDLLASVPGVGPVIARTLIAELPELGALNRRQIAALAGLAPYTRQSGQWRGKSFIGGGRKSVRSMLFLGAMVAARHNPVLKAFRDKLVDSGRPKIVALIAVARKLLTILNAILRDAKPWRAQNT

SEQ ID NO: 288727 - protein, 361 aa, unidentified
MASIALVRSDVIVGVDTHKDQHVAVALDGLGGRLGELFVPATAGGYATLLAWARDHGRVIAFGVEGTGSYGAGLASFLRRHAHKVIEVNRPARQADRRLAGKSDTIDAEHAAREVLAGNATNVPKTADGAIEAIRLIKIARDGAVKARSKAMITLKASLVTGGDELRAELEALTDHKLVLACAEFPDTLDDSADPAAAMRYLLGTLARRWLSLHDEIKVHFKLLERATAAAAPELVEAFGIGPDVAAEMLVTAGDNTDRVRSEAAFAKLCGACPIPAGSGKTNGRHRLYRGGNRQANAALYRTVIVRMRWHEPTIAYVERRTAEGLSKKEIIRCLKRFVAREVFALLPEPAKHEIFREIAA

SEQ ID NO: 288728 - protein, 490 aa, unidentified
MKVSLGIDVACRADHRASLAGPDGEFLWSGWRFRTSPLDLEALWSKIPAGAEVQVVMEPTRNAWVPLQAWLEARGAVVVLVPPEQSADLRNDYNKHTKTDRLDSRVLARLPLLHPEGLESVTGPTPADPFRRAVRRRTKLVKARTAVFQRLDALVELLGPAWADALGEGYSKSALVVLERWADPRALRRLGRRRLTDVLVKASRGAWREPKADELLAAAEESLELWKDGGLDLDELAADIAAEVRVARSLSAEIATLEARIAPMFAAADRRPETPDDREATPPTREGDDERDVGIVASLPGLDGILGAGILARFGDFDRFHSLAGIRSFTGLVPSIDQSGNSSGHGRPTKAGDPGLREALYLAADHLRRVDPHFAQRYHRLIVEEGKHHESAVCTLAAVTATRIAACWRRRECYVLRDTDGREITKTEGRAIVAERYTIPDDVRRARRRVANAKHLKGRTDRRDQKSTRAAPASGPSSANRTGKTTERVA

SEQ ID NO: 288729 - protein, 359 aa, unidentified
MRFYERQHRFYAGVDLHARTMHLCVLDGDGTVVLDVNLPCRPDAFLSAIAPFRADLIVGVECMFGWYWLSDLCHQEKIAFVIGHALYMKAIHGAKAKNDKIDANKIARLLRGGNFPLAYTYPAGMRETRDLLRRRTYFVRQRSGLFTHLQILNSQYNLPPFPKKLSFAANRSELDIAQRFSDPSVQHNAAANLAVIDCLDEQIAQLELYLTRTAKVDDVQTYHRLQTIPGVGKVLALVLLYEIHDIKRFASCGQFLSYCRLVRCTHESAGKVLGSGGHKIGNAHLRWAFAEAACLFLRSSERAKKWQEKQLKKRSEGRVLSILAARLARAVYHLWRKGAAFDAARFWQVQGMCGPAAQG

SEQ ID NO: 288730 - protein, 360 aa, unidentified
MRIIGCDLHARQQTLAMLDTVSGEVTNRTLLHEGNEVREFYAELPRPVLVGIEAIGPMQWFLDLLEELRIESLVGDAAKIRAAEPRKQKHDRRDAELILKLLVEKRFPAIWRASKELLDLRALLLHRHHWVRLRTQIQNALQAIALANGLRRGPGLWSYDGQAKIAFLPLPPHASYRRSMLQALYRKMEEEIEQLSAQVAEQAKQRSGARLLMTHPGVGPVTALATDVFLGDPQRFADGKALASYVGLIPREYSSGARQRLGTLTKQGSPLLRFLWNEAGAHAVRRDPELQRFYRRKLVQKGLGKARVASARKLGIRLWIMLRDQIDYQEFCRRGQKQSGAACAGMLEVGYGAHGHRPVG

SEQ ID NO: 288731 - protein, 317 aa, unidentified
MSKSAPAFVGIDVSKDKLDVAVRPVQERFSASNDDAGIAELLKRLKPHRGSLVVIEATGGLEHGVAAAMSTSGFRVAIVNPRQVREFGRAIGQLAKTDKIDADLLALFGERVKPEPRPLPDEDLQVLQALVARRRQIQEMLTAERNRLGAARAPAVRQGLKKHIEWLQKQVKDVDRQLGDAIKNSPVWCAKEDLLRSTPGVGPVLSTSLIAQLSELGSLNRKEIGALVGVAPFACDSGRFRGKRKIWGGRAPVRSALYMAALVGVRHNPVLREFYSRLLAAGKLPKVALVACMHKLLTILNAMVRTNTYWKEPASFA

SEQ ID NO: 288732 - protein, 405 aa, unidentified
MEFVVALDVSMGKSYSVIYQDQRFLYEEEIAHNQLGFQQLFDHIQTLPGSVTVVFEATGIYSKPVETFCQRNALRYCILNPLEAKKQLELGTLRSWKTDKHDAHLLAQSHSLHRREETQTQSIIYQHLRDLSRFYQEIEEEIKRMRMYLHNALQLSFPELEQFFSSRITPYALSLIALFPHPDLVLRSSITKIKNQLINHTLKNISQNRAKQKAVEIMSYAHSSYPAVSIESVQTQKVRYYARQLLHLLEEKERVSKELIEEAKNLPEFDLFLSVPGIGEISAALVMGELGDLSRFSNHKKVNAFVGIDIRRYQSGKYHGQDHINKRGNPKGRKILYLIIRNMIRQQKAAPNHIVEYYYKLKKQPTPKKDKVAVVACMNKLIKCMYSMARNHTEYDYSHAVSMDQ

SEQ ID NO: 288733 - protein, 406 aa, unidentified
MRRVIGMDIHRTFAEVVFWEDGRLRPTGRVSMTRAGLEGFGRSLGKEDEVVIEATGNAMAVVRVLSPYVARVIVANPLQVKAIAHAHVKTDKIDAGVLASLRAANFLPEIWLPDADTERLRRLVARRNQVVRHRTQIKNEVHSILHAHLIPSCPHADLFGRLGRNWLAGQVMPDDERVAIERHLRELDRLGEDVGMLDRDIAQTAVDDPAVKRLLTITGVNLIVAAGLVAAIRDVHRFPGPQKLVSYVGLNPRVRQSGLGLAQHGRISKRGRSHARAMLVEAAWAASKAPGPLRAFFLRIRARRGHQVAAVAVARKLAVLCWHLLIKEADYQWARPALVANKMRAIELKAGQPARKGSKPGPAYAYNIKALRDREIDLARHAEQAYDRFVSQWQPRRPKRRTGAAN

SEQ ID NO: 288734 - protein, 385 aa, unidentified
MMKLDRTDAPATDEYATVYVAFELSKAKWKLGVLLPGRGKLSRYTIDGGDLAALSSRLADARLKAERCGKPVRILSCYEAGFDGHWLHRWLSQEGVINHEIDPSSIEVSRRARRAKTDRIDLEKMMRALLAHLRGEPRALSVVHVPTEEEEDRKRRTRERERLLKERTAHTNRIKGLLHAQGVRDAMPMKRGFIAGLATLRTGDGRALAPRLKEEIVREHERLCLVNKQLRELEAKSVAEVRRAAPGSAEAKIVQLIDLRGIGLASSQQLVNEVFYRSFANRRQVGSCFGLTGTPYDSGESQRDQGISKAGNRRARALAIELAWLWVRHQPNSDLTRWFCARVGELKGRIRRINIVALARKLMVALWRYLTTGVVPAGAVLRPGV

SEQ ID NO: 288735 - protein, 310 aa, unidentified
MEPIFVGIDVSKDRLDVHVRPGGEAFVVTRDGKGLEELVGRLQELGPTLVAVEATGGFETIVAAAVAGAALPLAVVNPAQIRHFAQAVGKRAKTDPIDAGVIAHFVEAVRPVPRALPDEASRLLAELVGRRRQIIEMMVAERQREKRAANVRVRKSLARHIAMLERELGAIDQDINTLVRGSPVWRVKEDLLASVPSIGKTLARTLLAELPELGSLDRRNIASLAGLAPYARQSGRWRGRSMIGGGRAAVRSATFMAALVASRCNPPLKDFYQRLISVGKPKMVALIAVARKLLTILNAILRDNRPWQSA

SEQ ID NO: 288736 - protein, 413 aa, unidentified
MTDESLSWFAAVDWGSEKHQACILDAKGDVAGEREFPHSGTGLTELCDWLLSVACDTSAVAVAIETPHGPVVDALLDRGFAVYAINPKQLDRLRDRFCVSGAKDDRRDARVSADGLRADRHLYRLVQVSDPAVIELREWSRLLEELQQERVRLCNRVRHQFWRYYPHLLDLTDDVGADWFLELWALAPTADKAGRLRETTIARLLKQHRIRRLNAETACRILRQPAIKVAAGVTEAAVLHLRSLFARLRVVNRERHQAERKLDELCTELSEKASEGQSGEPRDVAILKSLPGIGRVTLAALLAEASGPLSRRDYPALRTLSGVAPVTKRSGKSNIVVMRYAAHARLRNTVFHWARAAVQNDPKSSCRYAALRKRGHSHGRALRGVADRLLQVACILLQRQTMFDPDRCQPAAA

SEQ ID NO: 288737 - protein, 321 aa, unidentified
MTTVACAAGIDAGKTYLDVGIEPSGRRFRVDNAPDGIRRLVARLRREGPERVVIEAIGPYARPVTAALGAAGFAVGVVNPRRIKGYREAEGKRAKTDRLDAGLIARFALTMREPPRPLPSAEDQALKDLAARRRQLVEMIAMEKTRLKQAFEPMIAASHRTAIAGLAAERKRIEAELERRLAGNAALSRRYELLVSLPGFGPKVATTLIIDLPELGGADRRAIASLAGLAPHPSQSGTAPGRNQIGGGRPCVRAALYMASLAACRSDPRFRAAYQASRAEGKPAKVALIAMARKLLVIANTLVRQDRPYDPGFAADPGDRG

SEQ ID NO: 288738 - protein, 347 aa, unidentified
MKKSTDIKSIRVVGIDLGKTCFQLYGVDDQAKERLDKKLSRAQLGQFIAKLPPSLIGMEACATAHYWARQMREYGHDVKLIAPQFVKPYVKSNKNDRADAQAICEAVQRPHMRFVAIKEIEQQDIQSLHRIRSQVVANRTAVVNQIRGLLLEYGIVVPQGRRKVREGLSLIIEDAENGLTARFRGWLLDLYHELVHLDKRIAYLDGQIEISAKENERAQRLLSIPGIGPMIATALSAAIGDINHFKNGRELSAWLGLVPRQCSTGGRPRLLGISKRGDVYLRQLIIHGARAVVQRVDGKTDKRSRWIQQVLLRRNKNIAIVALANKTVRIAYAVLKHNTEYREAKAL

SEQ ID NO: 288739 - protein, 344 aa, unidentified
MNCNAISIDLAKNIFQVCGVNARTKTLFNKKIKRKALLKFMAGHPPTTVYMEACYSSNYWGRELQALGHTPKLIPAQHVTPFVRGNKNDHNDALAIIEASQRPHIRFVPIKTEHQQEICCLHRIRERLIQSKTAVSNQVRGLLSEFGVVFETGKAAFISGMDEFINDDAYSYRLRAMMNDQYQEYNGLLKRILSIETELSQFINSTPNGKILMSIPGIGVVIASAILGAIDKGQAFKSPREFAVWLGLTPQQYASGNVSKMGGITKRGDRYLRKQLIHGARSVVNNTRDKTDQLNVWIKKLRERKSYNQTSVATAHRLARIIWILLQRQELYVPQAVIKAQGNA

SEQ ID NO: 288740 - protein, 367 aa, unidentified
MGKVTEKAEKGKEIFCAIDLHQRSMLAGVAIGRGELSFRELGTDEAGVADLIGWLHGLERKTGGRVWVTYEASGCGFRLADALLEAGFEVSVLAPTRLPVSAKSRTSKTDKRDVIRLHEVLRGHVLAGNELPKVWIPPPELRDDRELVRRRLDLKDQQTRVKNQIHGLLRRYGLKRPAEVKTNWTQKHLRWLDQVAGDLGPGAGQLLRSLLREFSFFESETAELDRAVRELAETDRYRDQSRALTQIVGVGTLSAMVFLTEMGDLERFPNRRALANYTGLTPRCYESGEDDDHKGHISKQGPARLRKILNQAAWSVVRCNGQRREWFQTRKARGKSSKKLITAEMRRLAIYMWHVALDAKLGVAVGF

SEQ ID NO: 288741 - protein, 344 aa, unidentified
MQPQEYVGIDLHRRRSVIVRRSAEGETLEVTKVDNDDLLAFERAVTAAGEHPEVVLEACYGWYWATDLLEELGCKVHLAHPLGNNWGNRRVKNDTRDAEDLADLLRLGRLAEAWIAPPEVRELRELVRYRAKLVSLRTNCKLQVYAVLAKEGVYVPMTDLFGVSGSELLETCHLSTAYRTRVESLRDLIEVFDREITKLEADVRHELRGQVGYEAIQQIPGVGPLFASVFVAEIGDVTRFRSPAQLASWAGLTPKHHESDLTVHRGPITKQGSRLVRWAAVEAAQRQANGTKLRADFVRITAHHGDSAGARKIARVAVARKIVTLVYYGLRDGTIRSKAISEAA

SEQ ID NO: 288742 - protein, 359 aa, unidentified
MDDGSKGASRMTVGVDLGDRYSYLCFLDTESGEVLEESRVRTIPEAFQRRFGAERHLHIAIEVGTHSPWVSRLLEECGHEVLVANARKVRLIYGDKRKNDKLDAENLARLARLDPKLLYPLKHRDENSQAHLALIRSREALVGSRTQLINHVRGAVKSFGARLPKCSARSFHKKKVAEHLPKELTPALGPLLETIAELTERIREYERKLEEIAKEHYPETGILRQVGGVGTLTALSFVLILEDRSRFKKSRAVGAYLGLVPGEDRSGESDPQRRISKEGDEMLRRLMVSSAHYILGPFAHDSDLRRHGLKIAERGAKNAKKRAVVAVARKLSVLLHRLWVTGELYEPLYNTRRLGGEAA

SEQ ID NO: 288743 - protein, 422 aa, unidentified
MLGIGIDWAEEFHDIALGTQEKGVIDQFRIDHGPDGVAALIERALRLEADPAEIRVVLETRHGLLVEALIDAGFTVVPVNPDVVARRRGPARKKDDAEDARICCLLALDRHAALKTLIPHGALGGELRAIARDDDRATRDQRRLLNRLRADLQTTYPAALVLAGKDLGAPTVLRLLERWPTQPELAEASRDELVEFARLARHGWPGRFADRVQAALTAPSLPTRDYLVRAKAAGIRLAAVQLLALHQARHGWQARMAELLLGGPRTGRDHTVKDPDPGKAFPGGEIYLSMPGLGDLLAARIAGEIGEHITQFDHPSGLQCYAGSAPVTRRSGKSDFVVARRLAHNHYLGAAVHQWAFCSLTRSGWARQFYDGKIAAGKSHHAALRALSNRWLEVLWHCLTKGVLYDETVHVANRNRALGHAA

SEQ ID NO: 288744 - protein, 452 aa, unidentified
MQEGMDRRKGLSLECIELNAAGIDVGATEIFVAVPPDRDVQPVRRFPTFTADLRAMAAWLVRCRITTVAMESTGVYWIPPHEILEEAGIRICLVNSKHVKHVPGRKTDVQDCQWLQYLHSVGLLKASFRPDSQICAIRSLSRHRASLVESAAVHVQHMHKALTQMNLQIHHVLSDITGQSGMAIVEAIVAGQRDPAQLAALCHQQVRSSRETVIKSLAGNYRSEHLFTLRQSLISYKHYQALMADCDREIERLMRSLNGRIDPTRNGPVPPSDPRVQKRRKNQFHFQMSPELTRIFGVDLTAIPGISALTAHTLLAEIGPDLSRFPNVAAFASWLALCPANKKSGGKVLSSRTRKTNSRANCALRIAAQTLARSRSRLGCFYRSMRARLGGPQAITATAHKLARIVYHLLTTGQSYDETVFLEQDRKQAQRYEKRLRNQAKDLGFQLVPIPA

SEQ ID NO: 288745 - protein, 386 aa, unidentified
MQTPNDLSQSRIVLKQDTTLIAVIEMSLSSWLVAGIVPGVKRQPLKKLAVDESALLKLLNRWREEAEKAGHKIERIAVAFEAGRDGFWLARWLRARGIEAHVIHASSVAVSREHRRAKTDRLDTELLKRAFLGWLRGERDHCKMVAIPTIGDEDAKRPNRERESLVGEQTRIVNRMKAALSRLGIRGFNPKLKKAAERLEDLRTPEDEPIPPNTLAELRRDMERRRLVRSQIRDIEDARLERIEQAPGDGPHAMVRLLARVIGVGIETADMLVQEVLSRNLRDRRAVARYGGLTGSPDESGKKRREKGLARSGNARVRRGMIQLAWRFLMFQKDSALAHWFYARTKHAPQTRKTMIVALARKLLIALWRLVREGAIPEGIVLRPAL

SEQ ID NO: 288746 - protein, 482 aa, unidentified
MKKNNIYQNQSQQLLSLFEQAGNNIKVMCVPIDYAKKDHVVMFCNGYGDILRKPFSVKNSPQGVDYLTDQVMRSCRQRGISQKHVFFGGEQVGSFADNFVSTLRSQGWLVAGVNAYEAKTQRENLQASTDRLDLMGIAKSLLNRRANCAPAQSGIYLNMRTLVRHRRKLVEITTEVKNRIHTVVDRLFPGFLNESKSGITPFSKSSLWLMKERFSAGQIRRRKRSSLIEALRQRGTKKPEDTAVRLQQYASQVLNPPQDYVHMLQLSLAQHVKHFCCLQQSIGQLETEIALNLAQTQGAFLTSVRGIGIVLAAGVSAEIGNPFEQKPINNLVSYSGIIPRVKQTGGPQGKTKTGKVARRCNRILKDYVVRSASHLGLYGPADLKFDYQRRQAGAQHADFGMARRYVRMAMCLMRTSQIYLPSRLRKADCHMQDRADYYVMSWPQLRDKWQKSGALQTAFNADQPLGQWRKIVQQFYGIKLTL

SEQ ID NO: 288747 - protein, 424 aa, unidentified
MEVVFARCAGIDVHQRTAVVCRSTPGERRQAVMATRTYSTTTVALLALSDWLSANGCTNVALASTGDDGKPIHHLLEGSFAVWLLNAQHSKAVPGRKTDVQDAQWIAELLRHGLVRPSFIPPRHQRELRELTRHRTNFVQGRATLVNRIQQVLEGANITLASVVSDVSGVSGRAMLAAIVDGASDPAALAALARGRLRAKRTALAQARSGRVRPHHRFLLAALLAQLDAHEETIARFDDQIAQACVANEEEAIVALLDTIPGIGRGTAELLVAEIGTDMTKFPTAHHLAAWAGLAPGNHESAGRQRSGRTRKGNAWLRAALVAAAQSAARTKQSYLGAQYRRIAARRGAKRAILAVAHAMLVIAYHRIARREPYRERGADSCDRQQPAATANRLVRRRRQLGDDVALTTTPEPTPAAEALVGVT

SEQ ID NO: 288748 - protein, 420 aa, unidentified
MKNSVARKMKQVPEGYLIIGVDPHKKRHAAVAITHDFTLRDKFKFDNTREGLEGMINRTRLKMTDAGCRGIMFAIETGGHYWRNIAYFLDERGIPFRFINQYTLKRRREGKDLNRRKNDYRDSEVAAQLLCTGEFTESRIPQGVYAELRTAHNTYRRLVKERTRITNLIKSLLDSLFPEFVKVCKNPCGLTAATVLSTCAIPGVIAAMSEEEFIALSKATKRPQLKRNKLRAIHDVAKTSIGIKAGAESLAFEISFLIEKVELIKRQVSVVERRLIGLVDEAEEGKYLLSIRGLNYISVGGLLAELGCFRAYRSAKQMIKMAGSNPTESESGGKRKSRTPMSKQGRPVLRYCAWTAVVPMMRFNDDFRTWAKRLRERPVHANPLGGREILGAALNRLLRLAFALVKNRAYYGLPVAVPVI

SEQ ID NO: 288749 - protein, 340 aa, unidentified
MKLFGAIDLHSDNNVMVLIDEKDEVVYRKRLPNDLSMILEQLSPYHSRIEGMVVESTYNWYWLVDGLMEQGYKVHLANTAAIQQYNGLKYTDDDSDARWLAHLLRLGVLPVGYIYPRAERPVRDLLRKRSQLVRQRTTNLLSIQNLVTRNTGSSLSAKQIKGLDVQQVDELLPNGDLALAVKANLSVMSSADEQSEILERTVSQRVQLRPQFRFLKTVPGIGEILALTIMLETGEIRRFASVGNFASYCRCVGSQKISNGKKKGKGNTKNGNKYLAWAFVEAANFAIRYNSKIKSFYQRKKAKTKVVVAIKAVAHKLCRACYYILRDRVAFDVTKAFGQN

SEQ ID NO: 288750 - protein, 359 aa, unidentified
MKQTETRSLYLGKEVFVGIDVHKKTYAVVARVEREVVKKWTTVASPQGLAEQLLKYFKGARIHTVYETGFSGFVLHRTLVKQGINNIVVHAAGVEVAVNNRVKTDKRDAQKLAALLEAGRLKGIGIPSDVQEQRRILTRTREQLVGDRSRVKNRIRMKCHQMGLIDHDENHQMTHKLVKELLSRATSTELTIAIEAYWQIWKKLDEQIALIEKEINKQAQDDPNESTYRSSPGIGPLSSRILSNELGDMSQFNNERELFSYTGLTPCEYSSGENIRRGKISKQGNSRLRQVLVEAAWRGIKKDKALAEFFERLYPKTGKKRAIVAVARKLIGRIRAAFRKGVSYQLGYQNVKLPTAKIL

SEQ ID NO: 288751 - protein, 453 aa, unidentified
MPRLTTGDHPDLKMVNPNAAAIDIGSTMHMAAVNPSSCDMPVRAFGTFTQDLHDLADWFRSCGVTSVAMESTGVYWIPAFEILEARGFEVILVNARYAKNVPGRKTDVSDAGWLRQLHSYGLLRGSFRPEAEIATLRAYMRQRERLTEYAAAHIQHMQKALMEMNLQLHHVVSDITGATGMKIIRAIVAGERDPDVLADYRDVRCKSSPATIRAALVVNDRAEHVFALAQSFDLYDFYKAKTAECDQRLEAAVAALSVKGGDDLPPLPKARIKGRQVNAPAFDVRAALYGVLGTDLTQIHGLGPSLALKLVAECGTDLRAWKTAKHFTSWLCLAPGNKISGGKLLSSKTRRSSSRAAALLRLAATTIGRSDTALGAFYHRLSARIGKQKAVTATARKIAVLFYNAIRNGMTYQDQGAAAYDERHRQCVLANLQRRAKTLGYTLAPVLPEPAVS

SEQ ID NO: 288752 - protein, 296 aa, unidentified
MRPSAEKLLVSNDEAGIQALVKRLSELKPALIVLEATGGLERSVSGALGSAQLPVVVVNPRQVRDFAKATGQLAKTDRIDAAVLARFAEAMRPPLRPLPDKVSLELRALIARRRQLIEMMVSEKNRLSAASKAVRKRIEAHIRWLETELDRADKDLDHSIRQSPIWQEHEDLLRSAPGIGPVVSRTLLAELPELGRLNRKQIAALVGIAPLNCDSGTFRGRRGIWGGRATVRAVLYMAALVASRRNSVIRDFYKRLRGKGKAPKVALVACMRKLLTILNAMIKHKTRWSEIIPQTS

SEQ ID NO: 288753 - protein, 451 aa, unidentified
MAKAKKRKHRQLDRSLPVMRPNAGGIDIGSTEIFVAVPADRDPESVRSFPTFTQDLHELVDWLQRCRVDTVAMESTGVYWIPLFQILEARGIEVHLVNAQHVHHVPGRKSDVLDCQWLQYLHSVGLLRASFRPEQAVCEIRSLMRHRENLVQIACVHVQHMHKSLDQMNLQIHHVISDITGVTGLAIVDAIVAGETDPKELTKLRDRRIKASIETVGKSLVGDYRPEHIFTLKQSQTAYRYCQQLIADCDREIQTRIEKFQNTPADPSAPAESSNESPAPTDSSFNLRSHLERIFGVDLTRIPGFDVLRIQTLFSELGSDLSKFSTEDAFPSWLNLCPKDGFSAGRRIRGSRVKTKNRVTQTFRLAAQSLHNNQSYLGNYYRSQRARHGAPKAIKNTAHKLARIFYHLVTTRQPYDETVFAKLEARNQQHRLRKLQSLANQMGYSLVQATT

SEQ ID NO: 288754 - protein, 408 aa, unidentified
MNAVGIDVSKGRSTVAILRPMGEVVQPPEDVAHDAISLERLAYRILDLGEDTKVLMEATGRYHEAIAAELHEHGIFVSVVNPIVIHNYSADSSVRKVKNDQKDSIKIAKFCLDRWTELREYTPMDALRQQLKLFSRQYDLYMKTRVTLENNLISLTDKVFPGVNEIFKSPERADGHQKWVDFLTTFWHCECISRVSEKAFTERYQKWCKRLGYNFSAAKASDVYIESLGHIVTLPKNANTKLLIQTAAKEFTSTSELMATVKAEMVRLAKQLPEYDTVMAMYGVGDVTGPQLMAEIGDIRNYPRRSSIVAFAGIDPEVDDSGKKHSESNPSTKRGSPHLRKTLFQIMSTYLKLSPPDEPVYQFIDKKRAEGKPFYVYMTAGANKFLRIYYARVKECMVALETAVHVED

SEQ ID NO: 288755 - protein, 341 aa, unidentified
MSSLVCGLDVHKDSVFATVMSYGGEVIERRRLADKDEVVSFLGQYPIDKVAMESSTSIVPVYRALRGRGYKVLVSHPKKTRLIAESRIKTDRVDSWALTELMRLDALPLSYVPPDNIAALREKVRRRAFLVRMRSKLKVKIRSDLTINGLIPPSEYGLFSRKGMVWLHSLQSDAVDSYLPVLSTLTVQIEKLSKELRSMAPEDEDVRLLMTIPGVGYYSALLVKSEMGDIGRFPDGEKLCSYAGLVPSVSSSGGRTRRGSITKEGSRWLRWIMVESVRIHLKYDTSISRAYHAIAERKGSGVAKVAAARRLLMCCYSVLKNRQPYFDPAGHYQPSRSGRGE

SEQ ID NO: 288756 - protein, 346 aa, unidentified
MSYSTTVGVDLAKNVIQISVVSSRGKELSNRSLTRKKFAEFLGKQKPSLVAFESCASAHYWARAAQRHGHEARIIPAKAVAPFRQGHKTDSNDALAVAEAARRPNIKEAPMKTVEQQGLQAIHRSRELLIQECTALSNHLRGLLMEFGIVIPKGFASLLKAVPEILEDGENELPDLYRPTLHRMYSRLLELREDIEAMTKEVDRLAKAHPICSRLMALEGVGPIGALLLYATMGSGAAFSGSREFAAYLGLAPKQYSSGGKTNIVGLSKKIGNSRLRSVLILGARAYTYRLKEPKSLKDKWLKANIERNGECRAAIALANKNVRTAWAMVTQGTEYQRRVQLEMAA

SEQ ID NO: 288757 - protein, 312 aa, unidentified
MYYIGIDVSKKDLSVFDGKKDLIFINQEGLKSFKKYLKKKVNFSDLVIIFEPTGIYSLYLKEFCAENSIKAYIVNPKKSHNFTRALGKRSKTDKIDARTLYQFHKLIDAKDIKVPQIDQEAKALASYLVSYEFALKQRVSLSHHLESLRDKRLIDLMKKDLKRAKKLEDKIFNDIKEYLGKNQNLKEDYQRLSTIPGIGEKAAIALLTLFKTYQGTNRAQITALAGLDPVKRESGTSVKGKVKISKNGKWIYRKILYLPALCATVHHQKIRVFYQRLLAHHKPKKLAIIASMRKILLIAHAMYRDKTEYVTA

SEQ ID NO: 288758 - protein, 400 aa, unidentified
MTTITREVVGGVDTHADTHHAAVIDTAGRRLGDAEFPTTPAGYAALLAFLVSFGVLLRVGIEGTGSYGAGLARFLRGQDIELAEVIRPNRQVRRMRGKSDPIDAYAAAATALAEPDLPVPKTADGTVEAIRQLLVTRRSAVKARTAAQVQIKTLLITAPDPVRTKYRSMTDIALITALSRTRGSDDTTLDAALRALRSLARRHQHLTSEITDLDHALERLVTDTNPALAATKGVGTVTAAQLLVTAGDNPHRLRSEAAFAALCGVSPIPASSGKTTRHRLNQGGDRQANAALHRIALVRMSYEQRTRDYVARKRAEGRSTKEIIRCLKRAIAREIFTVLTTHIEIPRIDDLRPLRKSRGITLETAAQHFGVWPMKISTIERAKSRDDDFANTYRQWLLTA

SEQ ID NO: 288759 - protein, 367 aa, unidentified
MREDNTNWVGMDVHADKICVCVYRGKETKPYEEYEVNTDKRSIERLLKRLKGLQGEVRSIYEAGPCGYELQRYLAKNEITCEVVAPALIPKKSGDRVKTDRRDARNLGRLYRSGELTAIYIPDEKQEAVRDVLRSREDAVEDVRRKRHQLGKFLLRHGHRYRDGKQWTQRHAMWMKGIKFDDYSLKVVFEDYILALDQTEERVKRLTKEIEDMSKKPEQEKVIAALMVLRGVGIITAMTILSEIGDLRRYGRAKDFMAALGLVPSEYSSGNKVIRGSITKTGNVHVRRVLVESAWQYQHSPTVGKGIKARRAGKPPELLKIARKADVRLNRKFRKLVSRGKLTTIAAVATARELAGFVWAIGQQAHT

SEQ ID NO: 288760 - protein, 382 aa, unidentified
MQRVTRNERRFVGLDVHAETITVAIATKDGDVHSIGSIPNRPESIKRLVTKLDAGGAWTACYEAGPTGYALYWQLARMGKACTVIAPTLVPMKAGDRVKTDRRDAERLARCYRAGELTAVWVPDAPHEALRDLVRAREAAKQDQLRARHRLGKFLLRHGKRPPQKMRAWTQQYLEWIKREVKFEQCAQQATLEDYVNEVEHCALRIVRLEKTIDTAVEQAPESMREVIEALQALRGVAKVTAVTIVAEVGTLTRFERPRQLMGYSGAVSSEYSSGERTRRGGITKTGNAHLRRVIVEAAWSQRYKPLISRAARKRQEGLSAEVQEIATKARQRLHSRYVRLLGRGKSKQQVVTAVAREMLGFIWAIGVTVERSHVEKAKGVA

SEQ ID NO: 288761 - protein, 342 aa, unidentified
MSIVIVGIDLGKNSCSIVGLDSLGTVVVRRRLRRDSVIAFASKLPACIMAMEACCGVHHMGRSLAALGHEVRLMSPEYVRPYVKAQKNDDRDAEAIAEAATRPTMRFVELKSEEQLDVQTLHRVRDRLVGERTSLTNQIRSLLLERGHVVAQGHARLRHLLADLLDPATCSLSARMAFLLGDMRTRWDELDRRIAAFDAEFSAMARTDERARRLTSIPGIGALNATALVAAVGNAATFTKGRDLAAWLGLVPRQATTGGKPKLLGITKRGSRYLRKMLIQGARSAMPTLAKANTAIGAWLRALLVRTHPNIAVVALAAKMARTVWALLRHGRNYEAVPQAAG

SEQ ID NO: 288762 - protein, 374 aa, unidentified
MADYSEVFVGIDTSKLRNAVAIAEGGRNGEVRYLGEIDNTEAATSKLVKKLAAQHRRLTFCYEAGPTGYGLHRLIKTLGHECVVVAPSLIPKKPGDRVKTNRRDALNLAKLLRAGELTAVWVPDARHEAMRDLVRAREAAVDDLKSKRQQVLSLLLRLGRHFTGKRTWTRAHMNWLVSQKLVHREQRIAFEEMLLAVRQADERVIRLERAIAAAVPDWSLAAVVTALMAVRGLDLISATIFLAEIGDLSRFASPRQLMAYLGLVPGEESTGDRVWRGGITKAGNRRARRILVECSWSYRHPPRVGKKKLAKVEAAPPAVQEIAWKAQARLTARYRALARRGKRPTLVVTAIARELSGFIWAVSRSVGAPATPVR

SEQ ID NO: 288763 - protein, 409 aa, unidentified
MTRVIGLDIHRVFAEAVMLDAGKLVPLGKIGMTRQHLRAFAHTLTHDDHVVIEATGNAAAVSEVLAPHVGRVVIANPRQVRLIAEARIQTDTIDATVLARLYASGSLPEVWVPDERTLALRRQVTRRNQIVRQRARLKTMLQSILHAHLVPPCPFADLLGPKGRAWLLSQPLPPDETDAVARHVREHDRLSEDLRAVERELARDALASPDTKRLMTIPGIDLVVAIGLLAAVGPIRRFEGPDKLVSYLGLNPSVHQSGESRPRHGRITKQGRTHARTMLVEAAWQAVRGPGPLRAFYERIARRRGNHIAAVAVARKLAVIVWHILRRNEDYAWVRPALHAKKLRDLELRSGQPERRGQRGTAYSYNLSRVRREERRRAELAETAYRRQTEGWTRRPRKVPTGAAKEERR

SEQ ID NO: 288764 - protein, 417 aa, unidentified
MSTDVRFFVGIDWASETHQVCLVAADGKIIGERAFAHGGAGLAEMCDWLVTTSGEEPPKIAVAIEVPHGPIVEILLERRFQVDAVNPKQLDRFRDRFTVAGAKDDRRDAYVLGDALRTDRHCFRRLAVEDPVVIELREWSRMAEDLSQERNRLANRVREQLWRYYPQALELGDDLAADWFLDLWVLAPTPAKAVRLRESRVTSLLKAHRIRRLEAAEVLRILRQKPLVVASGTIEAATAHITAVAARLKLVNQQIKQAHRRLDELSDKLAEGREEDAPGQKSKQRDVTILRSLPGVGRIVLATLLGEAAEPLRKRDYHALRTLSGVAPVTRRSGKRCVVLMRQACDLRLRTAVYHWARVAIQHDVRSHARYAELRKRGHSHGRALRSVADRLLAVACAMLKSQTTFDPEHAVEAVAA

SEQ ID NO: 288765 - protein, 377 aa, unidentified
MREKLRFLGMDVHAETIAVAVAEPDGEVRSLGTIANREDSIRKFIRKLGSPEQLRACYEAGPTGFVLYWQLTQLGVKCDVVAPSLVPKKPGDKVKTDRRDALKLARSHRSDDLTAVWIPDEASEALRDLVRAREAAKRDQLRAQHRLTKFLLRTGRRPPLGVKVWTERHAEWLQQVRYAHPAQEATLLDCLHEVQHMAERVKRLEKSIVEVIQRAPASMQEVIRGLQALRGIAHLSAVTIAVELGNITSRFEGARDLMGYSGAFPNEDSSGKRIRRGGITKSGNAHLRRIVVESAWSYRHRPAIGARLRRRQEGLPAEITEIAWKAQNRLHKRYMTLMARGKDQRKTMTAVARELLGFIWAIGIKAEAMACKQQMAA

SEQ ID NO: 288766 - protein, 423 aa, unidentified
MNVVYPICCGVDVHKTFFVATLIITEGIVPKYRKRRFSTFNNQILEFKNWLLENNCRDVCMESTGKYWVPVYNLLEDSIHVTIANPKWVKTIKGNKDDTKDSKWIGDLFRIGLVPGSFIPSKDIRILREYTRYRFKLVSCKSSEKNRYQNVFTVCNVALDAVVSDMFGKSAISITDYIVNSDTFDPEHCTSLLQRSLKKKATEVIESIEGFQMAAPQKERAKMVKEHYDYLVYHIQKLNTAIDELSKPFEPAINLLCTIPGIKRDSAITVLSEIGADMSQFDSSKRLCRWAGLTPGNNESAGKKKSVRITRAGVYLKPALVEIAHAAIKSKATPYYRFKYERISKRRGKKRAIIAIARMILTAVFQMLTTGEVWNPTDLHQIDMPPQLREKEVHKSLCRAVKLLVAHGIVLPNTIQIPEAVPA

SEQ ID NO: 288767 - protein, 356 aa, unidentified
MSSKLNTAIAVAGIDIGKNSFHVIGLDKRGAIVLRQKWSRGQVEARLANTPPCLIGMEACVGAHHLSRKLQALGHDARLMPAKYVRPYSKGQKNDFRDAEAIAEAVQRPTMRFVATKTGDQLDLQALHRVRERLVGQRTGIINQIRAVLLERGVAVRQGLRFLRIELPGILAKRTDVLSPRMLHLIEGLADDWHRLDERIEALSSEIGALACGDPACDRLMTVPGIGPIISSATVAAIGNGAAFSKGRDFGAWLGLVPKQISTGDRTILGKISRRGNRYLRSLFVQAAWVVLVRVGPKHWDRYGLKSWIEAAKKRLHHNVLAIALANKLARIAWAVLNKERKFECIRTNKMSPRAA

SEQ ID NO: 288768 - protein, 340 aa, unidentified
MQYVGLDVHKEFCQASILNEKGFEEDNVRFPTTRRGLESFLERFEDASFVLESTGVWEFVYEIIEEKGFPVKLAHPLKVRAIAEASVKTDKVDARTLAKLLRLDMVPESYIPPKDIRDLRRLTRLRSYLTQTNTGLKNRTHAELLARGIRRPEDMVVPFAKKSQDWMRTLDIPGVDVQLNMISAVQGQIELVNEMIRKEFDRREEVRNLASIPGIGIYSALVIYAEIGDVRRFPDPEHLCSYAGLTPTVSQSASSVHYGGISKEGSKQLRWILTEAVHTHHRYEPGSNLSRFYDKIAKKRGKQKAAMAAARKLLHIIYWMMLNGEPYHGHGFNPVAKPAA

SEQ ID NO: 288769 - protein, 356 aa, unidentified
MEIVGAMDLHRRQITFKWQDLSTGEIKRGRIMPAARAAVREWLSQFEGRDAHVVLEATTGWRFVVEEMQRIGVTPHLAEPAETSLRRGPKRRAKTDDKDCDLMVDLLLQGRVPESWIPPEHILELRARVRLRKALLDERRVWQQRVQAQLYHQGIAPGSGLSTAKGRARLAEAELSSAGRQLITVGIAMLDACDLQMFPLDAHLISFAKAQPGCRALMGLFGVGHLTSATILAELGDCRRFSNSDDAVRYSGPDITVYESNGKRPPGHLSRQGPEVLRWALYEAAQSGARRTSPDHAYYLETRDRIDHNRACLAIARKLCRRAHHILKELGVAALQPVEVDIDPATASTGRVEVAA

SEQ ID NO: 288770 - protein, 333 aa, unidentified
MENFYFTGVNVSKKKLDFCVMFEGKVVHEEETANHQSAIMSLLHHFEEDYGIDNTRMPVCAEHTGQYTFPLACACKTVECKLWLENAAEIKYSSGVQGGGKNDKVDAKRIAIYASRFQDKVRYYEHPTEDIERLKQLESERTLYVTDLTKYKGQMKDQKDYMPKALYERKMKRLQALMDDLKEAIQAITDEMDEVTASCPVLFRQQELLMSIDDVGRVVATNMIIATEAFTRFDDPRKFNCYAGVAPFSYSSGSSQHSKARVSHRADKVMKRLLHLAAVAVTHRVGGELKKYYERKVAEGKNKMSVINALRAKIVARMFAVIKRNEKYKPILS

SEQ ID NO: 288771 - protein, 389 aa, unidentified
MRFYTKQHQFYCGIDLHARTMSLCILNQEGEMLVHRNMPAGPDPFLKTIAPYREHLVVCVACICTWYWLADLCAREGIPFVLGHALSRKAIHGGKAKNDNIDAQKMAVLLRGGMLPQAYVSPAALRATRDLLRRRMHLMRKRAALRAHIQHTHRQYNLPEIGKQLAYKANRDGVAARFPDPAVPKRLEVDLALIDHYDHLRRAVALAVRTTAKQHDAHPLSRRRTVPGIGEIRSLVLLYDIHDLQRCPRVQDFVSYGRLVKCAKASAGKRSGTSGTKIGNASRTWAFSEAAVLFLRAKPAGQKSLARFENKHGKGKALTICAHKLARAVYDMLQREGVFDLATFLQREGRSVGEPAASLGHDGRSRATVLSNDALPASTNAHEHRGPLP

SEQ ID NO: 288772 - protein, 347 aa, unidentified
MRFYTQQHAFYCGVDLHAKTMHVCVIDQSGETLVHRNLPSRPDYFLNAIGLYRKQLVVGVECMFAWYWLADLCTREDIPFVLGHALYMKAIHGGKTKNDKIDSHKIALLLRGGMLPLAYAYPNAMRATRDLLRRRMQLTRTRAEAMAHIQNSISQYNLPPLAKKLCFAANRQGVAEQFREESARRSVEVDLSLIDHLDGQVQAVELYLVRHAKIDDPLTYQVLQTVPGIGKILALVLLYEIHDIRRFADVGNFASYCRLVKCAHESAGKKCVGKGKKIGNANLKWAFSEAACLMLRELPQAESLVARKEKKFGKAKALSILAAKIGRGVYWMLKRKEAFDVNRFFNH

SEQ ID NO: 288773 - protein, 319 aa, unidentified
MTVSNQAERVIGVDVAKNRLDIADSQGKIRKTISNTAPAIKKAIVQKVKDGDSVFVVCEATGGYERGLVKTLQDAGISVAIANPRQVRQFASAMGRLEKSDPIDAEAICQFAQTAELPAAPVKTAEQEARDAVVRRREQVLEMIGQENNRLQQESDPKMKKTIERVLKTLKSLLKKLDAEVARFLAEEAKTNASVEVLMSVPGVGAVTTATLLCELPELGQLNRSEIAKLAGVAPIVHESGQSRGHRSVSGGRSNPALVEFHRRLVSRGKPQKVAIVACMRKLLTILNSMVRTKTMWRTKGEEKVMADQGPATTRAHGD

SEQ ID NO: 288774 - protein, 424 aa, unidentified
MKYVGIDIAKKFHIACVLDDTGTMIKKNYRINSELTDFDLLYQLLELIDKDKSQFLIGMEATGLLFENLYLFLQKLGYNVVLLNPYQTTKFREMDTMKYVKNDNIDSQMIAALLKSGRYSTGFVSEDIYQAIKSLYRHKATLMQEIKNAKRQVSTTLAVVFPEFEQIIKDPFSVSGMALLNKYPTAKHYKGASGDRILKVFRNIKGNNFNLDKANDLLDLAMTTIYQGNAKDERAYVILSNLRRISFLKEEIEACESQMFILLNESADAVSTSISKDEEVYIADLVDNLRSIVGVSDKTIFAVLSECGDITRFKSGQAFIGFLGLYPTLHQSGNTTKYGRLAKRGAKLAKMAIYQAAVACVRHNDELKKVYLDKKSSGRAPKECIIVVARKLAMIIYAIYKNNTPYNPARVFNTQALKSSAKNN

SEQ ID NO: 288775 - protein, 339 aa, unidentified
MSVIIGVDPHKASHTAVAIAGDEREVAKVTVRATCQQTAKLLAWAEPFGERTWAIESAGGLGYLLSQQLVDAGEHVLDVPPTLASRVRVLGTGRSEKNDPNDALSVAIAALRSRGLRRVERADHTEIMRLLAKRNHDLGRLRARLICRLHNALADLSPGGIAKELYVSDARRLLESFEPATPIEHMRHELALELVADVARLDEQIKESHRRIRTAVRASKTSLTELFGVGPVLACSVIGYSGDVGRFANRDCFAAYAGIAPVEHSSGGRVFHRLSLRGHRRLNNAIHMVAISQIRQPHSDGRAYFERKVAEGKTKREALRSLKRHVSNAIYRQLVLDAG

SEQ ID NO: 288776 - protein, 367 aa, unidentified
MAEITWSAVARVGVDLSKRVFQVHAVDRAGRVLLAKPMSPDRFFAWCAELPAGCLVAMEACGGAHHAARRLRLLGLDARLIAGHFVTPYRMAGRSGKNDANDAAAICEAAGRPHMRFVPIKSAQQQGQLSVHRLREGYKEERTTLINRIRGLLAEFGIAVAQSPEALRLALPALIEDASNEVPGIARLALQRAHLHWVDIDLQIAWCDERIAAHVRSDERATKAAQLLGIGPLTASALVATVDDFSQFKNARQFGAWLGLVPSQNSTGGKARLGRITKRGDDYLRTLLIQGAKSAVMTADKRQDRISQWLVQLKERVGWQKAVVALANKNARIVWAVLTRGLAFDPDHVPIAPHERVALDDAAAARP

SEQ ID NO: 288777 - protein, 371 aa, unidentified
MGNSTTTLFVGLDVHKDTIAVACAPEGRGAEVRVYGIIGTRQADIDKLIRKLQSKGHRLSFAYEAGPCGYVLYRYLTKKGFDCQVVAPSLIPKKPGDRVKTDRRDAQELARNLRAGDLTAVYVPRLEDEAIRDLARSRVDAIQDLNSARFRLKGFLLRHDVRYTGRANWGPAHLRWLGTVSCPSPVQQLVFQEYVRTVSERHDRVDRIDTELQEQVPGWRMYPVVEAVQAMRGVAFTVAVTVVSELGDLGRFRNPRQVASYLGLVPCEDSSGPRRRLGGITKAGNSHARRVLVEGAWAYRHPARISYQLQRRVERAPVFAQEIAWKAQVRLCKRYRRLVARGKHPNQVTIAIAREMAAFLWDIARQVPVEI

SEQ ID NO: 288778 - protein, 365 aa, unidentified
MKKSSTVAAASNKNFERKLTIGLDLGDRSSWYCVLDEAGEVISEQKVSTTPKAMREVFSAMPCSRIALETGMHSPWVSRLLSELGHEVIVAHARNVRLIGESRRKDDRLDARTLARLARIDPQLLSPVKHRSAQAQADLTVIRARASLVRARTALVNTARGLTKSYGERIRGCNPRNLDTEKAQALSPELQAALGPLLQALESLSERITEYNRQIEGIAQQSYPQTALLKQVKGVGTLIALTYMLTLEDPHRFRKSRDVGCYAGLQPGRRNSGQSEPQMHISKEGDPYLRTLLVQGAHHILGPFGADSDLRRWGLKLAERGGKAGKKRAIIATARKLAVLLHRLWVSGEVYEPLRNTKRTMSAAA

SEQ ID NO: 288779 - protein, 395 aa, unidentified
MKANELQVAVDVGARMHRVAVGNGSGQLVAEFDLEHTAAGFAGFFTRIERLRGRRSAPVAVAMEGFNGWARPLDRQVLDHGWKLYNVNNLKLARYKEIFPAPAKTDAIDARRILELFRLRGDLAVARGVLQEIVATTEEAERLKRLTRRRRQLVNEKVRVLNRMQSDLQAVCPGLLEITADAENLWFLSLLSAREDIRQLGGLRQTSLLALEGVGRAYCAKIQAWQREALFSHEAEWAGPMIVADARRVLTLKREIAALDQLIEPLIDECDSARLLRTIPGFGPTCSGELAGEIGAIERFGSEASLALYLGMAVLDHSSGTHTGTRRPRQVNTRAKAAMMIAVARHMEQVATSRAYYDKKRAQGKAHNQAVRALGRQLVRVIWSMLKHQRDYEVR

SEQ ID NO: 288780 - protein, 367 aa, unidentified
MKKISTAAAKPSRNISQQKLTVGLDLGDRNSWYCVVDEAGQIQLEQRVRTSAKALQEVFGAMPRSRIALETGTHSPWISRLLSELGHEVIVAHARKVRLIGESRKKDDRLDAQTLARLARIDPELLCPVKHRSAKAQADLTVIRARGGLVRARTGLVNTARGLAKSFGERLRGCNVRNMNPEKAESLSPELQRALEPLLSAIAELSERICEYNECIEALAQASYPQVALLKQIKGVGTLIALTFLLTLEDPHRFRKSRDVGCYLGLQPGRRNSGQSEPQMHISKEGDPYLRTLLVQGAQHILGPFGVDCDLRRWGLKLAERGGRNGKKRAIVATARKLAVLLHHLWVSGEVYEPLHNSGRTTVATAA

SEQ ID NO: 288781 - protein, 342 aa, unidentified
MSRYFGVDIHRNCFMVCTQLENGRQYISTQKLERLPQFVSRLRSDDEVAVEVTGNTRLFYDAVAPQVSRVVIVNPFQFEVIRRSVKKMDQHDARALPLFLSKDMLPEVRMKDQEHAEMASLTQPRDSLVKSRTALKNKVNNLLSARGVNLNKESLASEKGLDHVFGMCFGSTVDVKLQVLVEQIRSLNKSIAKLEQEISKQTPKLPGYDNLKSIKGIGDVGAGVLLSVIGDVNDFADEGKLAAYFGIVPRVSNSNDTERSGRITKRGSKMGRTVLVQCAMIAKRYSSYLSTYYECIKMRCGTGKAIIALARKFLGIIYRTLKDNIIWEDVPNGVIRETEGCT

SEQ ID NO: 288782 - protein, 354 aa, unidentified
MIIIGVDYHPEFQQIAWVDTETGELKEVRLHHPEEAERFYRELAEQGVQVRIGMEASGHARWLERLLAELQFELWIGDAAEIRTKRVRKQKTDRQDAQLILKLMLEDRFPRIWVPSSENRDLRQLLWHRHRMVQARTRIMNQLQAVAMNEGLRCKKKLWREPGRQQLESFQLGLWASRRRRDLLQLLDRLNPTIAELTQAIEREAEKCPEAERLRTHPGVGALTALGFVLILGNAERFRCGKQVASYLGLVPLEESSGNRRRLGHITKQGSSMLRFLLVEAAQVTVRSVPEWRSKYVHLMLRRGRKTAKVAMARRLAVRLYWMWRQGRNYEQLQKFGSHAGQPGNRDGVQAHIE

SEQ ID NO: 288783 - protein, 346 aa, unidentified
MCSLPVFVGMDYHDSFVRVVVQDTDGSEMGNADRTNHWKAIADFGDRFGRPVRAAIESCCGAADLAEELVSCAGWSVALAHPGYVQRMKQNPDKTDCQDAQLLADLERVGYLPRVWLAPRYIRELRHVVRYRLQLTEQRRATKLRLRALLREQRCHAPEGLNAWTKAWQHWVRQTAELSEQGRWLAEQHLDELARLAIRIHEVEKRLEHLTTNDVEVQRLQQQPGIGPVTAWTMRAEIGHFDRFRTGKQLARFCGLSPRNASSGQRQADAGLIRAANPALRTVLIEAAHRLVQYDPSWQKFAQRLRARGKPGSVVAAAVANRWMRRLYHEMKTPSGELAVAVGPAQ

SEQ ID NO: 288784 - protein, 412 aa, unidentified
MVKKECFIYVGIDLHKETHTAVILNCWNEKLGEITFDNKPSEFSKLTRKVNKYCNDGMEVVYGLENAYGYGRALAVWLIEKGYQVKDVNPALSYAQRKSVAMYQKSDSYAAGAVALALIVHLNKLPDAVLDDAYWTLKQLVNRRDNIKTHQTRLKNQLHEQLCVSYPSYKKFFSDISRQTALHFWETYPSADYLKGKTPEDLAKELRVVSHNNCSINKAKIILDSVRADGSIKRDYQEARDALTRSIVGDLKHYNKQLEDVEKAIENLYPVFGCTLMTMPGINITTATNILAEIGDINRFSNADKLAKFAGVAPVKFSSAGKGEDRASKQGNRRLQSIFYFLAIQMIQVTKNGTPRNAVFREYFIRRTQNGKNKQQVLICIARRLVNIIYGMLKTKTEYREPMLDESFLKNQ

SEQ ID NO: 288785 - protein, 331 aa, unidentified
MKFKETLGIDVSKKTIDVSLHLTSAVHKFDNSVKGFKSLLIWMKKQTGLSQDRVLICFEHTGLYSLPLAAFLTEQKAIYCIEPALQIKRSLGLVRGKNDIVDAKRIAEYAYLRREQLKPFELPSMKVLKLQKLLSLRERMVKQRAGYSASKTEYKLFLKQKDYESLFSIHNKMIHYLGKQIDAIEKEIITLIKSDEKMKVLYQLMVSIKGVGLVLSSNFLVSTNCFTAFKNSRKFACYAGIAPFQKQSGTSLNSKPRVSHYANKRLKTLLNLSASSAIQADPELKSYYQNRIKRGKSKMSTLNIVRNKIVNRIFAVVSRGTPYVPLYQHVA

SEQ ID NO: 288786 - protein, 419 aa, unidentified
MPPDRVPQPVRRFGTCTADLEALADWLLDCGITTVAMESTGVYWIPLFELLEARGLQVLLIDPRQAKRAPGRPTTDPLDCQWLQRLHAYGLLAGAFRPEDQVRVLRSSLRHRHMLITSAAQHMQHMHKALQQMHLKLTQVVSELTGGTGMAIIKAIVAGERAPMTLAKLRHPKCHHDADEIAKALQGTWRAEHLFALRQAVELYTFYHQQLAVCDQQIAAHLETFADKSAGQPLPPKARKRNKRKANEPTFEARPALYRMAGVDLTALEGIEEGTALVILSEIGTDMHRWPSVKHFCSWLGLCPQHKISGGQVLSRRVRPGAHRVAVALRLAARSLHHSQSALGAFFRRMKARLGTPKAITATAHTLARLVSHLLKHGSASVQQGLENYEAQYHERKVKTMAKQAKALGYTLVPLVAQG

SEQ ID NO: 288787 - protein, 398 aa, unidentified
MTESSDYESVQVFIGVDVGKDTHHAVAINRSGKRLFDKALPNDENKLRSLISDLKQHGQILLVVDQPATIGALPVAVARSEGVLVGYLPGLAMRRIADLHAGEAKTDARDAAIIAEAARTLPHALRTLKLADEQIAELSMLCGFDDDLAAQTTQASNRIRGLLTQIHPALERVLGPRLDHPAVLDLLQRYPSPEKLASLGEKKLAAQLCKLAPRLGKRLAADIAQALAEQTVVVPGTNAAAVVLPRLALQLITLRKQRDEVALAVEQRVLAHPLYPVLTSMPGVGVRTAARLLTEVACRAFASVAHLAAYAGLAPVTRRSGSSIRGEHPSRRGNKALKRALFLLAFAALRDPLSRAYYTRKMSQGKRHNQALIALARRRCDVLFAMMRDGTFYTPQAS

SEQ ID NO: 288788 - protein, 356 aa, unidentified
MNYIAFDSHKKYTLASVEDRNGNLLQEKRIEHTRGALREFLLQYEKGSPVAVETIGNWYWIVDEIEEAGMEPRLVNAGKAKKMIGSVNKTDSLDARGLNKLQRADVLPTVWIPPAELRDMRDLPRTRMIFTQERTKLKNRIHANLTKYRLELTGVSDAFGVKSMDKLNERISRLPVYTRYATERLLEQLWIVQTQIDQFEKLTKEVFKDSVELKRIMSIPGVGYILGTVILLEVGDVSRFAGAPQLASYSGCTPRIHASGDKVRFGKLRTDVNHYLKWAFTEAANVICTHKSHWAHRHAVRLYNRIADRKNHQKAIGAVARHLAEATYWMLRKEEDYKEPKSISEVIKGEISAALA

SEQ ID NO: 288789 - protein, 446 aa, unidentified
MTVHWYRVKKTYAKPQGGFLAIGPRYPGVLSDDGLVVLFTHWATHSGPRSYVRDSGMRRRAAGSRLQLNSHFRRKPMPTTTRHARTPALPQSMPVPPRVLYLALDLGQRHWTLAFTVGRGQRPRVRTIPGGDLARLTTELAAARRRFGLPPESPVVSCYEAGRDGFWVHRALLAHGVTNVVVDAASIEVPRRARRAKTDRLDARKLVTMLVRHAEGEREVWHVVHVPSEADEDRRHLERERQTLVAEHTGLVNRIQGLLATQGVVLTLRGDVPAQLAAVRRWDGTPLPPELRARLEREWARVTAVRAALRTLTARRHQRVTAATPAAADVPAVHLTRRLAALGAIGETTAWLLATEMFSWRAFRNRRQVGGFVGLTATPDQSGERVRELGLTRNGSVELRARVIELAWSWLRFQPGAPSVSGTGGAMAVGRPGCGGLGSSRWRGGC

SEQ ID NO: 288790 - protein, 338 aa, unidentified
MKVHVLGVDLAKNVFQLHGVDRKGRAILIRRVHRDQLLKLLGELEPCLIGIEASTGAFYWQRQFEKLGHNVKIMAPQYVKPFVRRQKNDTNDAEAICTALQQRNMRFVPKKTLEQQDIQALHRARQRLINHRTALISQMRGLLLDRGIAIAVAASRARRLIPKILATPNDELTPMMREILTSLYAFMVEIDNRVRDFDRKIDAIFKANTVCQRISKIRGIGPKTATALVAAIGDGSDFKNGRHLAAWLGLVPRQHSSGERRVMMGISKRGSQHLRTLLVHGARAVVRTAVRKTDSRSIWVNQLRQRRGYNRATVAVANKNARVVWAVLTSGEPYRSAA

SEQ ID NO: 288791 - protein, 400 aa, unidentified
MMTPDDIDVWVGLDVVKSAHHAHALDHDGNTLYDKPLKQDEKAIRTMLGKLSKHGRVLLVVDQPNTIGSLPLTVARNMGIAVAYLPGTAMRRTAQLLPGDAKTDRRDAHVIAWAALKLPETLRDAGPDDETLAALKLLAGHDEDLAHESTRHVNRLRSLLLQTHPAFERALKGERITRDATLALLERYGGPMGVKRAGIEDVKDWAKSNGLRAGRIIDDMFKAIGEQTVTVPGTLMAETIIPSIAHDIKTIRDRRREVGRQVEKLLEDHPLLTVLTSMPGIGVRTASNILLGIGGDIANFKSSAHLAAYAGISPVTGQSGTSIKGERPSRRGNKRLKNALWQTAFVASTKHPPSVAYYKRKREQGKHHNAAIICLARRRCDVIYSMLKNGTLYQEPALVA

SEQ ID NO: 288792 - protein, 346 aa, unidentified
MQMRITTIGLDIAKNVFQVHGVDAAGQVLIRQRLARRRVLVFFEKLEPCLVGIEACSTSHYWARELIARGHEVRLMPAQYVKPYVKRGKNDAADAEAICEAVTRPTMRFVPVKTPEQQSVMMLHRVRLMLNRQRTQLSNAIRAHLSEFGIVAPIGRRGIDQLLSIVADEKDRRVPADARLCLTMLAAQLTVVKEQILENDRRVRSSARATELGRRLMEVPGVGPLLASALTATISDPSAFQSGRDLAAWIGLVPKQSSSGGKERLGSISKAGNRYLRQMLVVGAMAVIRYAERHGTRRPWLVQLMQRRPAKVAAVALANKMARIIWALMMSGERYREPAAVGAKAA

SEQ ID NO: 288793 - protein, 391 aa, unidentified
MIYIGIDVAKDKHDCFITNSDGEVLFPVFTIQNNRNGFDDLFSKIQSFSSDVSNIKVGLEATGHYSYNLLGYLIDKGLPTFVINPLHTNLYRKSLSLRKTKTDKVDARTIAMMLMSDVNLKSYSDTSYHNEELKSLTRYRFDKVQERAQLKQSVSRLVTILFPELEKLVPSLHLASVYALLSELPSAREIASCHLTHLTKLLENASKGRYSRERAIEIREAARVSIGSNMPAKSLELRHTLRLIGELDSEITEIESEIKRIMDQIPSPILTIPGIGYRMGAMILAEIGDFSRFDSPDKILAYAGASPSTYQSGQMESSYSHMEKRGSRYLRYALINAAKYVCHWDETFGAYLQKKISEGKHYNVAITHATKKLVRLIYAMEKSGKPYIKMA

SEQ ID NO: 288794 - protein, 343 aa, unidentified
MDVSTIGLDIAKSVFQVHGIDAAGQVVVRRQLRRRQLLGFFEKLAPCLVGIEACATAHHWGREIAALGHEVRLMPAHYVKAYVKRGKNDATDAEAICEAVQRPTMRFVGLKSPKQQSLLMLHRTRELLVRQRTMLVNAIRGHMAEFGIVTRVGLPQLKELLAVIADRDDHRLPPDARACLESLGRQFLSLNEEICAADKRLQAWHRSSELSRRLATIPGIGPITASALVASITDPSAFRTGREMAAWIGLVPRQNSTGGKPRLGKISKQGDQYLRWLLVAGAMAVIRHAKRRGTANHPWLDDLIARRPTKVAAVALANKMARMAWALLSHGGAYRQPVITASL

SEQ ID NO: 288795 - protein, 451 aa, unidentified
MSSENMTLEVVNPNAAGIDIGSRSHWVAVGQNAEDVKEFGVYSEDHEALCQWLTKHKVTSIAMESTGTYWQNLFSSLVAHGFDVILVNGRQTKNIKGKKTDIKDCQWIQKLHCLGLLSSSFLPDSTTDIIRTYSRHRQNILQQSARTVLKMQKYLRLMNLRLDVVVKDIVGETGTKIISAFIAGERSGKKLAENRHYNCRKSEEEIAKALQFNGRADYVFALKHEWGTYLHLQQQLNEVDAQIKELLTDIIDKDDNKKQHVATQKTHKRKNKNTLRGTDMNQMAYQYFEGIDLMAIEGVNDATIMSIISEIGLEGIKKFETSKQFTAWLRLAPNNKISGGKVLNHHIPKGSSRLKIALRNAANAIGNLKEGHLSDFFKRICYKKGRTTAINATARKLAVIIWNMLVKEMPYESPTQYLFLDEKRKLGLVKRIKKQIAKFELQPDQLGFAIT

SEQ ID NO: 288796 - protein, 367 aa, unidentified
MKKGSTVAVKQSKNFSEQKLTIGLDLGDRSSWYCVLDEAGSIVLEQKLSTTPKAMKEVFGRMPRSRIALEIGTHSPWISRLLSELGHEVIVANARKVRLIGESRKKDDRLDAQTLARLARIDPELLYPVKHRSAQAQADLMMIRARAGLVRARTGLVNTARGLAKSYGERLRGCNVRNMNPEKAESLSPELQAALEPLLNAIESLSERIVEYHERIENLAQESYPQVALLKQIKGVGTLIALTFLLTLEDPHRFRKSRDVGCYLGLQPGRRNSGQSEPQLHISKEGDPYLRTLLVQGAQHILGPFGVDCDLRRWGLKLAERGGRNGKKRAIVATARKLAVLLHHLWVSGEVYEPLHNCSRTKVAAAA

SEQ ID NO: 288797 - protein, 417 aa, unidentified
MTHYAALIGIDWADTKHDICLIETTTGQREASILRHSAKTLDEWATALRLRFAGQPIAVCLEQSRGPLIFALMKYDFLTIYPINPSTLAKYREAFSPSGHKDDVTDAAYLAELLLHHREHLRAWQPDSEQTRTLGYLIEHRRRLIDDRTRISNRLTALLKLYFPQVLDWFPDLRTELVCEFLLRWPALETLHKVRRETLLKFFRQHHSVRVETLQKRVEAIKVSQPLTTDRAIIKASIVMCQALVAQLRSTLLAIKEFDTQIAAICEGHQDFALFKSLPGAGAVYAARLLVALGSDRERWSSADEVAQLSGIAPVIERSGKSCRVRWRYFCPKFLRQSFHEYAGESVRHSFWARAYYEQQRGKGKSHQAAVRALAFKWIRIIFRCWKTRCAYDEVKYLEGLRKKGSSLLNYAANHPA

SEQ ID NO: 288798 - protein, 409 aa, unidentified
MQVLCERCCGLDVHKATVAACVVVPGPSSAPTKEVRTFGTMTADLLALGDWLAANGVTHVAMESTGVYWRPIWNLLEDRFTLLLVNARHVKAVPGRKTDVRDCEWLADLLRHGLLKASFVPDRPQRELRELTRYRTTLVRERASAVNRLQKTLEGANIKLASVATDVTGLSARRMLAALVAGAADAGAMADLAQGRLRTKIPQLERALAGRFGAHQRFLLAEQLTHVDFLDERIGRLDAEIAERVAPFDDAATRLDGIPGVGRRTAEVLLAEIGTNMARFPTAAHVASWAGMCPGNDESAGQRRSGRTRRANPWLRTALVEAAHAAARTKNTYFCALYRRLSARRGKKRAAVAVGHAILLAAYHMLAEGTPYRDLGPAHFDERRREAVERRLVHRLQTLGYKVTLEPAA

SEQ ID NO: 288799 - protein, 445 aa, unidentified
MAHANRLSRGDVRRNARLDRLRRVVSRDHAVLAVDLADDTQVVVVCDHDSRVLARRTWRCRPWQLDRALRWGLAVACRHGFAGVVVACEPTGHRWRVVVEQASRLGLEAVCVQPLLVRRAREAEDFTRDKSDDKDALLIARLTTQLHCYLPERPTAAWARLRHLGNRRVEQLTLATAAQQRLRDLLECGWPAALEVTRHPLDSSTWRAAMTVGRCDPARIRRLGLARFARAVARELPRWGGRRRNLRILRALYAATGDDRGVTSQRAGSLERSALVLTDFKQALAALAEVEGRMAKVLAELGLAELVTSIRGVSVVGAAAILAETGDPTRFDDAKAVVKHAGLCPRDNASGAFAGKTTISGRGRPLLRLAAWRAVWGALPHNPVFAARYTHLTSRQRNRLSDGQARTAVAAALLRQLWVVCVNRTPWEPAVAGGTIRKEVTDPAA

SEQ ID NO: 288800 - protein, 370 aa, unidentified
MSEIIRIGMDTSKTVFQLHGVDAVEQPVLRRKLRRRAVVAFFAKLAPTKVGLEACGGAHYWARELKALGHEAVLLPPQYVKPYVRRGKNDAADAEAICEAMSRPRMRFVPAKTAEQTAAQMLIGVRDQLIRRRTQLTNAIRGYAAEFGLTAAKGLSHIEPLLARIENDQALPELAKELFATLRQDYARLKLQIREIHAKLAAWHRNNELSQRLAEVPTVGPIGACLLAIKVTDPHAFRSGRDFAAWIGLTPKDHSTAGKQRLGAITRAGDEALRQALVVGATAVVQQVRKGRGHPSAWLVDIVKRKPPKLAAVALANKNARVLWKLMVSGERYNPHRERGRFVPPTGSVASRSPRQGRFAPPSAVALSQP

SEQ ID NO: 288801 - protein, 430 aa, unidentified
MEEVDEQELHVERVAALDLGKAALEACVRVPHESKPGRRLQEVRGYATTTGALLELADWLHCWGVTRVVMESTSDYWKGVYWLLEAEGFECWLVNARDVKNVPGRPKTDRADAIWLAKIAERGMCRPSLVHPRPIRQLRDLTRYRRSLIQDRTREMQRAEKLLEDAQIKLSSVASDSFGVSGRAMLEALVAGQRDPKVLAQLAKARMRVKIAELEEALRGFFTDHHAAILRMMLDNIDRHSEQIAALDTKIQAAVAPFARQVAQLDEITGVGAIAAQELLAEVGVDMGRFPSHAHLVSWAKFCPQVHESAGKAKPKGRGRGNPWLAGTLGNIVATAARTDSFLGARYRRIAKRRGKQKAIVATGNSVLVIVYHLLGDPEARFGDLGADHYDARINKHRRARNLAAQLQAVTGQRIMIRNGKAVIVEPEAA

SEQ ID NO: 288802 - protein, 455 aa, unidentified
MAKVRRKIGITKDREFKVVNFNAAGVDVSPKELQVCVPSDRDEKCNRTFGVYTKDLHAISSWLKKCGIDTVVMESTGVYWLPLFRVLKSDGFEVMLVNPKDAKNYAGKKTDEADAHWLMVLHTYGLLKPCFQPENITRQIRTLSRHRDNLIRSSSREVLHLQKEMEQMNLKIDNAFSDILGKSGQAIIKAILEGERDPEKLAALADRRCKKSKEEIMHSLEATWDEDHLFVMKQCQDLYEYYKKQIAEVEAEINRLVSQYTAQVDTEKAGKMERSKKQKQLHNEVSFDIEQHAFGLWGVNVMRMPAMSKNSLLRLVAELGADFTEKFPDARHFQSWANLVPDHKKSGGQLLSSRVPKRKNPVGQVFRQCANALCRSKEPLGDRFRQIKSRSGHKQAMVAVGKTLAGMFYTMVKEKKEYDATIYSKHRKQVLDRSIERLQAKILRLQNESAVCAYS

SEQ ID NO: 288803 - protein, 347 aa, unidentified
MAITVLGIDLGKNSCSVAGFDETGRVVLRRRLTRDGVVRLGAKLPACTMAMEACCGAHHLGHVLREQGHEVRLMSPEYVQPYVKAQKNYERDAEAMAEAATRATMRFVELKSEAQLDAQILHRARTRLVEQRTALINQLRAVLLERGIVVAKGRQQLQRFLTEMLDPAIEPPSTLSPRTRLLIEDMRLEGGELDRRIAALTTEFVARAREDQAARRLVSIPGFGALNATALVAAIGTGETFRSGRDLAAWLGLVPRQATTGGKPRLHGITKRGNTYLRTLLIHGARAALPSLSADQTLIGGWLRGLVGRAHKNKIVVALAGKLARIAWAVLRSGEGYAARVSQPVAA

SEQ ID NO: 288804 - protein, 347 aa, unidentified
MNIIGCDFHARSQQISMADTETGEIVEKELDHENGEVRKFYAGLPEPALVGIESTSYTRWFAEMLTELGHELVVGDAAKIRAKETRKQKHDRRDAEHILNLLVKGDFPKIWLPSAEERDVRVLIEHRHQLVQLRTRAMNGLQAVALNYGLRLRRRLWTKAGEEKLQKLPLREGPGRRRADLLALVAQLNAWVKELDPRIAEEVTRRPDAQLLLTHPGVGDLTALTTVLVLGPVERFPGTGQVTSYVGVIPEEQSSAGRQRFGHLTKQGNRLLRFLLVEAAQTACRFDPGLQRTYRRLVFRKGTAIAKVAVARKLLIRLYIMLRDKIDYQEFCRRGSHAGMLGDVALV

SEQ ID NO: 288805 - protein, 465 aa, unidentified
MAARKQKRMSAQVVEDEDYQLRYEVAAGIDVAKDSAVVCVRMPPAAGRKHRTSHLQTVPATVPAIGELAAELTALGVQMVSMEATSDYWRIWFAVLEEAGLAVQLVSSSQARNLPGRPKTDKEDARWIARLTEMGMLRSSFVPPPEIRALRVYTRHIWDLTADRTRYWQRLEKLLEDALCKLTSVISRLAGHQTARAVIEAMIAGERDPRTLAALGQGKMRNEKLPALAGALSGMRFGPQHAHAAASLLRSIDLLEAELRDLQERVTAHLAAIPGSWGVDADGVTGPGAGCAADAAALPAAERLDEIPGLGREAAMALIAEIGLDMSRFPTPQALVSWAGLTPAARQSGPRKGRGKKGHGNTYAKRIAVLAAYAAANTDTFLGERFRRLGSRPGGGGRKKAGCAVGRSILIIVWHLLNDPAARYRDLGSDWHARHTDRSRKARNARRQLEALGYDVIITLREDAA

SEQ ID NO: 288806 - protein, 426 aa, unidentified
MEDKTDRRWAGIDWGDHEHYLVVVEANGHPILCRPIEHSPEGLDDLVITLRGHGPIAAVAIDRKSHLLIDKLLEAGFPVYPINPKVAKTWREILKVDPPKSDAADGFSLAYNIRLFQEHFHLLRPDDPRTRELRMLCKEEKDEIDERTAKANQLKDCLKHYYPEALAWFKKFTTTTAADFILAFPTHEALGRASDNKLRKFLHAHCVGLSPIWKERLANRNSGARWPHDEATVAAKSLRAKSLARQIKTQNAMLDQYRKRIEALFGEHPDAAIFLSLPGAAAKLAPRALTYFGTDRTRYEDAGPLQALSGTVPVGNQSGKSDHPKFRWACQKGFRNTMFLIALGSIERSVWARAFYDRAREREQSHPKALRNLAAKWLKIAYRMWCDNTLYDEATYLDSLAKHNSPLVAYIRTSEKCGELMEKLLT

SEQ ID NO: 288807 - protein, 285 aa, unidentified
MEEVVVIGIDLAKSVFQVHGIDAQGKLVLRQRLSRAKLLPFFAKLPSCLIGMDSCASANHWARERIALGHEIRLMPPQYVKPYVKRSKNDASDAEAICEAVTWATMRFVGVKSPEQQSVLVLHRTRLILSRQRTPIGNAVRAHLAEFGIVAPVGPQGLDRLFAVIANSSDTRVPAAARTCLAMLVDQYQLILAHLLEADRAIRTDSRATELGKRLQEIPGVGPLVASALVATVPDARVFRSGHSLSAWLGLVPRQHSSGGKERLGGITKAGDTYLRRMLFVGAWR

SEQ ID NO: 288808 - protein, 370 aa, unidentified
MASMPPQLDPVSRVVVAGIDTHKDLHVAAVVDTDGVVLGTESFSTTRAGYRAMVRWMRTFGDVRKVGVEGTGSYGAGITRHLTEAGIEVLEVDRPDRADRRRRGKSDTLDAEAAALAALAGRRTSIPKRKDGLVESLRVLRLTRATAIRSRTKALQLLRMHVISAPEELGDQVRNLTRMQLLRTCACWRPDTIGFRDPVVATRIALKSLARRILELNDEIATLDELINPLVAELAPRLLARPCIGVEIAGQILVTLGDNPARIRTEAGFAMLCGVAPLPASSGKTQRHRLNRGGDRQANSALHLIVVTRMRVDPRTKAYVTRRIAEGHSKLEIIRCLIGGVSGCGPVRAGSCSRYVSGGRPRCLATRWPV

SEQ ID NO: 288809 - protein, 372 aa, unidentified
MRLLFRRTTELQINFIILMMFIGVDVHKDTHTAVGLSPFGEKIFEMKIGNETEDFVSLVEKTKVEANKIGLIPSFGLEDVHSWGERLSAFLVEVGLPVRAVTPILVDRRRSKTTHPEKSDSLDAQGVAEVMIQKIDTLPVYNLTEEAQKAKQIRELSLEREWLVKERARLKNQLHILLHRIHNTGYRMKFKDPFSKKALRYWMRGVPKNTDIILEQRMKRAVRRLLDLWEEIQEIEEELETMMKENKQTLSTASGCGVVIAAEIVGEVGDINRFHSPGALAKYAGCAPREHSSGKTIRWRKTRSGNRRLNRAFHRMALSQISRSGNDAARVYFKRKISEGKSKSQALVCLRRQMVNIIWMMLKRKTIYRTDL

SEQ ID NO: 288810 - protein, 405 aa, unidentified
MAFPQAAALGWRAPELEAGVLLLVGDDWAEDHHDVELMGAGGATLARARVPEGAAGMARLHAMIGAQLGEGTDAEVRIGIETDRGLWVTALVAAGYQVFGINPRSVARYRERHGVSGAQSDTADAHVLADMVRTDAHQLRAVAADSPGAQAVKVVARAHKTLIWERTRQADRLRHQLRDYFPAALAAYGDLGLDSADVLELLAKAPDPASAARLTTAQISAALKRAHRHNITAKTAAIRAALRSPQLAQPAPVTDAGAAVVRALAAVLTTLSQQITALERQVQAHFRAHPDAEIILSQPGLGLILGARVLAEFGDDPHRYATAKARKNYASTSPITRQSGKTSYILARHVHNDRLATPWPGRPSAPSPPHPAPAPTTTSSEPAKPATTPRCGNWPTGSSASCTAA

SEQ ID NO: 288811 - protein, 353 aa, unidentified
MNCTYYIGVDVHSNNIEMAVRHKGQVRQRFALPTSIPAVATAIDSFNGPKMMAIEEGPMAGWLYRNLLKKVDKFIVSEPRRNKLISSDGDHDDKIDSAKLAMLLEGGFLKEVYHSDDVKKAEFKQWVNLYHDRVKDAVRSINKIRAVGRMQGIKIPRSVIIKPENRSKWLNQIGQKSLSDQLNMLFIGYDAAAQQTHLAKQQLICFGKNYPIIKIWQQIVGVGLIRATTLFAYLDTPFRFRKKSKLWKYCGVGLMRTTSGKDNKGIPKPAKLQLPWNCSRVLKNVVLGASLSAIRQKDNIFRADYERMIKNGIIASNARHTVARKMLTAMWGIWKSSYQNGTVRFCQGKITAD

SEQ ID NO: 288812 - protein, 348 aa, unidentified
MRFYTKTHKHYCGIDLHAKKMFVCILDADGAVLLHRNIATSPEDFLKVIAPFREDLVVGVECMFAWYWLADLCSREKIEFVLGHALYMKAVHGGKVKNDKIDSHKIAGLLRGGMFPMAYVYPPEMRATRDLLRRRNFMVRRRADLFGHVHNTAIQYNLPEIGGRIAIESNRIGIDEHFPDPEVRKIVQFDLAMIDAYDDVIGILEQDMETTARRHDWHTLLLLRSIHGIGRILALVMLYEIHDINRFKSVQDFASYCRLVKCPHESAGKKKGTGGAKIGNAHLKWAFSEAAVSFLRHNASGKQLVEKLAKKHGKGKALSILAHKLARAIYYMLKNNTPFNLEKFMATA

SEQ ID NO: 288813 - protein, 345 aa, unidentified
MPIVGGLDIHRKQITFDYLDTATGEVGRGQIAPADRAHLRAWLARFAGRDDAAFALEGCTGWRYVAEELAAAGVTAHVAEPADTAFARGRKRHAKTDKTDSRHLRVLLEQGRLPECWIPPAQILECRALLEAYHDLRREHTAWIERIHAVFFHQGAPRLGEGALRTEHGLAALRQAAAVHLSPAGQLQVATALDMLAAIEARMDTLRQQLLHAARHLAGARALQARLYGVGPLAGLAMTCWLGGAGRFSSSRKAVRFAGLDVTVYSSDGKRSPGHLSRQGPEILRWVAYEAGKTHGRASAPGHDYYAAVKDRTDGKIAAPSQARKLIRQACHILAELGDDALTAA

SEQ ID NO: 288814 - protein, 345 aa, unidentified
MQPMYYIGLDVHKQKISYCVKDGPGKIHDEGWIPATRFDLDRWMKRLPQPWSAALEATMFSGWIYDHLKPHAAALKVAHPLMLRAIAAAKKKNDRIDANKICDCLRCDFLPECYMAPTAIRERRRTLRYRNLLVRQMVQMKMKISTLLMEAGVSYNKQKLHKAGYFRELLATNPDIPEGLHPLLRLCREMVVRLGKTESALIHSLQQDRLLTERVERLMSIPAIGPITALTWALEIGEVQRFSSIKKAISYCGLCGDEQRSANSVQRTPISKQRNKHLQTTLIEAAKMAPRYSPTLALLYDREKQKGNANRATLAVARKLVAYLMAVDRGQCHFLVIDQETRTAA

SEQ ID NO: 288815 - protein, 367 aa, unidentified
MEKSSTAFVGMDVHKESVDIAIADGREARLFGRVGGDAAAVERAVRKIRSVHRSPMFVYEAGPCGFWLYRRLAAQGLRCMVVSPSMTPRRAGDRVKTDRRDALQLARLARAGELAPIYVPDARDEAIRDLVRAREDAVCMQRQARQRLQALLLRNEIRYVGKSAWTQAHRRWIAHLKLPDPAQQIAFEEYVQAVEEAGRRLERLQGAIAAQLEHWRWRPVIEALQALRGVSAIHGVRIIAELGDLTRFESPRRLMGYLGLTPSEDSSGPRRRQGGITKAGNSSARRALIEAAWAYAHPARVSWVIARRHTGLAKSVTDLAWKAQLRLCSRFRRLAARRLPRNKVVVAIARELSGFVWAIARQVKPLA

SEQ ID NO: 288816 - protein, 412 aa, unidentified
MKDLLEISCGLDVHKEKIVACILTGPLGKPTRSEIREFSTLIPDMIALRHWIVSKNCHHVAMESTGIYWMPIYEILEDAFSGDITLLVVNARHMKNVPGKKTDMRDSEWISTLLRAGLLNGSFIPQKRIREFRDLNRYRKSVIRDITSQKNRIEKFLQSSGFRLSSFISDIFGASGRNIILHLIEHGQIDKTTLDSCLKTKTRKHIDEILMSVNGTLSEHQKTFLKILMTHYDSLKKHLAEIETSLEEDMDPFALQVEQLNSIYGISTTASCAIIAEIGIDMKPFKTAEHICSWAGLCPGNNESAGKRKSTSVTKGNPYIKSMLCEIAWVIAGKRNTYLSAWYWRIKQKKGAKKAIVALARKLLVIIYTMLKQGTLFDESCFETRRKHCEQKQLSRYIRELEKHGYHVKAQS

SEQ ID NO: 288817 - protein, 336 aa, unidentified
MVQIYGIDLGMSSFDVSFFSVSGQLCHLSGVKNTISGISKFLLSLPSDAVLCAEHTGVYGDLLLRLCTLNCIRLCFVPGYQIKHSLGLRRGKSDPLDACRIREYAERFYDLLKPCFYPSEEMSELQELHRTRSFLVESRKRLSTLDMGDNCKSSVSLAAIRARRSVLAELDTQISRLDHEIETLIQTSSEFSRNYQLLTSIIGVGPVTGCELIIKTENFRKLDTAKKCAAYAGIAPYPKESGKMKCGHQISPMGDKQLKTLLFLCARSAKDHNKEIRLYFLKKYEVEKKHFFVVMNNIANKLLRLIYSLIHKQQPYDRDYIQRDPRCVVISDAHRY

SEQ ID NO: 288818 - protein, 411 aa, unidentified
MEQIHDRVAGLDVHRDQVTVCVRVPGPRGGVQTEKARFGTTTGGLAALAEWLAGYAVTLAAMEATGVYWKPVYYALEDRFAVWLCNARHVKNVPGRKTDMSDAEWLADVAAHGMVRPSFVPPPPIRELRELTRYRKTQIDVRAAEIARLEKVLQDAGIKLTSVASKVLTQSGRAMVEALIAGERDPAALAGLAKGKLRPKIPQLTEALRGHFGAHHAIVAARILAHLDFLDDTIAELDREVGARVAGRYQQAARLLAEVPGLERRSVEVIIAETGADMSCFPSPAHLASWAGLCPGNHESAGKRRRVATTQGNQWLRRTMIESARAAARTRDSYFCAQYRQIARRRGPNKAAVAVAHSLLDVIWHMLTTGEVFADLGADYFTSRHDEEHQTLRLVSQLEKLGYTVELVPTA

SEQ ID NO: 288819 - protein, 380 aa, unidentified
MEYCTTIGADVSDRTTKICVMTKAEGGERRIVVETTCATTKAGFEEALSKFDRSWPVVFETGTHCRWMDRLFKEMGFKTIVGNPGKIPSITKSNTKNDRNDARELARLAIADPAMLHQVFLRDEVYQQMLRFHHARNVLLSQRTQTINQIRGFAKSMGYRIECSSTEKFHELGKADWPRELEECAWPLMGVLKTVNLKIKAYDRLIERLAERPEFKPMVERVRVVYGVGVIGSTVFVAAIGGRPDRFDHTRDIGAYLGMIPKQDQSGDDDKQLHITHAGADIVRTALVECAGVAMMSNAKDTDLKLKGLRIAMRGGRIARKKAKVAVARGLAVTMLALLQHPEREYVPLSEDGKKGFERYRAELEYLTMQKASRKEKKVA

SEQ ID NO: 288820 - protein, 475 aa, unidentified
MTNNRGPDGHDTPMLGHETLYVGIDIGKTTHVAGFISPTLLARHQRFEHCPALTFANSREGFRSLVDRVQSYVPLTQVYVVLEITGHYHRALQQYLQELDVPVYAIHVQKRQAGLLKTDKRDALGLANHLYNHLEKGIQVADPMQAVRQLAPPTEAAAGLRGMVRHRSELIGESTQRKNKLTAIGDELFPELTQVLRNPNSPTALALRAKFPTPQAFATASLADLHETKGYTRLLTDAKLLELQRLATQSIGTKDQARLRGLVFEQEQLMQELALIEHHLEQLEVQMTQVVEHSREGQILTSIPPIGPIQAATIIAMIGNIANFERPAQLKSYFGWAPAISQSGSTLDHVHLSPRGTRLMKQTLYLIVWQAIRHKDCEWARIYERLVPIKCSYDERTRRHTGRGKVIGRIAGQIVSVIYALLKKDQETLSTLSPGMKPPAPVLYDPEVHRRHREGHYRAPASKEEHNVLVRLPSH

SEQ ID NO: 288821 - protein, 356 aa, unidentified
MNNVSRLDFTGQQIYVGMDVHKKSWSISIFTDQFEHKTFSQPPEVGVLVNYLKHNFPGAAYKSVYEAGFSGFWIHDSLREQGVECIVVNPADVPTKDKERATKTDRVDCRKLARSLRNDEIEGIYVPPRPKAEDRSLLRTRHGMVKKQTRCKNQIKSILCFYGINIPDELATSHWSKRFINWIDSVRMERASGNLALKVHLSELTHIRQTIAELNRAIRALANTEDYRNNVRILKTVPGISILTAMTLLTELYDISRFKTLDKLCSYVGLIPNTDSSGEKDHKTGMTGRRNAQLRVILIESAWTAVRKDPALMMAFDELCKHMTKTKAIVRIARKLLNRIRYVLKNQQEYVPAIVQ

SEQ ID NO: 288822 - protein, 464 aa, unidentified
MGTCHGKKVAARGQAKEGLFEVINPAAAGIDVGALEMWVCVPGENEQERVRKFGTDTMELEALAAWLLQRGVKTVALESTSVYWIPLFQVLENHGLDACLVNARHVKNVPGRRKTDRLDCRWLQKLHACGLLSASFRPTAEICRLRTCMRHRATLIQEQSAQIQRMQKAMRKMNVQLDAAVSDVTGVSGTRIMDAIVAGQHDPATLAQMADPRVRKSPEQIARCLQGDYRPEHLFVLRQALAAYRFFLEQIQDCDREVERYTSELEKAAGRADTALPAASAETRKRKAGNVPEYDVQTHLYRLAGVDLTRIPGIGELSAQGLISETGLDMSRWQTHKHFASWLDLCPSPKVSGGRVIGQGRRHASNRAAQIFRQAASSLKNSQSWLGSFYRRMRVRIGAAPAVKATAHKLALIYYHVLSTHTEYRQIEAQQYDQRLRERTICNLQRRARQMGMDLVPAEAPAVT

SEQ ID NO: 288823 - protein, 342 aa, unidentified
MQIAILGIDLGKNSCSVVGLDVAGRVVLRRRLRREGVIKLAAGMPGCVIAMEACCGAHHLGRLLREHGHQVRLMSPEYVRPYVKAQKNDDRDAEAIAEAATRPTMRFVELKSEAQLDMQSLHRARDRLVGERTALINQLRAVLLERGIVVPQGRRKLERYVDALLAEEEIRFSPRTRLLVEDLRAEWRELDRRISAFDDEFAAQARTDETARLLTSIPGIGPLNATALTAAIGNAQTFGRGRDLAAWLGLVPKQVTTGGKPKLLGISKRGNGYLRKMLIHGARAALPTLSKGETPLGAWLRGLLGRAHVNTVVVALAAKLARIAWAVIRSGKKFDMKAATAS

SEQ ID NO: 288824 - protein, 480 aa, unidentified
MNVKARRTKKQVNVENQAIMLLSKEELDRKIEVIKKELRSYTWRDLETNGKFAKNDKLSFITDDMLIAGCDIGSETHYIRAIDVRGRELSSGAFEFSNTSEGFANAKAWVLALAAKNDKKQIVLGLEPTGHYWFALAAWMISNGISVVQVNPYAVKQSKEIEDNSQLKDDRKDPKLIANLVKDGTYGMSYLPEKVYADMRRLSMFRDQLTEDRIRNINRLHRELKIYFPEYMDAFGKIDGAFTLEVLKISAISSDITALGAEGIKNIWHNVKLRGRGYSRANEIVSYAEKSVGLTDGTDAGREAVKWYAEQILRLDEQLAEIESALHEKCREIPYAENILAINGVGENILAGILAEMGDISRFDDVKEIQKLSGMGLVACSSGKHKGQTKISHRGRKRLRYWLFQAAKSAVSHADEFKQLHEYYTTRSNNPLKKMQSLVVIACKILRVIYTILKTGTTYDSQKLLKDIKHPAASQAPMAA

SEQ ID NO: 288825 - protein, 319 aa, unidentified
MDATAQDANTYVGIDVSKDQLDVHIHPAGEAFSVSRNQAGLEELIERLKAYALKAVAVEASGGFEAIVIASFVAVGLPVLRVNPAQVRAFANALGKRAKTDPIDAAVIARFVEATKPEIRPLPSAQTLALADLIARRRQIVQMITAEHQRAMRSTANARLQKSIARLLKALQRELDSLDDDIDASVRGSPVWREKEDLLSSVPGVGKVIARTLLAELPELGTLDRRQIAALVGLAPFTRRSGKWRGKSFIGGGRTSCRTILFIGALVAAKHNPDLKAFHQRLIDAGKLKMVAIVAVARKLLTILNAIIRDKSPWTPKTV

SEQ ID NO: 288826 - protein, 371 aa, unidentified
MKTYILKAAPTACAVEQKNEKRPKAKQILLGADTHLRGYQVGRKIDHAVVGVVENFRSEDALLLFAQKQLERAERVVVVYEAGPFGYSLYRKLKALGVECYVCAPDSSEQQRKRRKNNRIDARNLTSKLFNYLNGDQSALQMVRVPSEEQEQRRLVSRQHDQLVEERKRLGAKGNAMLLSQGFGSWSNWWRPKTWARLNSLVPAWLLERLQIWVDVLKMLDEKICQAKVGLARGCSGPRPKGVGALSQMQLRSEVLDWHFYSNRRKIACLAGMVPSEWSTGEKERRGSITKVGVPAIRRIIVEMVWRMVLFQPQYKPVQKWQEVLRGRNPALKKKAVVAIGRQLMVDLWRLETGRVTAQELNLVMIDAEGV

SEQ ID NO: 288827 - protein, 331 aa, unidentified
MKIKQTIGIDISKLTFDVRVHSNQMYLVLDNKPDGFKKLIKWVNKHNTFAESETLYIFEHTGLYSHQLAVFLTEQNIPFALVPGLEVKRSLGISRGKDDKIDAKKLAKYAYEKRDSIQAYDMPSEQIMSLKQLLSLRVRLVKQRAGYKACLNEQKRVLKRKGNIVLFDSQEKLIKYLDKQIMSIEKEMNDIVNKSGSLKIIFELITSIKSVGPQTALFIMVYTNAFTKFSSWRKFASFVGTAPFPNSSGTSIRGKTKVSNLAYKKIKGLLDLCAKSAIQHNVEMKTYYEKRLGEGKNKMSTINIIRNKILARIFAVANRGTPYVDTMKYAA

SEQ ID NO: 288828 - protein, 336 aa, unidentified
MTIIRIGLDTSKHVFQIHGVDENEKPVLRRQLRRSEVEKFFAQLPPTRIGIEACGASHHWARLLRGLGHAVLLMPPQYIKGYVKRGKNDAIDAEAICEAMSRPTMRFVPVKTAEQQAALTMLGVRDLLVKQRTMLINALRGHAAEFGVTAAKGPNKIVELLQRLATGEGVPALAREMLGMLASQLEAVNGKLKAIEARLMAWHRQDQTSQCLATIPGVGPIAGVSFALKIPDARAFRSARHFAAWIGITPRENSTAGKHRPGKISHEGDESLRRLLVLGATAVIQRAKRGRVSPWLLGLLARKPKKLAAVALANKMARVIWAMMISGEVYRRPQEA

SEQ ID NO: 288829 - protein, 343 aa, unidentified
MPLHVGLDVSQKTTAICVVDDRGERRWRGVCATDPTAIASRIVRHAGASARVGVETGAMTPWLVHGLREAGISVECLDARRVKAALQMRLNKTDQNDAEGLAQVVRTGWYRPVHVKSLDAHRARSLLGARAQLVGMRTRLSNMIRGVLKTFGLLPGAGRGLVFDRHVEALIEGEPELALIIRPLLDTWRHLGQQIGAFDKAVQRQVRADPTCRLLMTVPGIGALSSLVYVSTVEDPTRFPRSRAVGAHLGLTPRRYQSGEIDRSGRISRCGDSLARTLMYEAAIVILHRVKRASQLRDWALAIAQRAGAGKARVALARKLAVILHSVWRSGEPFRWAASATAG

SEQ ID NO: 288830 - protein, 351 aa, unidentified
MIIIGVDYHPSFQQIAFLDQETGECDERSLNHSDGEAEKFYRDLKLRGVSVRVGMEATGYARWFERLLAELGIELWIGDPAEIKTKRVRKQKTDRQDAQLLLQLLLENRFPRVWVPSPENRDLRQLLWHRHRLVQMRTRIMNQLQAVAMNEGQRWRKKLFTEKGRMQLEKFLLAPWATRRRQDLLVLLDRLNPTIGELTAAIEQEAKKRPEVLRLMTHPGVGPITALAYVLIIGTPERFHCGKQIGSYVGLIPCEDSSAGRQRLGHISKQGNTLLRFLLVEAAQAAVRWDPDWRRRFLHLAMRRERRIAKVAMARKLAVRLYWMWRKGWDYRQTIEFGSHAGQLVETHGVK

SEQ ID NO: 288831 - protein, 446 aa, unidentified
MPANKRRSPGPPPKVVHPNAAGIDVGSEAHVVAVPADRDPEPVRSFGVFTADLRALVAWLKQCAVTTVVLESTGVYWMSLCDFLEGQGFEVLVIDPRSLARNLKKKTDVSDAAWLQELHAFGLLKSCFRPDPEVRALRTLWRHRDHLVTEAATLLQMMQKVLVQMNVYLHLAVADIAGVTGMRILRAIAQGQHDPQTLAALRDPNCKRTRAEIAKALEGTWDAAHLFELKQLLKAWDFYQNQLHACDREYEKAAGKMPDKTQGRPLPEPEKRPQKHRNSPTAFDSHALIFQLVGVRLTEVDGLGASTVLTILSETGPDLAAKFASDKHFAAWTTLAPRKHQSGKRTKFPAQTASRVAKAFRLAARALLNCKSVLGNFLRRLRARLGIGTAIRATACKLAKLFYRLITKGEAYRRDSTEAEEAKQRERQLQALERKARELGMQVIPV

SEQ ID NO: 288832 - protein, 370 aa, unidentified
MTITHAVAGIDPHKRTATVAVVDVLGAVVTSLSFTVTEPGIAKLLSLLASTTLSIDRVGVEGSGGLGRPVMLALAAAGYDVREVQANRTADRRRRRSRAKTDVQDAEAIARETLSDPNLPPAGKDATPSLASEKLGVLRSWRESLVLHRVRLLTEAEPVLVSLPLQLREQLPATSRVLASLKRLAELECGEATLSAGDRLKLDRLAASRADIVAISARIKNLDAQIPALLKAMGSSLTAIHGIGVVTAMTLLTEVGDPHRFATEARFARWCGVAPVAMSSGEGNGPPRNHRLDLGGNRQVNSVLHMVHVTQARCHPEAQSYLARRAGENKTKRAARRAHKRQLANVVIRRMWNDDADLARASSTPSAAAA

SEQ ID NO: 288833 - protein, 365 aa, unidentified
MRMEQFIGCDAHKKYSVFVAVNERGEASPAIRVEHDREQYRQFLERLPAGSQIALEAGGHYYWMVDEMEAAGHQPRLVHPLEAKKRMGKTGKKTDKVDANGLGILLRNGTLPEVWIPPSGLRDQRESLRLRMFLVQQRTRLKNRIQGALARYNIQIAGVSDMFGVEGRLRLGKRLGELPEHTRQSVELELVTLDFLEVQLADIEKRLEELMKVTAEADLLKTLPYVGRILSMVMTLEIGRVERFPSAAHLASYAGLVPRVHSSGGHTRLGQICGNVNQYLKWAFIEAGNLVVIHQKHLAGQHVVRLYQRVKRKKNHQKAVVAVARHLAEAAYWILKKQEVYRDPQPKPKAPAQAQAAHALSSTHG

SEQ ID NO: 288834 - protein, 326 aa, unidentified
MEHELHYIGIDTAKEKLDVDVLRPDGRHRTKKFANTTKGHDELVSWLKGHKIDHAHICIEATDPYMEPVAECLYDAGYIVSVINPALGKAFAQSEGLRNKTDTVDARMLAEFCRQKRPAAWEAPHPLERALRALVVRHRALTDMHTQELNRTETAREVQRPSIDAHLLWLEAELKRLEKQIKDLTDDDPDMKHRRKLLESIPGIGEKTSAVLLAYIGLKDRFAHARQFAAFAGLTPRRYESGSSVRGASRMSKAGHVSLRRALYMPAMVATSKTEWGRAFRDRLAANGKKGKVILGAMMRKLAQVAYGVLKSGVAFDASRHNPVAA

SEQ ID NO: 288835 - protein, 331 aa, unidentified
MNYSHFVGLDVGKKTFDASLMSADEKELSHKSFDNTPTGIQSLLDWIAGYHLSLSKLLFCAENMGSYVTELSVSSVSMGFSLALVCPLTIKKSIGLQRGKNDCIDAKRIANYAVLHYRKLELYKLPDKDLVRLRGWIIIRDNLVKQKVSSIKLLETFSRMAKLADVTESISFLEEQLKSIKERILEVEEDMEQLIAASTSLYTNYLLLRSIKGIGIINAIVLLCVTDNFQRFDNPRKFACYCGGAPFEHTSGISIRGKTQTSSLANKEVKVYLTRAAITAISWDPQMKAYYKRKIAEGKHKAAVINAVRAKIIARSFAVIRRQTPFVTLAV

SEQ ID NO: 288836 - protein, 408 aa, unidentified
MRLFVGDDWAEDHHDIELMDMAGRRLAKARLPEGVAGMARLHAMLGEQLGEADDEDVEVLVGIETDRGPWVAALVAAGYTVLAVNPLQAARFRDRLGVSGAKSDAGDAHVLADMVRTHAHELRPVAGDSTEAEAVKVVARTHKTLIWERTRHTQRLRHALRDYFPAALIAFEDLDAADTLELLAKAPTPAQAARLTTAQISGALKRARRKNVAEKAVAVQAALRAEHLGQPEILTSAYAASVQALIAVLTVLNTQVKALQRQVETHFGQHPAAEIILSQPGLGPVLGARVLAEFGDDSARYISAKARKNYAGTSPITRASGRKKVALARFVHNDRLIDALMTQAFAALKASPGARAYYDRQRARGAGHNAALRQLANRLVGILHGCLKTGTLYDETTAWSHHAENVAA

SEQ ID NO: 288837 - protein, 357 aa, unidentified
MEYCGIDAHSKSSTVCVINEMGEKLMLAKTPSTKEGLGKKVGMWDVFMPIVIEACSTSRPVIRHLQDMGFENVVVVNPQATSQMRARGKKTDYVDAQGLAELARLGLVEAWRVHIPGDWAQQMRDLLYDREFVIKHRVAITNRVMAIFRREGKMCPSLKGESGWMKISELLPEYAEEFEFYRRMRRQYLDREIALTGRIKSEATKHPQYEFVKSVPNVGPLTASILLACIDDISRFCSARSLASYFGIAPSVFQSGATEKTGSITKRGNSLARKFLAQASHHSRYLNSPFNAVYRDIAQKKSTSVAVMTVARKIVTSVYAVMKHNELFDPIKMGLLKVDREVKFVREYERAHKVEAV

SEQ ID NO: 288838 - protein, 346 aa, unidentified
MEINRVGVDLAKNIFQLHGADCRGKTVWKRQLSRGKWLELLCDTVKPGTEIGMEACAGAHHWARLLTHRGYAVKIIAPQFVKPFVKSNKNDANDARAICEAMDRPDMHPVSIKTVEQQDIQAAHRVREEIKSHRIAKANQIRGLVTEYGLVAPQQLSSLRSAIPGWLEDADNGLTLLFRQLLHGLWQDLWVLDQRMAELDKQIAVIAQENPTAKRLQQLRGVGPLIATALVATVGDGKQYRNGRDMAAALGLTPRQHSSGGKDRLLGITKRGDAYLRCLLVHGARSAVRTAKDKEDRLSRWIINLQSRRHANVVAIAMANKMARMAWAMMTKGVDYDPDFNPVSAS

SEQ ID NO: 288839 - protein, 335 aa, unidentified
MKFKTFIGVDVSKMTLDICSISEEGLIEDYQIPNDSKSLKSFFVLLEKKFELSTILVCAEHTGHYSNPLRSFCLDSGIDIWLESGAEIKLRSGVQRNKSDKIDAGRIASYALRYSDKAKTERTKNDALEEAKLLLSERELYVKERAKYKAQIRDLKKFIASAYYKDRKKRMDKHLALLSRSIVQIDKRVKEIFKETEKLSKQKELLKSIDGVGEQVAVHTIVATVGFEKFSNGRQFACHAGVAPFSYSSGTSQRSRNKVSNRANKKLKTLFHMAALSAIQMKGEFRDYFERKLAEGKNKMTIINAVRAKIINRIFALIREDRKYEKNYIFTLQHP

SEQ ID NO: 288840 - protein, 332 aa, unidentified
MLALISSLQARVACRHAATINVVCCFEAGRDGFWLQRFLTAQGVDTHVLEPTSILINRRARRAKTDRLDAVGMLRVLAAFLRGDRQSCSMVRVPTPDEEDAKRTHRERESLVQERVRIENRIEALLFTQGIRKRPSLRSWDRDLAVLRTGDGRRLPIHLRSELDRLRRRLVMTLELIGEVESERDEAAEATPQDQTCLKIAALGRIRGVGDNFAAVLTREVFYRSFDNRRQIASYVGITPMPYQSGSMDRDRRISRAGNPRARTTMIQLAWLWLRYQPGSELAKWFRNRVGTLAGRTRRIAIVAMARKLLIALWRYVETGVVPAGAEIRAEA

SEQ ID NO: 288841 - protein, 411 aa, unidentified
MQRVIGMDIHRTFAEVVFWEAGRLRPAGRIDMTRSGLEGFGRSLSKEDEVVVEATGNTMAVVRVLSRYVARVIVANPLQVKAIAHAHVKTDKIDAGVLASLRAAGFLPEVWLPDAETELRRRLVARRNQVVRHRTQIKNGVHSILQAHLIPPCPHADLFGRLGRNWLGRQELPADERAAIDRHLRELDRLGEDLAVLDREISERMIEDPSVKRLLTITGININVAAGLVAAIGDVRRFSSPQKLVSYVGLNPRVRQSGLGLAQHGRISKRGRSHARAMLVEAAWAAAKAPGPLRSFFLRIRTRRGHQIAAVAVARKLAVLCWHLLSKDADYQWARPALVASKIRAMQLQAGQPARKGNKRGAAYAYNVKELRDREIDVARHAEYAYEQFVSRWQPRRPEKRRTGAANEERR

SEQ ID NO: 288842 - protein, 341 aa, unidentified
MCSTNFFENLEHYVGIDVSKATLDCWLRPAGQWMQCPNTARGFAELDQWLRDHRVTRQDAVICLENTGIYDDRLLAALSELGWRCSVEKTTVLDKVTFEHHRKEDDYDATHLAEYADRFADKLSGWTPPDDRLELLRQLYGERRRLVDQQAAVQTKQTQSAQLAITSEVVEQSWNQQYELYAQQIAAIEARMQALVAEHAGLDHYYRLLTGIPGIGQVTAWLWLILFYGEQSLNPKKIASRFGVAPHSYTSGSSVRGRTRSSGHGASQMRKCMALAARSASTHYSKFRTYKQRKLDEGKPWPLVRNNLINKLIKIISAIWNSGTSYDPDHTSRFDRQKNAA

SEQ ID NO: 288843 - protein, 411 aa, unidentified
MEVVYACCAGLDVHKATVVACVRVSGPRPGERRGETKTFATTTGGLAELGDWLRGHGVTEVAMESTGVYWRPVYAGLETRVRVMLVNARHVKMVPGRKTDVRDCEWLAQLLECGLLRASFVPPRAVRDLRDLTRLRKALIRERGHHVNRIEETLELAQIKLGCVVTDLMGKTGRAILPALSTGIDDPDQLADYAQGLLRKKRAALREALAGRLTPHYAFLLQQHLALIDTLDAHIATLDARIDEAMRPFADAAALVQTMPGVAIRAAQAILAETGMDMVAFPTSAHFASWARLCPGNHESAGKRQPVSTGQGATWLRATRQESAWAAIRTKKSYYRALYHRLKGRGGAKKAVVAVQHAMLIALWPMLKHRVPHADLGADYFDRRNTERARRHHVRRLERLGYNVVLVESVA

SEQ ID NO: 288844 - protein, 366 aa, unidentified
MDAIYIGVDFHSRQQTICYLKTETGELVITELKHQDKERVRAFYQQFLGHVIVGLEASGYSPWFEAMLEELRCEVWLGDATEIRRRARWRYKDDRRDAELIRDLMVHHEFPRLHQPTPQSRDILRMLRYRQKLIKVRTMTKNSLQAIAMQAGLAKGRRLFTIAGQAEFKAVAMSPVLQYQRDHWLELLKPLNQELLETMKWCKVAAKGDATIARLRTHPGIGLLTALCFLHTLQPVSRFRNQRKVVAYGGFDPMVRRSADLSIHLGISKAGSRMLRYLTVEAVHTAIRHDEDLKRFYKRVAARRGRPKAKVAAARKLLIRAYIMMRDEIDYAEFNRRAVAARLARNSQGTPCVPEVLIGQSASPGA

SEQ ID NO: 288845 - protein, 331 aa, unidentified
MSVFIGVDIGSRTSIAGMRKDGRAAGQWEIAQTPTGRKAAVKKLQALKPKAIVMEATGIYYLDLALELHAADLPVSVINPKSFHNFAKLMLVNSKTDAIDAHLLSEYGERMTPRLWIPPSPVQLELRALGRHINRLVGQRVRAKNELHALQATSTTVSILIEDQEEAIAALDNRIERFRKAGRDLIAQCPTLARQYKQLLAGPGVGEVSALAALAELTTLPEILKSSQVARHAGLDVRQTQSGTSIDKPGRLSKSGNAYLRAAMYMPALTAVRCDPYAKAFYESLVSRGKKKMQAIAAVMRKYLTGIWACMHGNEPFDTAKLFSSDHLKKA

SEQ ID NO: 288846 - protein, 454 aa, unidentified
MRKPQVVPDEDHEVMYERVAAVDVAKASGVVCLRTPDPARPGRFVNRIWDNVPATRAQIAGLGRELLRCQVQMVTLESTSDYWRIWYYVLETAGLAVQLVSPSQAKNLKGRPKTDKLDAMWLARLTQQGMLRPSFVPPAAIRRVRDFTRARQDLVAERTRCLQRLAKLLEDAMVKITSVAADGMKAKSVVAMVAALAAGERDPRTLADLAKGPLRAKRDALAEALDGMFDSHHGVIARMLLGQVAFLDQQITRMEDQAIAALAEVPGSWGVDASGQTGPGCGVTPGSPVLAAAHRLAEIPGISVWLAIVIIAEIGLNMAAFPTPAHLVSWMGLCRSAAQSGTRHGKGKPKKGNSYARAAAGQAAIGAARTATFLGERYARIARRRGKAIAQAAVARSIMIIVWHLLADPAARYRDLGPDFYASRINRDKKIRNHLRGLQALGVTVTITDDEQAA

SEQ ID NO: 288847 - protein, 336 aa, unidentified
MPKPIIMKEYKQIYGVDVSKKSVDIVYTDRQVTVHQKFTNDLAGMEQLMAWLAQNQASPDDTLFCMETTGLYCFTLTHFLCSRSIDVWVEHSTTIKKATALARGKNDKVDALRIALYATKNLDRLRLWKPMNATLEKIKHLATLRERLVDTVKRLTVPIQEFEQMGNLAMSKLLTKSIKKTLAAIDNDLVKVESHIMEIVGQDENLKQLYKIITSVVGIGFVTAINLMVHTHGFTAMNDARKLACYCGVAPFEYSSGTSIRGKTRVHPMANKKLKCNLHMASITAVRYDAGLKQYYERKVAEGKNKMSVLNAVKNKLLARVVSCVNNQKMYVKMVA

SEQ ID NO: 288848 - protein, 345 aa, unidentified
MHYVGMDCHITTLDFAVVDDAGRLVKSCKVDTSAKNFMEFVKSVAAPRIVYMEESALAAWALETCIRIGEKLVITDPKQNHWIGSSTQKDDPLDAFKLAQLGRGGFIKEIRHPVGDRRRFRELMDCYHDTVKSTTRIKNKIKSKFRQNGIHCTGMTVYSETYREEWRQKLPQDQTLLLIVEGLWNQLKESEQTEKNLLKAARNFAKHYPEIKLFEDIPGIGFISAATISAILETPHRFANKRKVWMYAGLGITIRSSGGKTYSEKLSKDYNRLLKYTLKQVAETAVQAKDNPFCQKYLAMTILRGIAPHRAKLTISRDLLATMWAMWKNGEKYNPEIRRSLVLNK

SEQ ID NO: 288849 - protein, 315 aa, unidentified
MANLTKSKTVVNVGIDVGKQYLDVCIHEKDIYWREDNTAAGIKRIFKRLSYYQVERLVMEATGRYEFELAQLAYMKKLPVCIVKPLLIRQYARANDQLAKTDKLDAQIIAEFGAVLKPRVTLARSKNLIAIKDLITRRRQLVNLRTQESNRRGIMGKTLAVSCQRIIRYINAEIERIEKQLVRHVAEQAEWTEKQGLLKTVPGVGDTLVYTLLADLPELGELNNKEISKLVGVAPINRDSGRMRGKRRIQGGRANIRTVLYMATLSATQCNPVIKAFYKKLVAQGKHKKVALTACMRKFIIILNTMIKNKTEWAF

SEQ ID NO: 288850 - protein, 348 aa, unidentified
MTEPLFAGIDLHSNNLMIGIVDQSGQRIKYQKLACNLPQVIQFLEPFKTRLKSLAVESTYNWYWLVDGLREQSYPVVLANPAGIDQYSGIKHADDKNDAFFLAELQRLNILPTGHIYDPQLRPVRDLLRRRLGLVRQRTTLMLSFKSLFTRTTGQPMSLKRLKSMELSETKTLYEHPANCLIAAVQKEHIEQLDQSIERMEKAVLRSARKLPSYRQLTTLPGVGRILGMTITMETGNIERFASPGDFASYCRTVGSKRVSNGRNKGDNNRKCGNKYLAWAFVEAANFAKRYDEACRKWFDRKAAKTSTVIATKALACKLAKAAWHVMSQDSGYEEKRMFPELAMKQKE

SEQ ID NO: 288851 - protein, 394 aa, unidentified
MSFDHHFEESTAIETNLGAIFVSLELSRSTWLITSLSPGGGEKMSRHSVSAGDISALLTRFSELKNKAFARTGKSFPAIVIQEAGLDGFWIHRVLQSNGIESHVVDAASIAISRRRRRVKTDKVDGAALVRALLAYKRGEPRVCAMVRAPTPKDEDSRRLCRERKTLTIERVQHVNRIKGLLFSQGISDYEPLRRNRRQRLDELKTGDARPLPPHMRAQISRELDRLELLLEQIKAVEIERDALLISATKPEGMNADWTRAPQAMLISLNGIGPEIAAVLWSEGLYRSFANRRQVAAYAGLAPTPWQSGSVAHEQGVSKAGNPRLRTTMLQLAWLWLRHQPQSALARWFHERVKRNGGRLRKTTIVALARKLLVGLWKYVTAGVIIDGAVMQAV

SEQ ID NO: 288852 - protein, 334 aa, unidentified
MQVTTVGLDLAKNIFQVHGISADGTVAFNKSRRRAQLLDFFKNLEPCLIGMEACGSSHHWARQFQKLGHEVRLMPAMYVKAYVKRGKSDAIDAEAICEAVTCPTMRFVAIKTEEQQGVLFLHRARDMVVRQRTQLSNMLRGLLGEFGIVIAPGIGRAVKFAKGVLDGALPSIPDVAIDVLTNLCNQMVALHLRILWYDKRILLEGRRDRQVMLLRTIPGVGPVTASAIVATAGDGHQFRNGREFAAWLGLTPINRSSGGKERLGRISKMGDRYVRRLLVAGMTARLRHMKDNPDRADPWAIALLERKAPRLATVAMANKTARIVWAVLTRNERY

SEQ ID NO: 288853 - protein, 343 aa, unidentified
MEYYVGLDVSLKQTSICVVDQTGSVVREGVVDSDPEAISVYVRSKAPDAVRIGLETGPTSTWLWTELKQLGLPVICIDARHAKAVLKMQINKSDRNDAIGIARIMQTGWFKEVHVKDIDSHSVRALLASRALLVKIKRDLENHVRGLLKNLGLVIGRAKFNVFAVRAEELIEGRPELIAAIRPLLEARNAVEQQVSELDRKVMKLARHDAQVRRFMTAPGLGPITALAFKATIDDPARFARSRSVGAYVGLTCRRHASGEVDWSGRISKCGDAMLRSYLFEAAGVLLTRVPKWSAVKAWGVRLAKRNGLRKAKVAVARKLAVILHRMWVDGTEFNWSKQEIAA

SEQ ID NO: 288854 - protein, 363 aa, unidentified
MGESRDHPQRDWKPAAVSDVTPRMSLVLQPFLPYPNSCQGTSPHQQGWDTKMAELSFGGIDVSKDCLDVLLLPTGLYFSVRNNAPGWTELVARLRPFPVAAIGLESSGGYERGIIRTLLAAGLSVRRINPNKLRQFARARGVLAKNDRLDARLIAEYVAAMPTRVVRRDEALERLAEIVTMRRQLCDEHAAAMNQATHLEDAMLRRLSKRRLVRLEADISLLDKHLAELVGADPRLAHRYHLLISTPGVGPTLAYTLLASLPELGQLDRREIAALVGLAPYDFDSGKLKGHRCIYGGRMPVRNDLYMAALSASRYNPQLKAFSKRLAAAGKKAKVIIVAVMRKMIVTLNAMLRDNTEWRPVVA

SEQ ID NO: 288855 - protein, 412 aa, unidentified
MEVLYECCGGLDVHAKTVVACLIKKGHKQIRTFSTMTDELRQLRDWLTSEGCTQVAIESTGVYWKPVFNILEGVLTVVLVTARHVKGVPGRKTDVRDCEWLADLLRHGLVRASFIPPPEIRALRELTRYRQTVVTEHTAVANRLQKLLESANIKLGQVASDVLGVSGRLMLRALAEGEQEAEKLAALAQGKLKSKQGELQRALEGRVTEVQRWVLTELLTRLDELEAALQRVETRMGKEVESCADPFVQEAVELLDSIPGIGERGAQTIISEIGVDMSRFPSAGHLASWAGLCPGNNESAGKRKSGKTTKGSKYLRTALVEAAWAATRAKGTYLQAQYQRLVKRMPKKKALVAVAHTLLVIGYHLLSRRVAYADLGSDYVDRQHIERQRRRLVERLAALGVKVTIEEVAEAA

SEQ ID NO: 288856 - protein, 368 aa, unidentified
MQFIGIDLHTNKFTCCYRDENSGQDGKKETATFDLSPYGIKEFCRTLTNEAYALIEATITTFCFARLIQPFVKQVIVANTYELKQISLARKNTDKIDADILCRILKMQILSGEQTISAVVVPPVEIQELRGLFSTYRLYKKQTTQIKNRIHSLLKEKLHGFTKEEIFTQKQRETIKAIEKGSVMSFQANELFDTLEYAEARIESLKDKIMECAEPFMKEIEILTSMKGISVFIAIAIIADIIKVERFKNSKAFASYLRSAPKVANSNTSVSIRGTNKKGRKLSSSLLSQSLNHVLEASKKLNEWYGRLTQYKKAGLVRSGLLRRVFCEIYQMLKKGEYHYGREAEKHEAKMRQYRNFLERRKNLVKTA

SEQ ID NO: 288857 - protein, 370 aa, unidentified
MACRGCNPRQAAGDRIEPTQSSLWLPRSVIVVSTFIGPGWLPEQLGSLYKAGSTKMTQTNMTTAGIDTSKAKLDIAVHGRTERWQVANGLPGWRALTAKLVKVGATRVGIEATGGYERGVVEYLRAAGLDVLVLQPTQVKAFGRVHLRRAKNDVLDAVLIAACAAALDPPKIAPDPRLAELAENLTFLEQIEEDIRRFKTRLEHIDEPRLRRMVLGDIARLKARRATQIRDIARLLRCHHDLAVRLDLVLSIPGIGERTALALLIRMPELGRVSREEAAALAGLAPFDNDSGQYKGQRRIAGGRARLRRSLFAAALPAAFRWNKALMALYARLTAAGKVHNAALVACARKLLIYANTVVQRGTPWTEKAA

SEQ ID NO: 288858 - protein, 374 aa, unidentified
MKKNTIFVGLDVHKDSIDIALANEGRDGDVRFYGTIDGDLDSLHKAIRKIQGANRGAELRFVYEAGPCGYEIYRFLKGNGFDCVVVAPSKIPRKSGDRIKTDRRDALNLARLHRSGELTEVYVPGVEDEAMRDLTRGREDMVKALRVSRQVLLGFLLRHGYRYSGRSYWSKAHWNWIADIKMEHRAQQITLQEYVHMVQEQVERVQRITQQIQELIPQWRLAPVVKALQSLRGVSLIVAATTCAELGDLARFDSAKQVMAYLELVPSEHSSGQTTRRGGITKTGNGHVRRVLTEAAHAYSHPARESRVLSARLEGLPPKIREIAWNAQVRLCGRFKKLLARGKNRNTVVTAIARELAAFMWAIAHIAMPAGQNP

SEQ ID NO: 288859 - protein, 420 aa, unidentified
MTPDQKVAFARGFPVHVGVDTGKRFHVLVARGPDGLRRKPVKVLVSRDGFERADAELQALFPGITRAHVLVGLEFAGHHGFTFAHFLATRGYPIVNVLPAHTKHTKELEDNSPLKTDAKDAGVICKLVGDGTFVRFPFLESPYAELRVLVSYRHRLTVEATRFKNRLQGLLDLAWPEFVGQFSTLAKRTPIALLERWPLPEDVLAAHKTTVRAYARKISKGKVVGERFDRLYASAEQTIALPQATAERRLEIQAILARWRLVRTQMAEVETRILALIEQLPAAQALLTVPEVSAVCAATVLAELGTPGDYQHPRQVLKLAGMNLVEKSSGATQGRRRQSKRGRPMLRRQLFLLAGRWCQRRGLYRGYYEALLARNGGLKTKAVCAVARKLVPLLLAVLQRGEPFDRARWEAARHRPALAR

SEQ ID NO: 288860 - protein, 486 aa, unidentified
MIPSPGTSLRGGASGLADNRYGMPFPGQARGFIWLPGGYFNLGRRIEAPEPESVVAKSQPEIRAPDFNLEYSMKAQPESRTIHRYVALDLHKEYVMTGAMNAAQEWVLRPRKVEMMRFREWAAANLRQGDAVILETTGNVWDIYDIVAPLVTRTVVAHAGAVRQIAEARVKTDSEDIKRLLRLLIADIVPEVWVPPAPVRELRSLISYRNRLVKTATMIRNRLQSLLHRHNLKLGENGLTDAEWWESQPLSALEKLQVRQELALLSRVEQSKAELETELAKMSMSAKWGKSAVRLLQLPGLGLITAMTVLAAIGDIRRFASPKQLVGYAGLGAGIHQSGKEHQDKGITKSGRKELRWALVEAAWRAVRSSEVWKQRFDQLAKRRGEHKAITAIARKLLVTIWYVLTREETDRYASEEDLAYKMLVLSWELNEEARLGLTYKQFAKYALMKLGIETDITRFVRKNVPRRVAPRDEVLARMKELGLSL

SEQ ID NO: 288861 - protein, 316 aa, unidentified
MNKKNHTEVNIGIDTSQTQLDIYVRPCGDYFSVENTPKGAREAACRLRSYQPARVLIEATGRLEMHFVCAAHKARLPVVVCNAGQVRQFAKATGRLAKTDKLDAQDIAHFGEALEPALTELKPEKLRQISDLIAVRSQCLDMSTMQKHRLHRMPKSVHKPIQRILKAVQTEVERIDKQLDKLVEAIPQWRDQRDLLMSAKGVGKVVAYTLMSELPELGKLNRKEIAALAGVAPMNRDSGSYRGKRRIYGGRRKVRTVLYVSMLSAIQYDPKIKSMYERLVAAGKPKKVAIVACMRKQLTILNTMMKNGTHWDEKLA

SEQ ID NO: 288862 - protein, 345 aa, unidentified
MAMQETLYVGLDLGSSFCWQSIIGADGAVRSSRVVRTGEQQLRDAFAGFEGEVRVHMEAGELADWASSVIAPLVSGVVVSHPRSLAWIGKDSVKDDRVDAGKLAELLRLNRVHEVYCERDGERRVFRHLVTHQEQASREQARRKSKIKARLRTLGVIRKDSALFTTAGQSELLESIEQPEIKQMIAQSFDVLNRMIGCEGEARRAMLEYAKRFPEVRLLQTAPGIGAVTACRFVGYLQTPRRFSNKRKLWRYCRLGITRRESNGKRLSHPRLDSAGVGSLKDVSRKAFEAARRCKGDNSFKRCYEQSLENTKNAVHARLATQRKILACLRAMWIANRPYRDDRSG

SEQ ID NO: 288863 - protein, 325 aa, unidentified
MTAILSAILGIDVAKNKFDVALLSNGKYKTKSFDNKPAGFASLAAWLEQRDVANVNACMESTGTYGDCLARFLFDTGHTVSVVNPARIKAFGESELLRTKNDKTDAKLIARFCEKMKPTAWQPDPPEVEHLRMLGRRRDALICMLTQEVNRLGVADASVNESIQKVVIFLEQEIERITKCIKDHINNNPDLKKKRDLLKTIPGVGNVTIEAILSEANGFDGFDTVEKVVAYMGLSPKEKTSGTSVKGKSSICKIGSARLRKILYMPALSAIQHNPFVKALYNRLIAKSKHGMIIACACMKKLVHIIYGVIKSGKPFDPFYNIKTA

SEQ ID NO: 288864 - protein, 384 aa, unidentified
MRYVALDLDKNDAYVGIFDSETQQRHQERVPLMRDPISLNRFVESLRPDDVVVMEAQPCSFFLHDLFKPMVKDVHILESHWFGGLLDRGEVKNDRNDTGVMLDCAQANVLRTVWVPSEEVRAQRLAAMHYRQLDKERTRAINRCHAILTDYGLASLAAELLKTHVKRVVIKLQGRMPRKALTVLASTMRLLRSVEEELSLARAEIEATIQPQRDIVVTLPGMDSIFAHAALACIGDVTRFKTADSLTNYCLAPSLNSTGGKTRHGRTKRRGSALLRWAMVEAANCAKRSKGKLGNFYLKKQRSRGHHKAIVALARKMLEILWHMLTKNEPYRDVQPEAALRKQQRRNRKFHQAQQVLRNKPDPIETLKQNIGTVREIFQIMARE

SEQ ID NO: 288865 - protein, 469 aa, unidentified
MNAPQKNKKSKMKLKKMVKQYAQKIKKVGVLEQINLNAAGIDVGAEEIYVAVPEYRTEQSVRKFGTFTQDLMQIILWLKANEVTTVALESTGVYWIPLYDQMEKAGLDVYLVDARKTKNVSGRKTDVQDCQWIQQLHTYGLLSKAFVPDEQIRNLRTLERQRDMLINYRSSHIQHMQKALEEMNVKLTNVLTDITGKSGMAIIRDIIDGVRDPIRLARHRDYRCRKSEKEIALSLEGNFNEQKIFVLKQAVELYDTYTQKMMELDVQSEKVFKTFARKVDVKSMPVKELARSLQNRKKNAPHYDLRSQLYQIAGVDLTRVNGFDVLVLQRIISEVGLDMSKWPKMKNFTSWLALSPNNKITGGKIISSATAKSKSRANNAFRMAAMGVARSNCPIGRFYRKMKARDGAQSAITSTAHKLARIFFVMVSKQVEYSEELIKGDEEKNKKRMIKNLQRRAKELGYELVQKSA

SEQ ID NO: 288866 - protein, 421 aa, unidentified
MSCLPALPVCAHPTQVRRDTTILAESALLIAGADTHADTVHVAAITMTGAAVADRQFPTTRVGYTAAISFLTSLGQVERIGVEGTASYGAGFTRALTAAGISVVEVTRAVKSTRRLKGKSDPLDAYSAARTTLADDGLAIPKDDATSGLRALHIARRSAVKHRTAVINQLKAMLVSAPDSVREKYRGLTTFRLIESIARCRPDALADPWAQSMLVAAKLLAQRVQFLEAQSETLQNQIDALVTEANPGLRSAYGVGPDTAAQLLITAGANSHRLHSEAAFAALCGVAPVPASSGKTTRHRLSRGGDRAANNALHRIALVRLSSHQPTRDYAQRQLLNGHSKMEILRKLKRAIAREIFKLLTRQIEAPEYGDLRPARQAKNITVTAAAHHFGVWPTVISRIERGLQRDDTFAANYRSWLKAA

SEQ ID NO: 288867 - protein, 407 aa, unidentified
MGITCGIDWAEIHDDVALADDTGHIVARARIDTGATGFNELLRLIAENGGTPEQTPIAIETDKNLLVVALAEAGFSVYPINPRAVARYRERHAQAGGKSDPGDAAILANILRTDREAHRVLPAISEHGRAVKALARQHQEAIWSLHQTISRLRSVLLEFYPQALQAFPHLKHRAALHVLTAVPTPGAGRKLTRHRLEVLLRRSGRRNDPNLVEQILTDLKAPALRQPPQVEAALGAATTGLLGIIASMHQAVDALEKELGRAFDTHPSAPLLRSVPGLGPILAARVLAEIGDDPTRFTSAAGLRAFAGTAPITRASGRSHYVKARKVRNKRLGDACHWWAFVALTKSVGARAHYDKRRAAGDHHNAALRNLANKLLGRLWWCLQHGEPWDEHAAWPDLDREVAPAAA

SEQ ID NO: 288868 - protein, 341 aa, unidentified
MSNANSYIGVDLHKKMCFVTVMDKEGKIKKQTEISTDADKVAKFFSKHTNAAVAVESTMNWIPFYENLEGLGCSVVLSNPLQTKAIAAARIKNDKVDSKILADLLRTNLLPTAYIQPREIRDLKELVRQRMSYVEMRTQIKNKIHSVLFKNNLKHDFTCLYGKAGMIWLRQLELRDIYRQEMDRYLTTLDLLDKQIEELSATIMETAKTDYDCQLLMTIPGISYFTALVIKSEIGNIERFGSAKKLCSYAGLIPSTYASADKVRHGRITKRGSKWLRKALVDAITSGSRHPSKLSCLYRKLKKNKGTGKAKVATARKLCTIVFAILTDKQPFREFVSVKQR

SEQ ID NO: 288869 - protein, 315 aa, unidentified
MSTSGFYAADVSKSELVIACEADDAEIVRVANRAAAIDAWLDRLPAGSLIGMEATGTYHRLLAARASARGFTVYVVNPRDFHFYARSVGARGKTDPLDARLLARYIAHEHTHLHRYVPPSALCEQLCALLERRAVLVRTRQTLVQSLADLPTLQPHTQVALRALDDLVAALDSQLATLNASDPATASLVRRLRTICGVGPLVSTLLAALLQRFAFRHADALVAYVGLDPRPDESGSRRGRRRLSKRGHPEWRRLLVAAAMSAARTRVWGDYVLGHKNKGLPSTAVHVILARKMLRVAFALYKSGNDFFAPEIKPI

SEQ ID NO: 288870 - protein, 355 aa, unidentified
MDSEKYIGLDVHQSTIVVAVMDSTGKLVMESILETKAATILQFFAGLRGTLSVTFEEGTWAAWLYDLLKPHVDKLVVCNPRKNALLKDGNKSDRIDARKLAELLRGNQLKPVYHGETGVRMLRELARSYLTIVKDLSRVMNRLKAMYRSWAIPCAGRDVYYTRHRAQWLDKIREAGVRRRAERLYEQLDMLQHLRQQARRELLAESRRHAITAKLRQVPYLGPIRTALAVALIQTPHRFRTKRQLWAYSGLALETRISAEYRYVEGQVRRSKKVLSIRGLNKDHNHDLKGLFKGAATMASVRPGPFQDFYQASLAKGIKPTMARLTLARKIAAITLTLWKKGENFDAEKLKPQAA

SEQ ID NO: 288871 - protein, 424 aa, unidentified
MSRVVIGVDPHKASNTVVVIDAQERVLGQQRFSNDRAGYRSMKTFACVHRDRVWAVEGARGVGAGLAQRLVAEGEPVLDVPARLSARVRALGGGSGRKTDDADAFAVAVAGLRARDLQVVHQDDGVEILRLLSTRRQELVAQRIATVNRLHDVLCQLIPGGAKRHLGATRARQLLSAVRPRDAVGKARKQLALDYLGELERLDSRLKELKKGLAEVHAEHPTSLLEINGVGPINAAKILAEVGDVRRFPSRHHFASYTGTAPVDVSSGDNNRHRLNRGGNRRLNHALHIAAVVQYRMPGEGQDYYRRKRDQGKTHLEALRCLKRRLSDVIYRHLVDDLTAGSPGGQVGASLQSSAADLIPMASTSEQSLPGLENDLRRSPQLCLDTEGNHYRSVSRPASRSDYEPQDVPSIRPHTSRRIAGPRS

SEQ ID NO: 288872 - protein, 369 aa, unidentified
MKKVGMDVGKRQSDCCVFDESGAIVERFKVRTRQESLSATFANREKCLIGIESGRDAGWLHAHLTGLGHDVMVLDTTRSRAIGIGAGGRKTDRRDAEVIGRALVSGVAKPAHVLSAERRRLRDALWGRDKLVAIRSQLVTMLRGQFQGRGLETPRCEPERFADRMRASGLPGIEDPVVQSLLRTLAAVQGEIVVIEQHLRELAAREEAFGRLCSVPGVKLITALSFAAAVDDARRFRDAHSVEGYLGFGTREHSTGGKQRTGGITKRGNAMARRMLVQASNVLLRAPSMDADPLVVWAKQVWERRGRKRAVIGLARRLAGVLWAMTVDGTFYDPHGLARASWAGLSRRARRAQVEATTMKSASVAAAGA

SEQ ID NO: 288873 - protein, 337 aa, unidentified
MERQYVGIDHHRRSSTIYRMSADGEMLGCVRIPSQPFELAQAMAEAGDAPEVVLESGYGWYWAADLLEELGANVHLAHPLGNNWGNRRVKNDERDAKDLAAMLRLGRLAEGWIAPPETRELRELVRYRFRLVCQRTSCKAQVHGVMAKNGILPALGDMWGQGGARQLDSLELPKAYATRLDSLRDLIAFLDNEICIFDRYIHNELKNDAGYNAIQKVDGIGKIIASIFVSEIGDISRFSSPKKLCSWSGLTPRHRESDEKVRRGPITKQGSSLVRWAAIEAVTKQRGGPKLRADYIRLAKQTGKFKARVAVARKLMTLVYYGLRDGEIRSLEAHKAA

SEQ ID NO: 288874 - protein, 342 aa, unidentified
MRYIGLDVHKDNISACVLSDAGKVVFEKDFKKTNGTCDCLAELFDHVGKSGFCVLMETGTYAYPPYRFFRDRGCAVDCVHAQCLRMITQTDKKTDKKDAMTIARMLRLWKRHDIDLQIAYMPTREQCELKDLCRYREEISKKIGDETRRIKSQMSRNCQVLPEGMDSFQIRRNRRYVLEKYGTDVTLSRRMKALEQLFEERDIVQKQVESCLPDDPNVKLLEHIPGVGRQTAVQLMSMIVDIGRFEDSEKFCAYFGLVPRVRDSGGKEHHGRMTKNGDKMMRMLMERVTEAHVRNCDSFITDYYRRLCPQMGTKKALITTSRKMLMTVFAVLKKQQEFGTRP

SEQ ID NO: 288875 - protein, 415 aa, unidentified
MEDVIYERCAGIDVHKRMIAVCLRIGTKTQIREFGTLTHELREMTAWLKENGCQMAAMESTGSYWKPLYNLFEIEDIPAMIVNAQHMKAVPGRKTDIKDAEWIAKLLSQGLLNPSFIPDREQRELRELTRFRKSQIEERARNINRLQKMLEGANIKLSSLVSDIDGKTSTDLLELVINKLDFTVEDVDKLRHKRMNASSEELFQSLEGVITPLQRQLFKHVMHVIREQTTQIEQTDALIARYMNKAYVEAAIAIDEIPGIGEVSAQQIIAEIGCDMSRFPTAAHLCNWAGICPGNNESAGKRRSGKTNYANKTLKSTLTQCAQSAKKNKDSFFSAQYQRLVVRRGKNRATIAVAHSMLIAIYHVLKGTKFKDLGSDYYTNFNKEKKINSYIKQLSKLGVDITGYAVRSTISENVA

SEQ ID NO: 288876 - protein, 415 aa, unidentified
MKGTEDTRKIDRYIALDIHKEYVLAGGQTAGQEWVLPPRRISMTKFREWATANLHAGDGVVIETTTNVWDIYDIVAPLVTRTAVAHAGAVRQIAEARVKTDKEDVKRLIRLLIADIVPEVWVPPVEVRELRGVISYRNRLVKMGTMVRNRLQSLLHRHNIILPKGRLLDAAWWQEQKMSALEKMQIQQELVMLEELDRHKREVDMELGRQCLREPWGKQAVRLLQLPGFGVVMTMIVLSAIGDIQRFESAKQLVGYAGLGAGVHDSGKEHIEKRITKSGRKELRWALVEAAWQAIRISPYWKEQFETYLRRMRRPNQAIVVIARKLLVAVWHVLTKEETDVHASEEDLAYKMLVLSWDLDESVRMGLTYKQFAKYALMKLGVETDITRFVRKNVPRRIAPREEVLARMQELELST

SEQ ID NO: 288877 - protein, 322 aa, unidentified
MNKYKETFGVDISKDVFDVHGSSAGHNQYTNDASGFQKFLKDLPKKSLVVMEATGYYHYRLAQFLYKNEVIVSVVNPLIIKRFIQMKLAKVKTDKSDAKMICAYALINEVPFYTALTDVQSECLQLFRVLDNFIKHRTATKNKMHGEEVLGTPSKFTYRSLRRNKKHYDVEIKAIEAKILSLVKEDQQQQLTLLTSVPGIGQKTALFLIIVTDGFSKFETAAQLCSYVGITPTTRESGSSVRGRARISKVGNRKLRNLLFLCSFNACKHNKACRELYERIVNKGKSKKLALIAVANKLLKQCFAIAKSGIPYDETYVSVIAR

SEQ ID NO: 288878 - protein, 347 aa, unidentified
MVYVGIDLHRSRSQIAVLDQQGGELLSRRIANDREIFLELLHGLGDDVQVALEATYGWEWLADLLEDAGVELHLAHPLRTKAIAAARVKTDAVDARTLAHLLRTDLLPEAYIAPRELRDLRDLLRHRVALTRIRSALKQRVGAILAKQGIARPYSNLFGPGGSRFLTELELRQGPRRRLDSLLALIAAFDREIDNTTKEIEQRASEDPYVDVLCQIRGVGRYIAMLVIAEVGDITRFPSARHLCAWAGLTPTVRSSNGKARLGHISGQGSPALRWALVEAAQHAPTGGGPLRAAYERIAKRRGKQVAKVAVARKILTLCYYGLRDGEIRCLAPRAKARTNRTTVVTR

SEQ ID NO: 288879 - protein, 455 aa, unidentified
MPGTKTRGGSAGRLSTIHPDAAGIDIGSTFHVVAVPSDRDDRSVRTFRTFSTDLHQLADWLTAVGITTVAMESTGVYWIPVFEILEGRGFEVLLVNARDVKHVPGRKSDVNDAQWLQQLHQYGLLRGSFRPRDSVVRLRAYLRHRERLVDYAAAHIQHMQKALMQMNVQLHHVVTDITGLTGMRIIRAIVAGNHAPEQLAEFRDRRCHASENTIREALIGNYRPEHVFALRQALELYDFHQAKVAECDVEIEAVLDGLNAQRVTPEAPLPSVRHAKGRNEPAFDVRPALYTLLGADLSQIHGFGPYTVLRLVAECGDDMTKWPTAKHFTSWLSLAPGNKISGGRLLSSKTRRSSNRATALLRIAAVNIGKTQTALGAFYRRLAARTGKAKAVTATARKLAILFYNALRFGMTYVDPGVSSYEERYRQRVIHNLHRRAKSLGFTLVAAPPAAEGVS

SEQ ID NO: 288880 - protein, 462 aa, unidentified
MQKYYLGIDVSKGYADLLMLNSNKKTIEECFQLDDTFDGHNRLYHFLHRFFAARPDSVLLAAVESTGGYENNWFHTLLKFQDSFNLKVARLNPSGVNYHSKACFNRVVTDKTAARSIAEYLIIHPENVSYQTDDKLTSLRGKWKFINSLTRQKSRFLTQLEKLLYVAHPEILLYCKDNVSQWLLKLLELCPTANTLANTPVEDIAAIPYISKSRAAELVANAKKSVASASDALTEDSIRTIAAEIRNLQQLINKQTALIEKENPLPEILLLKSFDAIGTNSAVGLLIEMGPVERFPTVKHLCSYWGLHPVFKTSGDSTSGIHMSKQGRKEARAILFMITMAAIVQNPLIRDVYYRNLKKGKSKLDAMGVCMHKIARIVYGMLKNKTPFNPDIDRRNQARAQQKKPKGKLNRNRRHQKLDRKAPVSKRQYKKRKEQEMSQDEAVSSNPRSIPCPDVAVQETIS

SEQ ID NO: 288881 - protein, 376 aa, unidentified
MNEKLRFLGLDVHAETIAVAVAEPNGEVRSLGTIANREDLIRKFIRKLGSPEHLRACYEAGPTGFVLYWQLTQLGVKCDVVAPSLVPKKPGDRVKTDRRDALKLARSHRSDDLTAVWVPDEGSEALRDLVRAREAAKQDQLRAKHRLTKFLLRTGQRPPLGVKAWTEKYVEWVQQVRYTHPAQEATLLDCLNEVQHMEERVKRLEQSIVEVIQLAPAPMQEVVRGLQALRGIAHISAVTIAVELGNITSRFESARDLMGYSGAFPSEDSTGKRIRRGGITKSGNAHLRRIVVESAWSYRHRPAIGARLRRRQEGLPAEITEIAWKAQNRLHKRYMTLIARGKEQRKTMTAIARELLGFIWAIGIKAEAAGKQQMAA

SEQ ID NO: 288882 - protein, 372 aa, unidentified
MVWTAPYGIECARMRLLRSQTREPSVNQISRIGMDTSKHIFQLHGVDAAEHPVLRRKLRRKEMVAFFAKLPPTVIGMEACGASHYWARELGQLGHTVKLIAPQHVKPYIKRNKNDGRDAEGLCEAMSRPTMQFVPAKTAEQQAALMLAGMRERLVTRRTQLSNAIRGYAAEFGLIAAKGLDKIEPLLAQIAQDESLPALARELFAMHGRNYVQLQAELKKVEARLMAWHRANADSRRLAQIPGIGPIVATALVMKAPDPRLFPSGRHFAAWIGLTPKDHSTAGKTRLGTITRAGDEMLRSVLVAGATAVIQQARRGRGHPSPWLLALLARKSSPKLAAIALANKIARIAWKLMTTGECYNSARMPDTSALAA

SEQ ID NO: 288883 - protein, 341 aa, unidentified
MKKLCVGIDIAKDKFDVCFTVDGENYFGHTVFPNSKHGLKDLTTLAKNYKKEYKTDKIHFCMEATGIYHYELCEYLQKYSALIVSVVNPYQTKSYAKSLLLRTKTDKVDSKMLAQYCYERKPKPTPLISEKIKKLRSLVRLQESEINKRSEEKNRLHSAMDEYVREVIRKNISFINNQIKSIEEKIMEVINSDEKLKNDFTLLLTVPCVGEKVAWIILSEYYYVNPEDIRPKSCVAHAGLSPRACDSGDRAYGKSHISRIGISRIRSNLYMPTLTCICRENYFTAFYNRLVERGKLKKVAIIAVSRKILLTAMGILKNQKPFDPAWAEKTREEYEKNLKAA

SEQ ID NO: 288884 - protein, 375 aa, unidentified
MPRMPQAPEPSHAHVDPTGVDSTVVDPDEVVLGVDTHKDVHVAAVISVLGVLLGTRSFPTTASGYQQMLRWATGFGTVRRAGVECTGSYGAALARHLVGEQIEVIEVNQPDKATRRRRGKTDTVDAEAAAHAVLSGRASASAKAGDGPVEMVRIFKLAKASAIKSRTQAINQLKAVLVGADPQLRDSLSGLSNPTLIRRCSQLDAGTPRDATTAAAYTLALLARRILELTTEINDLNRQITDTLSAHAPRLLERNGVGPDTAAALLITAGDNPERLHNEASFAALCGVSPVEVSSGKTQRRRLNRGGDRRANSALHTIVLSRLRWDPDTRAYLARRIANGKTRREAVRCLKRYVAREIYQLIAQPTEPTPCARAA

SEQ ID NO: 288885 - protein, 368 aa, unidentified
MLTRFHGIDRHEKYSTISVLNRKGEEIRFTHRCTDLKGYIDSLGPEDAVVMEACSGAFYWADLIETRGAACSIIDPHRFRIIKDSWNKTDTHDARNMAQALWVSVVTGKYGIPTVYKPTMVIREMRKLYSQYQMLNRQMRVLKNSLQAILTENGIHLTGAEKNRLLSVRHGKEIVRGLELTHASEVNVRISLDLLWRIEEEKGRIKKEIFLTGEPLHEAVKLLITIKGITPLVALAFLADVGDIERFPTLRKMNAYLGLVPRVKESGGKSRHGHITRESRKLTRTLLTQSVYHISNASPVFRKYYSDLKERRGVGRARIALIRKVCGVMRRMLLTGECFRWMKDELFSKKLRAYEKELESLKREKKAA

SEQ ID NO: 288886 - protein, 372 aa, unidentified
MNSIVYVGMDVHASNYTLSCYTLTNDECFATVQMEPEVKNILTYLKKVQRNLGGSCEFLCGYEAGALGFSLYHQLQKHGIPCTILAPSTMPTFHRNEIKTDRRDAMKIARCLAFGAFRPVHIPTKEDAAVKDFIRMRDDHKIALKKIKQQIQAFCMRYDLHFTEGRSYWTQRHLAWLKALALDDLLREVLDEYLVTLHQLADKIERLDARIEELAQGERYAENVKKLSCLIGVRTHTALALVAETGDFRRFAKAEQYAAFLGLVPGERSSGDKQSRTGITKAGNTHLRKLLVEASQCYGRGKPGYKSRLLKERQQGNTSEVIAYADKANERLRRKFYRMVLRHNKKHNVAVTAVARELSCFIWGMMTGHTAI

SEQ ID NO: 288887 - protein, 386 aa, unidentified
MATPDKIHIEQDTLPQPTLFLAFELGQNTWKLGFTIGMAQQPRERTIPAGALETLQQEIARAKQRFGLPEDARVVSCYEAGRDGFWLHRALVTHGVQNHVIDSASIEVNRRQRRAKTDRLDVRKLLMMLLRHSAGEKKVWSVVRVPSVEEEDRRQLHRELTTAKQDRTRVINRIKGLLAGHGVQLALEGDVDAQLDQVHQWDGSPLPSALLSRLKRAWQQVGFLTTQIQTLEAERRALWRRREDPVIDQVRQLFTLRGIGVNSAWLYVMEFFAWRDFQTPKQVGALAGLTPTPYQSGQSRRELGIAKAGNRHIRAMAIEIAWAWRRFQPASALSQWYERRFGAGSARLRKLGIVALARKLLIALWRFLKTGVLPEGAVLKTAAARR

SEQ ID NO: 288888 - protein, 389 aa, unidentified
MRIYVGIDIAKLNHFAAAISSDGEIILEPFKFTNDADGFQLLVSKLESFDKNSIIIGLESTAHYGDNLVRYLVAELYQVCVLNPIKTCQMRKNNIRKTKTDKIDTYVIAKTLMMQDDLRFVSFYDLDMMDLKALGRFRQKTIKQRTRLKIQLTTYVDQVFPEIQYFFKSGLHQNAVYALLKEAPSPKKIASMHMTHLANLLKVNSHGHFTKEQAKELRVLAQKSVGANDSAISIQITQTIQQIELLDSQLDKIEAEMTDIIKFNDSVIMTIPGIGYINGGMILGEIGDIHRFSNPSKLLAFAGLDPSVYQSGNFQAKTTRMSKRGSRVLRYALVNAAWNVVRNNTTFKAYYDVKRAEGRSHYNALGHCAGKLVRVIWKMLTDEVEFNLE

SEQ ID NO: 288889 - protein, 433 aa, unidentified
MQNPPPFDLVIGLDRSDRKADLHLINTHTLERRNCVIDTGPEALWEWLLQLRQQHPRARVGLCLEQPAGHLVSFLETYDWITLYPINPITLQKYREAFVTSRAKDDTRDAYFLADLLLTHHHKLQPWAPEDSATRAVQQRVFHRRSVVDERTVLTNRLQALLKQYFPQALVLCGEDLWRPLATAFLLKWPSLGAVRKAKTATIQQFYHLQGSRSQKLIEQRLELIEKAVPVTDEAAVIDSFVLRVQLLAGELQLVQKTITEFDRQIALAYAAHPDREIFASFPGAGPVLGPRLLCSLGAQRERFEAARDLQCYTGVAPVTKRSGGSCCIHRRHLCPKFHRQSFHEYARESILWSRWAAAFYLQQRNKGCPHHTAVRALAFKWQRILFRCWQARKPYREETYEAALRKHGSPIVALFDRIEAGKSPWKNPVKKN

SEQ ID NO: 288890 - protein, 344 aa, unidentified
MNSMHYIGFDIHKKVISFCEKRMDGTIVDQGMIRATRQSLTDWANERKTPWIGAMEATLFTGWIYDYLLPHAKEVKVAHPEMLKAITASKKKNDAADAEKIADLLRCNLLPECYMAPEEHRNLRRILRYRNFLVREAVKMKTKTASLLMEVGAEYNKARLHGIKYFQELLGNLDYVPESVLSLLQMTRSNMECFQKMQKSLIHALRLDPQISGRVELLMSIPGVGEVTALTWVLEIGEVSRFSRIGQAVSYCGLCSAQKESAGKNYRGPISKKRNKHLQTVLIEAAKLAPRWNPQLTEVHERELAKGNRNRATLAVARKLVAYMLAVDKNQRKFVLKEVVAEAA

SEQ ID NO: 288891 - protein, 406 aa, unidentified
MADIFALDVSMGKSYCVWYRGKHCLKEFSLVNTKAGVNALRDMIKKAQKPIIYFEATGIYSRVIEHFCETNGLRFCRLNPLELHLKSESLRRVKTDQKDAHRIALTVQENTFRLTVPWKKDYLQLHELSRFYNQLNADWNYRLNHLHTALEQVFPELKQLFVNRTSKLALNIVELFPHPALVRPYSRVKLKNILMASTDKRISKMKAYKYADRLIDLAQKSYPAVSGDAIQVDEVRYYARQLIALTRKKEEVIKRMESIAQRLPEYILYCSFPGIGKQTAAQLMGELGDISRFDNANQLNAFVGIDIRRYQSGTYLGQDHINKRGNPIARKLLYFTVGNMIRQQHANSNHIVDYYYRLKEKRPHPKLNKVAMVACMNKTLKCLLSMIKHHEKYHYRYTDSMVPVKA

SEQ ID NO: 288892 - protein, 343 aa, unidentified
MSEVTTIGLDIAKNVFHAHGADASGSPVFSRKISRAKLLEFFAKQPRCLVALEACGGAHHWARELTVLGHEVKLIPPAYVKPFVKRNKNDAVDAEAICEAAQRPNMRFVAIKSEEQQASALVFRTRDLMVRQRTQLINAIRGHLTEYGWVAPKGPSHIAVLSNLLDGEIGSSLPDAATPMFRTMLDLLEILNGRISELDKEITRRAREDVIAKRLMTIPGVGPITATAIAALAPPVETFTKGRDFAAWLGLAPRQLSTGGKQKLGSITKMGERTLRRLIIIGCSAVVLHASKRGAPAGSWLEQMMARKPRMLVTVALANKTARIIWAVLMKQEEYKAPVAAAA

SEQ ID NO: 288893 - protein, 320 aa, unidentified
MSEQPVVVGIDVAKSHVDVAVLGTSAPAARFDNDDSGHKGLIEVLTPLAPALVVMEATGGYEAPLACALQAVGLAVAVVNPRQARDFARSFGQLAKTDRIDALGLAEFAAALLGRSDLQRYLKPLTTAAQQDLVALVNRRRQLLTMLGMEEQRLAMARPAVRRSIQALIKAIRKQLDDLDGAMAEHVTRHFAELAGLLRSTSGIGPVASATLIADLPELGHLTRRQVSALVGVAPFACDSGSMRGRRRIRGGRFELRRTLYMATLAAITYNPVIRAHYRRLVDAGKLKKVALVACMRKLLTILNAMARTHTPFQENYRNT

SEQ ID NO: 288894 - protein, 339 aa, unidentified
MQVYAGIDLHANNNYLGVIDSKGKRLFKKKLPNDPEMILGALDPVKKRLAGAVVESTFNWYWLVDLLMGAGYQVHLANPSAIQQYKGLKHSNDVHDAFWLAEMLRLDILPTGYIYPKEERAVRDLLRKRSHLVKLRTSLSLSLKNIVARNCSQSVKQNEIIRLKQDLVAPLFADNEDLALAGKMSKEVIDCLTNRINHIERFVESKLGLKDSYQYLTTMPGVGLILGLTIMLETGDINRFPTVGNYSSYCRKVPSQWTSNGKVKGKGNKKDGNKYLAWAFSEAAEFGRRYSPEVQAYYNRKFQRTNRMIAHTALAHKYARAAYYIMKDHVPFDPKRLFA

SEQ ID NO: 288895 - protein, 412 aa, unidentified
MQDILTCAMGLDVHRDIIVACLVKGAVDAEPEAETRTFSTLIPEMQKLRDWVIESECRNIAMESTGIYWQPIYEMLESCFDGEISILVVNARHMKNVPGRKTDMKDAQWIATLLRAGLLKGSFIPDKAFRELRHLTRYRKSVVHDITAQKNRIDKFLQSSGFRFTAFLSDTFGASGRNIIRHLIEHGSIDREALDKCLKTKTRNRIDEILVALNGSLSEHQRRFLNMVFRHLEDLEAHKHTVEDEITEEVLKHTDALNLLCSIPGIDVTAAAAIIAEIGTDMSSFPDSQHICSWAGLSPGNNESAGKRKSVHINKGNPYLKNMLCEVAWIMASHRKLYLSGWYWKVKQRKGAKRATIALARKILSIIYTMLKTGTPYNEECFEQRRLRCERKRANRLVNELQKLGYVVVAPD

SEQ ID NO: 288896 - protein, 361 aa, unidentified
MTTANIIGIDPHRKTFTATALDPRGGELGQAHFPNSREGHGSAVAWATGFGSIERWGIEGASGLGRPLAAYLVEAGCDVRDVPPHKTSVRQRGRHEGKTDRLDSHRVAAETQTNIRLARAFKHAEPAQPDPIRERIALWHSARRSLTKIRIQLLGELDALVQDLPVNLRGQLPAMHTVRARVNSLSRLDTSAVTDPTVSLRLQLIEHRVAMLHDVLEQDKVATAELSRLVEETGSTLTGLVGIASRAAAEIIVETGDIRRFTEAGFARFNGNAPIPASSGEGGGEPVRHRLSRGGNRRLNATIYRIAMIQLRFEPRARTIHDRARAHGHTCREAMRVLKRNLSNAIYRTMLRDARRAAGLT

SEQ ID NO: 288897 - protein, 522 aa, unidentified
MAFKRSRHSSKSGAAEFLQQPNGVVHARVQKVGPEHFGIISVDCAKARSKWMLADFYGNILIPPTEVAHNRVELAAAVKQVRTGLAKHHLRDCLVAVERTGRYHHPVKNAFRKADFETRLVHPFTTKQFRQPADPDNKTDDTDLKAIHRAAVNGFALLEAAPVESWRQLQLFIRHRRDLVRKSSALACQIREHLDAALPGYAACFDKLWESNVAFRLVQQFGSAQGMLEAGETALGEFLYQQKVRFQQRTLVTVLTWAKSAAAPDVAADLHRQIALAYHDDHARKSLEIIRLEREIAHRLAQTPYILLLSCPGINVVSAADFAGEMGPIENYANSRSITGRAGLFPARHQSDRVDYTGHLARRSNRALRAAILGIADNLILCNAHFHNLANLWKLAGKDPRMTHVKVAARFCRIAFQMVAGRQVFRHPCLRQRGYILDKLLAFHVEQQTPMQETMRDLHYAITHIPKSEHAAEAKPLHERMQTTRERGKKGPQPIRELIAIVLARLGVGVINSNPSGEEDLT

SEQ ID NO: 288898 - protein, 437 aa, unidentified
MNKSISKIYPNSAGIDIGTEYIFIGMEDKEVISFPTFTHSYIKAIEYLKENNITSVAMEATGVYWFALYDMIEQAGINVCLVNGREVKNVPGRKSDVEDCQWIQQLHSFGLLRPCFIPDDITRQLRTYTRLRQDHLSLSTQHIQHMQKALDLMNVKLHNVISQITGVSGMKILKAIINGNHNPKKLAELCEKSILKNKKDLVISSLYGNFRDDYIFSLKQAVDAYEFYQQKVFECDKKIQQLLDLITKDIPTPPNIKPPKRIRHNAPQVDNLHEKLMKLTGGKDPSQITGLTDKTLMELIGEVGTDLSRWKTEKHFTSWLCLAPGKHQSGKKNKKKIKKGHTKAGQIFRNAAYSLTNSKHSAIGQFYHRIRARKGQVVAIKATARKIAVLFYNIMTKGIEFVEKGVLAYQQKVKEQKFKYLQKQAKQLGLKLLPVNP

SEQ ID NO: 288899 - protein, 388 aa, unidentified
MYRIIKIGMDVHSKNYTLCAMEPTIGAEDRIFGEVQVAPDYKEVICFIESLKMKLGFYDEYSIECGYEAGCLGYTLYHQLTGAGVKCVILAPTTMLTQQGKRIKTDKRDARLIAQCLSYGGYHPVYIPTGEDDAVKEYLRMRDDHKLALKKLKQQINAFVLRHGHQYSGTKWTIRHVTWLKKLELAPMYRETLDEYLASCEEQEAKIERYDKRIEEIASERRYQENVKKLGCFLGIRTHTALSLIVETGDFKRFAKGNTYAAFLGLAPGERSSSENVNRLGISKAGNTHLRCLLIEAAKGICKGAIGHKSKELRARQSGQPAEVIAYADKGNTRLRSKYYKMIRHGKKTNVAVAAVARELACFVWGMMTGNISIRPTAGTSMPAVRQG

SEQ ID NO: 288900 - protein, 332 aa, unidentified
MGATGTGAAASPAAPHVGVDVSKDKLDVARSDRDGVESFPNDPDGVAALVRSLAAGPAPAVVVVESTGGLERPLLEALLDAGLPAALVHPGRVRHFAKALGVRHKNDPVDARVLMDFGRLASPRLAERRSKNQAELADLVACRRQLALARAQQLNRRSSTASAAALRSIDAVIAALDRQVELLDKRIRDLIDADDDFRHLDRLLRSVPGVGPTLSATVVAGLRELGDAGRREVAALAGVAPYDDRSGRRDGRRSVAGGRTALRCVLYMATLSAMRCNPVIRAFAERLRAAGKCGKVVVVACMRKLLTLINAMARDGLTWEQLDVVKKLAANG

SEQ ID NO: 288901 - protein, 344 aa, unidentified
MVTFGVDAHKRTHTIVAVDDNGKPLGQTTVGTTSKDHLGLVRWAARFGGERRWAVEDCRHLSRRLERDLLGAGEQIVRVPPKLMAHVRDSARTYGKSDPIDALAVARAAQREPELPSPRLDGPDREVRLLVDHRESLVGERTRLICRLRWYLHELDPGWEPKARSLDSHRTLEEVQARLNGQSGVVARLARELAGRCADLTLSINALKNEISALTEQLAPALLALPGCGPLTAAKILGETAGVDRFKSRDAYARYNGTAPLPVWSANKARHRLSRTGNRQLNAALHRIALTQARWHPPAKAMIERRRTGGDSGREAMRILKRRLSDAVFQALRSDHSEHIQVAA

SEQ ID NO: 288902 - protein, 352 aa, unidentified
MKINERISYRDKKVFIGVDVHRRHYTVCICDDELVKKCQIVAIPEQLLCLIKKYFSEAKVKVVYEAGFSGFALYRHLEQHKIDCIVVNPSSIEISSRDRVKTDKRDSLRMATQLANGRLRGITVPSKKRENQRLITRSREQLLKERTRIKNQIRFKFHQFGLFPLEFQTRLTRNQVILLLKKDLSEELRASVNLYIEIWDILDTQIKKLDKELQKQADDDPLEMVYRSACGVGAVTSRTLANELGDMSQFANEKALFSYTGLTPAEYSSGEHRRLGHISRQGNARLRRVLIECAWSAIKKDKKLNEDFVRISSKAGKKRAIVAIARKLIGRVRAAVRKGEMYELGHNSAILK

SEQ ID NO: 288903 - protein, 346 aa, unidentified
MTLAAISVLGVDLGKNVCSIVGLDSSGAVVMRRKVRRETLIGLAEKLPACLVAMEACCGAHHVGRIFATAGHDVRLMSPEYVRPYVKAHKNDDRDAEGIAEAATRPTMRFVELKSQDQLDMQTLHRSRDRLVGERTALINQLRAILLERGYVAPQGKRKLEQFLTALMDEQGGAGLSPRMMLLVADARAQWAELDRRIAAFDAEFVRWAKENEDARRLTTIPGVGALIASALVAAVGRAESFDRGRDLAAWLGLVPRQFTTGGKPRLLGISKRGDRYLRRQLIHGARAALPYVAERDTPLGRWAKELMGRAHRNVAVVAFANKLARIAWAVLRRQERFAAAPTVAA

SEQ ID NO: 288904 - protein, 470 aa, unidentified
MIRHRSDSVLLGPLASVRKPVSQPVIAAVRFMQVELPLHVRLIPQEIESAMRNAGIHADSLLEVRRMYNAVGIDVSKGKSTVAVLQPGGTVIRKPFDVSHTSQNLIELAHYLGSLEGSTKIVMECTGRYHEPMLKALYEAGLFVSVVNPHLIKNFGNNSLRKVKSDPADARRIARYTLDNWAELRQYSGMDNTRTQLKTLNSQFSFFMKQKVAAKANLIALLDNTYPGVNKLFDSPPREDGSEKWVDYAYSFWHVDCVRRIGLKTFTERYRAFCRKHHYIFQPDKPEKLFHASKELVAVFPKEKTYKLLIQQSIQQLNLASGHVERLRQEMNALASTLPEYSTVMGIYGVGKTYGPQLIAEIGDVSRFTHREALTAFAGVDPGVDESGQHKSKSNRASKVGSARLRKTLFQIMTTLLQNAPEDDPVYRFLDKKRAQGKPYYVYMTAGANKFLRIYYGKVKECLRNLEQAE

SEQ ID NO: 288905 - protein, 368 aa, unidentified
MGNDITAYVGLDVHKGSIAIGVAEPGRAAPRFVGTTGPALDQLVKALWHLGRPEQLLLAYESGPCGYVLSRELAARGYRCEVIAVAKIPRKPGERVKTDRRDALALARYLRGGELTPVCVPDERDEAIRDLSRAREDAVAARLKARQQLKAMLLRHGLRYEGKTSWTQAHERYLAKAAFTHPAQDIAFAEYRNAVREADERVERVTAALREQVAAWRWAGLVQALMSLRGVDFVAAVTLVAELGDFSRFAHPKQLMSYLGLVPSEYSTGQSRVQGKITKTGNGHVRRILIESAWTYRYPARMSRELLVRNQAQPKAVRDIAWRAQLRLCNRYHRFTARGVAQNKICVALARELAAFAWDIARHVPPAH

SEQ ID NO: 288906 - protein, 321 aa, unidentified
MKTVLGIDQAKKKFDVALLINGKYKSKVFENNLAGFSALLAWLAKNGVETVHACMEATGTYGEALARFLYEADHSVSVTNPARIKAFGQSELLRTKNDKTDAKLIARFCEKMNPTLWQPPPVEVEYLRGLGRRRDALISMRTQELNRQETSNETVNSSVQTVLECLNKEIEQVSKLIKDHISKHPDLKHKYDLLNSIPGVGPSAIEAILSEINAFEGFETIKQVVAYMGLSPKEHTSGTSVKGKSAICKIGNARLRKALYMPALSAIIHNPIVRALYIRMKAKSKNGMVIACACMKKLVHLIYGVIKTNTPFDPAYTLKTT

SEQ ID NO: 288907 - protein, 360 aa, unidentified
MNKIKPLDFTGDTIFCGLDVHKLSWRVNIRDKDIELKDFTQPPDAAILHKHLSKNYPGAHYKVGYEAGFCGFGIQRELAALGIECLVLNAADIPKGDKDRKQKNDKRDARSISQHLSNKRDVKTLYIPSTQWEHARSLVRNRQQQISDSTRCKCRIWQFLYFSSLPIPDKAETGQYWSGKFITKLQQMDCNNSAELKAALDIKLQDYLHKRKLLLESTRAIRKMYRQSSFWPLMKLILTIPGIGEINAAIILFELQDIFRFKTFDNLCSYAGLIPDTDDSGDTRRSKGLTHRRNNFLREAIIESSWVLAKKDPAMLMKYKDYCKRMHKNKAIIKIARHLMARINYVLRKQTSYVSGLIAG

SEQ ID NO: 288908 - protein, 343 aa, unidentified
MQAVTTIGLDIAKSIFQIHGVDAAGNVIVRRKLKRRYVLPFFQRLSPCLIGIEACASSHHWSRELQALGHTVRLMPPAYVKPYVKRQKNDAADAEAICEAVTRANMRFVGTKTPEQQSCLMLHRTRHLFIRQQTAVINAIRAHLAEYGIVAAVGRNGVEELLGVVADPSDKRVPEIARACLAALGAQLRMLKAQILEFDRMITAWHRSNETSKRLDAIPGVGPALATALVASVPDPKAFRSGRNFSAWIGLVPKQHSSGGKDKLGSISKQGDRYLRSLFTAGALAVIRYAKIHGTKHRPWLTALLARRPAKVAAIALANKIARMAWAMMAKGERYKEPVALAV

SEQ ID NO: 288909 - protein, 346 aa, unidentified
MMIIGCDFHPSWQQVAWVDTESGECGERKLVHAAGEAKVFYQQLGAPALVGMEATGNSQWFIELVEDLGHMIWIGDAAQIRASYVRRQKTDKRDAAHILKLVVERRFPRLWTPDREQRDLRQLVLHRHKLVEIRSRVKNELQHLSLNKGMQKKCRLWSQAGQKMLRELPLKPWASCRREDLLGLLEMLNQQVGTLDGAVQKAAEEHAQARLLMTQPGVGPNTALAYVLTLGDVTRFRRGKQVASYLGLIPREESSGGRQKLGAISKQGNRLLRSLLVEAAQIAVRFDPGFRKQYLHRCHQKPKGVAKVAAARRLAVRLYWMLRTQTAYPEIVRIESSPRVPLVGAS

SEQ ID NO: 288910 - protein, 334 aa, unidentified
MEHSTTIGIDLAKTVFQVHGVDANGAATLKRKLRRSQVLTFFERLDPCLVGMEACAGAHFWARELAAFGHEVRIMPPSYVKPYVKRGKTDAADAEAICEAVTRPTMRFVPVKSAERQAALLDHKTRDFLVRQRTQLVNTIRAHLSEFGIVVAKGIHNVERLLEATNDLPAAARQAVDMLADHLRETQDKIDEVTARIEAAQKKDPLAKRLATIPGVGTLTASAIAATTPEVDNFHSARDYAAWLGLTPQPHSSGGKERLGRISKAGNRYLRRLLYLGAMAQISVRRCGKPGTDWLWRMLERKPVKVVAVALANRMARVVWALIRSGESYRATPA

SEQ ID NO: 288911 - protein, 323 aa, unidentified
MTNVRNYVGVDVSKKTLDVSIPQENGTYLHKKISNDAVGFKSIIKHLSIDFCVVMEATSSYYMPFAYYLHANQIAVSIVNPLTVNHFCKMRMSRAKTDKKDASMLAQFGKSETPKLWKPKSDHLLELQQLQAVLDNFTNQKKSFANQLEAFNSSGKMSKSVKKIIEDQINYLKEKIKETESAMVTITEKHHLELYKNLQTIPGIGKRTAMLLIVITDGFTKFEQAKQLVSYVGLCPRLYESGTSIKGRTRICKMGMSRIRQLLYLCSMRAMRTNKQCRELFERLKQNGKNGKLAIVALANKIVRQAFAVGTGNIAYDANFYSK

SEQ ID NO: 288912 - protein, 343 aa, unidentified
MFAWLSTSLGRVLGTEQFPTTLRGYRSLFRWLGAFGQLGAVGVEGTGSWGAGLARFLTDAGVEVIEVNRPNRQARRKRGKSDPADAEAAARAVLAGEAVGTPKAATGTVESIRLLRVARRSAMKARTQAANQVHSVIDTAPEELRAKLIGLKERERITKAARMRSNNTSTPLGAAKLALASLARRWLSLTEEITQLDTHLAVLVESAAPSLLDIKGVGVATAATLLAATGDNPTRLRSDRSFAALCGSSPVDASSGRQLRHRLNRGGDRQANCALYLIVLNRLSWDQRSKDYVARRTAEGKTKKEIIRCLKRYVAREVYQAIMGDMADQVAPITTLKAFQRAA

SEQ ID NO: 288913 - protein, 344 aa, unidentified
MLYVGLDLSRKRLDFDARLVGGELFERGAVPPDGDGLAGLVRRLGDAEVLAVIESMNGARFVHDRLELHGWDVRIADAVKAKGLAPLACKTDKIDAWVLAELARLDLVPEIWLPDPAVRAERERARFRLHLVKHRSALKNRVHSILIAHGVPNPSSDLFGVGGRRLLERLLLPEPWRSTTTASLALIDTLDEEIDRCERELRRLGADHRYVPLLMTCPGIAWILAFTIASEIGDIGRFATPLKLVGYSGLTPQVNQSGENDRRGPLRKNGPDHLRWALVEAAHTAARHPSFQPILERKRAQFGHKRGTKIAAIEIARRLVRAIWHMLTRGQPFAPAGATRPLAA

SEQ ID NO: 288914 - protein, 355 aa, unidentified
MATTVLTTATQPVIVAGIDAHKDTHHVVVLDDKGLRIADQEFAATTPGYRDLLDWLTRFGLLDRVGIESTGSYAAGLTRYLLDAGIDVIEVNTPHPHTRARKGKDDAIDAEAAARKVLAGEATAKPKTTTGVVESIRLLSLARNSAVKARSAALTQLQNTLITAPARVREHITARGGRGKASQCARLRPDTTRLDDPVQASRMALRSLARRVHDLDEEITAVQTQLDRLVARTAPTLVSRVGIGTGHAAQLLVTAGQNVDRLGSEAGLARLCGVAPVPVSSGKSHRMRLHRGGDRQANRALHMIAVCRLRYDQRTIDYMRRRSAEGLSKKDVLRCLKRFIAREVFHDLKTDLGLA

SEQ ID NO: 288915 - protein, 338 aa, unidentified
MTVEILGVDIAKNVFQLHGVNRNGRVILKRRVMRDQLLAVLAQIDPCTVVVEACTGAFFWARKFETLGHQVKIISPQYVKPFVRRQKNDGNDAEAICTAACQPHIPFVPKKTATQQDIQALHRARQRMVNHRTAVVSQIRGLLLDRGFAIAKSITRARRAIPEIISDLENELTTMAREAITELYDLFRDLDRRIASFDKKIDCVFRGNEDCQRIARIKGVGPKTATAIVAAVGDGSEFKNGRHLAAWVGLVPRQHSSGDRKVLMGISKRGNQHLRSLLVHGARAVVRTAPNKSDPDNQWVNQLRERRGFNRATVAVANKNARIIWAMLRTGKPYRAAC

SEQ ID NO: 288916 - protein, 416 aa, unidentified
MKIVRPICCGMDVHKNIIVATIGITNKKTRITEYIQETFSTLNPDLLNLKQWLINHKCFDACMESTGKYWIPVFNILEDEINIYLTHPKYVKAIKGKKTDKKDSKWICDLFKHDLIKFSFIPPKEIRALREISRYRYKLVGMRSSERNRYQNCMTVSNIGIGSVFSDPFGKSAQAIMKEVLESDIIEDEKILKCIHGSCKNKDKILDSIKHCNIETDQRFKMNESMTHMEELQVHIDNCEIEMMKRAAPMFDQFMHITQLPGISTLSAILIISEIGVDMKQFESDKQLTCWAGLAPANNESANKKKPVRISKAGQYLKPLLVQCALGAIKDKDGYFGIKYSRIKKRRGHKKAIIAIARMMLVSIYHMILTGETFNPSDYESFRNPKPPIKQQVLTEESAIEFLKKSGFDVSKLTKP

SEQ ID NO: 288917 - protein, 320 aa, unidentified
MMAQNDRVVVGIDVAKDKVDACIRSLSQRQTFPSGAEGRRKLIAWLRKHKVDKAVMEASGGYERDWAKALREACFEVRIVDPKRVRNFARSAGRLAKNDVIDADTIAWFAETFDEAPGQTHDAAREELAALVKARKAVIDLKTRLQSQNEHAVPGAVQKAHARVLKGLDAEIARLEDAIAVTVKATPAFAARAEIIESVPGLAETASAVLIAGLPELGTVREEVAAALLGAAPYDDDSGKRRGERHIKGGRRWVRNALYMPCLGAATRNNPVLKAFYERLVARGKEPKVALIACMRKLIVILNTMIARGEKWDPSRYALR

SEQ ID NO: 288918 - protein, 375 aa, unidentified
MFLEEWPAADGYPRRAAGDRIEPTLSSFWLPRSVIVVSTFIGPGWLPEQLGSLHKAGSKKMTQTNMTTAGIDTSKAKLDIAVHGRTERWKVANALPGWRALAANLARADVTRVGIEATGGYERGVVEHLRAAGLTVLVLQPVQVKAFGRVHLRRAKNDALDAELIAACTAAIDQLRIVPDARLTELAGYLTFLEQTEEDIARFKTRLEHIDEPGLRRIVNSDIARLKARKAAQIRDIAKRLRAHHDLARRLDLVLSIPGIGERTALALLIRMPELGQVSREEAAALAGLAPFDHDSGQHRGQRRIAGGRGRLRRSLFAAALPAAYRWNKALIALYARLKARGKAHNSALIACARKLLIYANTVVQRGTPWTEKAA

SEQ ID NO: 288919 - protein, 417 aa, unidentified
MQDFAAFVGIDWSDSKHDLCLVDSSTPHKEFSVLTHSPEAIDEWASGLRSRFKGNKIAVCLEQSRGPLIYALLKYDFFVLYPINPSTLARYREAFSPSRAKDDPKDAEYQVELLLHHRDRLRAWLPDDPKSRQLRFMVEHRRRLVADRTRLSNRLTAELKGYFPQVLLWFSDVRTLLVCDFLLRWPTLSEVKRARRGTLEKFFREHNSSRKEKIEERISSINKAVSLTTDQAVISSSALMVKALARQMKVTIEAIKEFDREIEGLCSSHEDYHIFESLPGSGKVYAARMLAAIGSNREKFATAEELACLSGIAPVIERSGKSSWVRWRYFCPKFLRRTFHEYAGESVLHSFWAKAYYESQRAKGKNPAAAVRALAYKWIRIIWRCWKTRTEYDEVKYLESLRKKNSPLLKYAASHPE

SEQ ID NO: 288920 - protein, 433 aa, unidentified
MDLMNRCIAGIDVHKKMLAVVIRKPGQAVEYIQRKFGTTKNEIRHLAAWLQHHSVSQVVMESTANYWRPVWYGLEQHLTLHLTHPLKTRAPRGRKRDYRDARRLADRWHSGDLEESFVPGAEQRSWRWLTRARVQMKRKMGVIRNQVEGILEEGGIKLAAVATDIFGVSGWAMLEKIAEGERDIDELMGQVRGRLKKKKAQLEEALIGALEPVYQMLLKQQMEQVQMLRRQVEEINEKLSAAMKDHAAVLVRLVKIPGVDLYAAQELLAEIGVRALAFPSGDQFASWVGVCPGSQESAGINHSRRSAKGDRYLRRLLCQIAWAAIHTKDTFFGALFARLKPRIEAKGAAWAVAHRAGHVIWLVLHEEVEYKERGPAPLALGRSNGSLSALPVSSPVRVSTLSPCWNRRSRKLHEEEIFEGARLRSSPQLCAAP

SEQ ID NO: 288921 - protein, 371 aa, unidentified
MRENTIFVGLDVHKNSISVALADVGRDGEVRSYGTIPGDLESVHKVVRKLQSTGATLRFVYEAGPCGYDLYRSLTKKGFDCVVVAPSKIPRKSGDRIKNDRRDALSLARLHRAGELTPVYVPTAEDEAMRDLTRGREDAVKALRVARQHLLAFLLRYGHRYNGKSYWSKAHWKWIADIKMPHGAQQIILQEYVHAIHEQSERVQRLNEQIRELVPQWHLAPMVKALQALRGVSLIVASTTLAELGDLTRFSKAKQLMAYLGLVPSEHSSGDNKHRGSITKTGNGHVRRALTEAAHAYSHPARESRILLARLEGLPQRVQQIAWKAQVRLCGRFRRLLARGKNRNKIVSATARELSAFMWAIAQEVQPRSQA

SEQ ID NO: 288922 - protein, 401 aa, unidentified
MSIVFGIDVSSRDSSVCVLQSGATREYKITNDTIGFKTLLIDLKEYAEHPQIILEATGVYSRRITRFLDEYDYDYVLLNPLKAKKEINQGLRRNKTDRNDAYHLALAQDRNQHQPNRKEPEVYHQLQSLSRAYEELTHDIISSKNRLHKYLQLTFPELETIFNNSRGVNYWYLVELFPHCQDVRNLEVSTIAKQIKDFKGYGINRAQKLAIKLKHLADLAYPAVDQDDPERDEVVYYANRLLRLIADRERRSEAMIKLAKTLPNRDLEILMSIPGIAEITAVRILAELGDIRRFSNPNKINAFVGIDPGRYQSGEKDSNLRISKHGNAVARKILYRAIGQIDLAAKTSPCHIADYYERKKQFSQTKGFKKIAIASIHKLLRTVYILIITDQMYDYNVANNN

SEQ ID NO: 288923 - protein, 377 aa, unidentified
MHSENIAAYIGLDVHKETLAVAIAAPERLGEVRYYGTINNEAQAVRRLFQKLQGLYGNILSCYEAGPCGFGLYHQLTAMNIKCQVIAPSRIPKSPTDRIKNDHRDAISLARLLRAGELTPVWIPDLTHEAMRDLIRARAAAKRDSRVARQRILSMLLRTDKRYAGKHWTGKHRTWLANQSFSQPSQQIAFQHYCQSLEQIEDRILQLDQEISRLLPEWSLCNLVCQLQALKGVGQLTAITLVAELGDFSRFSSPKQLMAFLGLVPGEYSSGNSIRPRGITKVGNSELRRLLYEAAWSYRTPAKVGAWLIYYRPDSVTQYSKDITWKAQQRLCSRYRSLTAKGKKSQVAITAVARELTGFMWDIALAAQSPFSQQKQN

SEQ ID NO: 288924 - protein, 366 aa, unidentified
MKKISTMQVFSNEILKDQKLTIGVDLGDRWSFYCILDEAGKIILEQKLPTTPEAMKQTFGKISRSLIALETGTHSPWVSRLLTELGHEVIVAHAQKVQLISKSNRKDDRHDARTLARLARIDPELLGPVRHRSAQAQIHLTVIRARAELVSARTALVNAARGLAKSYGERLPKCGTYQVSEKLAERLSAELRDVLGPLLKEIESLNERVKEYDERMEKIAKEVYPEVSLLQQVKGVGTQIALTYVLTIDDPYRFSKSREVGCFLGLKPGRRDSGESEPQKGISKEGDRYLRTMMVQGAHYILGPFGEDSDLRRWGLKLAERGGKNAKKRAVVAVARKLAILLHRLWVSGEVYEPLRNSQKAVRAVA

SEQ ID NO: 288925 - protein, 388 aa, unidentified
MQSTVDRIEASTAIQTDLRAIFVSLELSRSTWLITSLSPGAREKISRHSVQAGDVAGLLGRFVLLKQKTRTRTGRDFPIISIQEAGLDGFWIHRVLQSEGIESHVVDAASILTSRRRRRAKTDGIDGETLVRTLLAYKRGEPRVCSMIKVPTPEEEDRRRVCRERKILVAERVEHVNRIKGLLFAQGVFDYEPLKRNRRARLEELKTGDGRPLGARLKAQISRELDRLELILPQLKAVEAERDALLEPTREDHPAPAAMLARLKGMGPEFTAILWSEALFRRFDNRRQVAAYAGLAPTPWQSGSVVHEQGVSKAGNPRLRTAMIQLAWLWLRHQPTSALSLWFRERTQRNGGKMRKTTIVALARKLLVALWKYSTHGVIIEGAVMKTS

SEQ ID NO: 288926 - protein, 462 aa, unidentified
MERYRGPEQPHSIAPRQCAVCPVQASTERTERDTRNESTPGARGPVFCGVDTHADSHWLCVLDWRGRRVLSRRFPADAAGYEALAGAIAAAGEPACVAMEGTSSYGAGLTRHLASLGMPVREALSPARTQRRRPGQGKCDEADAERAARAAMSGSKLGVPKSQDGWVDGVRCMLAARSGAVKARTSAINTARSLLTTAPEGLRSRFRGMGGPRLMEELPSVRAEGALGAALGALADLWAAARDAALDMERAIEASLEENCPALLAMYGCGPVSAAKLAVAAGDNPGRLRSEASFAAICGACPIPASSGKTVRHRLNRGGDRQANSALHEIARQRVMRDPETAEYAERARARGKSDREVMRCLKRYVAREAYRALMRPHEIRRPEDASELVAARRAAKVSQVRAASILGTSEKYISMLERGQRELKPIRRAYEAWVEAGLPLDWDRQAFEAERKMDSKKHLAK

SEQ ID NO: 288927 - protein, 384 aa, unidentified
MTDQRIPYCGRIVYVGIDVHKETYTVTCVCHKQIVQTVTMQADPAALAASLPRRFPGATLYAVYEAGFSAFVLHRVLTKADITNIIVNPASVAVAANDKVKTDRRDSKKLAIDLADGRLRGISVPTEAEELARLLPRTRAQIVKHRATIARQIKAKLHQFGLIAPASRRLISSRYLREIAAWSLPQELSVSLTLLAEQWRFATRQLIEMRRLLRDQAQAQEEIEKVYRSVPGIGEVVARTLATELGDMTRFANERALFSSTGLTPSEYSSVASVRRGHISRQGSSRVRHVLVETAWRALPRDGVLKERFDRIAATRGKKRAIVAIARRLTGRIRACFRQGTTGFDHRVGHCRPLRIMGIGSKLSCLQGVRWFHLGQEFLGWPMP

SEQ ID NO: 288928 - protein, 370 aa, unidentified
MLDTTTFVGLDVHARSIKAVSLDVMTGEVRAATFGYDAGAVAGWVRSVDPRARCVYESGVTGFDLQKRLSGLGVDCVVGAVSKMIKPSADRRRKNDRNDAEFLARMLSVGNVVEVWVPDDECEAARDLTRALEDARDDLSRSKQRLSKFLLRHGLVFDERTPTGRRKGNWTRAHWSWIESIRFAEGADNDVLAYYVDAVRRAAEEKARLEGLVEAEARKPRWRRRVDSLRCLKGVDTATAADLVFEAGEFSRLGNARSFAAWVGLTPSEHSSGESDRRGAITKAGNKHLRKALVEAAWHYLTCSGRPKDLARGQAPDRGARRHAAKGVRRLVERRGTLLARGVHNNKANVATARELACWVWAVGLMAEEA

SEQ ID NO: 288929 - protein, 447 aa, unidentified
MATKRAHAPKNQRAVLNRINYNVAGIDLSSEDMFIAVIEKNVCQFSTFTKGLEDAAVYLKSEGIEKIVMEATGVYWIPVFEYFEKQGFNINLVNGAHAKNVPGRKTDVLDSEWLRELHTYGLLRASFIPDEKIRELRYYVRLRDDHTSMGATHINIVQKNLDMMNIKLHKVIDSIMSVSGLLIVQAILDGERDPERLWSLCERNIDNKKKDGLICSLKGNYREEYLFGIKQALEMWQHYQELQKQCDAEIEKILRKMTSDIEEPKNQGTEKPIKKRNKPVIEDFHLLMTKLTLGKDTTAIAGINDYSALKIIAEIGTNLDKFKNEKHFTSWLGLSPSAHQSNKKKRKKGRRHCNRAGMIFRQIAVNVGNGKHTALSSFYKRIRARAGKMVAIKATARKIAIYFYNLLTKGVQFVEEGIRRYEQRYTEQQEKYLQRKASEMGYMLVKA

SEQ ID NO: 288930 - protein, 337 aa, unidentified
MKNETACVVGIDVAKRKFDIALLINNKIKTKVFDNTAAGHKAFEDWLIERSAMPGQTHLCMEATGPYSEVLATKLVTDGWQVSVVNPARIKGFAQSELARNKTDRADATLLVRFCMAMRPNLWTPPPIEWRELRGWVDRLQALKEIHQQESNRMEAHLASEQMQLVQDVQIHLDWLSKQIKELERSINDHIDRHPDLKRDAELLGSIPGIGDTTVAKVLAYAGNIRRFANAKALAAFIGVTPRQRLSGSSVKGRTMMSRTGHGDLRRALYMPGMVARRHNPVLKIFGDRLSAAGLAPKAVIGAVMRKLAHLIYGVIKSEQPFDANFNHSTLAIQDGI

SEQ ID NO: 288931 - protein, 370 aa, unidentified
MSVRRILAKTINTDLEYEAIGIDLAKNCVSVALLTTDGEVVCIDRLDYSELEKSAQVLCPTTFAMEPCTEMNYLVQKLEAWGHRCLVIGGKNVQNYVENHYSGQKTDLNDAQALAFLAQDTQLRTIKAKDMEQQKYASLTTLREQYIKQYRQTIVSLKGICQAWGLNISKGISGKARLKDLIENHAAFPEELKESLVDMVTHAQTAQKALNKITKTLEELAKNDKLCQLIQTIPGLGPICSCRLRATVGDIKRFKSPKDFPAYYGLVPRSIATGHNEKKGRITHRGDKTMRSLMVQGAGSVINMATRGKLKSKQLTKWILKKQKEKMPWGKLVCAVAAKLLRIVRAVLISSKPYNSKIAGVAKCSLPKGA

SEQ ID NO: 288932 - protein, 474 aa, unidentified
MRKQAKQRPDLQAVPLLKHEPLYIGIDVGKMKHGAGFVSTTLLERHQRFEACPALAFENSREGFRALLERIQSLAPLEHCFILMEKTGHYHLALQQYLQECDLPVYTMHVQTRPAGMLKTDKRDALGLANTLYNQLQLGIQVADKTHLVRRAEPPTAAAAQLKGLIRHRYELVRESTQRKNKLTAICDEIFPELTRVLKDPNLPTALTLREKFPTPHAIATASLTALQEARGYTRTLPDSKLLELQRLAASSIGTKDVTRQRSLVLEQGQLMKELRLLQEHIGQLESEIKTIVDQAREGKILLSMGIGPIQAATIIATIGSILNFPNAGTLKSYFGWAPMREQTGTTFDRSHLTSRGSRTMRQMMFLIVANLTRQETEWSYLYKRLVQAKCPYDEHTGERKGKLRIMGRVAGQMIETMYALLKKDGEILSKITPGQEPPPPILYDPALHRRHREGHYQPLKSSSPPSLIMLQPK

SEQ ID NO: 288933 - protein, 436 aa, unidentified
MRGCRCSMIMGFTKPIEHFNLQRKKVITMNTLYVGIDVSSKSNVVYLMLPNGDKHSNFSVANSHEGSTLLVKKIYSALTSHSLDTVLIGLEATSVYGDNLVYFLREDATLAPFNRKIHVLNPKQVKKFHDTYNDLPKNDYVDSFVIADCLRFGRINKEVYMGEYRYKALQNLTRARFFAVQNLVKEKQRFMNVLFKKYSTMTQEKVFSDAFSTTALAVYDEFESAEALANMDLHELTDFIIEKGKNRFPDPDAVAKAIQKAARSSYRLPKTVNDSVNQVLSISITSMKALESQIKEFDKAIKALMELLPNVLISIPGIGPVYSAGIMAEIGDINRFDNQASLAKYAGLAWKQHQSGGFEAEVTRLIPSGNRFLKYYLCEAAFSLVRCDKKYSDFYHLKYKEVNRCQHKRALALTARKFVRLVFRLLKDNLLYCPAK

SEQ ID NO: 288934 - protein, 351 aa, unidentified
MPHKLNSAIAVIGIDIGKNSFHVVGHDKRGAIMLRQKWSRGQVEARLANLPPCLIGMEACVGAHHLSRKLQMLGHDARLMPAKYVRPYSKGQKNDFRDAEAITEAVQRPTMKFVATKTAEQLDLQALHRVRERLVSQRTGIINQIRAFLLERGVAVRQGLRFLRNELPHILAAPCDALSPRMLRVIEDLAGDWRRLDERIEGLSSEIEAQARQDKGCERLMTVPGIGPIISSAMVAAIGTGDAFSKGRDFGAWLGLVPKQISTGDRTILGSISKRGNRYLRALFVQAAWVVLVKVGPKHWARYGLKSWIEAAKKRLHHNVLAIALANKLARIAWSVLAHGRTFEASKIQAA

SEQ ID NO: 288935 - protein, 338 aa, unidentified
MEWTVAIGVDTHKHMHVAVALDRFGTQLGSREVATTESGYRSLLAWALELGLPAFAVEGSGSYGAGLVRFLQLAGVAIWECERPRRRERRRGKSDLIDAALAARRLLSGDGLCLPRGGGRREELRLLMIERRSAIQARTAALNQLSAIVVTAPEPLRQRLGRLSGERLAGAAARLRPGDDVRTAVVHRLGRRAERLSHEVTEVDRRLLEILTEVAPALLAECGVGPVCAAQLLVSSGDPNRMASEASFAALAGTSPLDASSGQQRRHRLNRGGDRQLNRALHVIALARIHHHAETAAYYQRLLAAGKTAREARRCVKRALARYFYRRLREIPTPALTT

SEQ ID NO: 288936 - protein, 344 aa, unidentified
MEQISRIGMDTSKHVFQLHGVNAAEVVVLRKKLRRKEMVAFFEKLTPTVIAIEACGASHHWARLLQSFGHTVKLIAPQLVKPYVKRSKNDAADAEALCEAMSRPTMRFVPVKTAEQQATLMLVGVRDRLIRNRTQLANAIRGHAAEFGLTAAKGVAHLAPLLERIQADESLPALARELFAMQAKEYAQLQAQIDEVEAKLTAWHKADECSRRLAKIPSVGPIGAMLLRMKAPDPALFQSGRQFAAWIGLTPKDHSTAGKVRLGVITRAGDEGLRSVLVVGATAVIQHAQRSGKASPWLLELLKRKSPKLAAVALANKTARIAWKMMLTGETYTAKSAPAMAGAV

SEQ ID NO: 288937 - protein, 408 aa, unidentified
MEVLYPRCAGVDVHKKTVVACARIARGGEVDQYVRTFATTTGGLFELLDFLQEHGCTHVAMEASGVYWKPIWHMLEESFELVLGNASHIRNVPGRKTDVNDAMWLADLLAHGLIRASFVPPSPIQELRALTRTRKQLVREQVSHVQRIEKILEDANIKISSVMTDILGKSGRAMLHALIAGETDPTKLADLAFGKLKRKREELVKALHGRVTAHHRFMLRLHLDQIAALDSGITAIEREVSAQLEPFLAAVELIKTMPGVADTVAHVVIAEIGIDMSRFPDAAHLRSWAGMCPRNDESAGKRRSTRLRKGAPWLKTNLVQAAWAAVKVKGSYLRALFLRVKARRGAKKAIIAVAASMLTAIYHMLRDGVIYQDLGDAHFATIDKERTTKRLVTRLESLGYSVDLKATA

SEQ ID NO: 288938 - protein, 417 aa, unidentified
MNDSEHWKQHQAYGALDWASEKHSVIIVDQAGKVIEDFEIEQSALGWKKFREKLQPYGSIPFAIETSQGAAVEQLLEAGMIVYPLNPKSAQAYRERKAPSGVKDDRLDAWSFADALRVDGQDWKALRPEEPLIKELRLLCRDEVSLIEQRTAFISQLRHALAEYYPAALEAFEDWTSVSAWMFLQRFPSPELLALAGKRQWQKFLHSRRLWGSDQGPRRMEIFAHATELSGSAPTVKAKSLLALSLVKMLFVIEKQLAVYRQRIEELFARHPDHDLFGSLPGAGPKIAPRLLSEIGDDRERFDGDARILQCYGGTAPVTKRSGKYRHCHQRWACDKHLRHAIYLFAEKSLSRCVWAQTYYQHHRQKDRSHANALRRLGHRWLKIIHKMWMDRTLYDPELHHRNQLQHGSWIFQLKEC

SEQ ID NO: 288939 - protein, 294 aa, unidentified
MLIIGCDYHPSFQQIAYVDTETGEVGERRLDHPDEAERFYGELQQRNVPVRVGMESSGHSRWFERLLQQLGMELWIGDPAEIQSKRVRKQKTDRQDAQLLLRLMMENRFPRIWVPDAENRDLRQLLWHRHRLVQMRTRVMNQLHVVALNEGLQRKKALWRPAGREQLQSLVLAPWASRRRQDLLELLDQLTPQIQKLTQALEQEVQKRPVTRRLMTHPGVGPLTALAFELVIGTPERFHCGKQIASYVGLVPEEKSSGNRRRLGHISKQGNALLRFLLVEAAQVTVRSQPEWRS

SEQ ID NO: 288940 - protein, 419 aa, unidentified
MIGAVLECCAGIDVGKKFVVVCVMTGPADGEAQAQTRKYGTVNGELQKLRDWLKSCGCFHVVMESTGAYWKPIFNVLEEVEGMHVVLANSQQVKNLRGHKTDPEDAHWLAYLLRHGLIRPSFIPPKPIRELRDLTRRRRQLVRSGAQERNRVQKVLEGANIKLGNVLSDVFGLSGQLMLEALLEGNANTDQIAELAQKSAKKKIPQIRASMLFFQMNDNHRELISLSLNHMGFLEEQIMELDGKIAEHICASGLEQEQQILQTVPGVKQEAAASILAELGPDMKVFGDVEHCSSWSGVAPGNNITGGKRKRAPAMHGNPWMRSLLTECAWSASRKNGSEFQRQYELKKTRLGHKRAIVAVAHLLVTAIFEVLQTGKPYTKPGANPMPGTKAAKLIRHHSRRIKTLRKRLLRQTKTSVSP

SEQ ID NO: 288941 - protein, 281 aa, unidentified
MSDRVESSYVGVDLSKGRLDVAFRPTGGHYRFSNDPNGIDALVSRLAKEHPALVVLEASGGYERPAAAALAASGLAVAVVNPCQARDFAKATGRLAKSDALDAESLARFAEALRPEPVRRRIWAHVRWLEKEISRTDGELKGAIEGSPTRRENEALLRSVPGVGPVLARTLLAELPELGTLSHKHLSALVGVAPFNFDSGTLRGKRMVWGGRSRVRSTLYMASLTATPHNPLIIRAFYERVVAAGKPRKVGLVACMRKLLSILNAVVRDRVPWSPTHVLSP

SEQ ID NO: 288942 - protein, 451 aa, unidentified
MAKRREKRERRSVVWEPDAAGIDIGAEEIYVAVPPDRDEESTRRFSSFTCDLHALADWLGRCRIRTVAMESTGVYWIPLFQILEERGFQVYLVNAHYLKSVPGRKSDVSDCQWIQYLHSVGLLRASFRPPDAICALRTLWRHRGSLLEMAAEHILHMQKALSQMNLQLHHVLSDITGTSGQAILDAILAGKRDPVELAQLCHSRVKSPRDKVAQALVGDYRPEHLFTLKQSLEGYRYYQKLILELDQETARLMQALPSATEQPLPPRTKATAYHRQGNDPHFDLRSELYRISGVDLTDIPGVSAATAQVILTEIGSDVSRFRHASAFASWLGLCPEKRVSGGKVLSCKTRKVKHRAATALRMGANSLCRAKGYFGEFFRRMRAKLGTAQAITATAHKIARILYHVLSTKEPYTETIFHLYDEQAHQRAEIRLRKQAARLGFQLVTIPATGQ

SEQ ID NO: 288943 - protein, 462 aa, unidentified
MEANEVGPDKVHPWLLTEPECWYVKPVRSGTTNSFLALSCELARVFDRPPFLASLFLTRRVELPVCASSTEKCMPHEMGVSMRSIGIDLHKSYAYVFELGQDGAKKHYRVELTDAELSSFFGTLGQDAQVVVEASTSSYRFSEMLGQRAGRVVVSDPAQTRGALSQAAVNDHKAAETLARLLQSNFIREVWVPPATSRALRSQVALYQDLSRMRTQFINRLKSLLQQEFVEFRVGKLGPRSHALLDRQFKEQPELRFYLCSLARSINHVNSELAQLEYLLGAWCKKSDDAQLLLTIPGMGVILTVTLLAQIGNIKRFPTAAQLCSYAGLVPRVYESGKTRRYGHISRAGRSSMRWALNLAAWGGSGNSKAIDDFKRRLAERRPKMVASTAAARKLLAVIWSMLTHRRPFRDEDPGLSARKRLSLQAWPELDAQALEVPKIRDSRPSIRALKRTGQSDTESAE

SEQ ID NO: 288944 - protein, 342 aa, unidentified
MTTFVSFVGVDIASASFMACIGTTPWKITVKPVKFENDEDGFVSFLGWLKENNLKAENTVVCMEATGVYSEGLAYFLYASDYTVAVEPPLAIQCKFPVNASKTDELDCQHIAEYASRYQDKLSFWKPRAEVLEQVKVLLTTRQHFSVQLTGHKNALHAINRKKVSSELAKRSHQNMIEQIAKAIKEIDQEIRRLIDSDPTFKQTLLLLLTVPGIGLQLAAHLLILMQETLDPRVLASFIGISPLKHESGTSVHSAPTSRHFGPPTLRKLLYLAACSVRTHKKPFQRYFFRKVAEGKHKKLVLNNIQNKILKIACAVVRSQQPYIPNYAPVNPLVFQKSLTAS

SEQ ID NO: 288945 - protein, 467 aa, unidentified
MVVPYDEPSKPKKSRRKSLPVPVPASSAPLNVINPDAAGIDVHSDMHMVCVPADREAEPVRQFGANTADLQEIVVWLKECRVKTVALESTGVYWIPLFELLESEGFEVYLVEPGQLSRCGARPKTDVLDAQWIQRLHSYGLLRGSFRPPDSVLALRAYWRQRQMQVRYAASHVQHMQKAMEQMNVKLTEVVSDITGQTGMSIIDAILGGERDPIKLAKLRDERCHSTEDQIALALQGTWRPEHLFELRQARALYQFHHEQITECDQQVQAELAKFPNRAGEKTRTKKPRTRGRKSNDVRFDAKGPLFQALGVDLTLIEGIDVGTALVILAEIGVDVSRFPTEKHFASWLRLCPPQDQSNKTKKRRGHRKGTNRVASALRMAARSAGKTMSPLGLFYRRIRSRIGGLGAVKATAHKLACLVYRMLKYGEEYVIQSMEEYEAQIKAKVLDSMKRKAAAMGFKLVPVPAK

SEQ ID NO: 288946 - protein, 341 aa, unidentified
MEHTTIAVDLAKSVFQVAVSHRPGHLDEERRLSRDRFLAFFAQRPPATIVLEACGSAHHWARQLQPFGHAVRLLPPHDVRPYVRRNKTDRTDAKGLLEANRNEEIHPVPVKTIEHQAIASLHRLRSTWLATRTARLNTLRGLLREFGIFIPTGSQRVVPRVRALHEDPAVPPLLHATLAAACDEIEMLEVNMRAVERQLAALADDMPDVQLLQTVPGVGLITATALVALVTDIRRFPSGRHFASFLGLTPREDSSALRRRLGAINKQGDVYVRMLLTHGARSLVWHAKAAKRPTSLQQWAMQTELRRGRNVAAVAMANKLARIVWAVWVQQRPFAADHRRG

SEQ ID NO: 288947 - protein, 344 aa, unidentified
MEQHKTYYVGIDISSETFTSSIGTGDQGWSVLGKAETFANTQEGNNDYLKWLSQQDVRPGNSIICMENTGVYSEQIAYFLQSQGFQISIETPLKVKRSFKIDGHKTDPVDSRQIAEYAYRFYDELRIWKPRREVLEQVKILLATREQLVTQKTGHCNSLKALKRKVIRVGMAEELLETLISTLKDQIKAIETEMNKLIRQEADLAQEQALLTSVPGVGKLLSAQALILFHQMDGELSDKKMAAFIGICPYEHSSGTSVKRKARTSQHGPEVIRKLLNLAARSVCTHIPVYRQYYLRKLAEGKAKSLAINNVGNKLLSVMVAIFKSGVPYIPGYRSIHPRLLTKS

SEQ ID NO: 288948 - protein, 349 aa, unidentified
MDRTTYGLDIAKNVMQLHWVDGETGEIGRRKLGRAKLSEFFAQMQPARVAMEACGSAHHWARVLGALGHQVELLPARQVRAFVRSNKDDAADARAIWLAAQQSDIRRAPIKTVEQQAVMSLHRARSHWVSVRTATINMLRSLLYEFGVVLPGGKKAGLKTMSARRAEIDDQLPQLMRELVDLQLEALKGVERSIDQLEAGIAEQHRQIGTARTLREVPGIGVLGATALAATLGDASGWRSGREFAASLGLVPAHSGTGGKTRMGHLSKRGDPYLRTLLIHGARAVIAQAKVMPTWLEQLLRRRPLNVAVVALANKMARTAWALLAHGRAYRSEWKSTPPSGCGAQAQAA

SEQ ID NO: 288949 - protein, 351 aa, unidentified
MSGLLVRARTVARTLGTRATESASARKGQAIMDSPRPVVGIDVSKDRLDVACLPSSVLTPKEAAFDNTPKGHQRLIAVLKRIQPRLIVLESSGGYQRVLVATLGAAGLPIVVVNPRQVRDFARAMGVLAKTDTIDAMVLARFAEKVDPPIRPIPEPELVDINALLARRRQLVKDRTSETNRLEQCTCARVRTSHNTVIDLLSREIADIDNDLDQRIRNSPIWQHKVALLTSVPGVGDVTARTLLAFLPELGTINRQTIAALVGVAPINRDSGLMRGRRSIFGGRAVVRHVLYMATLTARRHNPDIKRHYEQLVARGKPKLVALIACLRKLLVTLNALIKHQTMWAPKTLQA

SEQ ID NO: 288950 - protein, 321 aa, unidentified
MTYVGIDVSKVTFVVAYSSVKTNKTRTFKNTVNGVHEFVQTISASEHNCVLEATGNYSALLVYLLSEAGITISLENPLKIKNFARVMLTVTKTDEIDARLIALYGEKMQPAPYKLRSDASLVLKQKRTVLRQLKKQLVATRNLKGSMEVLPFFDPKCKKTIEKTITFLEKQIKEMEEELASLAQGEYKKQMDLLTSIKGIGVTLAAPLIVATSRFSYFDNAKQLTRYLGLSPTYQQSGTSVNVKGHINRNGDSSLRSQLYVAAFSSLRCNTECKACFDRLRSNGKPGKVVVIAVANKLVRQAFAVVTQGKPYVDGFKSEKP

SEQ ID NO: 288951 - protein, 406 aa, unidentified
MASARRTAFTRSRPIPPKGMSIYEGRAFETMFVGVNMSRTTSPTQETGMKILAIDLGKSKSVACVYSVETAESRFNKVGTSPGQLHELILKVRPDRIVIEVCSAAGWVADLVETVGIELQVANTAAPAWRWSNTKRKTDRDDALRLAQLSALGQLPRVTIPKRDVRQWRALIRYRHHLVRRRTQLRNRIRALFDREGLTLPTGKQCWTNAGIAMLHEWARSLDEAPDQELWRGELACELEILQIAELLIARVEAKLDRLAEANTACQLLQSIPGVGPRLAEIVVAVLDDASRFQKGKQVGSYAGLTPRQYQSGDCDRQGRISRQGNPLLRSLLVEVSWVGLQYNPWMRAVYEQVRRGSPTRKKIAIVAVARRLLIRCWAMLRDGVPWRPPNTEPIPSRTCGVVGAH

SEQ ID NO: 288952 - protein, 353 aa, unidentified
MTNNIIDTIGCDLGDKKSEICVLGADGAVKERTSAWTNRKGMAAFFTRPTAHVVVEVGTHSRWVRDLLLELGHQVTVANPRRVKLISASDNKTDRHDAELLARLGRVDVKLLAPVEHREAQVQADLAVAKARDTLVATRTKLVNHVRGTVKSFGERLPMCSAASFARQTRKRLPVQLKPALEPVYQALERIDEQIKEQDKMIERVAKRYPDVDVVSQISGVGVLTALVFVLTIEDKDRFSKSRMVGAFLGLRSRKSSSGNDDPQLRITKAGDPFLRRLLVNGANYILGPFGQDSDLRRWGLELAKRGGKNAKKRAKVAVARKLGVLMHRLWVTGEIYEPLGYHQRQLDQKRAA

SEQ ID NO: 288953 - protein, 357 aa, unidentified
MESQEVKYVGVDCGKKSIEVVRINSENSLERRQFSTTESGINNLLQWLTLNDIVGLEAGSQSFRIAKSILNKGVQVIVLNPGNLATIYQSLKKTDKEDSLKIARLIQRFPIEELPTVPIPNDEEEDNRRLCTEQENWTKQLTQGKNRLHSLFTQAGLTQITKKHLRTKANREISVALLPSRYQKEAERILKVLDLVEQNLKLIEKEIQEALKKNKAYVQTIMSMPGIGMITSLAIMSYMGDCKRFSSAKQAAYYAGLVPRVDISGDTVRYGRIINRGCHSIRRVIVQAAWSLVRCQHGGKVKEFYQRLYLKKGAKKSIIATSRKMIEVLYVMIRTGKLFDSMPENILNRKLAQYGLM

SEQ ID NO: 288954 - protein, 342 aa, unidentified
MEISTIGIDLSKTTFHLIGLSPRGEIVLRKKLSRKQLLIYTATRKPMLIGMEACGGAHYLARALRDQGHDARLMPAQYVKPYVKTNKNDYLDAEAIAEAVQRPTMRFVPIKNNEQLDLQALHRVRDRWVARRTAVMNQIRGFLLERGIAIRKGPSYLTTQLQIIFAEGDSSFSGRLLHLILELKHEWDELERKIEEASAELGRIAKQDDGCHRLMEVPGFGPIVSTALVAAIGNGVSFRKGRDLAAWLGLVPRQHSTGGKTRLLGISKLGNEYLRRMMLHGARSVVMQMERKPSALGEWLSSLSARRHRNVTVVALANKMARIAWAILSKGTHYCAPAFVAA

SEQ ID NO: 288955 - protein, 482 aa, unidentified
MRKKHSTARSKKAFSTASKPLQPSAQMPVINAHAAGIDVGATSHWVCVPEDSVAGDQSPIREFGACTRDLDELVEWLLKCGVKTVAMESTSVYWIPLFQKLEAAGLEVLLVNARHVRHVPGRKSDCKDCQWLQRLHSYGLLNGSFRPTDDICRVRTLMRHRDNLTRACGVHVQHMQKALNHMNIHLHHAVSTLTGETGLRILDAILAGERDPKELVKLRDAQITRSTPEEMEAALTGDWREEELFVLRQSLENYRHLLKQMEKCEAEVEKALAKVVANPATVEESDRPQNPPPAHPDKPKRKKFRILKAGTGLKRDLRAELTRICGVDLTQVTGLNLLGVLILISEIGVDMSRWRNEKAFASWLGLSPGNKISGGKILSSRTVPVVNRVSTLLRNVAPAVGRTQTWLGVFHRRMRARLGPAAANTATARKLACILYHLLRYKEDYIDIDCLLYQEKMRKNRLTRLSKQAEELGFELIKKEAA

SEQ ID NO: 288956 - protein, 322 aa, unidentified
MSQPNPLCVGIDVSKATLDIAASSDVAQFTVSNDSDGFNAIITGLRRHSVALVLMEATGGLEVAVACSLQAEGFEVAVVNPRQARDFARAMGYLAKTDRIDARVLTQMAEVINRHPERKRFIRALPDAERQALAAMVVRRRQLIAMLVAERNRLHPSHPQNKKSINTIIKALEDELVRLEKEMDSHIRNHFKEIAERLSSIKGVGTMTVSAMLAEIPELGTLSRREISALIGVAPVNRDSETMRGRRTIFGGRAGVRSALYMAALVATRFNPVIKTFYVRLLAAGKAKKVALVACMRKLLTILNAMLRKNDEWDESYHHVAP

SEQ ID NO: 288957 - protein, 388 aa, unidentified
MQGVAAQSEAPIAIRTDLCAIFVSLELSRSTWLITSLSPGAGEKMSKHSVSAGDTAGLFSRFADLQQKARTRTGRTFSIITIQEAGLDGFWIHRVLQGKGIESWVVDPASVLTSRRRRRAKTDKIDGETLVRTLLAFKRGEPRVCAMVKAPTPEEEDRRRICRERKTLTAERIRHVNRIKGLLFAQGVCDYEPLRRNRRGRLEELATGDGRPLPEHLKAQISRELDRLEIILAQLKAVGSERDAMLEPAKEGRPTPASLLAQLKGIGPEFAAVLWSEGLFRSFNNRRQVAAYAGLAPTPWQSGSVAHEQGVSKAGNPRLRTTMIQLAWLWLQHQPGSQLSIWFRERVQSNGGRGKKTAIVAMARKLLVALWKYAVHGILIDGTKTKAA

SEQ ID NO: 288958 - protein, 409 aa, unidentified
MDVIYERCCGLDVHKRTVTACLLTTKPEGGRQQETRTFGTMTDDLLALAHWLAQAGCSHVAMEATGAYWKPVYNILEGQFETLVVNAYHVKAVPGRKTDVRDAEWLADLLQHGLLRGSFIPDRPQRELRELTRYRTSLVRERASEVNRLQKTLEGVNIKLSSVATDILGATGRAILEALAKGTGEGPELATLARGSLRQKRAELERALKAETSDHQRLMIREHLAHINYLDEAIGGLSREIEERLRPFDHTLSHLQTITGVGRRTAETILAEVGTDTSRFPTHRHLASWAGLCPGNNESAGKQRSGHTRKGSPWLRSALVESAWAAAKTKQTYLSAQYHRLAARRGGKRAALAVAHSILVIAYYIMARGQTYDDLGGNYFDERDRRQVERRLVKRLEDLGYSVTLEAVA

SEQ ID NO: 288959 - protein, 369 aa, unidentified
MESSVTKSAGPIHLGLDVSKSKFAVGILRWDEQTPDVEVIFNDEASVRRLIDRFPDRGQLRVCYEAGPTGFGLHRLLTSMGVACEVIAPALIPKAPADRVKTDRRDCQRLARLHRAGELVAIRVPTEAEEAVRDLCRARADLVADRTRTRHRLSKFLLRHDRIWHQDAWTGTHAQWLTGQRFDDPALRATYGHYRAVLAARDGELAALEADLAHWYTHGPFTDAVKRLAAYRGIAHLGALTIASEVGDWRRFPAARTFMGFTGLVPSEYSSGGSVHRGRITKAGNAHLRTQLIESAWAYQHRPGLGAVLRRRQDGVDPATAARSWTAQQRLCARFRRLSPGKTSRNIVTVAIARELAGFLWAEMTATHS

SEQ ID NO: 288960 - protein, 398 aa, unidentified
MKNLYLGGDVSKGYCDFIIINEEKAIVEEGFQLDDNQSGHKKLRKVLLATIKQHSPEAVYAAVESTGGYENNWYSLLKKLSTDMPVLVARINPIGTNHSSKAKMERIVTDATSARNIAEYIINYKQRIEFGKEDPFFTIRKQWGFYQMLLKQRTQLYNQLQGDLYIVHPELLRHIKFGYPNWLLQVIKQYPTSAHLSKARIPTLMKIKHIDQKRASTLVERAKASVSSSADAVMGNLVVSVVEQIHQMTATIKRQGEYICSQCDQPEIELLTSFTGIGKISAIGLLMEIGSICRFSDAKHLASYFGLHPVFKISGDGRKGMHMSKQGRKQPRAILYNVTRTAIVHNALIKTIYQKHLAKGMRKMAAIGACMHKILRIVFGILNGKKPFDPNIDIKKQQ

SEQ ID NO: 288961 - protein, 363 aa, unidentified
MERNDLSRALVAFDQNSTLVAVVELSLKNWCVLGLVPGLKRQPHKTQEAGAERLVMLLERWRAEAVKAGALVSRMVVAFEAGRDGLWLARWLRARGIEAYVIHPTSIPVPREHRRAKSDRLDTEMLMRAVLGWLRGEAKHCSMARVPTAEEEDAKRPSREHESLVGERTRIINRMTSLLVCLGLPKVNIKLARTAKRLDDLRTPEGEPVPPNALAQLRRDLERLAVIKVQLKAIEQARLARLAAAPQHGTHPMILMLAKIMGVGIETADMLVHEVLTRHLRDQRAVARYGGLTGSPDESGSQRREQGLAKAGNGRVRRGMLQLAWRWLIHQKSSALTQWYRARTADGRKDTRKTLSWRSPASF

SEQ ID NO: 288962 - protein, 408 aa, unidentified
MIYCGIDWAERTHDVALVNDTGQLLAKRHITDDAAGYQLLLELLAEHGDTEEDPISVAIETSRGLLEAVLRTGKRKVFAINPMAAARYRDRHSVSRKKSDPGDALVLANILRTDMHAHRPLPDDSDLGRAIAVLARAQQDSLWNRQQLANQLRSLLREYYPAALDAFAAWTNGLCRPEARELLKAAPTPTRAARLTRTQLQAVLKRSGRQRGIALEADRLRDVFHAEWAHQPPLVEDALGKQMLALLVQLDAACTAADDLAKAVAEAFPQHPDAEILLSFPGLGIQLAARILAEIGDDRTRFADARGLKAYAGSSPVTRASGKKSSITRRWVKNDRLNHAGYLWAFSSLQASIGANAHYRRRREHGDWHAAAQRNLFNRMIGQLYHCLQHRKVFDENTAFPTELAAAA

SEQ ID NO: 288963 - protein, 377 aa, unidentified
MSTVRFLGLDVHADTIAVAVAEPNGEVRSLGIIPNRAESIRKLVKKLEPAEHLRACYEAGPTGYVVYWQLIALGVRCEVIAPTLVPVKAGDRVKTDRRDALKLARSYRAGDLTPVWVPDAAHEALRDLVRAREAAKKDQLRARHRLSKFLLRHGRRPPTGTKAWTQKYLAWVKQAVHFEQPAQEATLLDYVHEVDHVADRLTRLDHAINDAVVQAPPSMRAVIDALQALRGIALISAVTIVAEVGVLARFARAPQLMGYSGLGPREDSSGGRTRRGGITKTGNAHLRRIVVEAAWAYRYRPAVSGPLRKRQAQVSEPVKAIAWKAQHRLHARYRTLLGRGKCPQQVVTAVGRELLGFIWAIGVAVDAEQRTAPALAA

SEQ ID NO: 288964 - protein, 340 aa, unidentified
MAITTIGLDLAKSVFQAHGIDESGATVQVKKLHRKQMLPFFSKLPPCLIAVEACGTAHYWARTLAAMGHEVRLIPPSYVKAYVKRGKSDALDAEAICEAVQRPTMRFVPVKTIEQQGILMTHRARSLLVRQRTMLANALCAHLAELGHVANPGIGNLAKLAEQVMADRNVLPSYARTALEILIRQIMAVSAEIAELDQQLAAWHTESEASRRLAAIPGLGIITATAIAATMTDAEQFSSGRQFAAWLGLTPQQHSTGGKIRLGGISKQGDRYLRRLLVVGATAVMRHVKDKPTPMADWIRKLSEKKPFRLVSVALANKLARIAWVVLTRKEAYHPYTHLA

SEQ ID NO: 288965 - protein, 411 aa, unidentified
MLWAGIDWSDEALDYELLAEDGSVLLQGKVKPDVNGVADLFSRFDQQAAADQIHIAIETVHGPWVQALLDHGYCVYPINPKSADHFRKAMSAAGDKSDSIDRHVLALHLKSCHSKLRRLKPDDPALVALRIGCQDRIRLVEEKTAKLNELIAGLKTYYPAILGLFGDVDSQISLQFILAFPTQKQFRSLSAARLRNWLKQHKYPRRERIEGMTEQLSSPVLGVADHLQTAKVPRLTYLASSLMKLNDEIGQLDDTIGGQFAALPESDWISSLPGAGPTLGPSLLACIGRDATRFAHSGEAQALMGTAPVTRASGKSRVVHMRRACWKFARRTLLWFAYHSRRKCQWAANLYQRQKDRGAGQYAALRAVANKWLKIILAMQRTGQRYDESIYVHSRTRYLANGQTRTKTKMA

SEQ ID NO: 288966 - protein, 386 aa, unidentified
MQASNRSTPIANDLSTIFVAIELSRKSWLVTMHSPDKDRMSRHKVESGDHAGLLALIERIRERAARALGAAPAVVSCYEAGYDGFWLHRLLLAAGITNHVFDPASIMVDQRARRAKTDRIDGEQMLRTLMAYCRGEPRVVRVVRVPSPEQEDARRASRERDRLVKEQTAHTTRIKALLRLLGMAVGNPHRRDWLSWLSAQRDWQGQAVPPRIKAELEREHARLMLVRQQLDALAQAAAEAELTPAAAEMAQRSDLLLRLKSLGPVFATTLTNEAFYKDFRNRREVASYFGLTPSPWQSGATDREQGISKAGNRRAREKTIELAWLWLRHQPDSALTQWFRQRTLNASKRIKRIAIVALARKLIVALWRFLTTGLVPAGAVLKAAKA

SEQ ID NO: 288967 - protein, 390 aa, unidentified
MDVLYQSCAGIDVHQANIVVCILHGPLTSTRPKREMATFDTTTKGLRACHDFLSQFHVEAVGMESTGVYWRPVWHALCDDFELILAQPAHMKAIPGQKTDKKDAHWIAKLTRIGLLPRSFVPDETIQELRELTRQRKHYVESRNRETNRIHKILQSGGIKLTTYIEDIMGLSGRNLLQLLVDGTPITPRIVHQSVYTSLKKKVPQFLEALDGYFSDHHRFMLKQSLEIYDFYQKQIELLEERMNVYLSQYENHVEILDSIPGIDVITASVIISEVGVDMSQFPTSGHLASWAGLCPGNNESAGKKRSTKIRHGNSYLKKCLCQAAFAIKKQKGSPLADRFYQIQSRRGSQKATIVLAHQLLKIAYILLKEQIKYPEFLAQKKTTRDELVA

SEQ ID NO: 288968 - protein, 387 aa, unidentified
MAKVDDLSRSLTPFDQSSTLVCVVELSRSSWLIAGMVPGVQRQPLKKVELDAPALMRVIERWRSEATKANRAIGRLVLAYEAGRDGFWLARWLRARGVEAHVIHSTSVVVSREHRRAKTDRLDTAMLMRVFVGWLRGERGHCTMVAVPTIDEEDAKRPGRERESLVGERTRIINRMKAALARLGVSGFKPELRNASARLETLRAPENIVIPPNTLAEIRRDVARLAVIREQIKAIEQARVESLRRDPHRPAHVMVRLLARVIGVGIESADMLVREVLLRNFRDRRAVARYAGLTGAPDESGPKRREKGLAKSGNSHVRRGLIQLAWRFLVFQKDSALARWYVERTSGAKGARKTTMIVALARKLLIALWRLATTGVVPDGFVLRSAV

SEQ ID NO: 288969 - protein, 405 aa, unidentified
MPIYYAGIDVAKYKHTCCVADSNGEVVVRSFDFANSAEGYALLLKTLDALGPRGSVKVGMESTGHYHENLCRRLLAEGYPVRVQNPKTIVSFRKSRNVSKAKTDGNDALEIALYFATFGFTPSTGKSYTHESLYGLAKDANALISDRTVLYNRIQRHLDITFPELLGFLRENADGSRRNSTRGRNVLGSPTTRWIISNFPSARAVSAMTDADYATLRRLSHSSFSPIRFARMKALAASSVGTPIAHDSAMVAMLAAQCGLIDSQLASIESGMEGLLASEPHEFTKIKGIGPGYASAILGCVGDFSRFPTADALLKYSGMVPSLYQSGTVERRGRMEKKGPWLLRYALVQAAQKVVLHYPKWAEYYRRKCSEGKFYKVALAHVAAKLLKAIWLIETRGLEFDESRF

SEQ ID NO: 288970 - protein, 353 aa, unidentified
MRRPKDKLIAGIDLHSNNVMIGVTNQDGKRVAHRKLDCDLKEVIQFLKPLKGQLQSMAVESTFNWYWLVDGLRQAGYPIDLANPARIEQYSGLKHADDKDDAFHLADLQRLKILPQAHVYDPELRPVRDLLRRRSSLVHQRTALLLSFKSLYARTTGQRLDLSDAKKMEPKEAPKLYEHPANRLIAQVQAEHMQALEKSIRRLEKAVLDCAQEIPMYEKLLTIPGIGRILGMTITMEVGEVKRFKSDGDFASYCRMVDAKRLSNGKCKGDNNQKCGNKYLAWAFVEAANFARRYDEQCRRWYDRKAAKTSKVIATKALGCKLAKAAWHIMSGQCNYDEKRMFPELATRTMSKS

SEQ ID NO: 288971 - protein, 408 aa, unidentified
MDVVYDRCCGLDVHKKSITACVMTPKGKEIQTFGTMTHNLIQLIDWIKSKQCTHVAMESTGVYWKPIYNLIELEDIQPLVVNAAHIKAVPGRKTDVKDAEWIAKLLRHGLLQPSYVPNRDQRELRELVRYRRSLIEERSREISRIQKVLEGANIKLSSVATDIMGVSGKSMILAIIDGVDDPQELAGLAKRSLKKKKDDLERALFGSVGLHQKLMLKTQLSHIDFLNEQILLLNEEVQQRMEPYKEDIELLDSIPGIGKSHAEQLLAEIGLGKDISNQFPTAAHLCSWAGMVPGNNESAGKKKSGRTRKGNKKLRSALVEAAHSAAKTKNTYLSSQYQRLSVRIGKKRAAVAVGHTILTIVYHMLNKRQPYIELGADYFDRRKKEIVIRQSIKRLEILDCKVTVEEIA

SEQ ID NO: 288972 - protein, 347 aa, unidentified
MKRIAVDLAKSIYQVAESVRSGQVVQRKRLNREAFRRYIQEQAEPVEWVMEACGTAHYWGRLAQSLGHQVKLLHPRYVRPYRRRNKTDRNDCDAMLEAARCTDIHPVPVKSHEQQQLQQLHGLRETWKKSRTQRINLLRGMLREAGIETPTSTAAFIRAASELIEQPELASLSRLLHIVLAEINLYEQCMAECEQQLKRWHADDEIVRKLDEVSGIGLLTASALTTAVGKPERFANGRQLSAWLGMTPREFSSGNSRKLGHISRQGNVYVRTLLIHGSRAALLAAQRCQARTPEKLTQLQRWAVTTAARIGHNKAAVALANKLVRICWAVWCHERRFSGNWQSIKPA

SEQ ID NO: 288973 - protein, 288 aa, unidentified
MSRDIKYIGMDVHKEATVIAVLNGSGKLVMESIVETQASSILQFIHGLRGELHVTWEEGTWAAWLYDLLQPQATQVLVCDPRRNALLKEGNKSDKIDAHKLADLLRTGMLRPVYHGEHGLRTLRELGRSYQTISQDLNRVMNRIKALYRGWSIPCAGTQVYAPRYREEWLQKIEHAGVRRRAELLYQQLDGLQALRRTLRPELLAESRKHKAAKLLRQIPCIGPIRAARLIALMQTPHRFRSKRQLWTYSGLGIETRDSAQYRFVRGQLQRTKKPQQIRGLNRNHNQR

SEQ ID NO: 288974 - protein, 476 aa, unidentified
MPYRIAGIDVHKKMLAVVVSDVEIDSEYEFERKKFSSTPEQLRSLAAWLLEQEVEEVVMESTAQYWKPVWEALERYWKPIREKREGARRKSGTLHLAQALSNRGRRGRKRDFPDAERLVKRLVAQELTLSFVPDVEQRLWRTVTRKKYQLRCDRIRLQNQLESLLEEAHIKLSSLVSDLLGFSAQRMLKAIAEGETNPATLAALADKHLRATPEQLCDALGACTQLNPVYRRLLNLALEELRLIDDQIGRLDREMASLLGEHQDAVQRLAEVPGLGVDSAQQIIAEVGPSAATFPSQKCLSSWVGACPGDDETAGVNYSHRSPKGNRHMRRLLNQAANAAARTKGSIFEIVYRRSVPRLGHNQAIGAIAHRQCRLIWLILHQGVRYEERGPAVTKRSKQLRTWKMIRQLRSLGYRIEPPNPQPSQTHRDLLFCDPTYLNSLPFTPPDSTRHIQPVLARSVLSSGFEAAASGPETGQ

SEQ ID NO: 288975 - protein, 322 aa, unidentified
MSVTVLGIDIAKQKLDAALLVDGKTKHKACKNSAEGFETLMVWLEKQGIQKVHACLEATGNYGEDLAIYLHEAGHIVSIVNPARIKGFGQSELIRTKTDKIDAALIGRFCLAMKPGPWIPPSPAIRSLRALVRRVDSLIDMRSQEKNRISTAHESVIFLIKEHIAYLNQEIEKIRQQIADLIGQDPNLKRKHDLLDSIPGIGKATIPHILAELDDLEKFDHVRQLVAFIGLAPKETLSGSSIKGKPRLCKIGHARLRKALYMPALVSIQCNPVMIAFYNRLKDKGKNGKVIVCAIMRILVHVIFGVLKSGKKYDPNYKPAFA

SEQ ID NO: 288976 - protein, 359 aa, unidentified
MNKNSMFFVGLDLGDKYSYLSILDQEGEMIEETRLPTTKASFQRKFSTLQHCRMAMEVGAHSRWASHLLTELGHDVLVANARKLRAIYHNPRKGDRADAETLARLARLDPALLSPIHHRSPQAQADLAVLRSRDAIVRCRTLLINHARDIVKASGSRLPSCSADSFAHKVAPDIPEPLRPALAPILDTIASLTKKIKSYDQKAEELCSERYTETNLLRRISGVGPLTALGYILTLENPHRFRMSREVGPALGLIPRRDQSGDHDPQLRITKTGDAYLRRLLVGSAQYILGPFGPDCDLRRWGLKLAERGGKNAKKRAVVAVARKLAVLLHHLWKTGEIYDPFYFAKKYDQASQDIPAAA

SEQ ID NO: 288977 - protein, 366 aa, unidentified
MDKVKLYVGLDVHKDSIAIAFARAHSRDDPRFVGTTRYSVISLIKALSKLGEPSEISVCHEAGPCGYGLVRALRKQGYHCEVVAPSRVARRPADRIKTDRRDALLLARLHRAGELVPVTVPEPQDEAIRDLVRAREDAVTDLRRVRQRLKSFLLRHGHAYTGTRWGPKHELFLSTIKFEDPAQHIVFTEYRMAVRFATELVDRLTRSLHDHAETWRWLPMVKGLMTLRSIDLISALTIVAELGDLRRFPHPREFMSYLGLVPSEHSSGNTTQRGGLTKTGNTHVRRILVEAAWNYRLPARIGESLQPRLEGQPQSIIEIAWKAQLRLCHRFRRLRARGLHQNKTCAAIARELSGFIWDIGTRLQPT

SEQ ID NO: 288978 - protein, 318 aa, unidentified
MPQETRIVGIDVSKRKIDACIRSLGLGVRLASTPEGRQELIVWLCGHGVGTVVMEASGGYERQWAEALRAAGMAVRIVDPKRVRYFAKSAGRLAKNDRIDAETIAWFGETFPADVTLPHDPEREALERLVKARASLKDFETRLAQQGEHEQPALVSKAHRAILKTIRAQLRKLAAAIVARIKANPVMARRAEIIESVPGLADLVASGLIAWLPELGRVPGKAASHLLGAAPFDADSGQHKGKRFIKGGRRKLRNLLYMPLVGAATQHNPVLKAHYQQLLARGKEPKVALIACMRKLIVILNTMLARDQTWNPPARTVA

SEQ ID NO: 288979 - protein, 416 aa, unidentified
MIYIGLDLSDKFFDSCITDESGDVLDRNRFDNSHDGFCSLVKLINEHCQESRTQQQEHVTECIIGLENPRSSIVDFLTQRGYSVVLTQPDAVYNYRKSRIPSGAKSDQADAQLIADYVREHHKTLRSITIADESIRELSLLLEDRDRLVRQKVRFSNQLTSTLKEYFPQALEAFGSIDSKSAIQYLKAIDTYDQVKGTPRKKLEKLLSESGVKRKDSRERFHEAMKKPGYRVSPALVKTKVRLKNVLVTHLELLLNQIADYEDQIREIMDNSTDGGLFRSLPGADYILGGKLLVLYSTRDFHQASEAQQLFGTVPYTAMSGQSRRVSFRRGANKFGRNTFQQLARGSILSCNWASIQYAKKRNQGKKSHHAFRCLANTWVKITFAMWRDKKPYNESTILAAIASHIINQPAFVNRD

SEQ ID NO: 288980 - protein, 343 aa, unidentified
MQVVTTVGLDIAKSVFQVHGVDAAGQVVIRRQLKRRYVLAFFEKLPACLVGIEACASSHHWSRELKTLGHTVRLMPPAYVKPYVKRQKNDTADAEAICEAVTRANMRFVATKTPVQQSCLTLHRTRHLFIRQQTAVINVIRAHLAEFGIVAPVGRKGIETLLDVVANPTDKRVPVIARACLAALGAQLRRLKEQILEFDRMIMAWHRSNEASKRLDAIPGVGPVLATALVASIADPKAFRSGRNFSAWIGLVPKQHSSGGKDRLGNISKQGDRYLRSLFMAGALAVIRYAKIHGTTHRPWLTALLARRPTKVAAIALANKMARMVWAMMTRGERYKDPIALAA

SEQ ID NO: 288981 - protein, 349 aa, unidentified
MEHYAGIDVSLELSSVCVVDAKGKIVKEAKVPSDPEALVLFFTGLRFVVERIGIEAGPLSQWLHAGLAKAGFETVLLETRHVKAALSAMTVKTDRKDARGIAQLIRMGWFRPVHCKSTGSQEVRALLVARKLLLGKLLDVEFSIRGILRGFGLKMGVVTRNGFDARVRELCAGQAILEQIARSMLAARCALQTEYTKLHKAVLSIVRGDAICRRLMTTPGVGPVVAITFKTAVDDPTRIAKSKAVGALFGLTPKKYQSGETDVTGGITRVGDESVRAALYEAANVLLSRVTRFSALKRWGMDIAKRRGLKRAKVALARKLGVILHRMWVDGTSFRWTKVASGDEQPARA

SEQ ID NO: 288982 - protein, 338 aa, unidentified
MAIVFVGIDLAKNVFAVHGVDEHGKPALVRSSVPRARLHALIASLPACTIGMEACSGAHHWARLFIAAGHAVRLMAPKFVAPYRLSGKRGKTDAADAAAICEALQRPNMRFVPPKSLEQQALLTLHRVRQGFIEQRTALINRMRGLLSEFGIVMPLKASTVRLQAGAALEDLPGWANIAIGDCLSELHRLDERVAQYDRHLAAHARQDDRARQLMRLNGVGETTATALVGSVGSAHEFRSGRQFAAWLGLVPGQYSSGGKTRLGRITKAGDGYLRSLLVLGARAALNAAKGRTDALSCWALAMLERRGYWRTVVAIAAKNARMAWAMLRRGEAFVMPA

SEQ ID NO: 288983 - protein, 422 aa, unidentified
MLEQSQDDEQIIARVAALDIGKAEVMCCIRVPRDAPAGRRRQEVQAYSTMTRSLLVMADRLRELGVTRVVMEATSDYWKPVFYLLEAHGFDPWLVNAKDVKHLPGRPKTDKLDAVWLCKIAERQMIRPSFIPPPPIRQLRDLTRYRVDLVSARTAEKNRAEKLLEDAQIKLSVVATNIFGVSGRDMMAALIAGERDPRVLAQMARVRLRAKMSQLEEAFHGHFTDHHAFLLAKMLARVDAITADIAEIDERIEAQLRPFADAVTRLQQIPGIGPVAAAVIIAEIGTDMGRFPTAGHLASWARFTPTVKQSAGHNKGNGSTGRGNPYLARILGEAVVAAGRTRTFLGERYRRLARRRGKQKAIVAVGRSMLIITWHLLSSPSTQFADLGPSFYDSRIQPDRKKREHIRQLEALGYKVNLEPAA

SEQ ID NO: 288984 - protein, 387 aa, unidentified
MPQPNDLSRSLVALDQDSTIIAVVEMSQSSWLVAGVLPGIERQPRKKLEPSAERLLGLLHRWRDEAVRAGKKITRIALAFEAGRDGFWLARWLSARGVEAHVIHPSSVAVSREHRRAKTDRLDTELLKRGFLGWLRGERGHCSMARVPTIAEEDAKRPNRERECLVGERTRIVNRMKGSLARLGIRNFKPTLRKAAERLATLQTPEGSPLPPNVSAELQRDMARLRFVISQIREIEEARQKRLEQEPETGSHAMVRRLARVVGVGIETADMLVHEVLSRPIRDRKAVARYAGLTGSPDESGAKRREQGLARAGNARVRRGMIQLAWRFLLFQKESALARWYRARTADSRVGTRKTMIVALARKLLIALWRFVTTGETLEGVILRPAG

SEQ ID NO: 288985 - protein, 466 aa, unidentified
MRTETSVQASRRAKKELARRLRSADPGLEVVHPDAAGIDVGNESHYVAVRPDRDPEPVRRFACFTADLYRMAEWLLSCGVKTVAMQSTGVYWIPLYDILEEFGFEVFLVNARHTKNLPGRKSDVQESQWLLKLHTHGLLNNSFQPPSDIRVLRTYWRLRAEHATGMATCIQRMQKALTQMNIQLANVISDLSGRTGQAIIRAILNGERDPQKLAELSDWRIHATKEEIAKSLQGNWRHELLFIVRQQLEMYEAYQRRIAECDHQLQEHLAKFASVPSTSVDACNPPQSKKSKRYRYMPQFPLSNELMRISGVDLTQIDGVDAMTAQTLISEVGFDMSRWKTESHFASWLGLCPDNRISGDKVLSRGTRRVINRAATALRIAASTLIRSKTYLGAQYRRLRTKLGAPKAITAMAHRLARLVYRMLKYGQKYVDKGANYYEQKSRQQQIEFVRKKAAQLGLQVTLAQP

SEQ ID NO: 288986 - protein, 429 aa, unidentified
MRTESTPGARWPVFCGVDTHADSHWLCVLDWRGRRVLSRRFPADAAGYEALAGAIAAAGEPACVAMEGTSSYGAGLTRHLASLGMPVREALSPAGMQRRRPGQGKCDEADAERAARAAMSGSRLGTPKSQDGWVDGVRCMLAARSGAVKARTSAINTARSLLTTAPEGLRSRFRGMGGPRLMEELPSVRAEGALGAALGALADLWAAARDAALDMEHAIEASPEENCPALLAMYGCGPVSAAKLAVAAGDNPGRLRSEASFAAICGACPVPASSGKTVRHRLNRGGDRQANSALHEIARQRVMRDPETAEYAERARARGKSDREVMRCLKRYVAREAYRALMRPHEVRRPEDASELVAARRAAKVSQVRAASILGTSEKYISMLERGQRELKPIRRAYEAWVEAGLPLDWDRQAFEAERKMDSKKHLAK

SEQ ID NO: 288987 - protein, 343 aa, unidentified
MDQYVALDVSLQKTAVCVLNASGSVVIEAELPSEPAALTAFIQTHAPRAARVGLESGPTSPWLWHSLRAAGLPVVCMDARHAHAALSVRPSKSDRNDARGLAEMVRMGWYREVQVKSLAAHERMALLGVRRQLVDMRVEIDGQIRGILKTFGMVVGSGNKGAFAQRARMLVQDHPVLSALVDKLIEVRAVAVAKVAALDKEIRRFVRDDPTLRRFMTVPGVGPVTALAFRSTIDEPDRFKRARDVGPYLGLTPRRYQSGETDRQGRISKCGDRFTRTCLYEAANVLLTKVQRWSPLKAWGTRLARRIGSKKARVAIARKIAVILQCIWTDGTEFWWTKEPATA

SEQ ID NO: 288988 - protein, 394 aa, unidentified
MKLVGIDVGKNSHHFCVMDKETGEFNVAPSSFSNNKEGFDFLINSLKPYSKKSILIGMEDTGHYHVALLKFLLSNGYPVALINPKTTDLTRKMEGGITKNDKLDTITICDVLDTPERKKQYRITKVDRFDLYEQRQLTRHHHNLKEELNVYCNRLQKSIDLVFPEFNTLFSSKYSIVYMNLLKTFGSAEAIASTDIRTIRKCFEIKGRGNRISLTPEKLKECAKNSIGISSEVETIQIRHLVSQITLIKEQIAEIDKKIEEFSITNNSPILSIPGISHFSGTSILAELGDIGNYSKPSQIIKFAGVAPYHYESSQYNAQHTGITKKGSKYLRKTLYQIILTVINNNPVFKKYYLLKISQGKGHRCAQGHCIRKLLRIIYHLLETGQSFDPALLR

SEQ ID NO: 288989 - protein, 412 aa, unidentified
MRRVIGLDIHRTFAEAVAWEDGRLLRLGRLDMTRTALEGFGKSLRPSDEVVVEATGNAMAVVRVLSPFVARVIVANPLQVKAIAHAHVKTDKIDAGVLASLHAAGFLPEVWTPDPETERLRRLVARRNQVVRHRTRIKNEVHSILHAHLIPRCPHADLFNRRGRDWLSRQPLPVDEKATIDRHVRELDRLAEDLDVLDREVAQGAIGNPSIERLITITGVNLTVAAGLVAAIGDIRRFTSPQKLVSYVGLNPRVRQSGLGLAQHGRISKVGRSHARAMLVEAAWAAAKAPGPLHAFFVRIRARRGHQVAAVAVARKLAVLCWHLLTKETDYLWARPALVAIKKRSMELQAGQPTKKGNQRGPAYAYNVKALRNREMLVATQAERAYEHFVGQWRPRGPGKGVRERLNPARHE

SEQ ID NO: 288990 - protein, 355 aa, unidentified
MSQTLNTSIAVVGIDIGKNSFHLVGQDQRGSIVLRQKWSRVQVEARLANLPPCLIGMEACVGAHHLSRKLQMLGHDARLMPAKYVRPYSKGQKNDFRDAEAIAEAVQRPTMKFVATKTADQLDLQALHRVRERLVGPRTGIINQIRAFLLERGIAVRQGLRFLRAELPGILATRSDVLSPRMLHLVEDLAADWRRLDARIEGLSGEIERLARQDKGCERLMTVPGIGPIISSAMVAAIGTGDAFSKGRDFGAWRGLVPKQISTGDRTILGSISKRGNRYLRALFVQAAWVVLVKLGKKWERYGLKSWIEAARKRLHHNVLAIALANKLARIAWAVLNKGRAFECVKVNEMTSQPV

SEQ ID NO: 288991 - protein, 412 aa, unidentified
MLHPKMRKLFIGVDIHKRTHVAVIINCFTEKLGELRFENNRKGFEKLIEFVKSHLKRGISPCFGLEDTSGNGRNFARFLLNLGYTVKSVDASLTYTERRNQAIAHKTDGHDAFCVAKVLLNQLDTLPDASIHDDSWTLQLLVSRRNSIVKVRAASKNQVHSYISHHYPSYPKFFTVTYCKAGMEFFQNFPSPSKLKGITKEELAEFLSIHSSGFFGIEHAERILMLVAKDGDTLTEYQETRDFIVSHCIKEIKHCNEELEVIEAEIKKHMKQFPYRLETMPGINTITAAMLISEIGDIRRFSSSDKMCRYSGISPVSCSSGDKDKNFRNKQGNRRLYEIFRDIASRNICRGRDKKSPINETFLEYYNKKISQGKTKRQALIAVMRQIAKVIYSMMIHQREYIKPTISKTENT

SEQ ID NO: 288992 - protein, 346 aa, unidentified
MTTVDATRPLTGGVDTHLDVNVAAALDPLGGLLGLAEFATTKQGHVELLGFLERFGPVARVGVEGTSSYGAGIARFLRRSGVEVVEVDRPNRQARRRTGKSDPADAVEAARAALSGRAQGAGKTKDGNVEAIRALVVAKRSCRSTKIKTLNQIRQLSFTAPEELRERLKGVSRQHLGATAAALRPRAGTDPVTFATKTALSTLGRRVLVLDEEKDRLDLLLAELVEATTPSLLEVFGVGVDTAATLLTTVGDNPGRIASEAAFAHLCGVAPIPASSGKVNRVRLNRGGDRQANSALWGVVITRMRNDPRTKAYVERRLEEGRSKSEIIRVLKRYVAREVYKHLTFD

SEQ ID NO: 288993 - protein, 366 aa, unidentified
MPSVTPAAGLIHLGMDTSINAIVVGVLRPGEEMPVVERIFNDEASIRRLIGRFSDRRSLAACYEAGPGGYELCRLLSGMGVACDVVAPSLIPKGSGERVKSDRRDAIRLARLHRAGELTAIRVPTPAEEAVRDLVRARGDLLDDRKRTQQRLNALLLRHGRIWRGGARWTAAHRQWVGGQVFTEAALARVFATYRGCLEAREAELAAIEAQLGPWASAEPLAAAVGRLGAYRGIAQLTGLTLAAEVVDWRRFASARAFMGFAGLVPTECSSGDRTRRGHITKAGPQGVRAALVEAAWAYQHRPAIGAALKRRQAGACPQTLARSWKAQHRLHGTYRKMIGRGRPAGVAAVAVARELAGFVWAEMTS

SEQ ID NO: 288994 - protein, 349 aa, unidentified
MTTQRLSYVGQSVYVGVDVHKDTYAVTCGCNKQIVKTATAKADPAGLTASLSQWFPGARLYTAYEAGFSAFVLHRALTKAGIMNIVVNPASIAVAANDKVKTDRRDSKKLALDLSDGRLQGIYVPTEDEELARLLPRTRAQIVEHRATIARQIKAKLHQFGLIAPASRRLISNRYLREIDAWPLPPDLRVSLTFLAEQWRFATRQLIEMRRLLREQAKAHPAIEQVYRSVPGIGEVVARTLATELGDMTRFANERALFSYTGLTPSEYSSGPSVRRGHISRQGSSRVRHLLIETAWRALPRDAVLKEIFDRIAATRGKKRAIVAIARRLTGRIRACFRQGTTYAVGTYA

SEQ ID NO: 288995 - protein, 397 aa, unidentified
MYIVGIDIAKRKHEAAVIDGEGTVIIKPFSFTNNCSGYNRLLAMLTKAKLPLDEVSFAMEATGHYWLALFTRLQKEGFRVQVINPVQTNSIRNFYIRQAKTDPRDALLIAEVIRFGHFSESTLHPENIYELRELCRGRHAIVSMQADVKRKVIALLDQVFPEYETAFTNMFSDTSMAILQTCPTPKELSEMPLEELCHLIEVSSHKRFRMEKAQELQALARNSFGFVMAGDVFSTMIRLYAKHLVFLKQQVQEMDRKIAEIMETLDTPITTITGIGPTLGAYILSEIGDINRFSSAAKLAAYAGIDPTMRQSGEYNGVRNRMSKRGSPYLRHAIWLAASSAVLHDPALKLYFQKKRDEGKPYMASVGHACRKMVSIIYAVMRDNKAYTPCIPNEISA

SEQ ID NO: 288996 - protein, 437 aa, unidentified
MRGIFAIARISQEKATPTDERGSREGSKCQEGRSIDMIDKEAPILAFDASKGSSHCQGYLSFGEPSSKPIKAAHSKSGMAAAEEISEALERKTGTKPKVVMESTGVYSKPVARWAGLNGLEVYLISPLESAKVRKSRVRPTKTDALDCGVIAEVAYTRDVRKLAAESPLYSQLYSLSRRRAAIVDRLVASKNQYRKSLDAVWPLLDEACDPFSGYAMWAVGRYRHPEALAKAREGLVEKALEKAEIRTGAISKTAIASKLSAYAKDAISGCGPEDGEVDSLLSALDDVIRDMRALDETTSRLLGLAKELPHFVLVASIDGIGDALAALLCAEIGDPSRFASRNGIVAYAGLDPTILQSGKNDGLHHSITRKGNAFLRKYLYLTVENMVIHKADNAITRFYSKKKSSGLCHKAAATAACRKLLVTIWGMLRSGSFFER

SEQ ID NO: 288997 - protein, 441 aa, unidentified
MAVINPNACGIDVGSKMHYVATGQGSEEVKSFGVYTKDHQAMVAYLQNKGVTTIAMESTGNYWQTLFAALEKAGFEVFLVCGNQTKNVKGRKTDVQDCQWIQWLHSVGMLSNSFIPNEFVSHLRIYSRQRLKYIQVQSRLINQIQRDLRAMNLRLEVALNDITGKSGRAIIEAILSGERNPKSLAGLADYRVKKSKEEIALSLEGNWHEGYLFVLRQHYSEYVQNLDRIQACENEIEKILKESLECSEIAPQDAPNHKKALKKNKNKPVIDFQIYSFQYFGGVDLFAVEGINQNTVLSLMAEVGTDITKFHSAKAFSNWLHVCPNPKVTGGKIISNHTKGGGNPLSQAIKSAANSIGNLKTVTHLTRFFKKIAYKKGRKEAITATAHKLAVIIYNMLTKYEPYKPFVREVNEQAERIKKLKEVEKIVKSHNFKIEDINFSY

SEQ ID NO: 288998 - protein, 358 aa, unidentified
MAVTEGTRRIVGGVDTHKDLHVAAVVDEQDRVMETRSFATTRQGYRQMLAWMRSFGELQRIGIESTGSYGAGLLRFMQQAGITVLEVTTPDKQDRRRRGKNDDLDAQNAAHAAFAGQRTVTPRSRDGMIESLRVLMACRKTAVSARRVALQMIHNTIVCAPDGLRDQLRSLTRMQLVRTLGSWRPDLTAYRDLESAYRIGLKSLARRYLELHDEIADLDAMIAAIVDELAPNLIARNSIGHVGAAQLLLTAGGNPERLRSEASFASLCGVSPVPASSGKTVRHRLNRGGDRAANSALHIIAIGRLRTDQRTKDYVARRIAEGHSKLDAIRALKRYLAREVFTLVTQRRREINATQIAA

SEQ ID NO: 288999 - protein, 457 aa, unidentified
MKRKISKISSKKEVVMPVVNPHAAGIDVGSRSHFVAIGQGADDVREFGVYTDSLHSLCQYLQGEGITSVALESTGGYWQRLFLMLQSYGLNPILVSGKFTQNVQGKKTDVQDCQWIQRMHMLGLLPNSYQPNYFTEQVRQYARHRQGLLENGASYILKMQQALRHMNIRLDVAIADVVGQSGQAIIKAILAGQQDAKYLASLANFRIRKSKEELERALTGIFRPEYIFELKQCFEMYEFLHQKIAECDAQIAALIDQHLEERECEDGVQRKQYDKKPPKRNKNDPRMPIQQFAFQLSDGVDLSEIDGVSASTLMTLISEIGLDVSQFPSAKHFASWLRLSPNNKVSGGKVISSHTKKRKNRLGQALQRVANVIGSNYKEGALHQFFMRIKFKKGHQQAIVATARKVAVIIWNMLSNKEAFNYETDQSYADKIKQQTIKNMQRKIKKMGIRAEDLISN

SEQ ID NO: 289000 - protein, 343 aa, unidentified
MTYFAGLDVSVKETSVCIVDDAGKIVREVRVASEPEALLPVLTNTLYRLKRVGLEAGPLSQWLYSSLAEAGLPVICVETRHMRAMLKAQINKTDRNDARGIAQMMRVGLYRPVHVKTLRSQKLRVLLTHRKLLQSKAIAIENDLRATLRNFGLKVGVVGTVKFEARIRELVESLPDLAELVEPLLIVRRVVREQLGILHRRLLAIVRDDAVCRRLMTIPGVGPVVALTYRATVDVPARFRNSKAVGAVFGLTPAKYQSGENDRTGAISRCGDEMMRMMLYEAAQSMLVRSTKWSWLKAWAMKIARHRGIKKAIVALARRLAVIMHRGWVDGTEFRWTREGGVA

SEQ ID NO: 289001 - protein, 346 aa, unidentified
MKVLIGVDPHKTSLAVAVVEEDTGELFERASFAQDRTGLRTLERWAKRFPERRWAVENAGGLGRHLAVRLAGSGESVVDVPPKLSARVRVLSTGNARKNDELDALATALAASRNERLAQVDPEAASEALRLLSERREDLVAERTRALNRLHGLLRDLLPGGVARTLSADRAARILRGIRPQGASARLRRRLASEVLRDVRTLDRKIADLNERIEAEVEASGTTLTQIFGVGPILAARIIGTVGSVERFPTKAHFASYSGTAPLETSSGEVVRHRLSLAGNRKLNYALHMVATCQARSDVRGSTYYRKKIAEGKSRKEALRCLKRRVSDAVFRSLSTDSRAHSQRAA

SEQ ID NO: 289002 - protein, 424 aa, unidentified
MKVTYKTCCGVDVHKSFLVATIITTTGGIEPSYQKKRYSTFNNSILEFKQWLLDNDCHDLCMESTGKYWIPVFNLLEDEINVTIANPKWVKAVKGNKDDTKDSKWIGDLFRLGLVKGSYIPCKKIRILREFTRYRYKIVSCRSSEKNRYQNALTVCNVALDSVVSDIFGKSSTSIIDYLLEQSGNSINNEEIASKLLKSLKSKEDAVIESIEGYQMTDSQKYRMHLVRAHMDYITAEINDVDREIEKLISSDPDFENAIQFLMTIPGVKRDSAITVISEIGIDMTQFSSSKRLCCWAGLTPGSNESGGKKKSVRVTRAGVYLKPALVQCAHAAVKSEKSPYYKKKYESLMKRRGKKRAIVAIARMILTAIYQMLSTGESWNPSDLYKIDIPEALLEKQKAKAIKQAMKLLQREGLYPPPEPIAS

SEQ ID NO: 289003 - protein, 413 aa, unidentified
MEVLYPRCAGLDVHKATVVAAVRLVAGGKVAREVRTFATTTAGLLALAAWLGENGCTHVAMEATGVYWKPVWHVLAEGGFDLVLANAAQVKNVPGRKTDVNDATWLAELLAHGLVRASFVPDAPTQELRSLLRTRKQLVRERASHVLRLQKTLEDANVKLDAVLSDLLGRSGRAMLEALVAGETDPEKLAAFAHPRLAATPERLREALRGRVTAHHRFLLRLHLDQVDALEAAIGRIDREVEERLAPFSTAVDLLASIPGVGALAARVIVAEIGLDMGRFPTAGHLVSWAGLCPRNDESAGKRLSARLRKGAPWLKTILVQCAWAASRKKASYLQAQYHRLRARRGARKAVCAVAASILTAAYHMLKDGTVYRDLGPGHLDRRSRETQARRLVRRLANLGYAVELAPLEPAPA

SEQ ID NO: 289004 - protein, 320 aa, unidentified
MRNAVGLDISKLTFDATAIVGNAEYSAKFDNDSKGLNQFSDRLKSLGCQNLHICMEATGNYYEEVADYFAQYYSVYVVNPLKISKYAESRFKRTKTDKQDAKLIAQYCRSAQESELVKRQKPTDEQYRLSRMIAAYAQIKRECAAMKNRHHAAKDEEAAKAYAQIIKAMNEQLEVLKEKIKEQTEKPNCKEGVKRLETIPAIGRMTAAVLFHHLTSSKFETSNKFAAFAGLSPQQKESGTSVRGKGKLTKFGNRKLRAVLFMPAMVAYRIRAFPGFIKRLEEKKKPKKVIIAALMRKLAVIAYHVHKKGGDYDPSRYKSA

SEQ ID NO: 289005 - protein, 344 aa, unidentified
MQIARIGLDLAKYVFEIHGVDCHGKTVLHKTLRRHAVSAFFANLPPCLVGMEASNGAHFWAKAISELGHDVRLISPQFVTPYVKSNKNDRNDAEAICEAVGRPNMRFVPVKSAEQLAVQAVHRIRSRLVADRVRLVNQIRGLLGEHGIVIAKDIGNLRRALAGIVGDNDHRALSHLVRALMGELREELIELDARIAGYDRKIRELYRNSEICQRLGKVEGIGPVTATALVAAVGDRSSFKNGRQFAAWLGLVPKQRSSGGRARLFGISKRGDRYLRTLLIHGARSALGRVREKQDPRSLWLGKMRQRRHPNIVAVALANKNARIAWSLLTNDSVYDVGLSVRAA

SEQ ID NO: 289006 - protein, 334 aa, unidentified
MALELLAIDLGKRAFHIYGIDTDGVILSRKVSRAKLAEVVGDLGPTAIAMEACASAHYWARCWLAAGREVRLINPRFVKPFVKGSKNDAVDAEAIFEAAMRPTMRFVPVKSTDQQDLQSLHRARDRLICQRTALINHTRGLLAEYGVVLPQGPWRFTAQAPTAIAGADLSDLARTIFGELLDQLDDLDRRVKKLDATIAGLCRTNETCRRLAKLPGVGPVVATAIVAAVNDGRQFRSGREMAAWIGLVPRQYTTGGKPRLGGIGRRANHYLRRQLIHGARAIVSRSAKHDDRQSTWLKALVARRGFNRTIVALANKTARIAWVLLSRKEEYAAP

SEQ ID NO: 289007 - protein, 446 aa, unidentified
MATRTVGIDVAIRGPHVAIILDEQGRPLGTPIRVRLSAAALDELVTKIRAGLQADDTVMVVLEPTGMAWFPLARRLTQAGCTVIRVKGQRVKALRRYLSEYAKTDVTDAQVLGRMLAFGRRGLLPLYVPAAKQQALNCLTKQRARYQDAISSIRRRLLDLIRWAQPTLEPVLPSIGTSVSLAVLEHYFNPAQLQALGAHRLTEFIGRHVGGNHPAHGPFVEELARGLLAAAADAVALFGADGVDFELLPLEVRQEIQLLRHHRELLVELDRAIEQLYRELHPVEALRTLPGIGDTLGPALLGVLHTASRFGAQRRLRGFCGLFPRRQESGGVAHPGQPITQDGNNRIKRNLMLAADVARTVDPELAAVYYRCMVEKGHHHRQALCAVATRLVNRIHAVLRDGRPYELRDLDGHPITVSAAKQLIQTHLRVPDVIRRTRKKAPVAAA

SEQ ID NO: 289008 - protein, 317 aa, unidentified
MKDKNVIGIDVAKAKLDVFDSKTGRHTVVANTPEGVDALVRGVAPAKTLVVLEATGGYEGLLVEALERRGVDCAVVNPLHVRHFARGCGMVEKNDKLDARMIARFGEVVRPEPREAPSASEAKLKALVHRRDQALAHLGAERNRLQQTRDAETAEMIRQGVAFYRAQIREVDKRIAQVLDQCPQLAAKSRVLQSCPGVGVATTATLLAELPELGRLNRGQVAKLVGVAPIARDSGQKQGQRRTHAGRSMVRKVLYMAALVATRYNARMQAFYQRLLARGKAKKSALVAVMRKLVVTLNLMVRNNETWSEPSLAIDNN

SEQ ID NO: 289009 - protein, 458 aa, unidentified
MNRKRSKSKIDRTMPMVHPNAAAIDVGATMHMAAVGADRTPEPVRSFGTFTTDLHRLVDWFIECGVETVVMESTSVYWIPIFELLDARGFTLFLVNARDAKHVPGRKTDVSDAQWLQRLHSYGLLRASFRPKGQIAELRSYVRQRERLLEYAASHIQHMQKALTEMNLQLHHVVADITGATGLRIIRAILAGEHDPKVLAQLRDYRCHASAETIEKALTGSYRAEHLFALEQALALYDAYHEKVSACDTRIEAVLKELSIGRGRRSDSLLSPRRPRTDQVNGLAFDVRAALFALLGKDLTQIDGLGPYLSLKLIAECGDDLSAWASSKHFTSWLGLAPSNKISGGKVLSSRTRRCGSRAAALLRLAAVTVGRTDTALGAFYRRLSARIGKAKAVTATARKIAVLFYNAVRHGMEYVDPGASFYETRYRTRVIDNLHRRARVFGFVLQPMEPTPGAAVS

SEQ ID NO: 289010 - protein, 424 aa, unidentified
MNLTQNDRLKQVTSDTLIVGVDVGSQTHFCRAFDWRGFELSRRVFKFSNTGMGFLTFLRWTEEIMNKTEMKKVIVGCEPTGCYWLTFQKFLQDHDVQLVTVNPFTVNRSMELDDNSPEKSDLKDPKTIALLVKDGRFSTSYLPSGVYAEIREASVCRDQIMKQNVRLSNQIQGWLQKFFPEYFECYADWDSTSGLMLLRKAPLPQDILKIGAGGINQIWRDAKVRAAGIKRAQTLVEAAQNSVGLEAGEAARLEIWVLVNDYILKAEQLKRLDEYLEEKVKEVPNVEKLLAIKGVGMSTVIGFIAEVGDIGRFTDPKQIQKLAGLEIVKKSSGKKKGQPRISKRGRRKLRRTMYESAKALMLWNPAFQDVFLYYRNRAKNPLGGMQAKIAVACKAIRVFYVVLQTGCDFDEEKFRKDIIRPEAA

SEQ ID NO: 289011 - protein, 355 aa, unidentified
MLETVGQRDRKMFISNPNRRRSCARASSNLLGWDFMNFNVKYTKIFVGVDVSKATLDIYRPDTNEAWQIENSEEAIAGFCTQLEKKKRQIMVVMEGTGGYEYPLVKHLASHKLDVAVINPRRVRDFAKGIGMDAKTDPIDAKVISKYAEVVVPKPMATKSDHELKHGALVARRKQLLELVNQENNRLKQSWDDDAKQSIREVLEVLKKQLKSIDSQLAKMLKSDVANQRVIEILESVKGVGPVMVSTLLAELPELGKLNRGEIAKLVGVAPINRDSGKKSGKRFIGGGRGQVRRVLYMSTVVAIRHNPAIKAFYAHLRSQGKESKVAIVACMRKFVTIINFLIKTDQLWQNKASV

SEQ ID NO: 289012 - protein, 339 aa, unidentified
MEEVSIIGLDLAKRIFQAHGADRSGKCLFSRKLSRAQLLGFFSSQKPCIVAMEACSSAHYWGREIAALGHEVRLIPAHYVKPYVKRGKNDAADAEAICEAASRPTMRFVEIRSAEQHSQAMVFRSRDLLVRQRTQAINAVRGHCAEFGLSAPTGHKGYEALKGLIGEATDLPEVAREVLELLMASIDQLEGQIGVLEKKMAQLAKRDPVNKALMSIPGIGPITALAVKALGPDARGFASGRDYAAWMGLVPSQHSSGGKERLGKITKKGNRTLRRLFVICAGTVITSIARSRTVPDPWLAKLLARRPRMVAVTALANKIARIVWALQVKGGVYQSPMTT

SEQ ID NO: 289013 - protein, 357 aa, unidentified
MPRSTTHPRITVAGIDIGKNTFHVVGHDKSGAIVLRQKWSRGQVESRFANMPPCLIGMEACVGAHHLARKLTALGHTARLMPARYVRAYAKGQKNDFNDGEAIAEAVQRPTMKFVAVKTVDQLDLQALHRVRERLVSQRTGIINQMRAFLLERGVAVRQGIRFLRAELPNVLATRSDVLSPRMLRIIESLAGDWRSLDARIDQLTEEIKIIAATDVDCRRTMSVPGIGPIISSATVAAIGKGDVFSKGRDFAAWLGIVPRQISTGDRTILGRISKRGNRYLRVLFVQAAWVVLAKPQMWERYGLLAWIAAAKRRMHPNVLAIALANKLARITWAVLAKGRNFEMTRKSKSNAAPQPA

SEQ ID NO: 289014 - protein, 492 aa, unidentified
MWNDDWPQDAVWKITPVPRKTAGLPVFLFILKKVKEMAKSKKAKMIKSPDGNKLAIVNPDAAGIDIADKEMQVCVPEDRDGENNRCFGSFTCDLNIIVEWLRACRITTVAMEATGIYYLQLFLKLQDAGIEVLLCNPRDVKNLSGHKTDSADAEWLMLLHRYGLLKPCYQPGNAARQIRNLCRQRNNIIRSADKQIQYMQKAMEQMNIKLSTVITDITGMSGRDIINAILAGERDPVQLASLAQTNCKTPRGEIAKALEGTWDADLLFMLQQSVDAYDFFTRQMDECDKQIEALLVAYQARLPHDANALVRHKRKKSDRSKNAPEIDIEKYAFAIWGVNVFDIPGLKDLAVMQLIGELGHDFNDKFETAEKFCRWCNLTPENKISGGKILSSRVQKRKNPVGQIFRKAAAPMAREKSEMGNYYRRIRSKSGALQANVATAHKIAKIFYTMVKTKEKYNPAKVGLDEMEITQKKILRLERALEKLNQKYKKTG

SEQ ID NO: 289015 - protein, 418 aa, unidentified
MKPWNELTHFAALDWADDHHDLVVVDAGGQVVLKLTFEHNAQGWQQAQQALAQWPGLPVALETSAGPAVDQLLQRGFTVYPVMPKAAARYRERKRPTGPKDDFHDAWSLADALRTDGHAWCALSPLDPLTAELRALCRDEMVLIEQRTALVNQLQAALKEYYPAAVEAFEDWTVPATWDFVLAFPTPAALEAAGKRRWEKFLHTHKLWRPQTASQRLEIFARAAEFSGAAPIVAAKSLLAQSLARLLQALEHQLEAYRARIRQLFNQHPDHELFGSLPGAGAKLAPRLLVELAAVNWTQISQVQARAGTAPVTQQSGRIRRVKIRRACTHWLRATLHLWADLSRHYSAWSAAYYRAHRDKGQSHACALRCLANRWLEIVGAMVRTGTTYNAEKHLVAIQKHGSYVLKLIPCPATQNCE

SEQ ID NO: 289016 - protein, 323 aa, unidentified
MGKIILGIDISKKHFDVSMLIDDKHKNKKFDNNATGFQLLKNWIAKHDVDKVHVCMEATGFYGESLAEFLFKDGYKVSVINPSCIKAYARSKLCRHKTDKIDSQLIAEYCDKYNPNLWQPLPSEIKNLRELERCIASLKLQHNQTTNQLENKMQSCFILNIWKDLKLKIEDQIKDLYKEINALFTKINDLQKAYNNLQTIPGIGKITAITLLAEIPEINAFKNARQLAAYAGLTPSQKFSGSSVKGKPKLSKIGAKRLRKAMFFPALVAKKHNTYIQKFCKNLEKKGKHTFCIIGAAMRKLLHIVFVILKNNTVFDPNIATSS

SEQ ID NO: 289017 - protein, 428 aa, unidentified
MEAVVASERTQAVWEAVIERCCGLDVHQKTVTACLLAGALDQQPGESLRTFSTTTRGLLELRDWLEEHGCSHVAIESTGIYWRPVFHILEDTVTVLLVNACHMKQVPGRKTDLKDAQWIARLLRWGLLKPSLIPPKPIRDLRDLCRYRKKLTEQASAEKNRIQKVLEDANIKLASVVSTVFGVSGRAMLEALIQGVMSPEETAGLAKRKLRSKIPQLVEALEGRVNEHHRFLMRMQMEHLEYLEKAIAQLHERIDEKIKPYQHEVDLICTTPGIDTVGAQHIFAEIGGDISVFPSEGHLASWIGICPGNNESAGKRKSGRTTRGNRWLKALLVQTAHGASQTKGTYLKAFYHRVAARRGKKRAALAVAHKQTAIIYHELSEDKPYQELGENFFDRINQRALEQRLVRRLRSLGYRVDLHPEPVTPQCS

SEQ ID NO: 289018 - protein, 326 aa, unidentified
MDILGIDIAKAKFDVHLCIAQQQRRASFPNTEAGFVQLKAWLDRHRPEQAAPLHACMEATGNWGLDLAAFLCGQKITVSIVNPRQIKAFGDSELARNKTDRLDAALIARFCRAHTPPPWTPPAPALRDLREMVRRCEALKAARVQELNRRKSGFANAIVAASIDHHIAYLDQQIQQITDAVRQLIASDPSQQAIRELLLSIIGVGEVTASVIMAELPNLVEFTPKGLAAFAGLSPQERSSGSSAAASRSISRIGSARLRSALYLAALSAKRHNPRLADFIQRMREAGKPPKVILIAVARRLLVYAHAVLRSGKPFSITHQAVDQSA

SEQ ID NO: 289019 - protein, 369 aa, unidentified
MADHKEAFVGIDVAKLRNAIAIADPGREGEVRFFGEVDASDTSMRRVIQRIAAKFDRVDFCYEAGPTGYGLYRLIRLLGHECTVVAPSLIPRKPGDRVKTNRRDAVSLARLLRAGELTAVWVPDEGHEAMRDLVRARAAAVETQRAHRQQVSSFMLKHSRVFPRPKAWTMRYLRWLQEQKFDHPAHQIALQEMIEAVRTSKERVLRIEAAIEEFVPQWSLAPVVQALQALRGVDLIVAVTFATEIGDLSRFENPRQLMAYLGLVPSERSTGETVRRGSITKAGNGRVRHMLVESAWTYRHPPKVGKAKLYKLEQTSPRVREIAWKAQTRLTARYRALSAKGKKTTIVCTAIARELVGFMWSVGQEVQPA

SEQ ID NO: 289020 - protein, 389 aa, unidentified
MKIYVGIDIAKLNHFAAAISSDGEIIIEPFKFTNDADGFQLLVSKLESFDKNSLIIGLESTAHYGDNLVRYLVTELYQVCVLNPIKTCQMRKNNVRKTKTDKVDTYVIAKTLMMQDNLRFVSFFDLDMMDLKALGRFRQKTIKQRTRLKIQLTTYVDQVFPEIQYFFKSGLHQHAVYALLKEAPSPKEIASMHMTHLANLLKVNSHGHFTKEQAKELRVLAQKSVGANDSAISIQITQTIQQIELLDSQLEKIEAEMTDIMKFNDSVIMTIPGIGYINGGMILGEIGDIHRFSNPNKLLAFAGLDPSVYQSGNFQAKTTRMSKRGSRVLRYALVNAAWNVVRNNATFKAYYDAKRSEGRSHYNALGHCAGKLVRVIWKMLTDEVEFNLE

SEQ ID NO: 289021 - protein, 425 aa, unidentified
MQTNNIIKHYTKSTLIIGIDVAKYNSVARAFNSEGKELSKAITFTTDYEGLNLFHMWINKIKSTYKLKDSIIGMEPTGHYWIRIEDYIVDKISNSMAVLVEASDVKSMRDLLGMENKKTDHIDAMAIAKTILFGKYSTINKRNSGFTDLKELIRFREEKIKEKVRLDNKIQRWLDINFPEYKLLFKKWNTKTSIAILKNFPTQREILNTNSKKIVSTIKEEVKTGNISKYVELLKEIAEKSIALDKCSEMQKIILKHYLENYLNINQMLVLIENEVNELLKKIDYAQNLVEIKGVSSMFIGSLLAETGDLKNFKVPQQLLAYAGLDLKISESGEKKGKTTISKRGNSRVRAILFKYLLPFINANEEFKALHKHYTTRSNNQLKGMQSLIAVGCKLLRVFFGMSKTNTNYEPTIILEHNQFLSIAA

SEQ ID NO: 289022 - protein, 406 aa, unidentified
MICIGIDIAKRSHVASAVDEDGGTVVESFKFDNTANGFAKMLKRLRKADATPENSLVGMEATGRYWVALFDFLISHGYEAAVINPIQTDAFRGVWTVRKVKTDALDAAMIADLVRYKRYSPSALGDEATEELRNLARYRMSLVERSTALKNRATAILDRTFPELAGLFSNAYCPTHRELLQHCATPDQVLGTDVGTLERILREASRGRCGRAKAERLKALAKESVGVGFGSKTLAFEARLLMEELDFVQDQVKEVERELARLLERTQGKWLVTIPGIDVALASVIAGEIGDPNAFDDPHRLMGYAGMDPTRSESGETVRSDGHMSKRGPGALRWAFMQAADCARKNDPYFGDYYDRKRGVDGKHHYVALSGVARKLMGVALAVMKEGRPYEPAPPRNHRPGHLKEA

SEQ ID NO: 289023 - protein, 428 aa, unidentified
MADHLNNKPYRAWIAIDIAKDFNAVLSETNEGKRQHFRMANSAQDHDRFIDFLKSLPSPCIIGFEATGNYHRALGHRLVSEGFEVCFISSLASARYREVMFNSWDKNDPKDAAVLLELLKQEITQRYVDPLIAGHHDLQELSKTYYQVTLSRTRLQHSILTHYLPLYFPEMGKWWNSTRSAWWINYLLHFPIPSAVTKHSQETFCEIASPIVGRKVNKAAKLIELYETAQHSIGLPIEEDSLACKTFQIQLRRYQEINDCRTELEKTAQAVLANNPDSVILQSVPGIGPINALTILAEGGDLRRFNHHRQFLKYCGFDLAKNQSGNYRGQEHISKRGNARLRLALWMAVNTAITQPENSFQQKYNRYIKDAPQDKDLQRKARTAVAAKMARVVYGLVKSKQMYQGYYEKALPSGSIPLCRAVEAVRTS

SEQ ID NO: 289024 - protein, 326 aa, unidentified
MQTILHNCCGMDVHKDSVVACIIKSDPSKPAENVKDEVAKEIKVFGTFPDDLAQLKAWLESEDCRHVAMESTGIYWIPIYEALENAHGGKIDIKVVNARHMKNVPGKKTDIKDSEWIARLLRAGLLAGSFIPPQDVRELKQLTRYRKNIVQDVTTQKNRIEKTLQQAGFKLSTFLSDIFGVSGRNLIRVLIKQGRIFSSDVERETRRISKEKKAEIKRAINGQLTKKQRDFLQLQTNMLDSLLTHLEAVEKSIAALSEKWEGDIERLCTIPGIAKTSATAIIGEIGTEMGKFPTAEHFCSWAGLAPGDNESAGKKKVQESLSETLT

SEQ ID NO: 289025 - protein, 365 aa, unidentified
MITDNYTTIGMDVSDRKIQVCIMTKSGINPKIVKETTIPTTKEGVQKFLSTQDKNTPVVFETGMHCRWMHEIGEGMGFKVYVANPCRLKMITESKTKNDVNDARMLARIALSDPGLLHPVKLRDAEHQKMLNLHEMRNLLIKQRTGMIVQMRFIAKSMGFRMPKTSTRCFHKLDTTLWPKEFRDIAWPMLKNLEQLDITIKTYEKKIRELAETPTFKAQVDRLMEIHYVGLYAATGFIAVTGGDMDRFERPRDIGPWLGLSPKQDQSGDIDKQCHITKAGSPLMRRLLVECAQMIVRDGAIETDLKIKGMRICVRGAKIAKRKAITAVARSLAVLMVAMLKKMDKPYKPLSEVNEKAFSESQFSA

SEQ ID NO: 289026 - protein, 400 aa, unidentified
MNAVGIDVSKGKSMIAVMRPFGEVVASPFEVGHTEGELKELARFLKSLPGETRVLMEYTGRYYEPIAQYLHEAGIFVSVVNAILAHDYSGNSIRKVKTDKIDAIKLANMAIDRWIELREYVPEDEIRRTLKICNRQYNQYVKLKTMLKNNLIALLDETFPNVNKLFSSPARKSDGHEKWVDFALKFWHCECVCGISPRQFKDKYERWCKRNGYHYSADKAEDIYATACGNIGLLPAIDSTKIIVTQAIVQLQAIEETLAALKQEMQRLASTLPEYETVMALYGVGEVLGPQLIAEIGDVTRFKSKKSLVAFAGIDSPPDQSGQVDNRSKAITKRGSASLRKTLFQVMSVILQNSPNDEPVYTYLDKKRSEGKPYKVYMIAAANKFLRIYYARTKLALVNT

SEQ ID NO: 289027 - protein, 369 aa, unidentified
MEKDTTYVALDDSKRKIVAGILRPGDAQPELREMANDPRLIRRLFERLTREGPVAACYEAGVSGYDLHRQLTALGVACSVIAPALTPRRPGQRIKTDRRDAAKLVRLFRAGELTAIHVLDESEEAVRDLVRCRDDLRRDVLRWRHRVLKLLGRHGRAYLAGKNWSQAHWRWIREQRFDLPPLQRAFEATVFALEQALARQAELDQELEAVAATAPYRELVGWLRCFRGIDTLSAIILLAEVVDFQRFRRPRELMAYLGLVPTEYSSGETQRRGALTKAGNSHARRVLVEAAWHYRHRPTIGRALAGRSQGQPDEIVGQAWRAQQRLHRRYRHLVGHGKRTPVAVAAVARELVGFIWAAMTRHESRRAAA

SEQ ID NO: 289028 - protein, 411 aa, unidentified
MLTIVYPICCGLDVHKSFVYACIASTNERGVTTYQSKRFSTFTKGLKELSAWLSYYKCTDVCMESTGKYWIPVYNILEHSCKIVLAHPKYVKSIPGKKTDKKDAKWIADIFKHGLVVGSFIPSFHIRQLRDLMRYRFKLTSYSTGETNRARNCLTVSNLKLDDVFSDVFGKSAGAIIDRILDNPNEPFDVKPFVSKKCKSPIEAIQAAVDGEMCSEQVQKFQVIRSHLNDLDKAKANLDSVILALAEMFTPQINLVSSVPGIRSFSAIGIIAEIGVDMSVFLSAKHLCSWAGLSPQNNSSAGKKKTTRISRAGAYIKPLLVQCANAVVKSDKHPEIKNRYLRIKKRRGHKKAIIAIARMLLVAIYNILKKNEPYNPELYNKSDKPIKSFDISVDSAVRILQSKGYSVIPPG

SEQ ID NO: 289029 - protein, 331 aa, unidentified
MNYVGLDVHDEYCQAAILDEKGKLLEEKRIPTNEAGLKHLARSIDKGSSLTMEASSSFYVPYEFFSGRGYEVKVAHPLKVKAIADARIKTDKIDAKTLAHLLRADLIPETYMPEKPIRQLREMISHRDGMVNMRTQEKNRVQSMLTRRGLKHGFSDVFGKGGTAWLKSLELDAMGRLEMDQHLGTIAHLDKMVDAIEEEIFAYEKVFPETQMLQSIPGVGRLIAITLMAGIVDINRFADEKKLASYAGLTPSVHQSGNVDRHGKITKQGNKMVRAAIMRAVQKAIVKETKIRRFFLRIEKRHGTNKAKVATGRKILCWIYFMLKRGETFAA

SEQ ID NO: 289030 - protein, 353 aa, unidentified
MIVIGVDPHKSTHTAAAVDPVTNTGLGSLRIDATLAGYRRMLVWAKQWPQRQWAVENAEGLGHHLAQWLLARGEVVLDVPATATARVRELSRGARRKNDRIDAASAACVAAAQGDARPVVAEDHVGALELLDERRNNLCQNRTRTINQLHRLLRELLAGGVPTELTAAKATAALRTFRPRSTPERVRVQLCRDLIADVRRLDQQLAENQAEATRLLDEHGTRLREIDGVGPVLAARILGRTGHVSRFATAAAYATYNGTAPVEVASAEYQCHRLNRYGDRQLNCAIHTIAIVQLRRHGSAARRYYDRKITDGKTPRAALRCLKRHLSNQLWRTMLADEQRDQDRCHDQSTKAS

SEQ ID NO: 289031 - protein, 387 aa, unidentified
MQKPHDDSKACRTAFVQDNTLVAVIEMSLSSWLVAGMIPGVSREPVKKIAPDAEDLLQLLYRWRDGAITAGKEIIRIAVAYETGRDSFWLARWLRERGIDAQVIHATSVAISREHRRAKTDRIDTAMLRRGFLGWLRGEPGHCSMAIVPTVTEEDAKRPCRDRESLVHERTSIVNRMKAMLIQFGVRNFNPVLRKASEKLDAVRTPEGIALPPNTVCALRRNMERLHLIKEQIKAIEQAQLQGLQRDPTEKMNAIIFLLVRIIGLGVETAQQLAHEILFRNLRDRKAVARYAGVTGSPDESGSKRREKGLSRSGNGRVRKILIQLSWRIVKFHPESDLVIWFKTRTQNARGSRKPMIVALARKLIIALWRYVNTGVVPEGFKLRPAS

SEQ ID NO: 289032 - protein, 389 aa, unidentified
MFYLGIDIGKNTHVASLIDSKKKVLFKAFSFSNSIDGAESLICKLEPFKNQLEIGMEATGHYWLSLYSYLSEKNFTVRVINPIQTDGWRQGIEIRKRKTDIIDSLLIADLLRYGDFVETSLSNEDYLSLRNLSRFRSYLVSSIGDLKRKTIALLDQVFPEYASSFSNIFAKTSKEILANFSSPSDFEDINSEDLQSFLDNVTMKKFSARKLEELSKKASKSFGVNFCMDSFGLQIKMLIGQISFIQNQVLDVEKEIKSLLEKLNSPITTIPGIGAVNAATILGEIGDIKRFSNPSKLVAYAGLDSTVSQSGNFESTSNHMTKRGSPYLRRALFQSALRAEFCDPVFSDYYQKKITEGKHHLVATNAVARKLVHTIFAVLTKDEPYQVQS

SEQ ID NO: 289033 - protein, 343 aa, unidentified
MQIHSVGIDLGKTTFHLVALSAAGKVLLRKKFTQKQLITFTANMQISLIGMEACSGAHFLGRVLREQGHDVKLIPAQFVKPYVKSNKNDFLDAEAIAEAVDRQNMRFVPIKTDDQLDLQALHRVRDRLIARRTSVINQLRAFLLERGMTFAKTPAKLKLAMPEILENADANLTPRMRNLVSLLWNEWKDLEQQIVSMNAEVEQIASSDPACQRLRKIPGIGPLVATAIVAAIGNGAAFHKGREFASWLGLVPRQHSTGGKARLFGISKRGNSYLRKILVHGARSAVLRVKRERSPFGGWLDALEQRAPINVVITAAANKLARIAWAVLSSGQEYRPTVSPMAV

SEQ ID NO: 289034 - protein, 407 aa, unidentified
MDLLKTVFGIDVSSRKSNVCIMVNGQKVNDYAISNDMVGFNQLLGDLKQVTKPQIIFEATGVYSRRLQAFLDMHELRYVMMNPLEAKRKTKDDLHQNKTDKLDALYLAKLQSEHPQRLAYVQNKEYQELMANNRIYEQASHDLITNRNRLHKAIQLTFPEIEHLLANPRGKNYWSIALRFPHPDIVLETKEADIIDFLKGLSGIGKKRANDITQNLIRLAKVACPAVKKNSAHIRGLKMAINNILSAEEECQTALQEMAKLAPKRDLEILTSIPGIGENTALRIISELGDIRRFNNPSQLNAFVGVDPQVYESGNLTAHLSISKRGTAIGRKVLYLAINQIQSAKKVGNPCHIADYYEKRKRSSETASHKKAAIASIHKLLRTIFALIKNDQLYSYDVAKHNQRLLS

SEQ ID NO: 289035 - protein, 373 aa, unidentified
MTASMDEEAPAMESMRWVGVDVHAKESVAAVLDQATGEISTHRIAGRPEDVLLWLTTVAQPFRAVYEAGPTGYGLVRRASERGLDVVVCAPGHILKNATDHIKVDKRDAVRLARLLSAGELRLVRIPEPDQEQLRDLVRSREDVRVDLTRIRNRIGKFLLRRELYPPQHAESWGVLHRKWLQQLRFEDRASELVFQDAMQAHDILVARREQLERALAEIAASSPWSRTVARLRCLRGIDTLSALGLVAEVGDFRRFVHPRFLSSYLGLVPSEHWSGDKRRQGGITKAGSKHARRLLVEAAWQYRHVPRTSHHISQRQQGQDPRVIDIAWRAQRRLYKRWQRLHEERRKRSTVVAVAVGRELAAYCWEIATLTG

SEQ ID NO: 289036 - protein, 408 aa, unidentified
MDVVYSHVCGLDVHKKTVVACIITPDEKEIRTFSTMTDDLLQMVDWIKSKGCTHAAMESTGSYWKPVYNLLETEEIQTLVVNAQHIKHVPGRKTDVKDAEWIASLLRHGLLRGSFIPPRDQRELRELIRYRRSLIEERAREVNRIQKVLEGANIKLSSVASDILGKSARAMIEALIAGNVDPESLSELALRRLKNKKADLQRALKGLIGPHQRLMLQTQLRHVDELDALIQQLDEEIKRRMLPFEEDLERLDTIPGVARRTAEQIVAETGTDMSRFPSAAHLCSWAGLAPGNNESAGKRKSGRTTKGNPKLRSALIEAARAAVRTKHTYLSSLYHRIAARRGANRAAVAVAHRILTIVYHLLKEKQVYNELGPHYYEERRREQMARQAIRKLEMLGYDVMLKEREQTA

SEQ ID NO: 289037 - protein, 396 aa, unidentified
MTTIGIDIGGRTHVVARCRDGVARADREILRVSESRAGFAALDTWLERQPEPVTLVTMESSGHYWMPLAAHLRRRAVPVAVVNPLAAKYFARSRLGRTKSDPADARSLAEMAMRDTPPARDPLAGAELRQAARFAMTLVTEQAKACQRLIRLVELGFPELGELFDDPTCRTAREVLRIAPTARAATRRRTATLANANAGPGHRRLGQARAERLQAAAADSIAVPELAAEVAFEVGLLLDQYDLLEGQIEAADRHVAELLDDELARRLRTIPGVGPSIVATLIAEVGDIGRFSDFDQLLAYAGVHPAERSSGRKGSNPETAWHMSKAGNSHLRAAAYRMAVVGVQHNPVIAAHYARKRAAGKSKMNALGHCMRKVLSLVWGVWRNGQDFDPDWGVEA

SEQ ID NO: 289038 - protein, 341 aa, unidentified
MQIHSVGIDLGKTTFHLVALGEAGRVLVKKKFTQKQLLVFTANMQASLIGMEACSGAHFLARALRSQDHDVRLIAAKFVKPFVKSNKNDFVDAEAIAEAVERKNMRFVPIKTDDQLDLQAIHRVRDRLISRRTAVINQLRAFLLERGLVFATTPAKLKAAMADVLENADADLTPQMRNLISMLWNEWKLVEEQIEELTTQLERISDADAGCIRIRKIPGIGPVVATAIVAAIGNGAAFRKGRDFAAWLGIVPRQYSTGGKAKLLGISKRGNVYLRKILIHGARAAVLRIKRDRAPIGAWLDALDSRAPKNVVVVAMANKLARIAWAVLSSGNEYRPAAVPA

SEQ ID NO: 289039 - protein, 400 aa, unidentified
MRAVFGIDVSKTSSEVAILVNGEKVHGYTILNDAIGFNRLLGDLKTVHNPEIIFEATGVYSRRLQAFLEEYSYAYTRLNPLEAKKQLDSLRVRKTDKIDAEKLAKSQLVHNRKPTYVQEEVYQHLRDLSRFYQNMTEDLVRTKNRLHKVLQVTFPELETLLSTPTGEQYWNLVMAFPCKEFVLSLSQSNLCEIVRQSTSKRISEKRITYLTDKLIKLAKQSFCAVKNTSPMLEEVRYYAQELLRLSERRQVVLNDMVALAQPLPEYDILRSIPGIAETTATSIIGELGDIRRFQSSNQINAFIGIDLRHYESGNFLAKEHITKRGNPYARKILFKCIHNIASASHTNPCHIADFYEKRKRQSTIASTKPHTIASIHRLIRTMYYLITHNKLYDYSLAQNR

SEQ ID NO: 289040 - protein, 346 aa, unidentified
MEQYVGLDVSLKMTAICIVDRAGKILREGMVASDPDAIATFVRLHAPHVVRIGLETGATSTWLWTELNRRGLPIICIDARHAKAALKMQINKSDRNDAVGIARIMQCGWYKEVHVKALESHAIKALLVSRALLVKIKRDLENQVRGLLKNLGLVIGRAKMNTFVRRAAELIEDEPELAAAVEPLLKARDAVEKQITDLDRKVMKLARHNVQVRRFMKVPGIGPITALCYLATIDDPTRFKRSRSVGAYVGLTSRRYASGEIDWTGRISKCGDRMLRSYLFEAAGVLLTRVEKWSVLKAWGMRVAKRSGLGKARVAVARKLAVILHRMWVDGTEFKWTSKEAIGQPA

SEQ ID NO: 289041 - protein, 409 aa, unidentified
MDPVIDCVAGLDVHKATVVATVRTPGADGRRTSWTETFGTMTADLIALRDWLQAYGVTHVALESTGVYWKPIYYVLEDTFQLLLINMLELKHVPGRKTDVKDSEWLAQLLECGLLRASFVPPPAIRELRDITRYQVQQVRDRSQEVNRLCKVLEDAGIKLTSVATDVLGVSGRAMVDALVAGTTDPTALAELARGKLRTKLPALRRALQGRFRRHHAFLVEQILAKIDFLDETLDRITAELDERLAPFAPMLANLDTIPGVNRTTAVSILAETGGDMARFPTAGHLCSWAGMCPGHDESAGKRRSGKTRKANRYLRAALIQGALGASHAKGSALQARYHRVKRRRGHKKAIVAVGHQMLEIAYHLMRDGGTYDELGADYFDRRHTDRTVRRHVRQLEALGFQVTIEKAA

SEQ ID NO: 289042 - protein, 343 aa, unidentified
MRLFVGLDVSLEKTAICVISEHGKIVREAQAASEPEVLIRWMGDLDGTIAVIGLEAGPLSQWLHRGLTQAGLDVVLMETRQVKGALKAMPIKTDRRDAEGIARLLHLGWFRPVHCKSVSAQEVRAVLNARKAVQQGFIALEMSLRGLLRNFGLKVGSISRGRFEQRIRELAAGNPMLEAATEPMLRARLSLRQELAGLERRVRQLAQEDPACRRMMSMPGVGAVVALTYRSAVDDPGRFTSSKKVGPWVGLTPSRNQSGERDVSGGITKAGDVNLRRALCQAATVMMHRGRSTWLRTWAAQIARRRGSKRAMVALARRIGVILHRMWVEGTDFRSDGPAPKVS

SEQ ID NO: 289043 - protein, 367 aa, unidentified
MKQSSKIFVGMDVHKDSIDITLAEQGGEVRRFGEVGGDRAALLKVVRKLTSRGSELVFVYEAGPCGFWIQREITALGHACWVVSPSLIPQRPGNHVKTDRRDSENLARLARAGELTPVHVPDVRDEAIRDLVRARDDAVIAQRRARQQLKALLLRNDIRYVGKTSWTSAHLRWLSELKLPQPAQQIAFQEYVDAITVATGRIERFEQAMRDEVLTWRFAPAVAALQAMRGIQFVHAMTLVAELGDLTRFASPRQLMAYLGLVPSEDSSGPRRRQGSITKAGNTYARRALVEAAWAYRHPARLTRIIALRQDALPKQACDIAWKAQLRLCAKYRRLRARRVLETKIIVALARELSGFVWAIGQHVKPQ

SEQ ID NO: 289044 - protein, 338 aa, unidentified
MTAIRVIGIDLGKNTFHLIGHDYSGREVMRKKLNRQKLLQLLSVHEPVVIAMEACGGAHWLARKCKSYGHQVKLIPAQYVKPYVKTNKNDFIDADAIAEASMRPNMRFVSAKSEQAQVGTVIRKIRSSYIKDRTACMNRIGSILLEFGISLPRGHSNMKNLFQWLADNKEPIPPMLILELRQQLDFYHQLNEWIKSQENKLEQLLKENDLLLLLQSVPGIGPMTASCCLSAISNPNDFVNGRNFAAWIGLVPRQYSTGGKPRMLGISKRGNKELRELFVHAARAVVWRDESAKRYFGTWLIELKQRKPFNVVVVALANKIARIAWSVMSTHKAFEIRT

SEQ ID NO: 289045 - protein, 409 aa, unidentified
MEVLYSRCAGIDVHKETAMACVLTPGPGAEPHKEVRQFATTTGELRKLAQWLQQAGVTHAAMESTGVYWKPVFNILEPSCELILVNARHVRQVPGRKTDKADCAWLASLLRHGLLEASFVPPLEVRELRDLCRMRTTLVRECVQVGNRIRKVLEDANVKLDSVASNTLGVSGRSMIQALIEGEQDPVVLAELARGRLRSKLTELTAALEGQVRPHHRFLLRQWTALLASLEQHIAEVEQEIERHMPPFEWAAALLMEMPGLDRTAACALIGEIGADMSRFPSARHLASWAGLCPGNNTSAGKSRSGKSHRGNPWIKGLMTEIAWAAARTKGSYPAALYKRLASHRGKKRALVGVANSQLQVVWHLLTHRHPYRDLGPDHFDRINHQRLAQSLVRRLQKLGLTVTVTPAA

SEQ ID NO: 289046 - protein, 347 aa, unidentified
MAKIITDFSTVTTVGLDLAKHVFHAHAVDGAGRVVVTKTIRRKDVSGFFAGLPRCLVGLEACGSAHHWARTLTALGHDARLMPPAYVKAYVRRQKNDAADAAAICEAVTRPSMRFVAIRSVANQAALMRHRVRELLVGQRTQLLNAIRGHLSEIGIIAPQGANHARGLAVLLASPDEAIAAAVRAALRPLVAQLTNLDAEIDRADREIKALVAANDTARRLMTIPGIGPVTASAIAASVQDAAAFASGREFAAFLGLVPRQHSTGGKERLGRISKMGNRYLRKLLVVGAHAVLFHRKGHTDALRTWACKLLAAKPFKLVAVALANKLARIVFAVLRTGGTYRGGVAA

SEQ ID NO: 289047 - protein, 351 aa, unidentified
MIIIGVDYHPSFQQIAFVDQETGECGERQLNHSDGEAEKFYRELKQRGVSVRVGMEATGHSRWFERLLAELGFEVWIGDAAEIKTMRVRKQKTDREDARLMRKLLLENRFPRIWVPSPENRDLRQLLWHRHRLVQMRTRIMNQLQAVAMNEGYRWKKKLFSAPGRALLEKLSLAPWASRRRKELLELLDQLDPKIAELTAAVEQEAKKRPEVLLLMTHPGVGPITGLVYVLVIGTPERFPCGKQIGSYTGLIPCEDSSAGRQRLGHISKQGNTLLRFLLVEAAQAAARCNPDWRRKYLHLMMRREKRIAKVAMARRLVVRLYWMWRNHWQYSQLVEFGSNAGKLVTGHGVK

SEQ ID NO: 289048 - protein, 342 aa, unidentified
MDEIKLVGVDIGKTAFHVVGVDASGAVQLKRRCSRAQLLALMGKLTECVVAMEACCGAHHLARQIMLLGHDVRLIAPQFVKPFLKSNKNDYLDAEAIAEAAQRPTMRFVPVKTVEQLDLQALHRVRDRLVGKRTAVINQLRSFMLERGIVFRQGRRHLAGQMPALFADERSPLSPRMQAIAQGLWREWQQLEREIDDVSTEIDSVAKTDPVCRRLMAVPGVGPIVATALVAAVGDGSAFQRGRDLAAWLGLVPRQHSTGGKPKLLGISKRGNSHLRRLFIHGARSVAMHSDRKRGLGLWLTGLEQRAHKNVAVVALANKIVRISWALLARGEDYRVPAAAAA

SEQ ID NO: 289049 - protein, 358 aa, unidentified
MTRCIPTDAQAITLGVDTHKDAHVGVALDGLGRRQGTLSIPTTPEGYKKLVDWASEFGPLEHAGVEGTGSFGAGLARFLKSRGIKVFEVIRPKRSHQYRSGKSDPIDAESAARSVLADTAIGEPKGADGEVEMIRTLRITRRSAVKARAQAANQLRALLLTAPEGLKSELCGLSTARVVEKASRLRPGATPSDVEEATKFALRSMARRYQHLSEEIGKLDEQLNRVVSEVAPELVAVEGIGTDTAASLLIAVGDNPERLKSEAAFAHLCGAAPIPASSGKTVRHRLNRHGNRDANRALYVIAVCRMSRDERTRTYVAKRTAEGKTKKEIIRCLKRYIAREIYRILASPSSHSTSISGP

SEQ ID NO: 289050 - protein, 344 aa, unidentified
MVTTIGIDPHKATHTAVAIDGSENVLGEITIRADKDQTRKLVDWAGSVDGDGRLWAVEAATGLGYLLSQQLMAQGETVVDVPPVLASRIRVLSSGKSQKNDENDARSVAIAALRRDGLAEVHREDDAAVLRMLAKRHRELTALRTQAVCRLHAMLAVLRPGGMGHRLSAKQASRMLGGIRGLDAVGEQRRLMAKTHLVDIRRLDRDLDANKARIRQAVAAAETSVTDIYGVGPVVAAFLIGYTPPIERFTTPDRYAAYNGTAPIEVSSGGKVRHRLSRRGNRILNHAIHTAAVTQISHQTPGKVYYDRKIDEGKTNKEALRALKRRISDAVYRQLRQDAERRDG

SEQ ID NO: 289051 - protein, 351 aa, unidentified
MSNPTRWVGVDLHRRRSQIAIIDEQGELALSRRIVNDRDTFKDLLGNPEGTHVAIEATYGWEWLAELLEEAGYDVHLAHPLRTQAIAAARVKTDAVDAKTLAHLLRTGLLPEAYIAPPELRDVRELLRHRAVLTRMRTAVKNRVHALLARQGIRQEHADLFGKAGREFLAALELPDGSRRRLDSLMSLIGDFDREITATTREIDARAKADERVPVLCQIRGVGRYTAMLIIAEVGDVKRFPTARHLCAWAELAPTVRSSDGKARLGHISRQGSPALRWALTEAAQKIPTGGGPLRAMFERIAKRRGRNIAKVAVARQILTLCYYGPRDGEIRCLKQQPIDDHDNHELAQAA

SEQ ID NO: 289052 - protein, 456 aa, unidentified
MKIPQSTIRLLTGRLVKILLYREVSTMKSNTQNAKIEAITENTLVLGIDIGSETHYARAFDYRGIEYSKKPFKFSNTEAGFMSFKAWIQDMKEMHEKDKVVPGMEPTGHYWFNLGKFLQDNEMRPVLVNPHHVKKSKELDDNHPTKNDRKDPKVIAGLVREGRYMIPYLPEGVYADLRTASNIRFQLQAELTRIQNRISRWFNIYFPEYKTVYGKPDAKSGMMILKVAPLPEDILTLGIDGVNQIWRDAKMRAVGKARAKTLMEAAEHSVGSKEGAVSARMEIRMLLEDYESRNVRLQEVMALIEELVKQIPMAEKLLEIKGVGIKTVSGFLAEVGDISRFNNPKELQKLAGLALVENSSGKHKGETRISRRGRKRLRYLLFEVAMSLVSKNAEFKELHIYYTTRRINPLKKMQSLMAVAAKALRIFYAILTKGVAYDPKKMINDIKRPKIYLQAA

SEQ ID NO: 289053 - protein, 432 aa, unidentified
MKFNQSNKQNQRISRISETTLVIGTDIAKHNHVARAFNYRGIELSRRCLFQNDENGLLNLLAWVESIKQEHGLTDVLLGVEPTGHYWFPLFHFLKQRGVEVVLVNPHHVRRSKELDDNSPTKNDIKDAKVVAKLVLDGRYTQPQLPEGVYADLRVLMNQRDRLCGDLNRVKGRIHNWLDRFFPEYRQVFKDGEGKASLITLQHFPLPQDVVGAGETTVMATWKKNGVQRAVGPKRAELLYRKAQKSIGLTEGATAARYELAMYLEQYAMLCRQIERLMEQVAALVEQIPGASHMMSIPCIGLVTVAGFLAEVGDLSGYEHSQQIVRHAGLSLRENSSGLHKGETTISKRGRCRLRALLYRAALTMVAKNPEFRALHLYFTTRRDNPLKKKQSMIALCIKLIRVLFELGRKQKKYDSSKVLGPHREAQLQAAA

SEQ ID NO: 289054 - protein, 428 aa, unidentified
MTHSEIKSTEFAAYIGIDWADQKHDICLQEAGSNRIESLQIDHKPDSISKWVSELRQRFQGRSIAIALEQKRGGLLYSLMYYEFIVLYPVNPHALASYREAFTTSGAKDDPVDAGLLLEMVGLHRDKLHPWIPDDPLTRELSMLVEYRRRLVDDRTYLTNRLQALLKQYFPQALDWAGELDTSRALDFLAQWPQLEAIQKAAPDQLRNFYRQHYRLGEKLPQRLAEISAAQPLTRDKAVINASIPMVQALLEPLRGLIAGIETFDQQIEACYQQHPDKEIFNSLPGAGEVLAPRLLAAFGADRARYQSAEEIQCFSGIAPVTERSGKTKFVRRRLACPKFVRQSFHEFANSSIKWSRWARAYYDQQRRRGNKHHEAIRSLAYKWTRIIYRCWQDHEPYDESVYIAKLELRGSPLAKLIPTAAEQAVSS

SEQ ID NO: 289055 - protein, 342 aa, unidentified
MSEVTIIGIDLAKRVFQLHGAREDGSVVFRKKLSRGQVLAFVSQQSRCVVAMEACATAHGWGREFEKLGHDVRLVPPVYVKPFVKRQKNDAADAEAIVEAALRPTMRFVAVKTEDQQARAMLFRTRQMFVGQRTQMINALRGHLAEHGLVAPTGTAQLKRLADAIEDRDTALPEGVRDLGQMYLAQIAGLNARVAELDQKMRCAAKEADVARRFQTMPGVGPITALAIETFAPDLATFRRGRDFAAWLGLVPKQHSTGGKSRLGKTSKMGQRDIRTLLVSGAMAVLQAVERFGTPKNSWLSRLRARKPRLVVAIALANKMARGLWAMMTKQEDYRNPVATMA

SEQ ID NO: 289056 - protein, 396 aa, unidentified
MLARRRVTARAWELGELLDWAVGCARAAGFASVTVACEPTGHRWRVLDQLAAQRGLALVCVQPLLVYRGRETEDLTFDKPDPKDAVIIARLTAGLHCYEPERADAVWARLRHLGARRRQLTADATAAVNQVRDLLECAWPTVLDASGAPFRSASWRAAVAVALDRGAADLTRVRRLGTGRFTAAVRRELPAWGASRPCLRIVRAVWSAAADPAGVAAQRPGALERASLALDDWHDTRARLAQTEARMVAVLDELGLTELVTTIAGLTAVGAAAILAETGDPNRFATPRSLDWHAGLCPRDNASGGYQGKTSISGRGRPGLRVAAWRAVWAALPNNPVLAAKFTHLTTRDDNRLARQQARTACAAALLRWLHVVITRQVSWDPVIAAGGASPLRTAA

SEQ ID NO: 289057 - protein, 347 aa, unidentified
MRDDMYYIGLDVHKRTISYCVKDAAGHVHQEGKIGSTRRELDAWIKTLPQPRTIAMEATIFTGWIYDHLLPHAEKVKVAHPLMLRAIAAAKKKNDRIDAGKIADCLRCDFLPECYMTSTEIRDRRRTLRYRNLVLKQMVQMKNRISGLLMETGVSYNKQRLHKLGYFTELMSGNEEVDESIRPLLKLSRETIVRSQRLDYALVSSLERDPLLAERLKRLRTIPGVGPITALTWALEIGDVSRFQSVKQAISYCGLCSAERSSADKLVRMPISKQRNKHIQQTLVEAAKLAPRYSHELALVYERERQRGNRNRATLAVARKMVAYMLAVERRKQDFVLTGKFSGTAAA

SEQ ID NO: 289058 - protein, 412 aa, unidentified
MEGETVIAGVDTHKDVHVLCLLDGLGRKIRSGSFGADPEGYDRLAEAIGDPGSCAVVGVEGTASYGAGLTRRLAELGYNVVEVLRPKRDKARPGEGKSDPPDAERAARKAASGRGCSVPKSQDGWVEAVRQLYVARRLAVATSTSCVACAKSMLTTAPGALRERFRGRERPKDLMPLLARGRKAGDALEESVLASLRSVAAVWKEARSQVESLDERIRALLEANAPALLGVEGCGTTTAAALVVAAGDNPGRLKGEAAFSMMCGASPIPASSGKTDRHRLNRGGNRQANWALYEIAIKRMAYDERTRRYVARRTSEGKSRREAVRCLKRYIAREVYHVLMDPNPDGAAPEGPELAKMRKAMRVTQKKAAAELGLSAATLGHLERGKRRSTKLERRYYELLCELERTLPQTAS

SEQ ID NO: 289059 - protein, 421 aa, unidentified
MHVVYERCAAVDVGKDEIAVAVRMPGDGPDGRVTVKRAFRTFYGVMGEAARWLVSLGVTHVAMEATGIYSMPVYYALVEHGDFIRVLICNAAHVKNVPGRKTDYADAEWLAHLLECGLLAGSFIPPAEIKAARDVIRYRTKVAQQRVSEIARLGGTLQDAGIKIDSVASSIATKSGRAMIEALIDGERRGPVLAQLAKGTMRAKIADLSMALEGRFSDHHALMCRLHLDHIDHLEAAIARLDARIEQMMEPFQRWRDLLITVPGIGRHASAAVISEIGIAVAEFFPGDAHLASWSGLCPGNHESAGKRRSGKPRKGNTHLQALLVECAWSAVRHHGYLKSLYHRHVMKNGGYRSATAKKKAIVVVAHAMIVIIWHIMVTGQPYHELGADYFASLRDPERETRRLIARLQALGHTVTINPAA

SEQ ID NO: 289060 - protein, 337 aa, unidentified
MNITTIGIDLAKTSFSLVGTNKHGKIVLRKTLSRKKLMSFIAQCPPCMIGFEACSSAHYWAREFEKLGHKPRIIAVKFIEPYRKGSKNDNNDAEAICEAVRRPNIWYVPVKTADQQALLCVHRVRQGVVGERTRWINRSRGLLSEFGIVIPKGRYALQAVLPAILTDMDNGLPELARQMIHDLWLSIQQANEQILGYDRALSRLAREDDTAKRILTIPGVGELTATGVVASVPDPRLFKNSRQFAAWLGLVPRQYTTGGHVRLGRITKRGDKYLRMCLVHGARAVIAKLGDKQDHVSCWVRGVIERRGYLRAVVALAARNARLIWTLMVKREDYRAI

SEQ ID NO: 289061 - protein, 319 aa, unidentified
MAQNDLVVAGIDVAKDKVDVCIRSLSLRRTFASTAEGRRELASWLRRQKVGKAVMEASGGYEREWAKALRDAKIKVRIVDPKRVRSFAQSAGRLAKNDTIDAEMIAWFAETFDEARGQAYDATREQLHQMVNARQAMMDIQARLENQGEHAVPAAVQRMHAQVLKKIGAELVKIEAAISTLIQATPHFNELAEIIESVPGLGRTTSAALIAAMPELGQANNRIVAALLGVAPYDDDSGRRRGERHIKGGRRRTRNVFYMACLGAATQHNPVLKAFYDRLVAKGKEKKVALIACMRKLISILNIMIERRQKWDASRHALS

SEQ ID NO: 289062 - protein, 361 aa, unidentified
MSKHNNISGNGVAISTIGLDLSDKTAAFCALDQAGAVVASGSIRLTRAELHKQFGQLPPVRIALEACGQSGWVEEVLTACGHEVIVANAREVRSISGNPRKCDARDAEQLARLARVDPQLLRPVRHHRNAGRRLDMVVIRSRALLVESRTRLVNGARGMAKLFGEHIPSCTTANFSERAQKALPAALGAALRVLIEQIEALSEAIAVCDQQIEALAAKMVDSRWLKSVPGVGSLTAVTFLLTLDDPQRFAHSRDVGPYLGMVPGRGQSGEQDPELGISKAGNRYLRKLLVQCAHHILGRYGTDSALRQWGLGKAAGSRKAKKRAIVAVARKLAVLLHRLWTRRELFKPFPADAANARHAVA

SEQ ID NO: 289063 - protein, 417 aa, unidentified
MTNTVRLLAGDDWAEDHHDVELQSMDGRVLSKARLPEGVAGMARFHAMVAEAADALGATAEDLDEVEVLVGIETDRGPWVQALIAAGYRVYAINPLQVARYRERRSVSGAKSDTADAHTLADMVRTDAHQLRPVAGDSAEAAAVKVVARAHKTLIWERTRHTQRLRHALRDYFPAALEAFEDLDAADTLELLAKAPDPASAARLTISQISAALKRARRRDVPAKAARIQTALRSEQLGQPDVVAAAYAASVRATVAVLVTLNEQIKALQGQVEQHFGQHPDVEIILSQPGLGPILGARVLAEFGDDPHRYVSAKARKNYAGTSPITRQSGKKKTVLARYVHNDRLVDALGAQAFAALNASPGARAYYDQLRAREVGHQAALRQLANRLVGILHGCLKTRALYDETTAWSHHVNELVA

SEQ ID NO: 289064 - protein, 315 aa, unidentified
MRDMPCFVGIDVATAQLDMALRPSGERWAVPNEASGVMTLVDRVQARHPTLMVLEATGGLERAVTSAWATAGRPVVVVHPRQVRDVARATGQLATTDALDARALAHCADVIRPTPRPLPDAQTQELRALLGRRQPLIGMRTAEQHRLAGTNARLTKDIAAHMTWLNAAIATLDDDLETILRASPLWRENDDLLQSAKGIGPVCARTLLLELPELGTLTRQQIAALVGVAPLNCDSGTLRGRRMIWGGRAHVRTVLYMGTLVATRFNPQIKVFYERLLAAGKVKKVALTACMHKLLTILNAMLKHRTPWQPQEVQS

SEQ ID NO: 289065 - protein, 427 aa, unidentified
MSISQNRKIRRIRDSTLVVGADIAKKVHVARASDARGIELGKPLFFDNSRRGMEKLLTWMRMLMADHGCDNVVFGVEPTGHYWMNLAQFLRQHGIDVVLVNPLHVKKSKELDDNNPTKNDHKDARVISQLVKDGRYSVPNIPKDVYAELRVGMNQRERLIEDLKRVQGRIHNWLDRFFPEFTEVFRDWEGKAALVCLRECPCPQDIQAKTAEEIVHMWKTYGISRGMGKKRATYLVEIASQSVGLTEGLQMARQELQILLGQYDLLQEQLSQLLEQIERLLNRIPGAAQMLSVPGLGVVTVAGFLAEVGDLSAYEHWRQVQKLAGFNLKENSSGKHKGQTKITKRGRPRLRALLYRCVLVLAAKNPQFRALHQYYTTRVENPLRPMSSLVALCYKLIRILFTLGRKQVPYDPVKALGPVHSAQWLAA

SEQ ID NO: 289066 - protein, 452 aa, unidentified
MAKLQKNEDIGKLKVQHSRCGGIDVGATLMQVCISVEDREHGSNRSFGTDTQSLRDIVNWLLGHGITHVAMEATGVYWIPLFNMLVKNGIEAVLLNAADVKNYTARKTDVNDAAWLMTLMSYDLVKPSFQIDELSRALRNCTRHRMSLVSTCSDCIRRMQKTMELMNIKLTEVISDIAGPTGIRIIEAILAGNTSPRDLAALASDRCKSSKEDIAGALEGTWEDELIFILGQHYRQYLLYREQTMQLDSVIEGKLKLLVERILKMNDGEVRTVIRSKKGTPHMKNRISFDIEALSVQIWGVNLMRIEGVSGITMLSLMGELGCNFVGSFKDAAHFCSWCNLSPCHKITGGKIISSKMKKRVNPVGLTLRNCAQTLANSKSPLGDYYRRMRSKGGGKYAVCATAHKIAAIIYTMVRNQQEYDPSKVSVNDRQWLKKRIKHHEKLLKKLKSMAS

SEQ ID NO: 289067 - protein, 263 aa, unidentified
MGLDVHKHYLIAIAVDADLSKVYGPRRVELSDLEGWVRKTITPQDAVVLEMSTNTWQLHDELKRHAHSVTVVHPPHVALIVRAQVMTDKIAALQLARLHAKGLLTGIWVPPPEIRDLRTLVAQRQKMTRLKTQAKCRLQATLHRYHLPPPEDGKVYTKNTELWWMSLPLSTLEKVRVESDWATLTFAEAQIQRLEKRMAEWAAQQETVTRLMQITGIGVVIAVRLVAAIGDIGRFPSAEQLVGYSGFHYRTVSGSSANELGIG

SEQ ID NO: 289068 - protein, 434 aa, unidentified
MEPQFAALIAIDWADQKHVWAMEIPGQTKPQMGSLSHTPEAVDAWAAELARRFGGQSIAVALEQSRGPLVFMLTKYPHLIIYPVHCSTLANYRKSFRPSGAKDDPIDAQLILDILARHRDKLRPLRTDTVETRTIQFLVEERRKLVDQKTACTNRLTAHLKMYFPQALEWFGELGSPIAVAFLERWPTLSDVQKSRPATIRKFYTSHNSRTGGDYLDKRIDEIQTAISATHDEAVIAGYSVAVLAWTGLLKQFLLAIKDYDQRIDLLASKHPDYALMKSFPGVGPVSAPRLIAALGSQRDRYESAYQIQCYSGIAPVVSSSGKKHHVHCRWACPAFLRQTFHEWAQHSMAGSQWAREYYEHQRKAGKGHNTAVRALAFKWIRILFRCWKNNVAYSEPVYTKSAAIKKAQNQVGRAVEIKGEKKIGISKFMGPAT

SEQ ID NO: 289069 - protein, 328 aa, unidentified
MCTLGIDVSKNKIDLCLLTAGPGGKKKHKVLTNEPAVARKVVDWLNAQKCVPESVTVVLEATGIYHENLAYGLHEAGVSVCIANPCRVREFAHGMDILNKNDAVDAFVLACYGELKSPAVWVPPSPEVRKLRALLRQRDALREDVQRTVNRLEKANSTSTPQEVIRSLERMKSWLNEELARIEKLITDHTDNDPGLKADLDLLKSIKGVKDQVGREMLALLKDGTFKSASQVAAYLGLTPVEKTSGSSVRGRPHMSKTGPSGVRAKLYVAALTASRWNKQAKAIYERLVAKGKAKKAALGAVMRKLVHLCFGVLKTRLPWDENYVATA

SEQ ID NO: 289070 - protein, 455 aa, unidentified
MSKSNRTDTPLRAARAQISNPEITVHAMYRSAIGIDVHLNLLVCCHQKQVAGHREQSESRDFNTDRASIDAFAAWCRECNPDIILMESTGSLWQSPYEALERAGFTSEQLALINARDAKAAAGRKTDRKDASRLASLARTGNFKKSFVPEKAFRLQRVISRDLQKNRNDISRTSNRFGKSLNLTGCRPTTVFSDIRGGKAASLILMAKLRDDPHLFDVIKQNSRRLRASPEQIMQALNFEIEPMMKEQILALRKKIDQLEEYDRSTFERLRQLQAPYEKDIQLLITITGIQERSARMIYAELCADLKDHFPTSEQFTSWLGICPGDNTSAGKQKSGKCPKGNKHLRRTLIEAARGLVVGGTAALKEKFQVLKMRRGYRRAMVAFAHLLARIIYSVLTHQKGFEPYQSTAFRDTLMERAKNGVKQLLKLKGTKYVIADGLVVETKTGAILGAVVSS

SEQ ID NO: 289071 - protein, 464 aa, unidentified
MKKPGQKKQVKARKKRSKKINLDSLPFINFNAAGIDIGSEEHWVAVPKDRDEKPVRKFDCFTSDLHAMAEWLKKCDIDTVVMESTGVYWIPLFQILETQGFDVKLVNARHVKNVPGRKTDVLDCQWLQQLHTYGLLSGSFRPEDSICVLRSYWRHRENLIRYAAAHIQHMQKALTEMNLHLHKVISNLTGVTGIRIIQAILAGERDPLKLAQMRDPRIKNNAETIAKSLEGDYRQEHLFALKQAFELYCTYQQQIEACEQETEAYLTQFDSKCNPDPTKKYKSSRSKNDPSFDLGIHLYRITGVDFTKIDGLDVLTVFTILTEVGLNPEAFGTEKRFASWLGLCSENRITGGRIISNKTRKVVNRASKAFRMGANSLKNSQSALGGYFRRMRARKGAPKAITATAHKLARIFFHLWKTGDTYQDLGADYYEQKYKERVIENMKKRARKLGFELTLQPLAGLEVS

SEQ ID NO: 289072 - protein, 480 aa, unidentified
MGQLKLWGPESERRIAARSHRWLRRRQRGLGRRSQALTVGKEAGSPTTGPGVKSMRIVHEVIELPFEHTLVVQGPGARTQRHVRTKKGRNHKAPARRRKGAKTRTPRTLREAPIMRFVGIDLHKRSLTACVIDRSTGETFARRFPCSQPAEIVGFFEDLRPFRAVVEATATYDWLWELLEPLAERLVLAHPGKIRVIAESMKKTDRSDAAFLAWLLSQDSVPQAHRPSRWQREYQHLVRHRCGLVRQRSKLKTQIRALLSARNLDAKSLFSAQGEKHLERIRGNLSAAERFRLDELLALMKVLDERVLSADKALSSFRKAAAPAERKNHRIVTSVPGIGPLIADVIISSLGDVARFRSIGKVKAYAGLVPGFRESDKKRKELGITKQGSRDLRWSLVQAAWRATRLSPSWEEVFARLARRRGRKKAVTAVAARLLGVVYTLLKKQTTYRERLPARKNGVGRALVAAALEKQPTRGHGPSA

SEQ ID NO: 289073 - protein, 358 aa, unidentified
MSNLKYSIGIDVSKKDFHCCLSVIDTEQFVKVKSTHKFTNSTSGFKLLIEWVRRNRKEDLQVFYVMEATGVYHEQLAWYLHNKDFSVSILLPNKAKKYLQANGAKSKNDKIDARGLAQIGAEKKLDLWIPPSRKLYNLRSCTRQHQSLSEMHSAINNQLEAITHSQFQSKDIIRQMKKTMRLLEQQINEMDKIIEEIVKKDEVLNFHYKNISEIKGIAMLSFAVIAAETNGFVLFKDAGSLISYAGYDVVENQSGNHVGRTKISKKGNSRIRRILHMPALCAVREDQPQFKNLYERVYKRTGIKMKGYVAVQKKLLVMAYYLWRKKMKYQADFDYSEKIIAPEKSEATHDKIPEGRFH

SEQ ID NO: 289074 - protein, 312 aa, unidentified
METKFVGIDVSKLTLDFDCLPVSASQPFANDAVGIAAMIALLQDSGVERIVIEATGGYETAAVIALAVAKLPVVVVNPKQVRDFAKATGHFAKTDRLDAKLLALFGERMRPTLRVLPDEAQRALADLLGRRGQLVFMRAQEKGRLSMVPAVAKKDVELHITWLSKRIAKVESDLRSRLKKSPVWCEKATLLESAPGVGEVTTFSLLADLPELGTLSRQKISALVGLAPFADDSGKRKGQRYVRGGRAEVRCVLYMATLSAIKYNPPIKALHERLLKAGKPFKLSMTACMRKLLTILNAMLKTNKPWEIKAAT

SEQ ID NO: 289075 - protein, 316 aa, unidentified
MLYVGIDVAKNKHDVTALNVPGKTVLKPLTFSNNKAGFELLDLSLRQLNQDCLIALEDTGHYAFNLLNFLHEQGYKVYTYTPLLIKEFAKSLSLRKTKTDKKDAHGIALKLLSDPNREQFQHDNRQVELKILARHIHRLKKKQSDWKVQYTRCLDIIFPELDKIVGKHSEYTYQLLTRYPNPQKRLEAGFDKLIEIKRLTASKIQDILSVAPRSIGTTSPAREFEIIENIKHYKRLIDKAETCVNDLMAEFNSVITTVTGIGNRLGAVILAEIQNIHAFDNPAQLQAFAGLDSSIYQSGQIDLAGRMVKRGSPHLR

SEQ ID NO: 289076 - protein, 312 aa, unidentified
MASDWGADVGKDGVVLACHGSGKVLELANRAGVLQRWVKGLEPGSRIGVEASGIHHRCLARVAVAAGHTVYVVNPRDVKHYAAGMGRRAKTDRVDARLIARYVAHEHKQLRAYREPDPRQQAIAELLVRRHAVVKGKVGLNQALGDLPGYEKVRASMEELLREIDARLQALIDEQAGLHALCERLRSVPGVGPLLSAALGNLLMQHGFHSSDALIAFLGYDPRADDSSERRGRRRLSKRGPAELRRLLYTAAMAGARTKAWKPFYERDRARGLSSTEAMIVLARRIARTAYSIARHGTLFDPARLAGACTKP

SEQ ID NO: 289077 - protein, 405 aa, unidentified
MEVVVVVGAGLDVHKKRIVACCLDGRSNPVKVTRNTFGTYRHELEKLRDWLVGCGCTHVAMESTGIYWVPVYRILEGHVEIVLGNARHMANVPGRKTDVNDAYWIAELLRHGLIKRNFVPAAPIRQLRQLTRYRRKLIGMRSSSELRVEKLLQSANIKLSSVASEVFGVSGRLMLGALASGMTNTAQLAELARGKLRNKRADLRLALSGTFTEDDAHLLDVQLGVIEQLEQKLADLERLIAQKVAPYEHLLARLQTVPGVGRIVAVDVLAEIGTDITVWPSDGHFAAWSGTCAGNRESAGVPRKARSREGNSYLKSILCQAATSAVRTRGCYLSNRFRRIQSRRGEARAIVAIARELACSIYHVMYRGEPYRAPAIADPAIAQERRSQRLIRELRKLGYEVKKTE

SEQ ID NO: 289078 - protein, 505 aa, unidentified
MAAPTARHQPASSLPPSGQPAQAQAHRQAYNRRKTRAKVRSEAFRQREAAQVEALPVQHPHAAGIDIGSRSHWVCVGFTTDAASCLIREFPAHTAGLKAIAAFLREHQVTSIALESTGIYWVPLYELLQAEGFEVLLVDPSYSHQLRGRPKTDRRDCQWIYRLHSVGLLAAAFRPDEQTCQLRAYLRQRGNLVRQASRHVQHMQKALEQMNLKLTEVLSDITGKTGRAILRAILRGTRAPEKLARYRDKGCKASEAEMAQALTGTYREEHLFELKLAYEAWQFTLGQVDKVDGQVALQLGRMKGDRALPPLKPKARPKRRANSPRFDVRAALYYVVGLDLTEIEGVSALTALTVISEVGPGVSRFATVKKFCSWLGLCPNWQKTGGQIKSSRTRRGVNRAAQALRLAAQSLHHSQGALGGFLRRMKGRLGTQPALTATAHKLARIVYLALRHGLTYVRQTQEEYEAQMKEKQLKALRRKARQLGLEVVEKPSVSGAPAAAGPAQG

SEQ ID NO: 289079 - protein, 395 aa, unidentified
MRKDVTIYVGIDFSKEKFNACLLMEAGIMGESEFPNTKAGYLKLLRWVRKTSELGRLFDVTSVLFCGEHTGTCSIGLCEYLYSARMKVWLETPLKIKYGSGLNRVKDDKADAEMIAYYAKRFYEPDSCELFEPDSEDLKSLRSLYQFRNRVVSDRVAMGNRILSGAFDCSPLVKARMKKHHKAALEDEKEIEREMVKIMESSPELASNYRILVSFKGIGPITAAALIIYTSNFKKFNSPRKFACYCGIAPFGKQSGTSINTKPHVSRFAHIGIKAALVQACKSAIQHNPVIKEYARKLYGKGKHEGVVMNNVKNKVIHIIFKMIQTQTCWNPNYQEAHMNKKEENLKEHEKGATKVTPFIDDYSNILPPNQAECAFMEENIFFQEKSPLFICIKT

SEQ ID NO: 289080 - protein, 357 aa, unidentified
MTSNKKYIGMDVHKESISIAVMNSTGKFVMECVIETKASMLLQFIAGLRGDVRVTFEEGTWAAWLYDLLKPHVSEVVVCNPRKNALLKNGSKSDRIDARKLAELLRGNQLKPVYHGEQGLRTLKELARSYLTISKDVTRVMNRLKALYRSWGIACAGTHVYAPRHRSEWLGRISEAGVRRRAEHCYQQLDVLRLLRQQIRRDLLLESKKHQAWRLLGLIPGIGPIRAALLIALIQTPHRFRTKRHLWTYSGLGLETHDSAQYRVVEGQLQRSKKPVTLRGLNQDHNHDLKDIFKGAATRVSSSSHGPLHDFYEHLLAQGRKPTMARLTLARKIAAITLIVWKKEVHFDASYLTSQAA

SEQ ID NO: 289081 - protein, 411 aa, unidentified
MNFIGVDLHKKSITICVMDEKRKILARKTLPCTQTNEIVEFFRQFRPFKVVVEATASYVWFVELVEPLAEKIVLANPKKLRVIAESTKKTDRLDAQVLTEFLVLDMIPESYQATPRLRQHRALVRHRQYLQSRITSVRSKIRHILSNYNADRKDLFSSNCGLAYLKEVRLNDVDRFVMKQLWAEWQDHLAQRLAVSKKLKAFVAKAPQREAEAREILKTAPAVGPVTAEVILSELGDISRFRNAKTVCAYAGLVPVVRQSGERKSKDMKITKEGSGLLRWALVEAAWRLVGKSPKWAALFSRLRHRSGKKRAIVAVARKLLCVLYAMLRTSTPYKIVTTQTTAARTTGKESVRTSTPDQTTPTETTAPRTTGKKLVRTSTPEQTTPTETTAPRTTGKKLVRTSTPDQTITT

SEQ ID NO: 289082 - protein, 356 aa, unidentified
MEMFLTPDKKGTSMTEIMTIGLDLAKTVFQVHGADGEGRAVLRRRLRRGQIPGFFATVPPCLVGLEACASAHYWARELQALGHDVRLIPPQYVKPFVKTNKNDAADAEAICEAVLHPAMRFAAVKSADQQSVLMLHRSRELLVRQRTMLINALRGHCGEFGIVAAQGARKVTALIEVIEDPDDRRLPPLAREALVSLVVQLRATEERIAVLEKELAAWHRSSEASRRLAAIPGVGVITATALVATVGDAKQFRSARQFAARLGLVPRQQSSGGKDRLGRISRRGDGYLRRLLVHGARIVLFWSRRRKETRSDWLEALLARRPTNVAMVAMANKTARIAWAMLSRGQTYMPDRQAVA

SEQ ID NO: 289083 - protein, 427 aa, unidentified
MSVTQNEKIRQVTEETIVVGVDIASETHYARAFDWRGIELGKVFTFANSEAGFTSLLEWVGQLQANTQKTQVLVAAEPTGHYWFGLGAWLMDSGVKLVLVNPYHVKRSKELDDSHPSKSDRKDPKTIAKLAIEGRYQIPYIPQGVYAELRIAMLSRWRILKSLGQTKNQIARWLKIYFPEYGEVFAQFDGISSLLVLETAPLPSMLVELGPDGINAIWRKAKVRAVGLKRAKRLYEAAKASIGCTAGSASARAELGWLLEDYRAKMRQYDQIMAHVESLCEQVPGVPALLEITGVGLATVAGFLAEVGDVTRFDSPRQIQKLAGLAIRENSSGKHRGQTTISKRGRSRLRAILFRAAIALAGKNREFQQIHRYYTGRAKNQLKKKQSIVALSCKLIRVFYALLTKGTAYDPEKLLGDIRRNTPLIAA

SEQ ID NO: 289084 - protein, 384 aa, unidentified
MRYVGLDVGRDFAHVAVVEGSGSARKLGRLHMGEEFAAFAATLGPGDVVALEASGNTWALAELLGRHAGRVVVSNPLRTRAIADAKHKTDDIDAATLAELLAADYLPTVWIPDEATRRLRRIVAHRAGLVRERTATRNRVSAILSRRLVRCPLSDPFGVRGRTWLAALELPPDERLALDSALRLDAALDAEVELAERAIATAIVDDRRVRHLLTIPRFPRPAKLVSYLGLDPKVRQSGDRPAHGGHISRAGQAHARGLLTEAAHAAVRAPGPLATFFIRLRARRGAGIATVAVARKLAVLVWHLLAKDEDDRDARPELVRAKHRGLDRLAGRQTSRTRPSHRGATGSSHDQGWARLRGGDDPHHPALRHAIDRVQLDDTPAPGA

SEQ ID NO: 289085 - protein, 353 aa, unidentified
MQTNLRDFRGERIYVGIDSHLKSWNVTIMSEEMELRNFTQEPNSKKLSLFLQKHYPGADYRCVYEAGFAGFNAQRDLSAEGINCMIIHPADVPTSDKEKRQKSDRIDSRKLARGLKNKDFEPIYVPDIEQQQDRSLLRINDKITRDITRVKNRIKSFLNFFGIAIPGEFQGKSWRKGFMTWLSTISPGGEAAISLLVLLEELRMLKEQEFILDKRVKALSATDKYKQRVSLLMSIPGIGLQTAMILLTEIGDINRFPTIKELSAYFGLIPDQHDSGDTKRVGGNTKRGNVYLKYILIEVSWMCIRYDSSLLLAYKSAVRTMDKNKAIVKVARKLLNRVRFVLKNKTAYQVMMA

SEQ ID NO: 289086 - protein, 435 aa, unidentified
MNREGSERNYNTQNAKIASITEKTLIVGIDVGSETHYARAFDWRNYEYSKNPLEFSNTETGFHTLKAWMEDIAEKHGKTAVIPGMEPTGHYWFALGKFLQDSGMKPVHVNPHHVKKSKELDDNNPNKNDRKDPKTIAALVNEGRFSYPYIPTGIYAEIRSLSNLRFQTQEELTRIKNRIARWFSIYFPEYKDVYKDLKAVSGRMVLKAAPLPEDIVNLGAEGVNRIWRDAKLRGAGMKRAKTLVAAAEHSIGSKEAPEAARIELKNLLNDMDVYTARLEELLQSIEEKLKEIPYIDKLMAIKGIGLVTVSGFIAEVGDIGRFDNPKQLQKLAGYAIVADDSGKHNGESRISYRGRKRLRYVLYEAAISLIGKNAEFREIHEYYRSRKENPLKKMQSVVAVACKVIRVFYTILTKGVDYDAEKLRGDIRRPQMQAA

SEQ ID NO: 289087 - protein, 351 aa, unidentified
MNYIGVDYHKKYSYIVVKDEDGRVEGRGTVNNTKEEIQHFLQPYRSGMAVVEATRNWGLIYDWLDEVLDDVALAHPLKVKAIAEARIKTDKISADILADLLRAGLLPRAYAASKQTRELKNILRQRMFFVRLQTMVKNRIYDILDRHPEVLSQAPEASDLFGAAGMQWLGQTVLPGEDNKLLTSELELLNFLKEKVSQSNGTVKNLAKGDTRARLLQSIPGIGPFFSVLILYEIDDISRFRDEKKLCAYAGLVPSTHASGGKVFHGRITKTGSKWLRWAAIEAAQTAVRSDSEFHAYYQRIRTRKGTNAAKVATARRLLTIVYRLLRQRRFYERRTTNTRKAVTPAALVTD

SEQ ID NO: 289088 - protein, 246 aa, unidentified
MDETGRPIYKGRVASDPGALAALLGKKAPHAERVGFETGAMSSWLWHELRRIGLPVVCIDARHAHAALLVRMNKSDENDARGRADLVRIGSYRELAVTSQASQRARSLLIARARLVRIRRDLENQVRAMLKECGLIFPRAIGGQFRRRVEEPTGEGHIQWPVLLPLVSVHAQVCGELDALDRRVRQLAREDETTRRLMTVPGIGVVTALTFRHTIDDPSRFRSAAAVGAYLGLPPRRKQSGGRVSR

SEQ ID NO: 289089 - protein, 416 aa, unidentified
MKKAQDTRGYERYMALDIHREYLLVGAWDKEKDWVLTPRRVSTEKFPEWAKKNIRKGDILVLETTTNVWATYDIVAPLAGRVLVANAAEVEEIAKARVKTDKEDIKKLLKLLIGGIVPEVWVPPMEVRELRAFISYRGRLVKTSAMIRNRLQSLLHKHNLKLSEAGLLEQAWWEGQKEISPLEKMQIRQELSLLQEVEKLKAAVDEELQRQSTGAVWGKPALQLMQLPGVGYIVAMTVLSAIGDISRFESAKQLVGYAGLGAGVHDSGKTHKDKKITKKGRRELRWAMVEAAWRAVGMSPFWKAEYEKYLSRLRKKNQAIVVIARKLLVAIWHVLSKEETDVHASEEDLAYKMLLLSWSLKEDTRMGLTYKQFAKYALMQLGVETDITRFVRRDVPRRLAPKEEVLARMTELGLTA

SEQ ID NO: 289090 - protein, 393 aa, unidentified
MILIGIDIGKNSHTFSIVSKDSGEILLQPMEFPNTAGGFSTLCTHLCPYDKAELLIGMEDTGHYHLNLLKYLLEQHFTVALINPVATDMTRKMQGGVSKNDNLDSLTICDVISSSARKKSYRITKLDRFELYEQRQLTRHHHNLKEELNVYTNRLQKCIDVVFPEYNHLFKSKYGSIYMQLLKSFGSADKIANTELSEIEPFFEKQRGRQISLTPQLLQEAAQSSVGIPSSAEEIQINHLIAQIELIQLQIKEIDKKIEEFSLQMNSPILTIPGVSHFSGTSILAELGDICNYSSAAKIIKFAGLAPYEHQSSQYKAEHLPISKKGSKYLRKTLYQVILPVIRYNPVFQDYYRLKRSQGKGHRCAQGHCIRKLLRIIYHLLSTNQAFDPLLLK

SEQ ID NO: 289091 - protein, 354 aa, unidentified
MSQTPNTAIAVIGIDIGKNSFHVVGHDARGAIVLRQKWSRGQVEARLANIPPCLIGMEACVGAHHLSRKLASLGHDARLMPAKYVRPYSKGQKNDFNDAEAIAEAVQRPTMKFVATKTAEQLDLQALHRVRERLVSQRTGIINQIRAFMLERGIAVRQGIGFLRTELPTILATRTDALSPRMLRVIEELAGDWRRLDQRIDGLSGEIEALAHQDQTCSRLMTVPGIGPIISSAMVAAIGTGDVFSKGRDFGAWLGLVPKQISTGDRTILGKISRRGNRYLRVLFVQAAWVVLVRIKNWEHYGLKSWIDAAKRRLHHNVLAIALANKLARIAWAVLAKGRAFELTRTDDAGIRPA

SEQ ID NO: 289092 - protein, 309 aa, unidentified
MDGVFVGIDVSKDRLDVHVAPSGAAFAVARDGKGIEALAARLSELDVALVAVEATGGFEAVVAAGLSGAGLPVVVLNPAQVRAYAQALGTRAKTDPIDARVIARFLAATRPEPRPLPDAETRRLADLVARRRQIVEMIGAERQREKRASAKTRKSIARLTRALEKELATIDRDIHDSVRGSPLWRENEDLLKSVPGVGDITARTLLAELPELGRLDRRQIAALAGLAPWTRQSGQWRGRSFIGGGRPAVRTALFMAAMVAARHNPILSAFYQRLVATGKPKKAALIAVARKLLTILNAIIRDKTPWQNA

SEQ ID NO: 289093 - protein, 466 aa, unidentified
MKILGLDVCKNSVVAWELTSLPKNFRSYFRDNKRPKDNDPLTFKANADGVSKLLALKPDAIILEPTGVHYSWIWAHICETENIRVLWVGHAEATHYRKQNKLPDKNDQADALALAAYALLHWGDDEFFLQFEAGRVALMRHLWLQLQSLNRIQSPIINRARQQLAREFPEAALSKSEPSKVDGLPPLWAWLAGRERSLKRQNTHYDRLYRDSIANQYNVGITTFTRKLSNLLCDLADWEGEIQTEVLEILNFPEFIPYRKVMTMFGIGVRPQALLISQIYPVTKFDSVGRFKRRLGMAKDEYSSGDKETMNTGAGSKLCRSQLYLWVLDQIAPVHARPNNEIGRKLGEFYDSRKSQFQDNPELWKQKAVTRLQQVALKEFKRSLSQNLIPIVSKELQPQLEATLNLTLQTMQMSLVTSIAAGDIAPGVKHKDVKRGFGNLVISQTAAYGCRLLFKELKRAVTNDYK

SEQ ID NO: 289094 - protein, 375 aa, unidentified
MEHHSEAFVAFDTAKLRNAVAIADAGRSGEIRYLGEFDNTEVATRKLVAQLASKHARLTFCYEAGPTGYGLYRLIKSLGHDCIVAAPSLIPSKPGDRVKTNRRDAVNLVKLLRAGELTAVWVPDERHEAMRDLVRARDAAAKDYRIKRQNVSSLLLRLGRHYPGKKTWGRAHINWLTSLKLEHREQRIAFEEMLLAVRQVRERIERLEQAMREAVADWTLAPVVEAVQALRGIDMVGAVAFLAELGDLSRFENPRQLMAYLGLTPSERSTGASVKRGGITKAGNTRARRLLIEAAWSYRFPPRVSKDMQTRIGAAPRTAREIAWKAQMRLCGRFRTLTRKGKRSTIVVTAIARELSAFIWAISREVVGSHATANQ

SEQ ID NO: 289095 - protein, 415 aa, unidentified
MEKEPTVFVGVDWASVEHQVCLVRPEGPVQRAFAHDADSLGTMMDWLMASASDPQDVAVAIEVPHGPVVEALMDRGFAVFAINPKQLDRFRDRFSPAGAKDDRRDALVLASSLRTDRHCFRRLEALEPVVVELREWSRMAEELKEERNRLTNRIRQQLWRYYPQALDPGEDPGADWFLDIWSLAPTPADATRLTDKKLARVLSANRIRRINASEIRSILGRPALTVAAGTAEAAKAHITAVSERVRLVNRQLKEVTRRLDTLVDQLAAAPEAEPGQPVEQRDAAILRSLPGVGRIVLATLLAEAHQAIQARDYHAIRTLTGVAPVTKRSGKSCRVEMRQACSHRLRTAVYHWARVATQHDARSKARYAALRARGCTHGRALRGVADRLLAVACAMLEARTTYDPLKPGQQMTKAA

SEQ ID NO: 289096 - protein, 349 aa, unidentified
MREYISFDSHKHYTLMEREDIQTQVARHRRIEHAPDAIRAALRGCEADTPVAVEATGNWYWIVSEIEQAGLRPLLVHPRKAKLMMGLINKTDKLDVHGLNRLQRNGTLPTVWIPPADLRDLRELTRTRLMVTSQRTRLKNRLTTTLAKYGRQHTEFTDAYGPRARTELRQRLEPLPTQTRFVSELLLQQLDFVQQQIQTLEQRLQELVQITPEMQLLQTLPGIGVILAATIALELGQIDRFASAAHLASYAGTTPRVHASGGKTRFGALRSDINQYLKWAFAEAGNSVALYHQRRPQRHVSQLYRRVRLRKGHGKAIGAVARHLAEATFYVWSRREVYREPTGGRSKAV

SEQ ID NO: 289097 - protein, 355 aa, unidentified
MIVIGVDPHKATHTAAAVDDGIGELLAERTVQARRTGHEELLDWARSLAGERVWALEDCRHVSVSFERFLLASGEQVVRVPPKLMAGARRSSRIRGKSDAIDALAVARACLREPELPSARLDGPEREIRLLVDHREDLVAERTRIQQRLRWHLHELQPELELPAGCLDRRVWLERLGRRLARREQAAQVRICRELVVRCRELTRRAAELERELAVLVSAQAPTLLELPGCGVLTAAKLVGETAGVERFSGEAKLAMHAGTAPLPASSGARQRHRLNRSGNRQLNCALHRIAITQGRWHPPARAYLARKESEGRSRKEALRCLKRHLARVVYRTLRALEEEKMTSTNRPVLVPALT

SEQ ID NO: 289098 - protein, 326 aa, unidentified
MDILGIDVAKRTLAVTLLTDTDVRHHLECANTHAGFAALDQWLQSLGVTQVHACMEATNVYWEAVAAWLHAHGHTVSVVNPARIAGYAKALMKRIKTDRQDSLIIALFCREHRPTSWAPTTAAQAKLRALVRLRHDLIQNRVQFQNRVGDATDAEVKQVLESMVQALEDKITAVDARITDHLAAQEALQQQVALLDSITGIGVVTATTILAEMGDLTRYPSAKAAAADVGVTPSQYESGTSVRRRPRMTKMGNADLRAALFLPAMTAKRCCPAIRAFAERLAARGKSKMCILGAVMRKLIHICYGVLKHQTPYDPTKVMPKTKPAT

SEQ ID NO: 289099 - protein, 348 aa, unidentified
MRFYTDQHKFYCGIDLHARSMYLCILDQEGNTMFHKNCQVAPDAFLRAIQPYREDVVVAVECMFVWYWLADLCSQEAIPFVLGHALYMKAIHGGKSKNDKIDSKKIAVLLRGGTLPVAYVYPAAMRSTRDLLRRRNHLMQKRSELLAHIQNTNSQYNLPEFGKKIAYKANRDGVTDHFPDPSVQKSIELNLQLIDLYDRLLTELELYIVKQAKGHNIRNLYLLRSIPGIGKILSLILLYEIHDIKRFPRVQDFVSYCRLVKCARESGGKKSGAKNSKIGNAHLKWAFSEAACLFLRGNEQAQLYHNRLVSKHGKGKALSILAHKIGRAVYFMLKREEPFSMDTFFVRT

SEQ ID NO: 289100 - protein, 316 aa, unidentified
MTCYVGVDIGKNQFDVHLHHQARGQSFSNSPEGFTAFLSILPAPQTCHIAMEATGKYFFNLAQFLFNHQIKVSVVNPASIKYYAQSQLKRTKTDLQDAKLIAHYCQSQQPKLWQPPSQVIVELQEWQQFQALLIKQKTQLTNQMQTTECERLKQLQLEQIVQLEQEINEVSEQIKTLISQDEKLNEQTSLLTSIKGVGEKTAIQVLTLIKDIDGFDNAKQLASFAGVVPQIKQSGSSVNSSSLSKIVHSELRKCLYMPALAAIKFNPVIQTFAQNLQSRGITGKKKVVAVMRKLLHIMFAVLKHGKPFDPCYKIST

SEQ ID NO: 289101 - protein, 350 aa, unidentified
MLIIGCDYHPAFQQIAFVDTDTGELQEGRLQHREEAEKFYRDLAAQGMKVRVGMEASGHARWFERLLAELNFELWIGDAAEIRTKRVRKQKTDRQDAQLILKLMLEDRFPEIWVPSWENRDLRQLLWHRHRLVQARTRMMNQLQAVALNEGLRCKKKLFREAGRQQLEAFRLAPWASRRRHDLLELLDRLTPTIAELTQAIEEEVEKCPAARRLRTHPGVGPLTALAFVLIIGKADRFQCGKQIASYLGLVPLEKSSGDQRRLGHITKQGSTLLRFLLVEAAQVTARSLPEWRSKYYHLTMRRGRKIAKVAMARKLAVRLYWMMRKEWDYGQLTKFGSYAGKPENRDGVK

SEQ ID NO: 289102 - protein, 408 aa, unidentified
MKTLHQRCAGLDVHKQDVVACLRLGRRGRVEREVRRFPTTTRGLLELADWLEAARCTIVAMEATGVYWKPVWHILDGRFELVLANAAHIKGVPGRKSDVNDATWIADLLAYGLIRASFVPPQPIQDLRDLTRTRKQLSREIVRHEQRLQAVLEEANVKLTSVITDILGASGRRILKAMIAGETDPSRLAELGSRRLGCSRETLVEALDGHVRDHHRFLLEQHLKTIEQLEETMAAFDARLEAALAPFRDTVECLTQVPGLSTTAAEVVIAEIGLDMRRFPTAGHLLSWAGLVPGLHESAGKRRSTRVTKGAPWLKPVLVQCAWAAARKKGSYFEAQFLRLKGRRGPKKAAVAVAASILTTVYHMLRDGTCYQDLGPNHFIRRDPARTAHKLADRSRSLGYIVEIRSAA

SEQ ID NO: 289103 - protein, 581 aa, unidentified
MSKGTPLDHIGVGIDTARYGHRVSFLRPDRQPAAKPLTVLENQAGYQALQQRLQQLEQQHPHAHFDVRIDAAGQYAANLERFLRTLDLPMTLSIGEPKRNKDYQKAHFPKRTTDDTESQAMARFAVVEQPAATPPLPPPMVLLREVAGRLQAQVKQTTQAINRLHNLLARVFPELATIADDLAAHWVLQLLEQYPTAERIGQARLSSIEKIPYLPSDKAPVVHQAARQSVGSLRGHVAETLVRDLVAQVRHCVHAQQKMRQLLSAAFADLPASPHLQVVTIPGIGDATAAILVAMIIDIDRFPTPDHLVGYFGVFPEENSSGVDRYGNPLPLGTMRMSQKGNDLVRSYLWNAARAAICHNPAIRALYRRLKAKGKRGDVAIGHCMRKLLHLVFAVWKTNRPFDEHHFAWEQTAQTSMPTPTAPAASAATAASANDTAAGHKREIPAKQVVTTATSSVAPTAKPVNPPPPPTRSARPGVDYAFLRQQITLEQVLRHLGLFDQLHGRGQQRRGPCPVHARATDRKRTFSAHLGKNVFQCFHADCAAHGNVLDLWAAIHRLPLYDAALHLAQTFHLQRNREENP

SEQ ID NO: 289104 - protein, 371 aa, unidentified
MNDNAYVGLDVHKATIAIAIADADAGGEVRFFGEIANSPDAVASTVKKLAQRRGQLHFAYEAGPCGYGLYRQLVEAGHACDVVSPAHTPRRAGDRVKTDRRDAIMLARLSRAGELTKVWVPDCAHEAMRDLIRAREVASKDVRQARQRIQGFLLRYGRRYVGAVWKRKHRVWLGNQTFEHPAQQIAFQTHLNAMDQAVERKEAIEAQITALLPNWSLAPVVTALQALRGVALAVAAGVMAEIGDITRFDNPRQLMAYLGLVPGERSSGEKRRPTGITKAGSIIARKLIVEAAWAYRMPAKVGQGMQRRHEGLSGEIRSIAWKAQVRLCARYRQMLARRKKAPIAITAVARELVGFIWAIGCLASPTIPAAG

SEQ ID NO: 289105 - protein, 399 aa, unidentified
MEQVIIGVDPHKLSATIEVVDQREKLLGSGRFTTDQAGYAAMRKYAKTWPDRVWAVEGANGVGRPLAQRLLEAGEHVVDVPAKLAARVRLFDTGHNRKTDALDAHSIAIVAVRTEGLRVLKIDGELEALRILTDRREALTRRRVQTVNRLQALLAELLPGQAKKDITPLQAKAMLAGVRPRDVAGKTRRRIAAEELAELMVVDAKIKKATAELKVMVLARDSRLMDLHGVGPVVAARILADVGDVTRFADRNRFASWTGTAPLDASSGEQNRHRLSRAGNRRMNHMIHIAAVTQLRRDTEGRAYYRRKRSENKKPMEAMRCLKRRISDAIYRQLVADAQRGADAGPGGHCGASQESSAVDLPPHIDTSDQPLPGPAKPTLQPSRTVRKSFSRKTPQTTG

SEQ ID NO: 289106 - protein, 373 aa, unidentified
MPRYSTAFGMDVHLRSTTVCALDAETGETVTRRFRGNPWGEVAEWMSGFPGPSLAAYESGYLGFAPQRELSGLGVDCVVAAVSKVPRSAADLSSKNDRNDAARMAKAILSHDISPVWVPSPEIEGLRDLAGAHDAATARLAAAKQRLLAFLARRGYAYGGTTPAGNPRKYWTYGFLRWLDGIHPADDGGIRALAALRNEVEAADETREAVLAEYRAAVAAGPLSAEVEALQSIKGCGFALAAAFAAEVGDFSRFRSGRQVTAYFGLAPKQRSSADSVRLGGISGAGNALVRRLAVEGSWSYVQASHQPKLMPKGSGVPLEVRMHGRKGSERLLRRREEMLARGMPQAKANAATAAELVRWLWALGMMCREAGE

SEQ ID NO: 289107 - protein, 317 aa, unidentified
MKTVPFEQVILRGCGIDVHKDMVVATISGEGLKTETRSYKTFSSSLTELKEWLLSSGITHVAMESTGVYWKPVYKILECPDMKFWIVNARHIKYVPGHKTDKKDSAWICKLLLAGLLKPSYIPEREQRELRDLTRYRNKLIQHVSSEKNRIVRILEDCNIKLSSVVCSLDGVVANKLIDMLIDKGHVTMDDITCIYHKKLEASPELLYQACEGFIEPHHIYMLQTIRKDMEQTKAIIADLTCRIKEVLSPYENVMELLQKIPGLSRKTVEDLIAEIGVDMEAFPTEKHLASWAGVCPGNNENAGKKKVVEPPMATNS

SEQ ID NO: 289108 - protein, 339 aa, unidentified
MEEVSTIGLDLAKRVFQVHGVDRTGAVVVRRSLRRGAVLGWFSKLAPCLVGLEACGSAHYWARELRQLGHEVRLIPPSYAKAYVRRNKNDAADAAAICEAVSRPSMRFVAIKTEEQQAAAGLHKVREMLVKQRTMLTNQLRGLMAEFGIVVAQGPGHIRELLLILEDRADQRVPELLKQGLRLTASSLQSVQEQEEAIDKQIVGWGRRNRTCRHLITIDGYGPILSSAMAAIVTTPEAFASGRDFSASLGLVPRQNSTGGKMVLGPISKRGNGYLRRLLVNGAMSVLSSKRAKQDPWLMKLMATKRRKVAAVALANKMARIGWAVMMRQEDFRPRQITA

SEQ ID NO: 289109 - protein, 343 aa, unidentified
MQTVTTIGLDIAKSVFQVHGVDAGGQLVIRRKLKRRYILAFFQKLPPCLVGIEACASSHYWARELQALGHRVRLMPPIYVKPYVKRQKNDMADAEAICEAVTRANMRFVPIKTPEQQSGLVLHRTRHLLIRQQTAVINAIRAHLAELGIVAPVGRKGVEELLRVVADGNDKRVPDVVRACLGALGTQLLSLKKQILELDRMIMVWYRSNETSRRLHYIPGVGPLLATALVANVADPGAFRSGRNFSAWIGLVPKQHSSGGKDRLGSISKQGDRYLRSLFVAGALSVIRYAKAHGSKHRPWLTALLARRPAKVAAIALANKLARMAWAMMAKGERYRNPVALAA

SEQ ID NO: 289110 - protein, 331 aa, unidentified
MTRFVGLDVSQKLTAICVVDETGRRLWRGQCATDPGQIERLVRGHAGEDARVGIETGPMTPWLVHELRGRGLDVVCLDARHASAALKMQMNKTDQNDAEGLAQIMRTGWYRPVHVKSLDAHRARALLGARAQLVGMTTRLSNHIRGVLKTFGMLPGAMRGLSFDKRVEALLADRDDLAPIVRPMLVAWRQLREQIAAFDKAVRALAKASPTCRLLMSVPGIGVLSVLAYVSTVEDPARFARSRSVGAHMGLTPRQYQSGEVDRSGRISKCGDTLARTLLYEAAVVLLSRVKRASRLKDWAQALAKRSGPGKARVALARKLSVSGEPLGSTI

SEQ ID NO: 289111 - protein, 340 aa, unidentified
MPLYGGIDLHANNSVVVLLNEQDQVIYQKRLPNHLPRILEPLSLHHGEIEGLVVESTYNWYWLVDGLMEAGYRVHLANPAAMQQYNGLKYSDDHSDARWLAHLLRLGVLPQGYIYPKAERAVRDLLRKRAHLVRQHTANVLSVQNIMARNTGARFSVKRMHELTKQELQSWLTEESQVLAVTSSLAVLDCLKHQIKTLEQAVHKRVHHTPSYEQLLTVAGIGTILAQTIALETGAISRFPSVGHYASYCRCVDSHKLSNGKRKGTGNVKNGNPYLAWAYMEAAQFALRFQPAAQRFYQRKLAKSRNNTILARKAVAHTLARACYYMMRDLVPFEATKAFG

SEQ ID NO: 289112 - protein, 333 aa, unidentified
MNKITLISIDTAKAVFHLVGVDAHGHYVWRKQLTRRRLLSSLAQMGCCDVVLEACGASHHWARSIQALGHRVRLIAPQHVKPFRRGQKNDYRDAEAIISAALSPGMHFVGIKRVEQQAEQALHRVRSRVMSHRNAAANALRGLLGEYGVVFRRGFKPLREGARCFAETEEAHTLGLVELVNDVLEEIEVLQRRMDHYERLIKQRVRVDETSRRLREELRGVGELGASALRVKVADVRDYPGGRHFAAYLGLAPGHSGTGGKVRIGHIKRGHDRYLRQLLIHGARSALRHLGDKQDTQSRWMRGLLERRGFNIASVALAHKNARQAWAIMAREQ

SEQ ID NO: 289113 - protein, 390 aa, unidentified
MLYVGIDIASKKHDCCIIGDNSTVLTPVFTFENNAAGFDVLLKSIRAYSRSVCGVKIGLEATGHYSTNLVAYLQAKGFSLTVFNPLQVNLFRKAQTLRKTKTDKVDARCIAQLLMSSEQPAFIPQTTDISELKSLVRHRSRMVAMRTRLKVSVSRLVAIVFPELPGAVSSIHQVTCHALLLELPTAKAIADCHLTRLTNLLYERSKHRYGRDKAIEIKSLASNSIGLHSIATGFELQQTLRVLSTLYVEIDALDKLIKAQMLQINSPILTIPGISFALGSVILSEIGNIDNFANPAKLLAFAGLEPAAYQSGNFVANQTSMVKRGSKYLRWAILQAALLASQYDPTFKAYATKKLSEGKHHFVVQSHVGRKLIRVIFHLLKSNTHFKSVA

SEQ ID NO: 289114 - protein, 349 aa, unidentified
MFTIGIDPHKGTHTAAVLDGTEIVIDELRLVADRYQRDRLLAFATRFEPRTWAIEGAGGLGALLAQQLVAAGETVLDVPPTLSARVRLLDSTRTDKTDSHDARAAAIVAMRHGRLRRVAPVDHSAVLRLLADRHHDLTGLRTQAICRLHALLCQLTPGGASGRLSAQRAGQILRGIGPLGPVATERKRIALDLLGDVRRFDSQLVTLNERIAKAVPASGTTLTDVHGVGALGAAIILGHTADITRFPDAGHFARYNATAPIAASSALKDRHRLNPRGNRQLNRAIHVAAVTQIAHDTDGRIYYRRKLTEGKTRKEALRALKRQISNAVYRQLKPPRVDGCHWMAATRSP

SEQ ID NO: 289115 - protein, 371 aa, unidentified
MRFYNGQHPFYCGIDLHARTMHVCVLDQAGHVVFDKNLAARPETFLKAIAPYRPRLVVGVECMFAWYWIADLCAAEDIAFVLGHALYLKAIHGGKAKNDRIDAGKIARLLRGGTFPIAYAYPKGMRETRDLLRRRTYLVRQRAALRTHLQILNAQYNLAPFPTKLAYAANRTEMNIAERFADPSVQKSAAINLALIDRLDELIGDLELYLVRTAKVDDLQTFYRLRRIPGVGKVLALILLYETHAVQRFDTAGQFLSYTRLVRCAHESAGKQLGTGGKKIGNAHLRWAFAEAACLFLRGSERAKQWKQKQAAQRGEGKALAILAARLGRAVYHMLRKGEAFDEDRFWNGGGRSRTGSSSLSRAQEVQHAGD

SEQ ID NO: 289116 - protein, 466 aa, unidentified
MKPFYMGIDVSKGYADFMIIDAQKKPVIQSFQLDDTFEGHQALYSIVGRFLAQHPNSMLSAGMESTGGYENNWYNSIVAFQSSLNIQTARLNPLGVKRNSQADLKKNTTDKISAQNIAEYLVAHPEKVTYQKQDQLTGLRKQWGFIQTLTKQRTQFLNQFKGLLYTSNPELLRYCQTETPAWILKLAVKYPSAARLKRAKVKTLSKIPYLPKIKAQQVVIDAKRSVASATDAATEQLVVATAQQIIHLNKTIDGQIRRMIEACTMPEVKLLKTFSGISDKSAIGLIIEIQTVERFKNAKKLASFFGVHPVHKISGDGISGVKMSKQGRKEPRHILYMITLSALKSNPLIKQIYEKLQKNGKHNMAAMGICMHKILRIIYGMLKHNKPFDPRIDIANRKRSAQAKEAAPRKNASRRFQEYDTKAPVSRQQKKKRLERGRSHSVPDTKSGITAPVPETHIITNILSEL

SEQ ID NO: 289117 - protein, 349 aa, unidentified
MIIIGCDYPGFQQIAFVDTETGDCGEQRLEHGEGAQKFYRDLATHGKKMRVGMEASGHARWFEQLLGGLNIELWTGDAAVIRAKRGRKPKTDRQDALHILNLLLTGDFPQIWVASWENRDLRQLLWHRHRMVQARTRVMNQLQAVALNEGLRCKKKLWREHGREQLEAFRLAPWASRRREDLLELLDRLNPTIAELTQAIEQEAEKCPQAQRLMTHPGVGALTALAFVLIIGKAERFQCGKQVGCYLGLVPLEDSSGDKRRLGHITKQGNSLLRFLLVEAAQVTSRTIPEWRSKYLHLTMRRGRKIAKVAMARKLAIRLFWMMRQGWNYQQVMKFGSHVGQPGYGPDVQ

SEQ ID NO: 289118 - protein, 418 aa, unidentified
MTELELVVERCAGIDVHQAQLRVCVRLPGEGRRRSRVEEFATFGTTTPDLLELSEWLSQHGVTHVAMEGTGVYWKPVYYVLEASFDIWLVNAQHVKNVPGRKTDTSDAAWLCRLLEHGLLRKSFVPPPEIRELRDLTRYRKAVIRERASEVNRLHKVLEDAGVKLATIATDIMGVSGRAMLAALVAGTTDPEVLAEMAKTRLRARLPELRKALNARFREHHGFLVSQILAHVDYLDEAIKQVDERIAGALEPSEAAMTVLLSIPGIQRRTAEVVTAEIGTDMTRFPTSRHLASWAGLCPGNNESAGKRKHGRTTKGSPWLRTALVEAALGATRKNGYLQAKYRRVRSRRGHQRAVIAVAHAQLEIIHTLLSRGELYTDLGSDFFERQQEEQITKRAIRQLEKLEHQVILKDATAPLPT

SEQ ID NO: 289119 - protein, 412 aa, unidentified
MDVVYERCCGLDIHKKTVVACRIVPGPAGKPTKEIRTFGTMTEDLLALSDWLASEGVTHAAMESTGVYWKPIYNVPEGSFELLLANARRIEAVPGRKTDVRDRERIADLLRHGLLKPSFVPDRRERELRELTRYRSSLVRERTAEVNRLQKTLEGANIKLAAVASDLMGASGREMLAALAGGSTDATALAQLARGKLRQKLPDLGRALAGRCGAHQRFLLARQLAHIDFLDEAIEQVSAEVRERVRPFEAVVQRLDTIPGVGRWTAEVILAEIGTDMGRFPGAGHLASWAGMCPGNNESAGKRKSSKTRRGSPWLRVALTEAAQAAGRTKGTYLAAQYHRLLARRGKKKATVAVGHTILVIAYHLLTDETGYRDLGGHYFDERDRGLLERRLVRRLEGLGYKVTLARVDPAA

SEQ ID NO: 289120 - protein, 400 aa, unidentified
MQGNCIAIDVSKDKSHIQGFRNLNEPISKAMEIGHDREGFKKILELTNQFTRKEEDKPKVIFEATGIYHRGLQCYLEQNGLEYYIVNPLQSAKCRKQDLRTKKTDKRDCVNLAKMFYAMELRKTTIEDEKYYKLRQLSRHYEDILNHLRKAKVSFNATLDIVYPKYQDVFDKLYTTSSMAILRKYPHPDELGRKHPETVAKQLMRCGDHTEAWCMAKAEQLIAYAKTTVSGCRASDINVRIMVEELDQVEHYLGLAETTLTQMIQIAETIPNCKVIRTIPGIGDNLAARLLAEIGDISRFLGSKQLIAYAGIDPIIYQSGQMDGLHLKISKKGNKRLRCLLYLAVTCNLRTKNEANTIREFYNKKTRQASPLCAKAASVACANKLLRIIYGMCKTGTVFK

SEQ ID NO: 289121 - protein, 371 aa, unidentified
MSKKKTIKFIGLDVHQHSITLAIADFGHEGEVRLYGTIKNNTEALEKIIRKLVSTGAELRFVYEAGPCGFGLYRRLNGSGFNCVVAAPSMIPRKAGVRIKNDNRDAISLARLLRAGELTAIYVPDLEDEAVRDLSRAREDSRVAERKAKQRLSSFLLRNDFIYRGKKKWTKSHFNWLADLKMKHPVQQIAFQEYIDAIGECSERTTRIKEQIQQVAMEWRWAPTVKALQALRGVSLLTAVITVAEIGDFTRFQNPKELMAYLGLVPSEHSSGGKTRRGGITKTGNSHARRICVESAWAYRYQARVTQLLLKRQEDLPQNIRKIAWKAQVRLCARYRRLRARGKPVQVVIVAIARELVAFMWAIACQVPRTT

SEQ ID NO: 289122 - protein, 284 aa, unidentified
MQSISTIGLDIAKSVFQVHGVDAASQVVVRRQLRRRHVLAFFQKLRPCLVGIEACASSHHWSRELQALGHTVRLMPPAYVKPYVKRQKNDSTDAEAICEAVTRPNMRFVPTKTVEQQSCLMLHRARHLFIRQQTAVINSIRAYLAEFGIVAPVGRRGVEQLLEVVADTADHRLPEVARACLAALGSQLRTLKAQILEFDRRIIAWHRSSVTSKRLDAIPGVGPALATALVASVADPKAFRSGRDFSAWVGLVPKQNSSGGKDKLGSISKQGDRYLRSSRLARSP

SEQ ID NO: 289123 - protein, 359 aa, unidentified
MILERTSVGLDVHARSVVAVGLDGRTGEVFKQRLVPASEVVIEWLRRLPGPVATTYEAGPTGFGLYRAITAAGIRCEVAAPSKLNRPAGDRVKTDAKDALLLAQLLQLGQIVAVRVPSITEEAARDLVRAREDVRGDLMRARHRVSKLLLRHGHVYYGGSAWTGRHERWLRSIRFAQPGTQGAYDADREAVDFAVARRARLDEAIAAMAADSEFTATTRRLSCLRGVSTLTGFALAVELGDWDRFTGASIGAYLGLVPSEHSSGDSRRQGAITKTGNTHARRLLIEAAWHHKPEYKVGKVLQARWDQATPAARSRGHAGNQRLHRQWVRYAARGKKHTVANTAIARELAGWCWSLATLE

SEQ ID NO: 289124 - protein, 374 aa, unidentified
MMPSENRVLIAIELSVSSWFVAVRLPGSEKSRLHRVEGGDTTALLALIRDLRSRAETKLRHAADVACCFEAGRDGFWLHRLLTAHGAIAYVLEPTSILVNRRARRAKTDRLDAEGMLRVLAAWLGGDRQVCSIVSVPTPEDEDAKRPHREREHLVQERQRLENRMEALLFTQGIRGRPSLRSWERDIAKLRTGDGRALPCLMQAELNRLRRQLVLILELIHEMEAERAKALAAKGDDAMTRKIADLQRIRGIGANFSTVLAREVLYRRQLASYVGIAPMPYQSGGMDRDRSISRAGNPRARTTLIQLAWLWLRYQPGSALSDWFRGRVGTLQGRTRRIAIVAMARKLLIALWRYVETGVLPDGVELRAMEEATA

SEQ ID NO: 289125 - protein, 369 aa, unidentified
MGEYSEAFVAFDVSKAKHAVAIADSGRGGEVRFLGEVSNSPDAVERLIRKLAGRYGKLHFCYEAGPTGYGLYRQLKALGHACMVVAPALIPKRPGERVKTNRRDAVTLARLHRAGELTGVWVPDATHEAVRDLVRAREAAADDRRRKRQQLLSFLLRHSRIYSGGGHWTLAHRRWLAQQAFEHSAQQIVFQEAIDAIADADQRLLRLEQQLVRIVPDWSMAPVVEAYQAMRGASFIVAVTFAAEIGDVRRFETPRQLMSFLGLVPAESSTGDTVRRKGLTLAGNRRARRVLVEAAWTYRYPARVGETLRVRLDGLPKAVRDIAWKAQVRLCARYRRLSNTGKKLPVVVAAIAREMAAFLWAIGREVAPM

SEQ ID NO: 289126 - protein, 337 aa, unidentified
MKVTLIGIDLAKSIFQVCGVNRAGKRAFNRQLRRARLLEFLLQYPDAVIAMEACSGSNYWGRTLQQHGFKVMLIPPQHVKPFVKGNKNDRNDAFAITEAARRPDLKCVEPRTLAQTDMIQVHRVLDRMTRQRTALINQIRGFLNEYGIVVAQGKEKLLVAMPDLLEDAENGLTPSSRALFQQLLEQWRQANEAIECVEKGLKSQARTDEAAQRLMKMKGVAVKISTATIAHAGNGHRYKSGRHFSANLGLVPKEHSSGGQQKLGGITKRGNQYLRRLLIQGAWSVIRNVDKNDDRLSRWAKELVERRGKHKAVVAVANKMARIMWSMLYHQTEYRAN

SEQ ID NO: 289127 - protein, 329 aa, unidentified
MILPKPLDCCLGLDIAQAKLDACLLSGAQAFHAQFDNSKSGLAALRAWCKKHGAPTPLTVLEATGRYSDLAAAELHAAAHRVHLANPRRIKDYARSLGRRNKTDRLDAALIASFGTTRTLPAWQPASDAQQLLRALMRRSAELATMLQAERNRSASATDPLISKSLARIVRTLEKESASLQAQIQAHIHATPELREDIAHLCQIEGIGLCTATWLAAEVPRHLPNARAAAAWLAVTPRVRQSGTCLRSTAPVGPEGNRHLRRVLFMAALTARRRCPPLKAFADRLAAAGKSKMSVLLAVVHKLIKISFLLLKNHSAYDPDHHPLPTGKN

SEQ ID NO: 289128 - protein, 343 aa, unidentified
MKITTVGIDLAKKVFQVHGVDERGKSVLRKQLKRKDVLSFFAKLEPCLIGMEACAGGHYWARKLLEFGHTVKLMAPQFVKPYVKTNKNDRVDAEAICEAVGRPNMRFVPVKTAEQQAVLALHRARQGFVKGRTAQANQMRGLLAEFGIVIPKGLGHIAAQLPQILEDGDNGLPAMMRSLLEGLGEQLKQIDRQVKELEQQIVRWHRENAASCKLEEIPGIGPLTASALVTSVGDARSFKNARQVPAWLGMVPRHEGTGGVVRLGGISKRGDGYLRMLLIHGARAVIAQAERRIDQADPWLKRLLARRPKNVAAVALAAKNARIAWALLAHERRFEAGLSSQRA

SEQ ID NO: 289129 - protein, 383 aa, unidentified
MEAILYCACGLDVHRDIIEACIMRGVNAEPEILRQSFGTTKPELQRLMKWLLENDCYTVAMESTGVYWSPIFQILETESVYLEKVWVVNAHHMRNVPGRKTDVKDAEWIATLLRHGLLEKSFVPSIDIRDLREAARLRRIFVQERCRYINRLEKFLQTHGFKFSSVMSDILCVSGRKLLDILCKTGMLTEKDVQENCRRLRRTSDEIAAAVCGTLTAAERRLLERLLHKLDSCQEDIDAILQDIRLLCAPFQEQVAIIDSIPGFDQESAMEIIAEISAAPQEHFETSQKLCKWAGVVPRNDESAKKVKSRKILHGNRHIKSVLCQAAWAAVKVRGSPFHSWFWSHQRKIGQKKAIIAVSRKLLMLIYLLLASGRMYEPPCKAA

SEQ ID NO: 289130 - protein, 361 aa, unidentified
MEYYIGLDVSQRQTAICIVDDKGERVKEGKALTLPSDIHAWITKHIDADTVAKVGLEAGAMSSWLYTELTKLGLPMICLEAYQAHLFLKTQRNKTDKNDARGLAQLVRMGGSFIRAVIIRSQANQEARALLTLRQHLVAQKISLENNITGTLKPFGLITPRGHACPTTFRERVLTTLCRADERGIGVSAAVMPLLDLYDNLCQQLEILTKQVTALARANPICKRMMTAPGVGPIVALSFVTAVDDPTRFKTASDVGAYFGLTPQQYQSGETDIMGNASRRGDIMTRCHLVQAATTLLASTKKWCALKAWGVKLARKHGFSKARVAVARKLSIILCKMWIREQDFCWTTLPETMPSAEATSA

SEQ ID NO: 289131 - protein, 442 aa, unidentified
MKMALSLFTVWVLTTSSLSQRTSERLSPHSAPNEQIITTNCSPRTHSRLDRSLAKSQTKEHHMNQNQTIIGIDNQSKELEILKFDNSHQGFQELLALIKRYPKTKIAIEATAHYWRPLADFLQNHNLKVFTINPIQSNSLRKFYIQPIKTDAKDAYIIANALRMDKVRLTPPLPPTIRNARKIIRYRQFLTKLLTACNPELVSGQLRTMLDEAFPEYQNEKLFTNPFCPSSLTLLKNMPTPKIIIKHKKHLPKLLNHHKGIGTKKATKIYTAAVNSIGCKSTEESLSQIIPHLVEIIQTLQGKISETEKILTTIPKPELPILCSIPGMSTHLATVILAEIGDVNHFPTSRNLVSYVGLAPSTTQSGTFAANQNHISKRGSPYLRHAFYQLALLSIRYNPRLADYYRKKIAQGKPKKVALIAVARKLVRIVYHLLLSKNNYEK

SEQ ID NO: 289132 - protein, 342 aa, unidentified
MEKVSIIGLDLAKRSFQAHGAGADGGVAFRKKLSRQKVLAFLADQPRCIVAMEACGGAHHWGRAIGALGHAVRLIPPAYVKPFVKRQKNDAVDAEAICEAAMRPTMRFVAVKTSEQQARAMLFRTRDLLVRQRTQLINALRGHLAEHGVVAPQGSANLKKLAEALEDETTSPPLLVVELSRVFLEQIDQLSKKIAELERAMTHESVRGETTRCLRTLPGVGPITAMAIETFAPPMTVFERGRDFSAWLGLVPRQHSTGGKPLLGKISKMGQRDIRRLLIIGAMSLIRRACRKTAPEGTWLHRLLARKPRKLVAIALANKMARIIWAMLTKEQDYRAPAAAPF

SEQ ID NO: 289133 - protein, 372 aa, unidentified
MNNSTVYVGMDVHKESFTLADYTIDTEKSSYSRRTLADYKEVLKFLEYLRTIYGNDANFVCGYEAGCLGYSLYHQLTNHNVNCLILAPTTMLEIRSGKRIKTDKRDAELIAKCLAQHNYSPVHIPTVVDEQTKEFLRMRNDHKIALKKIKQQILSFCLRHGYHYEGKKHWTGAHMTWLKTLTVEDLYKEILDEYLLTYITLSDKIERLDQRIEELALKDEYKESVKKLRCFIGVQTHTALSVIVEVGDFKRFESAEKFASYIGLVPGEESSGDDTNRLGITKAGNGHIRFLLTEVAQCYGRGQIGHKSKELKAKQAGNTSQVIAYADKANERLRRKFYKMVLGKSKKHNVATTAVARELACFMWGMMTDNIA

SEQ ID NO: 289134 - protein, 342 aa, unidentified
MSWGPTVFFVNPNSCKGQAPAHKEGTEEMVAQTVQDIGIDVAKRWLDVAVFQTQEQAHFDNDKDGWAKLVRWLRGRTVRAIGMEPSGGYERGVAKALRSADLPARNVNPHKLRHYARALGRLAKNDRIDALLIARYTAELPTRPVRCDPIAEQLADLVVARRQLSDDKVSLANQLEQLREPMVRRIFTQRLHRIELDIALLAKRMAQIVASQPAFAAKDRLIQSFHGAGPILSHTILALAPEIGQASRREIAALTGLAPYDFDTGTFKGRRVIWGGRHALRRVVYMAALTASRSNPVLKAFHKRLIANGKQPKVALVAVARKIMTILSAMLRHNQPWNPGKA

SEQ ID NO: 289135 - protein, 356 aa, unidentified
MRYYKDIKGFVKGKAVFVGIDVHVKSWSLCFFSDGEVLEKMTIHAKYPILLHLLKTRYGDSRIIHLVYEAGFSGFWLYRRLHQDGYDCIITSPNRIPKSNNKIKTDKRDAEKLARFHASGHLKAIAVPSPEIESERRLLRQRGRLVKKQTRQKNEIKSFLFLHDISKPSSIRNHWTKAYIKWLKELRFEFDSDTFLMAQMLEHLAMIRQELARLLRCLKELSKHASYQDSYRRITKLKGVGLITAMTFLLELFDLERFKSTKDFSSYLGLTPSQHSSGEHVHLGHISREGNVHLRRVLIESAWTAIRHDPHLRDKYNRIKAKGTNGNKAIVAVARSLAIRLRRCLLDKQEYVIGVC

SEQ ID NO: 289136 - protein, 403 aa, unidentified
MARFAGIDWASAEHAVCVIDERAKVLHRAMVAHTREGLVDLVRALRRFGAPADLPVAIERPSGLLVDTLVEAGFQVVPIHPNAVKASRPRYAAAQSKTDLGDAFLLADLLRTDGHRFPALHPLSDETRALRALVRTRDDLVAERVGLANQLRALLERFWPGAVAIFADVDSPIALAFLRRYPTPQSAERLGAKRLRGFLARNAYCGRRPVPELLARLRSAPAGLASEREAEASGELVLALAAVLEPLVAQIQRLTAAVERALEAHPDGSLIASFPRAGRVNAAQILAELGDDRARFVSEEHLAAEAGVAPVTKASGKSRSVGFRWACNRRLRLAVTCFADNSRHASAWAAGVYQRARARGCDHPHATRILARAWLRVLWRCWSDHRPYDPLRHSAAALLLATP

SEQ ID NO: 289137 - protein, 345 aa, unidentified
MNITRIGLDLAKNVFQVHAVDHKGHFLLSRSLKREKMIEFFQKQPPCLIGMEACGSSHFWARTLMSMGHQVKLIAPQFVKPYVKGNKNDANDAEAICEAVSRPSMRFVPVKTVEQQDIQALHRIRQGLVRQRTALVNQIRGLLSEYGIVISLRVESLRNAIPYILEDAENRLTADFRLLLKGLQEDLTHLDKRIGSQDQAIKRVALEHEGAKRLQQLRGIGPITATALIAAIGDGRQFARGRDAAAWCGLVPGQHSSGGKARLLGISKRGDTYLRTLLIHGARAVIKTALNKNDHLSKWLQSLCSRRNQNIAAVALANKTMRMAWALLVRGEDYDPNFGHEAEPA

SEQ ID NO: 289138 - protein, 351 aa, unidentified
MDRYIGMDVHQASCTVAVIGPSGKRLKNHVVDTDATVLVELMKGIAGDKHLCMEEGELSQWLYEVLRPHVKELVVTQMRDRVGNKNDALDAWMLADMLRRQAVPMQVFKTTQYSRPLRDAVTGYEMVTRDMVRAKNRLRAVFRSNGVHVDEHIYDPEERKKKLKLLPPSKAQLGTELGQLLDATMASRDRLESWLHDRVKESIEVRRLQTVPGLGSIRAAQVVAIVVSPERFRTKRQFWSYCGLGIVHRSTNDWERGPQGRWKRTETTQARGLNRNRNPRLKQVFRSAAKTVVDQMPNHPLYKDYERMLEAGTKPNLAQLTLARRIAAATLAIWKHKENYDPAKHRRKDAA

SEQ ID NO: 289139 - protein, 375 aa, unidentified
MKEKVRFLGLDVHAETIAVAVAEPDGSVRSLGMIANRAESIRKLVKRLGPVEQLKACYEAGPTGYVVYWQLAELGIPCDVIAPTLVPMKAGDRVKTDRRDAERLARSFRSGDLTAVWVPDAGSEALRDLVRAREAAKQDQLRARHRLSKFLLRSGQRPAAGLKAWTQLYMAWVRQLRFEQAAQESTRLDYLHEVEHMAERVVRLEQAIAEAVKLASPEIQEVVKDLQALRGIAQISAVTIAAELGNISRFESARQLMGYSGAVPREDSSGKRTQRGSITKTGNAHLRRIVVEAAWSYRLRPGVGPGLRKRQEGVPEELKEIAWKAQNRLHKRYSRLAAAGKDQRKIITAVGRELLGFIWAIGIKAETAAKQRMAA

SEQ ID NO: 289140 - protein, 349 aa, unidentified
MTSLAEVVDVVIGVDTHKYTHTAAVVSAGTGGELEVLTAAADPDGYAALVELGNGHSGLRVWAIESTGGYGAGLARHLRELGEWVIELDRPDRPARRHGAKSDPLDAVRAAREALSRTKLAQPRAGGERGALSVLLAARRSAVEASTVAQRQLHALVTAAPECLRAKFRGQTTTAMIATAARLRCHASWDVETTTTAMVLRSLARRAQAMTAEAADHERQILDIARSWRPDLLELTGVGPIVAAVVLCAWSHPGRVRSDAAFAKLGGVCPIPASSGQTIRHRLNRYGDRQLNRALHTVVLSRLRYDPDTRAYRDRRRAEGKTDREIKRCLKRYVARQLYRQLQTAPSPT

SEQ ID NO: 289141 - protein, 361 aa, unidentified
MEEEKRRYVGIDLGKRTYEMTIVSKNGKVSMSNGRTTIEGRQALYKKLTKQDKVALEAGSLAFTMAKELEATVGCEIKVLNPTHLPLIYGTMKKTDKEDALKLAHILEDYKDERLPVVPIPSNEEMRRRKLLASYRREQRTRTQAINRLHGLFLVRGITTVVKGDLGTGEARGETVRVLEGLERKEAKHLLMCLKQYEERIVVLEKQMEEECEGDEEIERLQSVPGVGPKVSFAYKAYVASERFENASQVSNYLGLVPRVYMSGDTVRYGRITKRGNSYLRGLLVQASWALIRSKSGGSLKERYKYMTQEKGIGKKKTIVAIARRLSELLFTLMKNGTYYEVQRFRPEKAGEKLAQIALSV

SEQ ID NO: 289142 - protein, 344 aa, unidentified
MSEVITIGLDIAKHVFHVHGADERGRAVFSKKISRAKLLDFFAAQPSCKVALEACGGAHHWARQLTQLGHEVRLIPPAYVKPFVKRQKNDAIDAEAICEAVQRPSMRFVAVKSEEQQAAGLLFRTRDLLVRQRTQLINAIRGHLTEYGWIAPKGPSHVARLADLIEEEEMASSLPEAALAMFRLMLDLLAGLNGKIADLDKEIARRAREDEVSRRLMTVPGIGPISATAIAALAPPAETFAKGRDFAAWLGLTPLQRSTGGKQKLGATSKMGERTLRRLLIIGSSSVVQQARKRGAPKGSWLEQMLARKPRMLVTVALANKTARIVWALLIKQENYRAPVAARA

SEQ ID NO: 289143 - protein, 342 aa, unidentified
MDYFAGLDVSVKDTSVCIVDDAGKIVREVKVGSEPAALLAVLRNPAYHFRRIGLEAGPLSQWLFSALAEADLPVICVETRHMRAVLKAQINKTDRNDARGIAQMMRVGLYRPVHVKTLRSQKLRMLLTHRKLLQAKAIAVENDLRATLRNFGLKVGVVGAVKFEMRIKELIENFPDLVALVEPLLVVRRVLREQISILHRRVLAAVRNDEVCRRLMTTPGVGPVVALTYRATVDVPARFRKSKSVGAVFGLTPARDQSGERDHPGAISRCGDEMMRVMLYEAAQSMLRSKKWSWLKAWAMQIARRRGMKKAIVALARRLAVIMHRIWVDGTEFRWTREAAAA

SEQ ID NO: 289144 - protein, 395 aa, unidentified
MTNPKTEANLKIVNDLSRCLDPLDMDVTLIAVIEMSQSSWLVGGIVPGVERQPLKKLEVDEGALLNLLSRWRGEAEKNGRRITRMTVAFEAGHDGFWLARWLAAQGIETHVIHASSVAVTREHRRAKTDRLDTELLKRGFLGWLRGERGHCKMVAVPTLAEEDAKRPSRERETLVGEATRIIARIKAVFVRLGIRGFNPKLKAAAARLATLRTPEGEAIPPNTLAALKRDLERHQIVKRQIRELEQTRLDVLKQAPEKGPYAIVLLLARVIGIGVETADMLVQEVLSRKMRDRRAVGRYAGLTGAPDESGSKRREKGLARSGNARVRRGMVQLAWRFLRFQENSALARWYRQRTADAPSMRKTLIVALARKLLIALWQLARDGVVPEGVQLRPAA

SEQ ID NO: 289145 - protein, 348 aa, unidentified
MCQRNQYVGLDVSLKETSICVIDEADKIVWRGRVDSTPKAIASAVKQHSPHAVRIGLESGQLSNWLFQELQAAGLPVICVDARHAKAALSLKVNKTDANDAVGLAQIMRVGWYREVTVKSLDCQAVRALLVARAQIVSQITTLKNSVRGILKTFGRVLPKGLRSQFPVRVRAAIDGHPVLEAIIEPTLRVLEAARAQLLVYDRAVIQRARSDSTARQLMSAPGVGSVVVLAYITAIEDPARFKRSSSVAAYFGMTPRRYQSGEVDYAGRISKCGDGMVRCLLFEAAKVLLSRSARPSALKTWGETLGKRVGAKKATMAVARKLAVILHRMWTTDTRFQWSAEAGSSAA

SEQ ID NO: 289146 - protein, 344 aa, unidentified
MKQYVGLDVSQKSTNVCIVDEEGRRLWTGKCLSTPEAIAIVVRERAPLAERVGLETGPLCVWHYHGLKALGIPVFCIDARHAKAALAMQLNKTDENDAAGLAQIMRTGWFREVHVKSFNAQLQRSLLQSRLQLVNMRRDASNQVRGALKVFGIVLPPGRPSTFDRLAREYLGGREELSAFIEPLLAAWHALGEQAALLDKRLRKAAKEHVVVKNLMTAPGVGPLIGMAYVATIDDPKRFVKSRNVGAHLGLAPRRFQSGEKDCQGSISKCGDALLRHYLYEAAGVLLTRSRRSNSLKVWGMQLAKRIGKSKARVAVARKLAIILHCMWRTGEAFRWGSSTEVAA

SEQ ID NO: 289147 - protein, 346 aa, unidentified
MRILALDLGKYKSVACDYEAETGQHSFATIVTNPKALHDLMVDREPDRVVIEICSIAGWVGDLVRALGIELQVANTSDERWRWRNVKQKNDRNDALKAAQLSAVNQLSLVHVPRIEVRQWRALIAYRHHLVRRRTKIKNHIRDLLLREGQLLPRGRSAWTQVGMAALEVMVKPLAEMQINELWRGELGVELAQLKELQAQIIAVEAKLDDLAAADGRVQLLRTIPGVGPRLAEAIVAMFDDPTRFRTAGQVSSYIGMVPKSFDSGETERSGRITRHGHRLVRSLLVEIAWAALRHNRWARECFQRISGGKKSRRKIAVVAVGRKLLVRCWAMLRNRTPWHVSGAAA

SEQ ID NO: 289148 - protein, 358 aa, unidentified
MRIIGVDLHTRQQTVAMLDTETGELIKKTLKHDGDEVRKFYSALPDQVLVGIEATGSMHWFLELLEELGIEGKVGHPAKIRAAEPRKQKYDGRDAALLLKLQVENRFPSIWMPSTELRDLRTLLLHRHQWVRMRTRVQNTLQAIALGHGLRRGKTLWSQLGQHAMESLPLPPHAAHRRTELLALYGKLQAQIDELDERVMNHAQQRPGARLLMTHPGVGPVTALATDVFLGDPARFEDGKAVVSYVGMIPSEYSSGGQQRLGGLSKQGSPFLRFLWCEAAVHAARRDPDLQRFYRRKLTQKGLGKARVAVARKLGIRLYIMLRDQIDYQEFCRRGQMRQKSGDACAGMPDVGHSPAIQ

SEQ ID NO: 289149 - protein, 438 aa, unidentified
MKTFQEQALIKDKYAVVLGIDWGKQSHDIHQIVVDCWKLSHHTIKTDPTSTHRFINELRERYPGGRIAVLSEQGKGFLVNMLLDYDWIELYTVNPHAASEFRKSLRPSGAKSDSIDSETLARMFFTHFDKLTYLSHSDELTRRLDTFTRHRRELVDKRVSVSLAIKSLLRDYYSQVFEMLSVNIWDRMSLDFLRRWPCFSKLKSSNGPILKKFYFAHNSRSETLIDKRIKHWQNSQILSKDRVLEELSQFKLLNLIDQIALLNKQIDRIDKEIKRVFSQHPEREFFEQLPGAGTAMAPRLAAAFGCNRNRFKDCSQMQAYVGVAPITVQSGNTSYTFMRRVCPKFLRQSFHEWAGLSAQYSPWAKACYQMLLERGKCVGEAKRALAFKWMRILFRCWKNHEQYDEDKYVQSLINHRSPVIKKMKQLGLIDEKKFTFSS

SEQ ID NO: 289150 - protein, 473 aa, unidentified
MKARTTSNLQIIPMLAHETLYVGIDIGKQTHVAGFLSTTLLVRHQRFESCPALSFENSREGFRSLVDRISTYVPLTQVYVVMEVTGHYHRTLLQYLQEMDITVYVMHVQKRQAGMLKTDKRDALGLANHLYSQLELGVQVPDKLQAVRRLAPPTEAAAQLKGMVRHRYELIAESTQRKNKLIAICDEIFPELTQVMKDPNLSSALALRKAFPTPAAIATAPLSALQAVRVGHYPSEAKLVELQRLATQSIGTKEPARLRGLTFEQEQLIEEMELIQKHLEKLEAEMTQIAQNSREGQILLSIPGIGSIPAATIIAIIGNIANFERPSQLKAFFGWAPAIKQSGYTLDSARLSPRGTRQTKQMMYLVVWTAIKTECEWNRIYERLVPIKCSYDERTRRYTGKGKVIGRIAGQIVSVIYALLKKDQETLSRLSPGTKPPAPELYDGEVHRRHRAGQYQSSSSHKKPSKLIQLPPH

SEQ ID NO: 289151 - protein, 342 aa, unidentified
MTITIGIDPHKASHTAVAIDNTECVLDELRVRACSSQTDRLRSWAAPFPDRVWAIESARGLGYLVAQQLVAAGETVVDVPAVLSTRTRLLGSGKAQKNDPNDARSVAIAALRTDGLARVSIDEHAQVLKLLAKRHRDLGRLRGKAACRIHALLMELAPGGIAQRMNLTRANDLLDRVVVDTEMAAHRVGVAREFVADLAHYEAQMKTSKARLRHAVAATSTSLTDIRGVGVVTAAMIIGHVGDVSRFKSAAHFASYNGTAPIEASSGERRRHRLNPRGNRQLNYAIHVVAITQLRYPCEGREYYDRKRAEGKSTKEAIRSLKRQISNVVYRSLVADARRLEQ

SEQ ID NO: 289152 - protein, 315 aa, unidentified
MTRVICGVDVSSESLAARIGRDGAAASFANTPQGIAALAAFCRTHQVELVVMEATGGYQQRALQLLWAEQLPVAIVNPRAVRRFAQAMGLVEKTDAIDAGAIAWFAQTRRTVAQPPASSAQQHLRALVTRLRQLTLVRSAQRNQRRLVTDAAVLAMTDQLLALLQQQIGELETAIAALLASDPLWQALDQAFRSIRGVASRTVARLMAEMPEIGTLSAKSISKLAGLAPLARDSGKHQGRRMIRGGRAPVREILFVVASVAARYEPDFTAFHQRLRLAGKPPKVVRIALAHKLLVRLNAKAREVRNRITPALVAA

SEQ ID NO: 289153 - protein, 363 aa, unidentified
MTSMIPATGPVTGGVDTHGHTHHAAVLDHVGRQLGDREFPTTPAGYRALGVWLSRHGQLERVGVEGTGTYGAGLARYLRGTGVSVVEVDRPDRKARRAKGKSDPLDAYAAARAALSGAASGCPKTRDGRVEAIRALRVARSGAVKARSQATNQLKALLVTAPAELREQLRQLSTTALIATCARLRPTGDIGDPEQATKTALRRLARRHQHLSEEVAEADTELKALVSATAPGLLALPGVGTEVAGQLLTTVGDNPDRLRSEAAFAHLCGVAPIPASSGRTHRHRLNRGGDRAANNALYIVVLGRLRYDARTRAYADRRTKQGLSKPEIIRCLKRYVAREMFTALTARAVQSPPATTSTLSTAA

SEQ ID NO: 289154 - protein, 352 aa, unidentified
MKRSITMFIGCDLGDKKTTICVLDEDGQVAERAQIPTTKGGFERFFAKRDRARVVLEVGVHSRWTSSLLTELGHEVVVANPRQVRLIYQGRKKNDQLDAEALARLGRVDVALLSPVKHRSQAAQNDLAVVRARDSAVKSRTQMINCVRSMVKTAGSRLPTCDADSFHKKVKAKLPDELRPALLPLLAAIEHLTALIRGYDKQIEELARCCYPETERLTQVDGVGPLTALAFVLTLEDAGRFPKARQVGAYLGLTPGQAQSGDSDPQLRISKAGDEYMRRLLVGCAHHILGPFGKDSDLRRFGLKLVERGGKHAKKRAVVAVARKLSVLLCKLWVSGEPYVALGYRVCPKKAA

SEQ ID NO: 289155 - protein, 343 aa, unidentified
MDHFAGLDVSVKETSVCIVDDTGKIAREVKVASEPDALLAVLTNPAYCFKRVGLEAGPLSQWLYSALAEASLPVVCVETRHMQAVLKAQINKTDRNDARGIAQMMRVGLYRPVHVKTLRSQKLRMLLTHRKLLQSKAIAIENDLRGTLRNFGLKVGMVGTVKFEGRIKELVENLPDLAILVEPLLIVRRALREQIVILHRRLLVIVRDDAVCQRLMTTPGVGPVVALTYRATVDVPARFRKSKSVGAVFGLTCSKYQSGEIDRNGRISRCGDEMMRVMLYEAAQSMLRSKKWSWLKAWAMQIARRRGMKKAIVALARRLAVIMHRIWVDGTEFRWTREATAAA

SEQ ID NO: 289156 - protein, 430 aa, unidentified
MPAQTKKSRIERSPSAADTPSASREPIEVATAKRRASARSSRQLTDLPSTGCPADAPTCSDGTIERGPKGRSVMRKVALDLGVRKTSYCEVADGHVILRRTVESVRLLDRELGPDAEPAVVAVEACREAWFVHDLLTSWGNEVLILDTTRTRQLGVGHHGRKTDRIDAEVIARALEANRVHPAHVLSPHRRVLRNEISIRRAMVETRAQHVTTVRGLMREKGIGLPRCGTERFASRVRDTALSEADHQLLDPMLEVIELADAQINAADNRLDRLCQQEPVIQLLMTAPGVGSVVAATFVSVIDEAGRFRRAHQLESYLGLVPSENTSGGAKQRLGHITKQGNSYLRALLVQSACAIMQNGDKADPLVIWAKEIADRRGKKIAIIALARRLAGVLWAMWRKHATYEPSNINVKKARLLRRRQPTEVTAASA

SEQ ID NO: 289157 - protein, 505 aa, unidentified
MGPLAYMRGVEASVSLRSELRGRLWSNHFGWQSLFDVGHAPSWEHWTKSRPADQSLTGHPMSFDRLKRPQSRKRLPGHKLKPSRATLLVQNSKPHLSMKQTYILAIDVAKHKVRAALSGADERLLFEKDLPVSAGGLRELLVRLREHVAEPEGLLVLIEATGMLHLNWSVALIRAGYAVVVINPLIARRLYTLGNSIRDNKSDPIDARQLCGIGRLHGEKLLSLYRFALKPEQLCLQRLQSVRKAVRKSLSNLKKSYGSLLDVSFPELGRLLEIDGVGIRQLLSQAPTPCAIARMRRSSLEKNWMLRPKAAQLKKLAAESMADPELAQASRPALLAMLQSIEAMETRLRELDRQIEALTSQSVDPQTKALVESIPGFGALNAAKLLAFLPGEILHAGSNRQAAARLQAYMGNDPRVRQSGQWQGQTKMSKRGVEMLRTALFQCAFSASQHDPELRSFYQRKRAQGKHHEVALSHLMRILTRRLVAVLRSGQPYQPNDNSELKNAA

SEQ ID NO: 289158 - protein, 349 aa, unidentified
MSQSLNSAIAVIGIDIGKNTFHVIGLDGRGAIVLRQKWSRGQFEVRLANMPPCLIGMEACVGAHHLSRKLQALGHDARLMPAKYVRPYSKGQKNDFRDAEAIAEAVQRPTMKFVATKTADQLDLQALHRVRERLVSQRTGIINQIRAFLLERGVAVRQGLRFLRAELPRILATPPDVLSPRMVQVISDLAEDWRRVDERIGQLSGEIAVLARQDAGCERLMSVPGIGPIISSAMVAAIGTGDAFPKGRDFAAWLGLVPKQISTGDRTILGKISKRGNRYLRVLFVQAAWVVLIKPMSWERHGLKHWIEAARKRLHRNVLAIALANKLARIAWGVLAGSRAFEARKLQAA

SEQ ID NO: 289159 - protein, 345 aa, unidentified
MPMLADLVDAVIGVDTHTGTHTAAVVDRLGAHLATTEVSADAAGYARLTGWASKHAPGPRIAWAVEGCGSHGAGLARALAAAGHLVIEADRPKKARRRGGKSDELDAIRAARQALAIPDPAQPRTGDTREALRILLATREHATKTRTATVNTLKALILTAPEDLRAQFRGRRTAAQVRAALALRPRPGQPVSEQHLRQALHELARQITGLDAALKTSLKNLRSLARAWMPALLAEPGIGPVSAAQLLVTWSHPGRFRTEAAFAALTATAPIPASSGRTGRHRINPYGDRNANRALHTIAISRLRYHQPTIAYAARRTAEGKTTREIRRCIKRYLARNLYRLMEHH

SEQ ID NO: 289160 - protein, 460 aa, unidentified
MSEPIPAAEPDYAAFIAIDWADRQHAWVLQVSGSTQRETGQLEHTPEAIEDWAMQLATRFAGRPVAVALEQARGALLYSLSRFEHLVLYPIHPSTSYNYRKAMFPSGSKDDPKDAAILLDLLTLHRDRLRLLRADTTQTRKLQILVEKRRQLVDERTAQTNRITDQLKMYFPQVLKWFDSLHAPIVAAFLQRWPTLPRLQKEAPEAVRKFFYEHGSRSGERIEKRLQEAAKAQALIHDAAVIEPGVLVVKALLAMVAALNEGIRALEKAIEDVTAAHPDYSIFYSFPGAGPAMAPRLLAAFGTQRERYASASELQSFSGIAPVMEASGRQCWVHFRWACPHFLRQTFHEYAAASVQFCDWARVFYQEQRAKGKEHHAAIRALAYKWIRILFRCWQSRQPYQEQLYVAARQARALALPSRQQNLPAQTASHGKPTSRKTGKAQDFAMKSIGEILKSFMAEA

SEQ ID NO: 289161 - protein, 347 aa, unidentified
MSEQHHVGLDVSVKETAICIVDPHGKVVHRVTVVSHPEVIGRHLIDLGHCYARVGLEAGPLSPWLYAGLVEAGLPAICVETRHMHAALSARINKTDRNDAMGIAQMMRVGLFKPVHVKMPASQQRRLLLTSRKLLQRKAYDIESDLRGQLRNFGLKVGVVGAAGFEQRVRDLVLDLPFVAAVVLPLLEARTALRTQLAKLHKMLLDQVCTDPVCRRLMTAPGVGPVVALTYRTCVDNPARFGRSQCVGAHYGLTPRLYQSGETMRVGRVSKCGDTMMRAALYEAALVLLTGPRVRWSSLKVWGLAVAKRRGMQKALVAVARKLAIVLHRMWRDEKDFRWSTGAATAA

SEQ ID NO: 289162 - protein, 407 aa, unidentified
MNQLYVGIDVASRDNAVYIMLPDGSKHSSFSVQNNLGGAQALSKRVVSALTDVRLQDVVIGMEATSVYGDNLLCFLREDGALAQFNRKLHVLNPKQVKKFKGAYSELPKNDPVDAFVIADNLRFGRITVPVQLDDYRYKALQTLTRNRFFAVQNLTCEKQRFKNYLFMKCSGLAQESIFSNNFGATALAVYEEFDTPDDIADMDIGQLAAFIAESGKNRSPRPDEIAKAVQSAARGSYRLPKTVNDSVNQVMSISISSMRAMQAQIKALDKEIERQFDNIPNTLTSIPGIGPVLSAGIIAEIGDINRFPGHAAVAKYAGLAWTQHQSGTFEAQHTRLIRSGNRYLKYYLIEAANSLMRCDMEFKRFYDLKYNEVNKYQHKRALALTARKLVRLIFRLLKDNRLYIPA

SEQ ID NO: 289163 - protein, 457 aa, unidentified
MENYYMGIDVSKGYADFVILDAKKDVVEPNFQLDDTFGSHCKLFEILKRFFDRHSGSVLFAAVESTGGYENNWLHSLGGFQGTLDIRSARLNPLGVRANSKASLRRVITDKISARDVAEYLIAHPEKVTYQQEDSLAGLRRQWGFVRLLVKQKTQILNQFESLLYTANPELIAYCQSGVPAWLLKLLKRYPTAVKLAKARATSVARIPYVTADRAKELIEQAKKSVASATDETTGSLITAMAEQIIRMEETIRIQAQQMAKRCAIPEVALLKTIPGISDASAIGLMLEIQSVKRFSSVKKLAAFFGLHPAFKTSGDGTSGVRMSKQGRKEPRKILFMVAMVALTANPHIRKIYEEHTEKGMKKMAAIGLCMHKILRIIYGMLKNNQAYDSQVDQKNRESITARKAPRNVKNANRRYEMFDQQAPISRRQSNKRKEWKQSQGDNITQCGIGVPIPSAA

SEQ ID NO: 289164 - protein, 411 aa, unidentified
MQVLHERCAGIDVHKKQVVVTVMLTAPTGTVDKQTKTFTTMTADLLALADWLDSLQVDQVALESTGVYWYPLYNVLEASHTITLVNPQHMKAVPGRKTDVRDSEWIADLLRHGLLTASFIPPQPIRVLRELTRYRKTLVQERSQEINRLQQVLESANIKLAAVATAVLGVSGRAMLEALIAGEDDAAALAQRARGRLRAKEAALRQALEGRVQPHHRFLLRRILAHIDFLAASITTVQQEIETQLAPFAEAMTLLQTIPGIQATVAAAIVAEIGVDMTRFPSAKHLASWAGVCPGNKQSGGKRMQAGMTTGNPWWRGMLSEVVWSISHTSGNYLVEQYRRLARRRGKPKAIIAVAHTVLGIIYHLLRDKHPYVDVGADYFDKLDKARLERQHVRRLEQLGYTVTLTPAQAA

SEQ ID NO: 289165 - protein, 376 aa, unidentified
MREKLRFLGLDVHAETIAVAVAETNGETHSLGTIANREDSIRKFIKKLGSPEQLRACYEAGPTGFVLYWQLTQLGVDCAVIAPSLVPKKPGDRVKTDRRDALKLAHCHRNGDLTAVWVPDDASEALRDLVRQREASKQDQLRARHRLTKFLLRTGQRPPLGLKPWTERYMRWLAQVRYAQPAQEVTRLDCMNEFEHMSARVKRLEEAILEVVKQAPRTMQELIRGLQALRGVAHISAVTIAAELGNISSRFETARKLMGYSGAFPSEDSSGNRIRKGGITKAGNAHLRRIVMESAWCYRHLPRVGEKLRKRHQDVPAEIIEIAWKAQNRLYKRYRKLTMAGKDQRKVITAVGRELLGFIWAIAIKAEGISTQPIAA

SEQ ID NO: 289166 - protein, 345 aa, unidentified
MGPMYYIGLDVHKQKISYCVKDVGGRIQVEGWIPATRFDLDRWMKTLPQPWSAALEATMFSGWIYDHLKPHAAELKVAHPLMLRAIAAAKKKNDRIDANKICDCLRCDFLPECYMAPTAIRERRRTLRYRNLLVRQMVQMKIKISTLLMEAGVSYNKQKLHKAGYFRELLASNPDIDESLRSLLRQCREMVVRPGKMETALIHSLQQDPLLVERVERLMSIPAIGPITALTWALEIGEVQRFSSIKKAISYCGLCGDEQRSANSVQRTPISKQRNKHLQTTLIEAAKMAPRYSPTLAQLYDREMQKGNANRATLAVARKLVAYLMAVDRGQTHFLVIDQETRTAA

SEQ ID NO: 289167 - protein, 355 aa, unidentified
MTASYEYHIGVDYHKSYSHLVVQDSSGKTLRSGRVKNDRQSLGGFLERYRENSHAVVEATRNWMVIYDWLDDICDDVVLAHPLKVKAIADAKIKTDKIDATVLAHLLRADLVPEAWAPGEKARELRVALRERMFYVRLRTMTKNRIVTVFDRYPEQTAQLKKLGDLFGKAGRIQLAQVKVSEIDRIQIDRGLAFIGDIDVRIKQSEATIRAMTKANANVKLLKTIPGIGEFFARLIDAEIDDISRFRNPKKLAAYAGLVPSTYSSGGKTFHGKIIRQGNKWLRWAFVEAVSPAIASDPQLRAQYEHLKIRGTNKARVAIARKLLTIAFQILRDQRAYEQRGESNMESTSTISRLS

SEQ ID NO: 289168 - protein, 403 aa, unidentified
MSVFVAEVARPTLVFRGLLGQAEPILITGGRAVADYREAFVGIDVAKLKNAIAVAESGREGEVRFWGEVDASDTSMRRIIQRIAAKFDRVHFCYEAGPTGYGLHRLIRSLGHECVVVAPSLIPRKPGDRVKTNRRDALALARLLRAGELTAVWVPDEGHEAMRDLVRARASAVETLRVHRQQISAFMLKHSRIYPRKKGWTMRYLRWLQEQQFDHPAHQIALQEMVEAVRVSKERVERLEKVIEEFVPNWSLAPVVRALQTLRGVDLIVAVTFATEVGDVSRFESPRQLMGYLGLVPGERSTGETVRRGSITKAGNGRVRHMLVESAWTYRHPPKVGARKLYRLEEAPPKVREIAWKAQSRLTARYRMLTGRGKRTTVVCTAIARELTGFMWAVAREAQAGRS

SEQ ID NO: 289169 - protein, 342 aa, unidentified
MNDSVVSIDLAKNVFQVCDFNRYRKSTFNKKVRRGKLLDTVRQLKSKRIVMEACYSSNYWGRVFEGMGYSVGLIPPHQVKPFVVGNKNDHNDALAIGEASFRDTTVFVPVKTLEQQDMQSLHRIRERYIKNRTAIANQMRGLLSEYGIIVEQRIAVLRKEIPFILEDAENERTVISREFTAELYAELRKYDALIDAKDKLIKEMLKSDEAYQRISEIPGVGPIVGSAILSAVGDAKQFKNGRNMAAWIGLTPKQIASGDKSQMGGMSKRGNRDLRRLLIHGARAVVNWSGKKTDALSLWIQSLYKRMHGCKVVVAVANKLARMIWAVLAKGECYRAPVLETA

SEQ ID NO: 289170 - protein, 349 aa, unidentified
MHSTTVAVDLAKNVFELAVADATGKIVDRQRLNRVRFSSFFVQRAPCRVLMEACGSAHYWARRMAEHGHSVQLLPAQYVRQYVRRNKTDRADAAALIEAARCADIQAVPVKSLEQQQMLALHRLRSQWMGTRQRYLNTLRGLLREFGIAIPLGARVARSHVAQHLAQSRRDLPAAIRPLLEQMLGDVDQLERLTDQTERQIACLTHADPVVQQLRQIPGVGLLTSTALRATVGDIQRFPCARRFASWLGLTPREYSSAERRRLGSISKRGDVYLRTLLVHGARSALMAAHRQQRTGRPLDRLRQRALACQRQRGHNVATVALANRMARIIWATWKHGRPFDGNWPCAAH

SEQ ID NO: 289171 - protein, 400 aa, unidentified
MNETSFSGFLGIDVSKDKFDAYCIDINGEKHFYLSCPMDRAGFVKLVSRLGALPIPQENLLIGMESTACYHMNLFSFLLAGGYTAVIINPLLISNFVKMQLRKTKTDKKDALVIAQFLLMHRDTLAQKSISPHVSDLRDLSRQRESLLSQMTALKCDMKRLLTITFPELEKLTGVFTKSILKLVSRFPSAHAIGQADSAEINQLLTDHSMGRNSAKTTQAILQAARSSVGTTSPSRELILKQKADVVIHLEGQLKELTALMIELCRSDMGDDIDIMTSLRGIGEKTATSFLIEMGGDIQKFNDHKKLIAMAGLDPAIYQSGKHDGKGRITKRGNRHLRRVIWLMTIRVIQFNECFRNYYKKRMQDGLPFKKAVLATAHKLLRVIYAMLTQRTSFSYVANS

SEQ ID NO: 289172 - protein, 368 aa, unidentified
MPHVTSIGLDVHARSVAAAAFNPFTGEVVHRDFGTDAAEIAEWALGFEEPRACYESGPTGFHMARELRALGLDCAVAAVSKMQRPAADARRKNDRRDAEFIARMLATHNIVEVPLPDAAVEAARDLDRALDDATAEYRRARQRLNMFLIRLGHVWDERNADGTRKGSWTRAHWRWISGIRLEGPQRDVLEYYVTAARCAESDRRQLEKKVLALARTDRWRPAVEALSCIKGIDTLTAFRLAAEAGSFTRFRTAPAFASWCGLVPSERSSGETERRGGITKTGNRLARTALVESAWHYLTCTPRPKAPAPGADVPAAIRARADDCTARLCRREALAAAGKSSCKANAAVARELACWVWEIGCRAEGTLG

SEQ ID NO: 289173 - protein, 369 aa, unidentified
MREYTEAFVGIDVAKARNAIAIADGERGGEVRFLGEVDASEESMRRVVKRIAAKHGRIHFCYEAGPTGYGLHRLITSLGHSCTVVAPSLIPRKPGDRVKTNRRDALALAKLLRAGELTAVWVPDEGHEAMRDLVRARAAAVETLRVHRQQVSAFMLKHGRIYPRKKGWTMRYLRWLQEQRFDHPAHQIALQEMIDAVRTSKERVVRLEQTIGEFVPNWSLAPIIRALQALRGVDLIVAVTFVTEIGDLRRFESPRHLMGYLGLVPSERSTGETIRRSGITKAGNGRVRHMLVESAWTYRHPPRVGKTKLYRLEQVTPRVREIAWKAQTRLTTRYRALIGRGKKTTVVCTAIARELVGFMWAVAREVRPA

SEQ ID NO: 289174 - protein, 323 aa, unidentified
MAKGCEDDRDVFVGVDVSKSQLDVMILPARQRLTLANDAGGIETLLRTLLPLRVKLVVMEATGRYQRAVAGVLLCREIPVSVVNPRQVRDFARASGQLAKNDRIDSVMLAEFAQRLSPRRTQQTSERQALLSDLITRRRQLITMRTMELNRRHDPLSSKLAARQIAKHLRLLDQQLEDLDRELAKRIENDDDLGGKAQVLDSVPGISTTTAHTLIAELPELGQLNRCEIAKLVGVAPLDDDSGKCKGRRRIQGGRRTVRTALYMPTLSAMRCNSLIQSFARHLASRGKCFKQIMVACMRKLLIVLNTLVKENRPWQERLPAAA

SEQ ID NO: 289175 - protein, 344 aa, unidentified
MDNHTQYSGFAGVDLAKKVMQIHFVAGDGEITDKQVKRAEFLDFFRNRSKCLIGMEACGASQDWARKLEAMGHEVHLMSPKAVKPFVSGQKNDYNDAIGIYKAMFNGVRRVPVKSTEIRDLQTLSRIRSQVTKDKVKEINHVRGLLAEYGIVMGKSITAFNKGISSALESLKERGDVSPLVAEELQTTVESIKTKIERQKRLDREIEQLARGCKNYENFLKTPGVGPFTAAMLCVLLCDPAIFANGRQFAAYIGLAPRSRGSGGKNFIIGIPSKFNCDSESRAVFVECAQALARYKNKSPWVDGILRRKPKKVAVIAIANKLARQVWAMANKGESFKQMTILTA

SEQ ID NO: 289176 - protein, 354 aa, unidentified
MSQKLNTAITVVGIDIGKNSFHVVGLDQRGAIALRQKWSRGQVETRFANMPPCLIGMEACVGAHHLSRKLKALGHDARLMPAKYVRPYSKGQKNDFRDAEAIAEAVQRPTMKFVATKTADQLDLQALHRVRARLVSQRTGIINQIRAFLLERGVAVRQGLRFLRAELPRVLATPPDVLSPRMVRVIEDLAGDWRRLDERIEGLSSEIEAVARQDAGCERLMTVPGIGPIISSAMVAAIGTGDGFTKGRDFAAWLGLVPKQMSTGDRTILGKISKRGNRYLRVLFVQAAWVVLIKPKSWERHGLKPWIEAAKKRLHRNVLAIALANKLARIAWSVLARGRNFEARTITNATTQAA

SEQ ID NO: 289177 - protein, 354 aa, unidentified
MSSTKYIGMDVHTESISIAVRNSVGKVVMECVIETKASTILQFLDGLRGDLRVTFEEGTWAAWLYDLLKPHVTEVLVCNTRKNASRNGSKSDRIDAHKLAEQLYMNNIKSVYHGEHGLRTLKELARSYLTITKDLTRVMNRLKALYRSWAIPCAGKEVYAPRYRAEWLAKISEAGVRRRAEHYYQQLDVLRLLRQEVRRDLLAEAKKHKPWKLLRQIPGIGPIRAAIVIAVMQTPHRFRTKRQLWTYSGLALETHDSAQYRVAEGQLERSKKPATVRGLNKDHNHDLKDIFKGAATRVSGSRGPLRDFYENLLAKGRKPTMARLTLARKIAAITLIVWKKEVRFDANYLKPQAA

SEQ ID NO: 289178 - protein, 421 aa, unidentified
MKHPTEDDFAAVIGIDWAHAKHDLCLRAAGSKVLERSVLKHSPEAIDDWVKELRKRFGQGLIAVALELDKGPLVYALQKYEGFVLFPVNPTTLAKYREAFTPSGAKDDPTDAELALQLLLRHPEALKGLEPQSPSMRALVQLVHDRRRLVSDKVRITNRLINALKNYFPQPLEWFRDKDTVLFCDFLTRWPTLKHAKRARRSVLEAFFHEHNVRRSALIDERIRAIRSALPLTEDPGVIGPQSLLAATLVSQLRTVLEALERFNAAIAATTEQLPDYAIFSSFPGAGPIFAPRLLAAFGEDRNRYQRCEELQKYSGIAPVTERSGQKSRVHWRYRAPSFLRQTFVEWAGETIPRSFWAKAYYQQQRAKGLSHQAALRSLAFKWIRILFRCWQERTPYDEAAYLLALQRSGSPLLKTFTAST

SEQ ID NO: 289179 - protein, 352 aa, unidentified
MTIVGGFDVHRAQITFDYLDTETGELSTGQIRPATREVLRSWLAERFCGRHDVALAVEGCTGWRFVVEEMLCAGVEAHLAEPADTAALRGRKKWAKTDRADARHLRELLMTDRLPESWVPPSHVLEVRTLGRLYLALMDERRAWQQRIHAQLFHQGVPAPGSLLTPAGQEALGGARLSPAGRQMVDTATAAIEALSEQCLPLRAQLQAIGRRHRGARALMAHYGIGALSAAIIWAELGDCRRFESSDQAVRFSGLDSTVYSSDAKRSPGRLARQGSPELRWALLEAAKSAARSSSPDHASSCSVRERVGGKRPALSVARKLVRRCHHTLRQLGDEAWVPIETVPLGPLAKAA

SEQ ID NO: 289180 - protein, 496 aa, unidentified
MVPESVLKSVMTAALHQGTLISFRRVRNSARLGRLAGTNPIPRETMSRKRKSNPKTGASLLSCLNLNAAGIDIGATEIYIAVPGDRDPQPVRCFPTFTEDLHAAAAWLKACHIETVAMESTGVYWIPLFQILEARGFKVFLVNAHHVKNVPGRKSDVSDCQWLQYLHSVGLLRGSFRPEQAVCSVRSILRHRDSLVQMASSHVQHMQKALDQMNLQLHHVISDITGMTGIAILEAILAGERNPHTLAALRDRRIKASADTIARSLVGDYRREHLFTLRQSLAAFRHYQELIAACDREIAQSLEQFESKLDPPPASPSPSNDGSKPKASEPSFDLQTHLHRIFGVDLTQVPGINVLTAQTLLAEIGPDFSRFPSGPEFASWLGLCSDNRVSGGKVLSVKTRKVKNRAATALRMAALSVHRSQSFLGHFYRRMRAKLGAPKAITATAHKLARILYHMVTTGHAYDETICAQNEVQNRQRMEARLRKQARYLGLQVVAL

SEQ ID NO: 289181 - protein, 369 aa, unidentified
MKKTVKYIGLDVHKNSISIAVADQGRDAEVRYYGKIAYNMDQLSKIFRKFISQGAELRCVYEAGCCGYHLYRFLTSNGVDCTVVAPSKIPRKSGERLKTDKRDCITLARLHRAGELTSIYVPNEEDEALRDLVRARNDAQNAHKRAKQQLASFLLRYHILFPGKSKWSKAYFNWLSDISMPHPAQQITLQEYIDTVRTCSNRVDRLTEQIRYFSEQSRLNGLIKAFQAMRGISLIVAASLAAEIGDFSRFEHPEELMAYLGLIPSEFSSGEKQRKGSITKSGNGHARKSLVEAAQAYRLPARKSRAIQKRQEGLPAEICELAWQAQLRLCNRYRYLTNKGKNANIAKTAIARELAGFVWAISMELPQAA

SEQ ID NO: 289182 - protein, 422 aa, unidentified
MKKHMYRTTDVRVADWAMIGKQTHEQHIVFGVDIAKEDMVGVLMRQDRSVIVTLKWQHPQESKALIEQLATKLELASLEVVQEPSGTYGDALRLLFQKAGLPVFRVSPKRTNDAKEVYDGVPSLHDAKSAYIIGRLHLDGASGLWEELPGQRRELNALLGVLDMHQKHFEHNRNRLAALLSRHWPEVTSLLEPASVTLLALLTAYGGPRQIAANKEQAGKLMRRIGRIGLSQKKLKQVLASAGSTIGVPCMDAELYWLRELAQEARRGQVAVGKAKKVIEAMVSSDPTMKNMGLVLGKTSAAVLVAKQGSPLEYPSTGSYLKSLGLNLKEKSSGKYQGQLKISKRGPSMSRKYLYFAALRLFQREPIVNAWYQDKVRRDGGKKSKAVTALMRKLAKSIWHVARGETFDAAKLFNVQTLRLTV

SEQ ID NO: 289183 - protein, 316 aa, unidentified
MSPVSEVFVGLDIAQAHLDLALWADSRAWRFSNDLAGYDALIDHLRPFAPTLIVAEATGGYERGVVRALQQAGWAVAVVNPRRVREFARANGRLAKTDRLDAHNLAHFAQAVRPPARPVRTAAQEHMAGLVARRRQILAMLKVEQNRWHQLPLALRPGLEVHLAWLTADRDSLNRELAAQLEGEPVWQAKAVLLRSAPAVGPVTAATLLAEFPELGTLDRKKVAALADLAPMNNDSGHKRGKRRTSGGRGPLRSTLYMATLMATRYNPVLEALYQNLLRRGKEKKAALTACMRKFLTILNAMLRDNRPWQPQLAPT

SEQ ID NO: 289184 - protein, 327 aa, unidentified
MSNDKYIGLDVHQSSVVTAVHNHQGKCMMESIIETKAQTIRDFIKSISGTVHVVFEEGTQAAWLYDLIHPLVAEVVVCDPRANNSSLGNKSDRVDANKLAQMLRMGLLRAVYHGQTGIRALKELAHGYESLVSDMTRVINRIKAIYRARGVLWSGTSVYRSYHREQWFSQLQEAQRHRAYKILRKVPGLGPVRIAQIIASVSTPYRFRTKRQFWAYCGLAVVTRSSAEYEFVGGKVRKRHRPIATRGLNDNHNRRMKEVFKGAAVDAIKRGIFKQYYEGLVGKGMRAEIGRLQVARKIGAIVLAVWKRGEDFDQDRVIGQRAQGQGA

SEQ ID NO: 289185 - protein, 339 aa, unidentified
MGLHCAVDLHGNNGFYAVVDENGRRLMSKRLPNSLPEILTVLSPYRDRLEHGIVVESTFNWYWLVDGLEANGYRPRLANPAAAEQYNGLKNTDDKTDAFFLAEMSRLDILPEGFIYPKEERPVRDMLRRRLLLVRHRTAHILSFQNLVARERGEEISANRIMKLWPEGVKQFFEDDRLVLMGQTNIEAIRFLTKQIHMLENTVLAEAKLKPEYEKLLTVPGIGRILALTIMLETGDIGRFKKVGNYSSYCRCVKSARISNEKKKGENNRKNGSRYLSWAYVEAANFIRRYCPEAKRWHQRKAARSKQVVATKALASKICKASYFIIRDHVDFDVKKIFG

SEQ ID NO: 289186 - protein, 352 aa, unidentified
MLIIGCDFHPGFQQVAIFDNRTGEIEERGLSHRTEAEEFYRSLAGRQVRVGMEACGHYPWFERLLAELGFELWMGDAAAVRASVVRRQKTDRRDAEHILKLLVEDRFPRIWVPSLEERDVRQLLVHRHKQVQARTRTKNQLQAMALSHGVQKKWKLWTQAGRVELEQLPLLPYAAERRKRLLEGLDGLEAEIGELDRRVAEEARRRPEAERLMTHPGVGPVTALSVVLTLGPAERFESAKQVGSYFGLIPSEASSGGRQRLGRISKQGSSFLRFLLVEAGQTAARYDAQLKRFYRRLAARKNRGVAKVAVARKLATRLYLMLREGWTYAQLHQAVMLVSPSHSVAGKQKPSV

SEQ ID NO: 289187 - protein, 345 aa, unidentified
MDHFAGLDVSVKETSVCIVDDAGRIVREVKVASEPAALLVVLKSPAYHFKRIGLEAGPLSQWLFSGLAEAELPMICVETRHMQAVLKAQINKTDRNDARGIAQMMRAGLYRPVHVKTLRSQKLRMLLTHRKLLQSKAIAIENDLRGTLRNFGLKVGLVGTVRFEARIKELVENLPDLAVLVEPLLVVRRVLGEQLAILHRRLLAIVRDDEVCRRLMTVPGVGPVVALTYRATVDVPARFRNSKAVGAVFGLTCSKHQSGEINRTGAISKCGDQMMRMMLYEAAQVMLTRTNKWSWLKAWAMKIARHRGMKKAVVALARRLAVIMHRIWVDGTEFRWTREHAVAAA

SEQ ID NO: 289188 - protein, 342 aa, unidentified
MEKVATIGLDIAKSVFQVHGVGADGEVLIRRRLTRARMLPFFAKLPRCLVGIEACNNSHYWARELSALGHDVKLMPAQYVKPYVKRGKNDAADAEAICEAVTRPTMRFVAVKSPEQQSLMMLHRVRLMLNRQRTQISNAIRAHISEFGVVAPVGRLGVERLLEVVADAGDDRVPEDARLCLQMLAAQLEVVKRQILENDRRVLASARRTELGCRLMDIPGVGPLLASAFVASVADPNVFKTGRDLAAWIGLVPKQNSSGGKERLGSISRAGNRYLRQILVVGAMAVIRYAQRHGTRRPWLVQLLARRPAKVAAVALANKNARMVWALMTSGECYREPLAAAA

SEQ ID NO: 289189 - protein, 344 aa, unidentified
MQITTIGLDLAKNIFQVHAINSVGEVVAKKTLRRVQMRRFFEQLDPCLVGIEACGTSHYWAREITKLGHEVRLMPPAYVKPYVKRGKTDAGDAEAICEAVRRPTMRYVAIKAPEQQAALALHRARDLLVKQRTQLVNMIRGLLAEFGIEIRRGIEQALTLAKRIAALEVPDIPPLAAKVIAGLAGQVLDLQARLGEIEHELLAWHRSNDVAKRLATIPGIGTVGATALVASVTDPHQFRSGRQFAAWLGLTPLQHSSGGKERLGRISKMGDKYLRRLLVVGMTSLIRRAKYKPEAVDPWLADLLSRKPARLVTVALANKAARVVWAIMVRGGVYRMPAGVTTPV

SEQ ID NO: 289190 - protein, 362 aa, unidentified
MSHATQSFVGVDLHQCTVTLTAVDPLGEKITQLKISTKSVGKIEDWLSALPRPTHLAVEACPFVEWFIERFRLGVDRIDIADATELANRRGKRRKTDRNDSLDIAQRLARGECPLGFIAPPELMQLRKLGRHWRCLSRLLSRTKHSMKSMLHAANLRGPKFDGASAQRWLLANRDLLGPVQQDAFADFIDILNLVERQRERLRRQMIFASRGGKFAATIARLMTVPGIAEIWGTIIAAEIGPFDRFPNADTLEFWAGLTADMKESAGRTQSGAITKAGSATLRWALGKAAVTLCQCDARQEAIRQRLVARLGKPKANVAMARRLLRILYAMIRDGKAYQGGPKRDRTAAANRARLRRKKQVA

SEQ ID NO: 289191 - protein, 370 aa, unidentified
MDTYVTSIGLDVHARSIKGAAFNPYTGEMVIKSFGYSPTEVAEWILTFESPKAVYETGVTGFHLARSLKSLGVDCVVGAISKMQKPSADKHRKTDKRDAEFLARLLATHNVVAVMVPDEGCEAARDITRALADARDDLVAAKQRLTKFLLRHGRLFDEKNARGQRITNWTHAHWKWIYAQQFSESAAQETLFYYIEQVKQLEIAKTKLEKLIATHAKEQRWKERVDAIRCIKGIETVTAFALVAEVQVFSRFESASSFAAWLGLVPSEHSSGETIGKGGITKAGNAHGRKLLVEAAWHFINASPKSKNLDFDQKVSARLRNHTNKSNKRLISRCAYLHERGKKPVVANCAIARELACWIWAVGCMVEGTL

SEQ ID NO: 289192 - protein, 365 aa, unidentified
MKHVTTYVGIDAHKKDLFIAMLIGDAKTPVTWTVPNESNAVRRLVRKLEREAPGPVRACYEAGPCGYVLQRQLTTPGVTCQVIAPGLVPRKPGERIKTNRRDARKLAELLRAGVLTEVRPPTPEEEAVRDLCRARDDAREDLQRCRHRLGKFLLRRGLHYDGRNWTRAHRQWVDSLVWTHAAERLLVEDYLLAIDHVDARLIELDRQLVKIAEANPYREPVAWLRCFRGIDTLTAILILAELHDFRRFESPRALMAYLGLVPGEDSTGEKHRRGRITRTGNGLVRRLLIETAWHYQHRPNVGAALARRRKGQPSRVIAIADKAQQRLCRRFRRFVEQHKPAPKIAVAIARELAGFLWATLQAPAA

SEQ ID NO: 289193 - protein, 412 aa, unidentified
MKDLLEISCGLDIHKEKIVACILTGPLGKPTHSEIREFTTLIPDMLALRDWIISENCHHVAMESTGIYWIPIYEILEDAFSGDITLLVVNARHMKNVPGKKTDMRDSEWISTLLRAGLLNASFIPEKRIREFRDLNRYRKSIIRDITSQKNRVEKFLQSSGFRLSSFISDIFGASGRNIILHLVEHGQIDKTALDSCLKTKTRNRIDEILMSVNGTLSEHQKTFLKILMTHYDSLKEHLTEVETSLEEDMAPFTLQVEQLNSIYGISTTASCAIIAEIGIDMEPFKTAEHICSWAGLCPGNNESAGKRKSASVTKGNPYIKSMLCEIAWVIAGKRNTYLSAWYWRIKQKKGAKKAIVALARKLLVIIYTMLKQGTLFDESCFETRRKNCEQKQLSRYIRELEKHGYTVEAQV

SEQ ID NO: 289194 - protein, 416 aa, unidentified
MPLALPEAQVFTGVDWATENHAVCVMNAAGKIVAQFTIEHSAAGIAMLIRRLAKFGDPGDVPVAIERPDGRLVDLLLEAGHPVVPVKPNAIKAWRDGEVLSGAKSDAGDAAVIAEYLRLRYHRLAPAVPYSGETKALRTVVRTRDDLVDMRVAAANQLAALLDAHWPGAKAVFADVESPISLAFLARYPTPASARHLGEQRMAAFLVKHGYCGRRTPAQLLHRLRSAPPGTTAEALTEALRDAVLALAAVLTALHASVKDLDRSVAAHLGEHPDGPIFTSLPRSGQINAAQVLAEWGDARPAYEHPDAVAALAGVTPITRQSGKHRSVEFRWACSKRFRRAITIFADNSRHASPWAASIYTNARAAGKDHPHAVRILARAWIRVIWRCWIDQAPYDPAKHAAAAALTKQPAGEFAA

SEQ ID NO: 289195 - protein, 367 aa, unidentified
MKQQTSATSETPVKDRMIIDFTGKTIYVGIDIHQKDYQVAKVIDGVCLGNHRMAANGDLLIKHLHSCYRGAEFKCVYESCAWGFNLQRKLTTAGMQCIVVHAADVSTNDKERKRKTDKVDALKLARNLAAGELKGIHVPDETIQKERNLIRYRTRLMRDINRSKNRLKSLLKYQGIEVPAQYAKNNWSRNFLIWIEEQAAKDELLADTLLLMLDQMKLLRQLLLKTEKKLRELRKSKYALKVKLATSVPGIGPTTAMLFLLEAGDINRFKGFDALNDFIGFCPDTDSSGETDRDRGITTRRHKQLRSALIEAAWQAIRVDPALMNSYQELTKRMKGVHAIIRIARKLLRRLRAVLLTGIEYQKGVVA

SEQ ID NO: 289196 - protein, 413 aa, unidentified
MVRLAAATKRGPCFFRIWYILTRSLGKCPKECPPPMAVGGGRGMGVRRGPWCLDTVREFGPHPVFGLGRTVARDGGRSREPASKEDYTMKEATPSIGVDVSKDKLDYSVSGEKAAGTCPNTAKGIRKIIVAARKLNARVCCEATGGYERALLEACWAGGVEVVLTDPWRVRHFAKGKGVLEKTDAIDARIIARFACENDLRPFARPSEARRRLCDLTRAGETLDKQIQMARGQLEHCCDKAMEKLWLKNIRMLGGMREKVDRERIAVVNGDERMRHLFERYQLVKGVGPETALSMIAEMPELGTVSDKVAGKLLGAAPIPDDSGKKTGRRLIRRGRFAARRALYMAAVSSIRFNPILRAFYLRLAKSNGKPPKVALVAVMRKLICLLNRIAGDEAFKPSASGSKPVPRASGRG

SEQ ID NO: 289197 - protein, 441 aa, unidentified
MQILFSRCCGIDVHKDSVTACVLIYAEGQEPEVRKQEFPAHFKSLGNLRFWLMAQKVTHVAMESTGVYWKPVWQALEGHFELILANPFQIKTVPGRKTDARDSQWIAELLAHGLIRPSFVPPRATRDLRDLTRYRVKLVQERNRVHNRIHKVLEDACIKLDTVASDILGATGRAIIQAIIAGQEHPDWLADKARGKLRGKRAELRLALRGQITDHHRLMLRELMEDLEFVERKISRLEKEIATQVDHGKLDRLCGIPGVDLITGCTLLAELGSDMSVFNSPHHAASWAGLCPGNHESGGKRLSNRTRKGNQWLRRALCQAAWAATRKKNSYIAAFFYRKAGKHGMRKAIVATAHKLLIISFCILRDGTEYQELGDNFFDRLHPERTRNRLVRRLQRLGLEVTLQPRSDIPPALDTPDRSTVRKRGRPCKCTERGIPCKHVP

SEQ ID NO: 289198 - protein, 349 aa, unidentified
MDKITAVGLDLAKQIIQVHAIDAAGRVVLRKVVRRERLLSLLAQFPRCVVGMEACSGAHHWARELTQLGHDPRIMAAEFVRPFRKSLAAKNDANDAEAVCTAMLQPNMRFVTNKSVEQQALLCLHRVRQGLIEERTASINRLRGLLAEFGQVAPQSAPALQRALSTLLAAEDPRLPALVRRCTQDLREHVRAVEGRIAALDREIAQHAQGSDSARRLAALCGVGPNTASAVVAMVGNARDYRNGRQFSAWLGLVPKQYSSAGKTKLGRITKRGDAYLRTLLIQGARSALQAALRRAPAKRDRLSAWIVQLAQRVGYHKTLVAIANKHARIIWALLARGETLDRARGGAH

SEQ ID NO: 289199 - protein, 454 aa, unidentified
MRQSKTKKCKRNKQISTINPNAAGIDIGSQFHVVAVPADRDDDPVRTFQSFTGDLHRLADWLVACRIETVAMESTGIYWVPLYEILEKRGIIVIVSNARDVKHVPGRKTDVTDAQWLQQLHEYGLLRGSFHPPADIAALRAYLRQRERLLDYAAAHIQHMQKALMQMNLQLHHVVSDITGKTGMLIIRAILDGNHEPAVLAKLRDGRCKASIETVAHALEGNYRPEHLFALSQSVALYDRYQIHVTECDQYIEALLVRLRAPEPPEDPLPAPRHKTKQPNALNFDVRTALYSMIGVDLTQIHGFGPYMALKLVGECGTDMSKWPTAKHFTSWLCLAPGNKISGGKVLSAHTRRSKNRVTALLRLCAVNVGKTDSALGAFYRRLSARVGKAKAVTATARKLAVLFYNTLRYGVDYSDPGASYYEERHRTRVLHNLTRRARQFGYNLEPVPVEGVS

SEQ ID NO: 289200 - protein, 561 aa, unidentified
MKKLYVGIDLAITGRHRGSVYDPQENRYLDKSFAFNIDFDGFEYMLRKVQSHVQEGEEVQLNFVMEPTALAWMPLSCYLISKGHLVFRVTPQQSADFRKLRSKYAKSDRIDCQALAKLPLVCEDGVYQLYLPSSDLGELGRLARHLAKITQQATSRKLRIWSLFVMINPKVLAAFGREQFSRTARILYRYFTDPFKIVNLGKDQFAEAFRSECSWKVSDEVLEKIYEVSLSTTKIYGPMVDQGVLPFNYAGVEDEVRIELDLMEAEEKKISEIQRKIKPLYERIDPKGYLKSVQGIGIIIAAAILGIIGDVSRFPTIGAFRAFFGFIPKKKQSSNRDQTGLRIHKAAQSLLKMYMFLAAETARRYDPEFAAFYDRLTKRGLHHNQAECALANKMAGRVYALLKRMQRAEDSCYKSTVESAQPIELLRPEEVVYKLRDLEGNIIDKKTARELVMAKFPSISQKRREEKARKNIEKSGNNKDTEIKNRSKRTDKSKESTGSQQSFPDQPRQIPAPVQENSSMRSGRTLPAGSILDDMLSRLGVQVELSARGQEAEDLNELTDE

SEQ ID NO: 289201 - protein, 375 aa, unidentified
MNDHSEAFVGFDTSKLRNAVAIADGVRGGEVRFLGEFENSAAATAKLVKKLAAKYRRLTFCYEAGPTGYGLYRQIKNLGPECIVVAPSLIPKKPGDRVKTNRRDALSLAKLLRAGELTAVWVPDRGHEAMRDLTRARETAMMDLRSKRQQVSAFLLRQGLHYSERKKTWTKTHMNWLASQKLEYAEQRLVFEEMMLAVRQAQERLERLEQAIRVAVPDWSLAEVVTALMAMRGIDLISAATFLAEIGDLSRFQHPRELMGYLGLVPSEDSTGDKIKRGSITKAGNRRARRMLVECSWSYQHPPRVGQEKQEKVAAAPRAVREIAWKAQCRLHRRYRALVRRGKLKTVAITAVARELAGFIWAVSREITTARAAAQ

SEQ ID NO: 289202 - protein, 403 aa, unidentified
MNSVGIDISKGRSTIAVMRPFGEVVISPFEVRHTGSELSKLAKQLKSLDGETRVVMEATGNYHASVAKLLHNAGLYVSVVNAKLVHGYGNNELRRVKTDRKDAVKLANYGLDRWLTLPRYIPEEDTRLLLKNCYRQYRQYSKVQTVLKNNLISLLDTVFPNVNRLFSSPAREDGSEKWVDFVAEFWHCRCVSEKSEKAFANKYQRWCRKYGYNFNEAKAHTIHAEASGHIGVMPMSETTKLLVEQAVAQLRATSTALAALKHEMQALTSMLPEYPVVMDMFGVGPTLGPQLIAEIGDVRRFYSKKALVAYAGLDAPPNDSGDVTGRHKSMSKIGASSLRRTLFLVMSVYLQTAPLDEPVYQFMDRKRAEGKPYRVYMMASANKFLRIYYATVKAYLESLEHTA

SEQ ID NO: 289203 - protein, 389 aa, unidentified
MKIFVGIDIAKLNHFAAAISSDGEILLEPFKFTNDADGFQLLVSKLESFDKNSIIIGLESTAHYGDNLVRYLVAEFYQVCVLNPIKTCQMRKNNVRKTKTDKVDTFVIAKTLMMQDDLRFVSFYDLDMMDLKALGRFRQKTIKQRTRLKIQLTTYVDQVFPEIQYFFKSGLHQHAVYALLKEAPSPKEIASMHMTHLANLLKVNSHGHFTKEQAKELRILAQKSVGANDSAISIQITQTIQQIELLDSQLEKIEAEMTDIMRFNDSVIMTIPGIGYINGGMILGEIGDIHRFSNPNKLLAFAGLDPSVYQSGNFQAKTTRMSKRGSRVLRYALVNAAWNVVRNNATFKAYYDAKRAEGRSHYNALGHCAGKLVRVIWKMLTDEVEFNLE

SEQ ID NO: 289204 - protein, 340 aa, unidentified
MTITTLGIDLAKSVFQLHGVDADGNAVLKKKLRRGAVLDFLRELPPCLIGMEACATSHFWAREIGAFGHEVRLIPPAYVKPYVKRQKNDAADAEAICEAVTRPSMRFVPVKSAERQGVLALHRTRDLLMRQRTMMLNAIRGHLAEFGVIAAQGPRNVMDLIAKLRNDEGFGLPDIARAALLGLAAQLEMMTGEIRALERRLMAWHREDATSQRLETIPGVGIITATALSASIPDPSVFKSGRQFAAFLGLVPRQNSSGGKDKLGRICKMGDGYLRRLLVVGATSVIRRAEANTTRTGVWVRSLLERKPARLATVAMANKTARIAWAVLTRGEVYRCSAMA

SEQ ID NO: 289205 - protein, 387 aa, unidentified
MGAVLIGVDPAKRSNTIEVINASEKMLATGRFDNSTVGYREMRALARKWPDRVWVIEGATGVGLHLAQRLVSDGERVLDVPAKLSTRVRAMDTGHGRKNDPADAHAVAVVGLRSPGLREVSLDDETVALKLMSERRRDLVRSRTQAVNRLHQILMQLIASGAPKQLTVAQAKALVASVRPRDAVGKARRQLAVDLIDDVVVFDRKIKAMEARLSEAVAATGTHLTEIVGIAAVTAATIIGEVGNVSRFATSNHFATYTGTAPIEASSGEIVRHRLSRAGNRRLNSALHIAAMANKRHDPRGKAYYERKLAAQKGHMGALRSLKRRLSDVVFRVLLEDQARANPGGQMGATLTASAVDQIPKANTSDKPQPGVTAEATPTRRPTKAAS

SEQ ID NO: 289206 - protein, 326 aa, unidentified
MFFIGIDVSKAKLDCSLLLDVSSSKRRAKTVANSKAGVSELLAWCAKQHASNHELHAILEGTGVYHEQAALALADAGVTVSIVNPAQVKDFGRSLGVRTKTDGVDSWVLARYGALLKPRPWAPPAPEARVLQALLSRREAIAQDLQRERNRLEKADATETPASIRQSILNSMVFLEQQLAKLQQDIDDHINKHPNLKADRELLVSIPAVGPQVGNHLLAVIHNHRFHSAEQLAAYLGLVPVERQSGSSLLGRPRLSKAGPARVRAVLYMAAIVGTQHNPHIKALYQRLQARGKTKMSALGAAMRKLVHLCFGVLKTRQPYQPNYAI

SEQ ID NO: 289207 - protein, 335 aa, unidentified
MEFEFFIGIDVSKNELDFAVQRGRELLFHREIANEPAAINTFIRELNQIRGFDLRHAVFCMEHTGIYNNHALGCLYKKKTNICLEAASQIRNTQGNIRGKNDKIDAIRIAGYAYKQRETLRLWKPKREVVQQLAHLAATRMRLLTVKKQLKTPLTAHNAFSAKTVARQNLLICSHSLKAIDDDINRADKAIGQLIMADDVLRRLFTLITSVSGIGKVTAVQVIVATNEFKDIDNPKKFACYSGVAPFTDDSGKIIKKARVSHLANKKVKTLLHLSAIVAIQHNADLKLFYERKVMQEKKNKMSVINAVRNKLILRIFACVNQNRPYEKNYQKSVA

SEQ ID NO: 289208 - protein, 448 aa, unidentified
MDVMFTHGAGLDVHKKTVMACRVTPDPSGQQADGIMELQEFGTMTRDLLALSDWLAEVGVTHVAMESTGEYWRPIYNLLEGNFTVLLVNAAHVKQVPGRKTDKADARWLAKLMRYGLLAASFIPPQGQRDWRDLTRYRTKLVQERRREVNRVQGVLERANIKLAAVATDIMGVSGRAILAALVTGRADPATMAELAKGRMRTKLPRLEQALTGLMRDHHRRLLTLQLAHIDFVDEQIDAVSIESVCSLMELEPSGAVTPPSARAEAVGEVTDTVVPREADSPLSFAQAVTVLDTIPGVDQRGAELLVAEWGTDMSRFGTASRLSAWTGVAPGNDESAGKRRAGKTRRGNRTLRTGLTQLAHAAARTKGTYLSALYQRLAIRRGRKRAIMAVAHAIVVSAFHMLSRHEPYCELGANYFDEQRRNYLLNHLTRRIERLGYHVQLEPVQPA

SEQ ID NO: 289209 - protein, 341 aa, unidentified
MNIITVGIDLAKNVFAMHGVNDNGKPALVKPKVPRADLLPLIAQLPPCLIGMEACSGAHHWARQFRQYGHTVKLMAPKFVAPYRMTGKRGKNDAADAAAICEAVTRPAMLFVPIKEEHQQIILCLHRTRQGFVEERTASYNRLRGLIAEFGIVLPQKVTCLRREIGAHLEDLPGYANLCVGDLLAHADELDKKIAEYDRAIAQAAKEDARSKRLMQRPGIGPVTASAFVASIGNGHDFNNGRQVAAWIGLVPGQYSSGGKARLGRITKAGDSYLRSLLVMGARAVLNSLGDKQDRFSRWARSLQERRGYWRAVVAIAAKNARLAWAVLKYGEDFKLEPGTI

SEQ ID NO: 289210 - protein, 442 aa, unidentified
MEEVIPVKKRSYRTIAIQDVKVDDVVAVLGAEHRAMLAIDIAKEKMVFGIASSSGETLKLVRFEHPRQTREFLGVVDGLKQAGVELDIVMEATGSYGDVLCYQMTTRGLAVHFVDPKRCHDASMVFDGVPSQHDPKACTILAQLHARGLSKRYRSRGDDEKRARSLVDRQRLLARPLRQLVGTLEGLVATYWPELMAHIDLSARTRWPLELLATYPGPAAVAADEEGARVLLRRVTRGAMRAARIAEIVAASRHSLGVPVEPAVEQLVQTTVRTMLHLREEIAKVEKEADAFVAEEAAAGVKHVARMIGTMSALAVFADAGDPTAYKAPAALQKALGLNLRERSSGEHKGKLHITKRGSARARQYLYFAAMRFVRDDAVVRAWFAKRCVGGTKVRALVAVMRKLVLALPHVARGKPFDSKKLFDVRRLDLAAPTHDEVAMAN

SEQ ID NO: 289211 - protein, 471 aa, unidentified
MKKNQKTRADEVIRLLSKQKIRDVKELESYKLSVCHPCSAGIDLGSRDIYVALNPEIAAEHDLPIVHKFSTFTSGLYACRDLLLACGITTVSMESTSVYWINIYDILEEAGMEVCLVNPKKFRMVPGRKTDILDCQWLQTLHLYGLLQGSFHPEEHIRKLRNYMRQREKIIQDRSRYVQRMQKALTQMNLLLVNVIDDITGKTGLAIINAILNGERDPYKLASFRDGRVKKSEQEIAEALTGDYKDDQLFLLELNYGTYRFFEKQLDRIDMQITSLLQHFPLKETEPDAEKPKPSKARKGKNDIRTKLNLNEVLIGITGTDLTNITGLQSNTILQIISEVGTDMSKFPSAKHFASYLGFAPRNKITGGIIISSKTDRLKNHAAQAFKKVVPSISRGKTDLACFYHRIAAKSGTGKAIVAVCRKLAVIFYNTLKHGLLYVEQGEDEYKRKREERERLLVIKLARKHNMILQV

SEQ ID NO: 289212 - protein, 327 aa, unidentified
MAQKMDVVGIDVSKATLDAYALTSQQARQFANDPAGHQGLVAWLQELGVGVAVFEASGGYERAAAQSLRRAGLVAHVVDPKRVRHYAQAAGQLAKTDRIDARMIAAFGAAFLLGKPSGAAGGDDPARQDLAELVGTRQVLVDHRTSLQQQADAVTSAIAKKLLLATLKQFDRQIETSDRQIAAAIARHEPFAALARRLDTVPGLGPVSIAALIAWLPELGQLDRRQLAALVGVAPFADDSGKRTGQRHIQGGRMKLRNVLYMATVGAATRHNPVLHARYRRLLENGKKPKVALIACLRTLLTILNAMVAHQQDWNPTKLPATEPVAA

SEQ ID NO: 289213 - protein, 423 aa, unidentified
MENTAARKRKQVPEGYLIIGVDPHKKRHAAVTITQDFTTRDKFKFDNTREGLETMLRRARTEMVKSDCRGVMFAIETGGHYWRNLAYFLDEQGIPFRFINQFTLKRRREGKDLNRRKNDYRDSEVAAQLLCTGEFTESKIPQGVYAELRTAHNAYRRLVKERTRIINLVKGLLDALFPEFTHVFKDPCGLTSMSVLSICPIPMVIDGMTEEEFVATIEAQHQGRLMRRKLRALHYMARTSIGIEAGAQSVSSEISFLVEKFELIRRHIRIIERTLVRLVDETEEGKYLLSIRGLNYIAVAGLIAELGCFKAYRSAKQMIKMAGSNPTESESAGKRGTHTPMSKQGRPVLRYCAWTSVIPMLRLNPDFRAWAKQRRERPAHANPLNGREVVGAALNRLLRLAFAMVKSQTYYQVSKPELAPVAV

SEQ ID NO: 289214 - protein, 376 aa, unidentified
MSASALCGETDAERTPPPTPPSVDEESSGYDRRFERKLTRVCSTPAPLSLVNGGHIMQTPSALLNIGADVAKHTIVVACSEGGFPVREMANQRAAVLAFLKSLPAGSRIGVESTGTYHELFAEAAHRLGFLVFVLNPKDTRHYAKAVGLRGKTDRVDAELIARMVAHEHTKLHAWTPPTAQQREIDRLIKRRATLIGLREAVEMSLHELGGFADELKALRSRFNQLIARLDLRAKALVEANPERKQNFARLCTISGVGPVVGTALVNTLERVPVKSADAFIAFTGLDPRPDDSGQHRGKRRLSKRGPAELRRLLYLAALSAVKTKPWSSLYEHYRARGLSSTAALVILARRIARTAWSIYTHKTEFDPARLTRSLT

SEQ ID NO: 289215 - protein, 376 aa, unidentified
MIKLRFVGLDVHAETIAVAVAEPDGEVRSLGVIPNRLESIRKMIARLGPVKDLRACYEAGPTGYVLYWQLSNLGVACQVIAPTLVPVKAGDRVKTDRRDAEKLARCHRAGDLTPVWVPDAAHEALRDLVRTREAAKKDQLRARHRLSKFLLRHGKRQPQGIKAWTKKHLEWIKVNVHFEEPALEAALQDYFHEVEHAAARITRLEKSLDEAVAKAPEQLRAVIEALQALRGVAQLTAATIVSEIGSFSRFEPRKLMGYSGLVASEHSSGGKTRRGSITKTGNSHLRRVIVEAAWAYQRRPWLGGYLLRRQRDLALSDEVKEIAWKAQYRLHKRYTKLTAGGKNKNQTVTAVGRELLGFIWDIAVRTERKYQEKQAA

SEQ ID NO: 289216 - protein, 365 aa, unidentified
MSKYIWVGLDVHLDSITAAILEDEAQDPEVVKLSGDLMKVRRLFRRLSKKGPVRACYEASGSGFVLQRVLSRDGFHCEVIAPSLIPRKPGDRRKTDRLDAIMLARLYRSGHLTPVHIPTEDQEALRRLLRLRYTYQVYSKATKLRIGGMLRNHGFVYREGKSYWTKTHRQWLTKLRLELEGPLQTALATELEHLEYIDTQREALDSELERFAHAQPHRENVEALCCLRGVKTLTALTLLCEVDDVRRFRSPRSLMAYFGLVPSERSSGDRERRGPITKAGNVHARRLLVEAAWNNRHRSGADLILKRRRQGQPPDVVAIAMKAQHRLYKKFWRLDERKHRHVAITAVARELTGFVWAILKAVPQN

SEQ ID NO: 289217 - protein, 403 aa, unidentified
MNNVAGIDVSKGKSMVSVLRPFGEVVAKPFSVGHTGSELKELADYLKSLDGETRVVMEHTGRYYEPVARFLHDEGVFVSAVNPKLIKDYGNNTLRKVKTDKADARKIARYGLDNWAELRQHTPMDTIRMQLKTLNRQQSLYAKTKTMMKNNLIALLDQTYPGVNALFDSPVREDGSQKWVDFATAFWHVDCVRNMSLTAFAERYRKWCKRHGYNFSQSKAVEVHAGAQDLIPMLPKDSLTKTMVRQAIDALNAVSASLERLKAEMQALAAQLPEYPVVMAMHGVGDSLGPQLMAELGDVARFTHRNAITAFAGVDPGAEQSGTHEAKSTRVSKSGPPELRCALFLVMDCLLKTMPQDDPVYRFMDKKRAEGKPYLVYMTAGANKFLRIYYGRVKEYLAQLENS

SEQ ID NO: 289218 - protein, 360 aa, unidentified
MQQHSTTHSVQITGQQTGVTIGLDLSDRYSSFCILDADGTVAEEGRVRTTTPALQRRFGTLAPCRVVLEVGTHSPWMSRLLAGLGHEVVIANPRAVRLIAESDRKRDRTDAERLARLGRADPSLLAPIRHRGQQAQEDLALVRSRQSLVRARTALINHVRGAVKAHGERLPACSAPAFHRKGAAQLPAGLRPALLPQLELIAQLSSQIAAFDRQVEALSAERYPETALLRQVAGVGPLTALTFVLTLEDPARFRRSREVGPYLGLTPRQRQSGARSPQLPISKAGDRYLRQLLVGCAHYILGPFGPDCDLRRWGLRYAPPGARNAKHRAVVAVARKLAVLLHHLWVTGEAYQPVRQAQAA

SEQ ID NO: 289219 - protein, 343 aa, unidentified
MDYYVGIDVSLELSSICLLDAAGRIVREAKIASEPEALTAFLASLGVPLTRVGLEAGPLSQWLYAGLQKAGYEVVLLETRHVKAALSAMIVKTDRRDARGMAQLLRMGWFRPVHCKSPPAQEVRALLTARKLLQAKLRDVELSLRGVLRGFGLKVGEISKGQFATRVRTLTAGHHMLEKIAEAMLRAREALQTEFARLHRAMLAIARADEVCRRLMTVPGVGALIAVTFTSAVDRPERFSRSRAVGAHFGLTPKKYQSGETDITGAVSRVGDPMVRTALYEGAHILLTRAVRFSSLKRWALAVAQRRGMRRAKVALARKLAVILHRMWIDGTPFRWGREGAAA

SEQ ID NO: 289220 - protein, 325 aa, unidentified
MKNIIIGIDISSKTLDICVKKEEEVEHYVIENSLKDVKKFLKPFSETNTIIAMENTGRYNWNLYDALENFNFKVYVINPLHLSKSLGLVRGKNDKIDAYRIALFIEKNKDETRPWKPTSKSVKKLKILITERTSRIKIKKIFLKQQHDYKLMKNIGLDKELLKLNKQMIKKIEEQILMFEKKIEFIIKENKELEKQTELIRSVPGVGKVLSWIMIAKTEGFTKITEPRKMACYSGVAPFEHQSGSSIYRKPKVSFYADKSIKSVLHLGALSAIRLDNDLGIYYRRKVKEGKYKMLVLNAVRNKIIHRIFAVIRNQTFYENRLVVS

SEQ ID NO: 289221 - protein, 427 aa, unidentified
MDRQTTSKQTGWGGYRYFLGLDWAKDHHAVVTLAPNGQRVLDLQIAHDAEGWQGLRKKLIELAGADLSVVAATVETTCGPAVERLFELGCAIYPINPKAGQRYRERKAPCGGKSDHLDAWSFADALRTDGHAWRKLSPEDPRVQELRLLCRDERHLIGQRTALVNQLRQALLEYYPAALEAFDDWTISPPWDFIVRFPSPAELTRAGKRAWEKFLHTHQLYRPSTYAKRLEIFARAQQFCGTEPVTKAKSLLAVSVAKQLKVLQQQLNDYRSRIEPLFAEHPDHDLFGSLPGAGPTLAPRLLSECGQDRQRFEDHEALQCYGGTAPVSFQSGQIHVVHFRWVCNRNLRAAVHLWADCSRKQCTWAQVYYQQKRQEGKSHACAIRCLGQRWLKILWKMWQTRQPYDEQRHTRDQVRHGSWVLALETAK

SEQ ID NO: 289222 - protein, 361 aa, unidentified
MKGLQINELNFDGQNIYVGIDVHLKSWSVAILSEHSVLRRFSQSPEPEALHKYLARNYPGATYFSVYEAGFCGFWIHEKLTDLGINNIVVNPADVPTMSKEKLRKTDAVDCNKLARELRSGSLEGIYVPGTETLEMRSLIRLRNLIVKDSTRAKNRIKSLLRFHGVEIPEEFTRCSIGCWSKRFLNWLHSLELSTEYGKKTLELHLEQFIRLRQMLLQETHAIREISRKEPFHKQIRLLTSVPGIGITTAATLMVEIDNISRFSNAEHLASFIGLVPMCHSSGDNDVVGDITVRRHFMLRYLFVEAAWIAIRKDPAMTMAYSEYRKRMNPQKSIVKIARRLVNRVYFVLKQEKEYVPCVVK

SEQ ID NO: 289223 - protein, 342 aa, unidentified
MSIVIVGIDLGKNSCSIVGLDSLGTVVVRRRLRRDSVIAFASKLPACIMAMEACCGVHHMGRSLAALGHEVRLMSPEYVRPYVKAQKNDDRDAEAIAEAATRPTMRFVELKSEEQLDVQTLHRVRDRLVCERTSLTNQIRSLLLERGHVVAQGHARLRHLLADLLDTATCSLSARMAFLLGDMRTRWDELDRRIAAFDAEFSAMARTDERARRLTSIPGIGALNATALVAAVGNAATFTKGRDLAAWLGLVPRQATTGGKPKLLGITKRGSRYLRKMLIQGARSAMPTLAKANTAIGAWLRALLVRTHPNIAVVALAAKMARTVWALLRHGRNYEAVPQAAG

SEQ ID NO: 289224 - protein, 371 aa, unidentified
MSDYREAFVGIDVAKLKNALAIADVGREGEVRFFGEVDASDLSMRRVIQRIAGRFDHVHFCYEAGPTGYGLYRLIRSLGHECMVVAPSLIPRKPGDRVKTNRRDALGLARLLRAGELTAVWVPDKAHEAMRDLVRARAAAVETLRVHRQHVSAFMLKHGRIYPRKKGWTMRYLRWLQEQQFDHPAHQIALQEMVEAVRISKERVERLERAIEEFVPAWSLAPVVRALQTLRGVELIVAVTFATEVGDVQRFESPRQLMGYLGLVPGERSTGETVRRGGITKAGNGRIRHMLVESAWTYRHPPRVGAKKLYRLEQASPKVREIAWKAQTRLTARYRMLSVRGKKTTVVCTAIARELAGFMWAVAREAQAIRS

SEQ ID NO: 289225 - protein, 344 aa, unidentified
MNELMRIGVDLAKNVFQVHGVDRNERPAWCKRLPRDRWLQSVAEVAPPGCEIGMESCSGAHHWARQLQARGFRVRLIAPQFVKPYVKSNKNDANDAEAICEAMSRPSMRFVSVKSVEQQDIQAAHRVRASLIEQRTAKANQIRGLVAEYGLVAPKELLSLRRAIPRWLEDADNGLSDRFRHLLDGLWHDIRALDDRVTELDRDIAAIAQSDPDAVRLQQLRGVGPIIATALVAAVGDARQFANGRQLSASLGLTPRQHSSGGKERLLGISKRGDAYLRSMLVHGARAMLRTAKGKDDRLSRWACRLAERAHPNVACVALANKTARMAWAMLRHGTDYQPNLAAA

SEQ ID NO: 289226 - protein, 374 aa, unidentified
MSEFHAYVGLDVHKDSISVAVAEAGRDGEVRHWGVIRNTPDAVAKLARKLVERHRAVEFAYEAGPCGYTLYRHLTASGLACRVVAPSRTPRKPGDRIKNDTRDAVALARLLRAGELTFVWVPDEVHEAMRDLVRARQTAANDVRQARAHIQMFLLKHGIRYLGKPWGFRHRVWLADRQFPHAAQQLALQSYVNRLDQAESRKRQLEEQLAELVPAWSLAPVVTALQALKGIQLVIAATLVAEVGDFSRFASPRQLMAFLGLVPSEHSSGRRIRPGGITKAGNVAARSLLFEAAWSYRLPAKVGQAMWLKQRGIAQAWRDIAWKAQVRLSSRYRKLVGRGKKSNVAVTAVARELLGFVWAIATSSMPAPPKASPM

SEQ ID NO: 289227 - protein, 406 aa, unidentified
MFYLGIDVALNTHRLVMLDDNGERVSSGISFQNNTADFEKVLSKLKELSINSDNSICGLEATGNNWENLYCFLTSNRFKTIVLNPHQTNKFREALRKKAKTDDIDAFVIAGLLRSNEFASSYVPEDKIQTLRELTKLRYEFIKDHKNYQRQVLALLNIIFPEYKQTALKNPFAIASIAIFKSFATAKHLSIAKPKHIEKIVRSIKGNNFNVKEIENLISIAKTSVYSGRCQESRALTLNILLTQVENFDKSIQQLEEQVNLILSPESSDDINSFPGSNLLTIPGVGPKTLAAILSCVGESGQAFSSGVKLIGHIGFFPQIYESGETKRANRLCNKGPAYLRHALYMASVACLKHNLQLRNLYHTKISQGKKPKQALICVAKKLAHLCLSMLHSGQDYNPARVFSYV

SEQ ID NO: 289228 - protein, 335 aa, unidentified
MALYCGIDLHSNNHVVVVIDEQDRRIFERRLGNDLSLTLRALEPYQSELAGVAVESTFNWYWLVDGLQAAGYPMRLVNTTAVQQYAGLKYTDDRYDAYWLAHLMRLGILPTGYIYPKEQRGIRDLLRRRMQLVQAASKQLISLQSQIWRQTGERIASSRLKQANFVVDLPGAAQKLAAQSTLQVYRAIQDQLELLETVLLQAIKRRPDFQVLTTIPGVGAILGMTIALETGDIRRFPEVGHYASYCRCVKSEKVSNGKKKGEGNAKSGNKYLSWAFSEAAHFAVRYQPLAKRFFDRKQRKTNGMVAIRSVAHKLARAVYYMLRDQVPFDEHKLFV

SEQ ID NO: 289229 - protein, 326 aa, unidentified
MSTILGIDVSKDKLDLVLLSEEGKFHKVIGNDPAGFKRLDKWLISRHADRVHVCLEATGQYGDEVSEYLYGQGHDVSVVNPARIKRYGESKLHRNKTDKADAELIAEFCLKEKPVLWEPLSPDLKHLRALVRRLRDLQANYQQEESRLSSGEKDAWVIQDLTVHTEYLKASIEAIEAEIQNFTNQTPGLKEKQELLVSIPGVGKKTSARLLGELGEISRFENAPQLAAYAGLNPKGFSSGSSVHKKTRISKQGRSELRACLYMPAIVAMTHNPVIRALKERLQERKLPNMAIVAACMRKLLHIVYGVLKSQMPFDPEYDRQFNYSN

SEQ ID NO: 289230 - protein, 339 aa, unidentified
MEYCGIDLHQTYSEICIIDDEGEVMERSRVRTSKPGLTRFFGRRERMRIAIEAGGSSPWVSRLLGELGHEVVVCSPRRVRLIAESTLKNDAIDAEVLARLLRMDPAFLKPVRHRSERAQLLRSNLLVRRSLVEARTGWINTVRGLLRSFGYTVPGKAPGTFVVRVRRVELPVELRRVIEPLLNQLEQVSGEIGRCDGELAELARELPEVERLRQVPGVGPITALYFVLTIDDPHRFRRSRDVAAYFGLRPSMRSSGGVSHYGRITKEGDPEMRRLLVQAAHAMMLTRADCSLKRWAEGLKQRRGAGKAAVALARKLAVLLHHLWVSGEEFEAFPKSLAA

SEQ ID NO: 289231 - protein, 473 aa, unidentified
MARKKGKDPAGIGGPGLTGEPAGVSDEPAEVIARAAAIDVAKGSGMVCTRVPHESGPRRRVQRVWQVSARYSEIAALMAELAKLGIQRLVLESTSDYWRIWYYLAEAAGLEVWLVNARDAKHLPGRPKTDKLDCVWLCKLNERGMLRRSFVPPEAVRDLRALTRLRSRLAQDQARHQSRIEKILEDALLKISSVISDLMGASGRRFLAALVAGERAPDKLAALGDRRLKASPAQLEEALAGRFRDIHALEIGMLLELIDDITAKMARLDAEITARLARIPGLAPACAGCGEIGGGHAPSCPRPGAPVLSVIERLDELTGIGTGAAQVIVAELGTDKTTFPTPGHAAAWAKLASRTIQSGSTSKDGRTGKGNPYLRAVPGRAAMTAAKTDTYLGERYRRIARRRGKQKAIVAVSRTICEIAWMIITDPSVRFSELGPGYYARLDAGRQTRNKIRELERLNPGMKVTLTPAATAA

SEQ ID NO: 289232 - protein, 451 aa, unidentified
MEILYSNCAGLDVHKKTVKACLLTQMSHGQPHKEFRTYLTTTEELLKLSDWLKEQGCTHVAFEATGVYWKPVFNLLEGSFELLVVNAHHIKAVPGRKTDTKDAEWIADLLQHGLLKASFIPSAPQRELRDLTRYRVRLTEEKAREVNRVQKTLEDTNLKLGDVVSDIMGKAARMILHALADGETDPARLAALAVGRVHASQEQLEAALTGHVTDHHRFLLQEHLTQIHHLEQAIDRVTAEITRRFTPPSPPEETTVSQKEDETTKERASDPGSQPEANVQSQATLSWAQAVVLLCSIPGISERTAIGILAEIGTHMQQFPTAAHLASWAGICPGNHESAGKRLSGKTRKGNPWLRCLLVQAAHSASHQKHCYLAEQYRRIAKRRGAKRAAVAVAHSILVIIYHLLSNQTTYQEKGETFFEERDREGREKRLVRQLSSLGYHVELQPIALAG

SEQ ID NO: 289233 - protein, 408 aa, unidentified
MSRVVIGMDPHKRSATIEIMAGDESILGGGRFATDAAGFAAMLARVRPWPERVWAVEGCQGIGRHLASRLLADGEQVIDVPAKLSARMRVFATGQGRKTDATDAHSVALAATRMSGLRPVADDQQLAVLRILADRRRALGEDHTRMVSQLHHLLLELIPGGAKKDLSAAQAKALLAKVRPRDLAGKARRRVAAELISDLERAYQRKKAANKELNEMLAATGSTLTSLHGIGPSGAARLLAEVGDVTRFPSKAHFASWNGTAPIDASSGDQIRHRLSRAGNRQINRVLHIMAVVQLRNPTEGRAYYDRKVATGKTPMEAMRALKRRLSDVVYRQMITDARAAVTGPGGHLGAATGSSAAGLHPSTGTSEKSLPGPAANDPTPAKPAHSPGRSRRPPSPPDRSRRQALSA

SEQ ID NO: 289234 - protein, 446 aa, unidentified
MKKSSRMSVIHPHAAGVDIGAEFHVVAVPPDADAAPVRTFQRFTGDLHRMSGWLKTCHITTIAMESTGFYWLPAFEIPEAAGFNVFLVNARDAKNVPGRKTDVNDAQWLQKLHSFGLLRASFRPEHDISVLRSYLRQRERLTEYRAAHIQHMQKALMQMNVQLHHAVSDITGVTGLSIVRAIVSGERDPSVLIQYRDVRCKKTPEVLQQALTGNWQPEHLFALEQSVAFFDFYQEKIRECDDQIETSLLQLSTGTEEPEGVLPSARHRTKQPNQLSFDVRPLLWKITGADLTQIHGFGPYLALKFVAECGTDMNRWPDASHFTSWLCLSPGNKISGGKVLSSKTRRSSSRIAAALRLAATTIGRSDTALGAFYRRLSSRIGKAKAVTATARKLAILFYNALKYSQKYVDPGADYYEERYRNRVLDGLKRRAKSLGYSLQQDPELCV

SEQ ID NO: 289235 - protein, 345 aa, unidentified
MSTITIGIDPHKASHTAVAVDEFEFVVDEICIRSCPTQAVVLREWADGFRDDRIWAVESAQGLGYLLSQQLISAGETVIDVPAVRASRVRTLSTGRSQKNDPNDARSVAIAALRASDLAEVLPDDHTRILRLLAKRHRDIGRAKNRECCRLHSLLLEMFPGGADYRMSSMTRVNAMLDRFTPVDSMGRQRLEIAQDFTDGIDELTGRLKTSKRRIAAAVKASGTSLIEVCGLGPITAAIIIGNTGNIDRFPTKARFASYNGTAPIDASSGPKVRHRLNPRGNRQLNWAIHVVAISQLRHDTIGRAYYDRKIEEGKTPKEAIRALKRRLSDVIYRHLVNDAQHLHR

SEQ ID NO: 289236 - protein, 391 aa, unidentified
MPMYFVGIDISKYKHDCCIISAADQQIISKFTITNDKDGFEQLLTALNSLSNPEDIKIGFESTAHYALNLELFLENAHHSFMEVNPVLIKEYKKSTTLRRTKTDSVDCESIARWLITVEYKPHSKGFYHAYSLKSLTRLRDRLIRQRSFYLVKITNVLDHTFPEFKPFFNEQLSKTALYLLENYGSAEKMARMNSASYDKLRCISRGKFSIQQFLRLKELAANTVGVNNSIFDLELNTLLTLYKSLSDEINTLETEIIKLIEEVHPHYMSIPGIGPISAAVIYAEYGDISNFSNPGQMLAFAGIEPGINDSGTESHGGRMVKHGSSQLRYVLLNACLPLIRFDLTFATYYEKKRAEGKKHRVAITHVAKKLIRVIYALERQDVDFNAQKLR

SEQ ID NO: 289237 - protein, 402 aa, unidentified
MSYYVGCDWASTAHQICVINAHGQIVWQNEVPHTAEGCAALRRRLQRFGAPADVPVAIERPSGLIVDLLLEWGHPVVPIQPNALKASRSRYRISGAKSDASDAFILADVLRTDGHRFRAMNPVADETRALRTLVRTRDDLVATRIGLANQLRAVLEGFWPGAAQVFADIDSPIALAFLERYPTPEGAEHLGEKRLAAFLGRNSYCGRRPARELLERLRRAPTVIVGEANTEASGEVVRALVTVLVDLVAQIQKLTSAIAQAMRVHPDGAIVMSFPRAGCTNAAQILAELGQERLRFPSVERLAAEAGVVPVTVESGKHRGVTFRWACNKRLRRAITIFADNSRRASPWAAQIYQRAQARGCDHPHAIRILARAWLRVLWRCWQSSTPYAVSNHGSAQRLSVA

SEQ ID NO: 289238 - protein, 357 aa, unidentified
MKERRDYILRNEKVFVGLEDSKKTWSLCVRSGGMIVHETSMPAQYEVLRNYFHNKFPECQIQVMYEAGFRGFELHDQLVADGWECVVTPPHTVMEEKVQRKKNDRTDCRRLAKNLENGDYHRCFVPDKELREDRQISRTCGQVQADITRVCSRIRRMLEFHGLDNGLPPGRWSGLAYIRLRQHLGEMEMSNSLRFSFEVMFRELENLRQLKKELLLQLRKLARSDRYKGSVRLLMSAPGIGMLTAIRLTLEWGDVSRFGRKEEFASFLGLVPSDYSSGDQEHRGHITKQGNRSVRRWLVESSWVAIRYDPVLLEKYRRVLRNCGSKKKAIVAVARKLAIRLRRILLSRELYALGVVE

SEQ ID NO: 289239 - protein, 331 aa, unidentified
MAPTICVGIDVSKLTLDIAVLKDGVKAFSTKIDNSETAIKAFLSTMRSDHKATRDNTIYCAEHMGIYGKFLVEVLIAKQVRLCLESPLQIRLSLGIQRNKSDVLDAIRIAEYAYKHHASLRLWEPPRPPVQKLKMLMTIRKRLIKMGAMLKNNKKVEAYFLAAPSRKEVDEFTKQTFNAIKADVDAIERQMNEIINFDPHLHNLAQLITSVPYVGKIIAIEILVHTNEFKDISCPRKFCSYCGIAPFAQTSGTTLKKRPRVSHIANKDLKTVLHLAALGSTRPGKSPFKAYYARKVGEGKNKMSVLNAIRNKIVTVIFACVRDKKLYQETQ

SEQ ID NO: 289240 - protein, 370 aa, unidentified
MKKKVLYVGLDVHKNTIDVAVATSRSNGTVRSHGKIDSTLDALNKLIKKMKGRDVELRFVYEAGPCGYQIYRHLVSKNISCSVVAPSMIPKRSGDRIKTDRRDAINLVRLFRAGELTSIYVPTVEDEAIRDLIRCRDDIRRFERKARQRLLAYLLRHGYQYSGKRHWTKGFYNWLATIKFHHPAQQIALQEYIDAANECSQRVKRVTQQIQAHVEQWSRAPFVKAYQALRGVSLIVSATVVAEIGDMNRFPTPKQLMAYLGLIPSEHSSGKKVRRGSITKTGNSHVRRVLVEASWSYRMPARKSLILLKRQQGLPKSVCDISWKAQTRLCARYRRLIARGKSRQATVTAIARELGAFMWAIDKQMQLTIA

SEQ ID NO: 289241 - protein, 340 aa, unidentified
MKKDKRFYLGIDISKPFFDASLLIVDAGTKQEVQPERFANDAAGLRLFERWLKNYSVSYDSNSLVVIENTGIYHRPVWKFCSTRQLPIHIGNAAHIKWSQGITRGKSDRIDSSRLCAYGYRHREELQCTAALNPVFLKLKDLMTNRIRLLQQLTGLRSYLQELKKVSDKETAQLLQRCNKAALEGFKKSLRQIDDEIKKLISQDPSLYKNYRLLQTVPGIGHWIAVYLICCTHNFGNDISGKQLACYAGVAPFEHSSGISIRGRNRVHKMANKDLKKLLHLAAMATIKYYDEFKRYYNRKKEEGKHSMCVLNAIRNKILLRAAAVVNNQQPYVNYSTIAA

SEQ ID NO: 289242 - protein, 439 aa, unidentified
MTNKDTQGNDYISLQHNSKFKYMSKMEKKQIEFEQVVERGCGIDVHKSVIVATIRGTGIKETTRTFSGFTESIEEMRDWLKDEKITHIAMESTGVYWKPVFNILEADFEIILVNARHIKNVPGRKTDKKDSKWIAKLLLSGLLKGSFIPKKPIRELRDLTRYKRKIVGQIASEKNRIQRILEDANIKLSCVVSDMSGATATKIINAMIDGEDDIKELVKFRHGKMQSTVEDLAASLKGHLTAHHKFMLNIIKKSIEEKERTITELDKQIESHLKANELELDAELLATIPGVGKEGAAYILAEVGNDMTQFPNEQHLASWAGMSPGNNESAGKKKSSRTTHGNKYLKTMLVQFAWASTRTKNTYLRSKYDSLVVRRGKKRALIAVGHKILIAAYFILKDKVVYKELGVEFLQDKKKDKQISRYTKLLKELGVEVEIKKVA

SEQ ID NO: 289243 - protein, 358 aa, unidentified
MRFIIGCDYHPRFQMIAILDTTTGEVKVLRLEHENGEAKAFYLSLPKGTRVGIEATGSTQWFERLLGECGHELWVGDPAQIMARVVRKQKTDERDALHLLDLLMTNRFPRVWVPCPADRDARQLLQHRQKLVRMRTAVKNQLHGLAMAQGLCRKHKLFSQAGRRLLESLELGPWASRRRNELLTLLDQLDPQIAELDKAVEAEAARRPEVQLLTQQKGVGVITGLAFVLTIGPVERFARSRQLVSYLGLNPSEGSSGDHQYLGHISKQGNSMMRWLLVEAGQTAARLDVKLSRVYKRLKFRRGANVAKVAIARRLAVRMYWILRPAREAAPPVRMSGSSTQSMVDPRSGSVGTTPSSL

SEQ ID NO: 289244 - protein, 353 aa, unidentified
MEQFIGCDAHKKFSVFVAVNEKGQAGEALRVAHDRELYREFLARLPANSAIAVEASGSYSWLVDEMERLGHRPKLCNPFEAKRRMGLTHKTDKLDARGLAILLRNGTLPEVWIPPSELRDQRELLRLRIFLVRLRTRVKNRIHGTLSRHNVQVPGADLFGVAARLELGTRLPELPEHSREAVEQELATLDFLETQIESAEQRLEAIMKVSVEADLLKTLPCVGKILSMVLMLEIGRVDRFPTAAHLASYAGLVPRVHSSGGHTRMGQVCGNVNRNLKWAFVETGNLIVISQRRLAGTHVVRLYQRIKRAKNHQKAVVAVARHLAEAAWWVLTKQEVYREPQGPRQQALSSTHG

SEQ ID NO: 289245 - protein, 343 aa, unidentified
MNITRVGVDIAKSVFHVHAVDRHDQTQWQAKLRRCQWLGALSKRVPPGAEIGMEACASAHHWARELHKRGYRVKLIAAQFVKPYVKSNKNDVVDAEAICEAMSRPGMRFVAVKTVAQQDTQAAHRIREGLVGQRTAKANQIRGLVGEYGIVTPVGIQKLRQALPQWLEDAQNGLTDDFRTLLAGLADDLRYLDNRVEHLSEQIRQCVDKNPVARRLLELRGVGPLTASALAGALGDGKSFGKGRDFAASLGLTPRQHSTGGKARLLGISKRGDGYLRKLLVHGSRAVIRHAKNRDDGLSQWVNELSTRKHTNVVTVALANKTARIAWAIVHNDMAYEPKLAAG

SEQ ID NO: 289246 - protein, 372 aa, unidentified
MNYNTVYVGMDVHKESFTLCSCKYEDEKASHYQRTPASYKNVLRYLAFLRTIYGEYTRFVCGYEAGCLGYSLYHQLENFNVECVILAPTTMLEQRSKRRIKTDKRDAEIIARSLAQHNYSPVHIPTETDNQTKEFIRMRDDHKAELKKIKQQILSFCLRQGYQYDGSGNWTAKHVKWLRSLKTEGLYKEILDEYLLTYTILTDKLNRLDQRIEELASKEEYKESVSKLTCFLGIKIHTALSVIVEVGDFQRFVSARKFAGYLGLVPGQHSSGDDRNGLGITKAGNTHVRRLLVESAQSYTRGKIGYKSRVLRSRQAGNSPQIINYADRANERLRRRYYQMVLKDGKKYNIAKIAVARELACFIWGMMTDNIY

SEQ ID NO: 289247 - protein, 407 aa, unidentified
MDVVHPKCAGLDVHQQTVVACARVVSGASVHHEVRTFGTTTQDLLALSDWLTAHGCTHVAMESSGVYWKPVWHVLGGHFELVLANAMHIRNIPGRKSDVSDATWIADLLAHGLIRGSFVPPEPIQELRDLTRTRKQLVREIAQHTLRVQKTLEHANIKLTACLADILGVSGRAILQALVEGERDPERLADLASERVKASRAELVAALHGRVTPHHRFMLKLHLTQIEALEAAVREVEARLGDVLAPFRAAVDRLITMPGVSETVARVIVAEIGFDMTHFPTAGHLVSWAGLCPRLHESAGKRLSNRTRSSNPWLKTTLVQAAWSAARKKDTYLRAQFLRIKSRRGPKKAVLAVAASMLTAAYHMLKHDVDYRDLGADHFDRRDKAKLAKRLIARLHDLGLTVEVRAA

SEQ ID NO: 289248 - protein, 420 aa, unidentified
MVSIASEEAGWKRSSSGPRGWTSIKERVTACVRVPAEGGEREQHVAEFKTTVAGLLTLRDWLAAHRVEQVTMEATGVFWKPVWAVLEDEFECRLVNARHVKQVPGRKTDVADAAWLCQLAEAGLLKASFVPPKPIRALRNLTRYRKTQIQERAREANRLHKALEDTGIKLDCVASDILGKSGRAMLEALIQGTTDPEVLAELARGKLRVKIPALREALHGRFDHLHAVWIGSILAHIDFLDEQIAGLTETIGEQITPFERAVELLCTIPGVQRRAAEVIVAEIGVDMSVFPTAKHLASWAGLCPGNDQSAGKRRSGTTRKGSKWLDWALEETALAAVGAKHVYLAAQYARLKPRRGHKKALGAVKHSIIVACWHMLTTGELYNDAGGDYFTRLDPDKQTRRLVAQLERLGHVVALQKAAA

SEQ ID NO: 289249 - protein, 320 aa, unidentified
MGEDDLKNSSEHFIGIDVSKDHLDIAIRPTQEKLHVLNNDEGVGTVVERLRQLNPLLIVLEATGRYHRLVLGQLLAAGLPAIAINPRQARDFAGATGQLAKTDRIDAQVLAEFAEKIRPEVRSMPDEATQELEALSTRRRQLVGILSSEKNRIHTAPKAIRPRIQKHIHWLEKEILQLDKELDRRIRSSPAWREKEDLLRTCKGIGPVTTHTMLSCLPELGTLSGRRISALVGVAPFPDDTGNHKGRRHIRGGRLDVRAVLYMATLAAIRHNHVIREFHRRLIAAGKAKKVAITACMRKLLITLNALVRDKKPWQPDFVS

SEQ ID NO: 289250 - protein, 417 aa, unidentified
MSNSVARKLARFKPGYLYVGMDLGLDNNIAKVMDERARVIGTVRFTHNQAGYAHLADRLTYYVRRHTASGVVVAMEPTNYFWMLVAAELDRRGIEYYLVNAYTVHQHRCGDNLDRSKDDPRDAFTVGDLLRTGKYTETRLLRGDYAELRQYAVLHERLQTDIGRQKTILRNTVGVVFPELTTVFKNLAGEAAMAMLWNHAAAAAIRQMTEDEFIAAVRADCQCRRLMVSKLAKAYKLAAVSVGLADGIEALQHSVRSTLKQLRLLETEAASVRALLIRTFKRLPESKPLLTLHGLGVVSAAIILAEIGNPQDYRHGAQLVKLAGTQPAPNTSGRKTYSPTPMSRQGRSRLRTVLYFACMRLVQIDPDFAQRYEQLQKRDKNPLTKKQALGALMNKLLRILWALMRHKGSYKSATQAA

SEQ ID NO: 289251 - protein, 411 aa, unidentified
MNPVVGLDVSKGESQVQAYLDKGKPYRKGFKVSHTLEGLKELFDFLEEVKGKTGIQPPVVLESTGHYHSPVVYYLENRHYLLIIVNPLVSYRAKSSSLRKVKTDPIDARHLCELYYKEDLEPYKKRGIQLLNLRNLTRQHENVTGIYVQTKLLFQSILDQVFPEYRGVFGDLHSIVSLKTLLEYPSSEDILMASEEQLATTINDLCKSRSLQWAKDKASMLKAAAARNPFEKTIYKSHLLSLNMYIDMLLQYKGHLSKLETEIDALAKEIEEYNIIKSIPGIGEKIAATIISEVGEIDRFTSPKKLVAFAGIDPSVFESGKFRATQNRITKRGSSRLRHALYMAVGAAIRDKRKARTDEQLLPRNKRLREYYDKKREEGKPYKVTIIACANKLLHWIYALLKNKSTFQDIA

SEQ ID NO: 289252 - protein, 441 aa, unidentified
MRVVGLDIHRSFAEAAMIDEGGVRQLGRIDLVRERVIAFAKRLGKSAEVVVEATGNTMAVVKLMAPHVKRMVIANPLQVRAIAHAKVKTDKIDAAVLAKLYAAGFLPEVWQPDEATEQLRRQIARRATIVQSRTRVKNRIQSVLHANLILPYKGDLFSGKGRKWLAAQPLDEDQRSTINGWLAELDRLAADLAEVDRGVAQSGLGDERVRRLMTITGINLTVAVGLMAAIGDVTRFASAEKLVSYFGLNPRVRQSGDGRAHHGRITKQGRSLARSLLVEAAWAAAATAGPLHAFFVRIKARRGQQVAVVATARKIAVLVWHLLTNNEDYAFGRPALHQAKLRQMEIKAGLPSKRGGNTPGRARDYNIKSMRDTERAFVAQAEAAYVRFIAAWSERPKKKPADPKQRGARAPQMRSDSQGGAAGIPSSSPLLATRTPARPKA

SEQ ID NO: 289253 - protein, 420 aa, unidentified
MSEDQPEIQYAAFLAIDWADQKHVWSMQEASSSARERGDVEHMPEAIEAWIAQIGQRFAGRPIAVAVEQTRGALVFMLSKYEQLHIFPVPPAMTANLRKAFYSSGAKNDPADADLLLDLVQSHREKLRRLSPDTEATRRVQNLVEERRKLVDEKTAQSNRLEAHLKIYFPQIPHWFGDVDSPLVCALLERWPTLEALQKARPETLRSFFRKQHCRKEELIESRITAIAEAESALKDRAVVEAKVAVVKVVVQLIQVLHEGIEGLNRQIQEAAEAHPDFFIFDSLPGAGVVMAPRLLAAFGSQRERYQNAAEVQTLSGIAPVTESSGKSSWVHFRFACSKFLRQTFHEFAAHSIPQSPWAHAYYELQRRRGKKHHAAVRALAFKWIRVIYRCWKERVAYDEKVYLAVLAKQKSPLLAATER

SEQ ID NO: 289254 - protein, 333 aa, unidentified
MNYVGIDVGCKELVMAVSIKGQCRKTQTFENTGSGHKLIIKQLSKLKENAQVCIEATGIYHFDLAVALSRAKGVELMVVNPQVSHSFAKVLMKRSKTDAIDAEILATYCERMPFEPWQCPADAFISLRAISRRIAALSKLKSQTKNQRHALTSTNDTPDIVIAHTDDLIIVLENQIRALRDSALSLIAQEDDLAEAFRLITSIKGIAEASGIQILSELMLLPRDMNQKQWVAHAGLAPRHFESGSSVSKKPRISKAGNKYIRQALYMPALVATRHESHIKAYYTHLIEDNGLKKLQAVCAVMRKLLHAIHGMLKSKQTFDGSRFYAFPNKVQT

SEQ ID NO: 289255 - protein, 530 aa, unidentified
MPKRMLGVDLGINAPCVAVGLDEQGTEVLEATRFELSFEELEWVEQAALRDAKPGTKLHVVMEKTFPSCEYVSGFFASRGHKVSYAKPDQVKEGRKFLSRKVKTDARDAWVMARLPILDPRQLERGYQAKPALQELKTLVSHRQSLVSQLTYLKNQVIRYANTVWPGLNQVFGSFDWNHARAFVRELEPKQVVELEEAGVAQFLREKGRITAKRAEQLAAQLIPLAKRTLGLQSLVETSWLELHRQHTIQLIGQVELLEERIEAKEQDIALSYVKADPEQYLLSIPGIGANTAPTILAYLGEVERFATNRKAQGFVGLYPETDATGLSDRKGTSLSKEGPAPLRRDLFLVAEAFRRCDPRGAQLYYDQMVNKGKHHISALCVVANRLVIPRIVAVLKAQRPYELRDLDGNATHKQEAKELVAQFHVSEQVRRRLRSRKRPASNQCSETNSADREMPGRPSPKITSELEAPRNGRAPRLEDLTSNRLSLTKDQLAMMVFRNVDRLLNSGGTLEEIRFELNEEATSFFKKGG

SEQ ID NO: 289256 - protein, 357 aa, unidentified
MKSKIKQLDFKGEKIYTALDVHKKSWRVTTGCKEFELEHYSQNPDTKLLIRHLTKRYPGAKHLVAYEAGFCGFGIQRFLKEEGIDCMVINPADIPSSNKEKRRKHDKIDSRKIYKRLAAGDMEAIYVPQKAMEHARSLVRQRSRIVQDQTRCKNRIWGLLMFSDVAADIDKPRQYWSRKFIESLKQLHCGSEALRQALDLAIDEYMLTRQLLTTATKKVKELSASKLFAEIQEWLRSIPSIGLINAMVIHTEIQDIWRFKTLDHLCSYAGIVPDLDSSGDKDKKTGITHRSNNYLREAIIESSWVIIRKDPAMLMLYKTYCARMNENKAIIKIARHLLSRIRFVWSNQTKYETGIAA

SEQ ID NO: 289257 - protein, 341 aa, unidentified
MTTTIFDYYIAIDWAVENMAIARMTKKSNKITVIDVPSDVAELKIYLKQLKGTKVLTFEETTTSQWLYTALKAHVDRLIVCDPHRNKLLNEGPKNDKIDASKLVRLLKADLLKEVYHSNDDFLYLRRLVSGYDDLVKTGVRLKNQRASFLRACGCKDVKNTTVKLNAPNDNFVLDCLNRQISLYKEEKAGYEKEFKRLAQKYPAIRHQQSLPGIGPINAVKIVALVVTPHRFGSQGHYWSYAGLIKHEKTSGQRSYGKRSPRYCRQLKGVYKTSVKAAIGGNNPINDYYQYLLKEEGLPEYNARHKACRKLATLSWGVFKSGKKYQPYRRDTATNTKQSGL

SEQ ID NO: 289258 - protein, 408 aa, unidentified
MRTTVGVDVGCHRHRVAIADPGGKIVEEFDLPARWEGFRDFFARLEYYRRNYGVPVVVAMEGYNGYARPLDREIQKRGYTLLNVNNLKLRRFKELFPSPAKTDAIDARKIVELVRLQGSLPRSREILQEVSEVPEEHRMLKRLTRRRRQLVDEKVCLLNRMQSDLQAVSPGLADLVEYKDGVAFLRFLSCRNRLEQLKSIRKESLLKIRGIGKSFTGKVQAWQKKACFSEEASYVGPMIIEDARRILELKERIAELEEQIKELSESSPLGRRIGSIPGFGVVSTGELVGEIGTMDRFDSESSLAMYLGMAPLDNSSGSYQGTKTARQVNRRARMAMMTATMRHIPRVEESRSYYEKKRNEGKTYHQAVRATGRHLVRVIWSMVRRGEDYHIRQLHHLTENPPESVASS

SEQ ID NO: 289259 - protein, 406 aa, unidentified
MSQEKPVPTRFIGLDVHKHYLVAIGVDTELNQVLGPRRVPLVHLDSWMGKALTLQDAVVLEMTTNAFQLYDDLLPHVHSVTLVHPPHVTLITRAQVMTDKMAALVLARLHAVGLLPPVWVPPLEVRDQRALVAHRAKMVRLSTQAKNRLHAVLHRYHLPLPEGDLFTADHHDWWLGLDVTPVERVRIQSNLDTLAFAQSQIALFEETLTALAAQDERVLLLIQLPGMGLITAMTLLAAIGDISRFPTAKKLVGYSGLGSRVHDSGQYRRTGRMTKAGRRDIRAAMIEAAHTASRTHPHWKAELARLEPRLGHNKAIVAIARKLLVAVWHVLTKGCADRFADPDLIARKLLRHTYRLGRTHRPDGQTAAQYVRQQLDCLGLGADLTAIRYGSKTIALPPSRLTSVDN

SEQ ID NO: 289260 - protein, 341 aa, unidentified
MELFVGLDVSVRTTSVCVMDASGKLIRESKVETEPEAIGALLHRIGGPYKRVGLEAGPLSQWLYGGLAVAGYPVICVETRHMKAALSAQINKTDRNDARGIAQMMRVGLYKPVHVKTIRSQEIRMLLTARKFVQTKILDAENNLRGLLRNFGLKVGAVTKLQFERRIIELLEQSPHLRLVIEPLLEVRRVLRKQYQRLHKAMERLAESDNICKLLMTAPGVGPMVALSFRAGVDEPARFSRSRSVPAHFGLTPSRYQSGEIDRDRGISKCGDAGIRWVLVEAAGILLRISKRSSPLKVWGLSVARRRGLAKATVAVARRLAIILYRMWVDNTPYRWEAKAA

SEQ ID NO: 289261 - protein, 327 aa, unidentified
MNAIGVDVDSKLLVCRIQRGSQRQPIAEFDNNPIGFGKFIRWATKRRQPARVTMEATGVYSLPFALSLHQVPGIEVSVVNPRAIKNFAVARMQRGKTDALDATAILEYNLRMDFRPWCPPREELLELQHITRRVVQLNKELTRERNRHKAASRLGVIGRVVANDTAVNMRHLQRRIDTMEQAAWEIVSHDPLLKPKLDLLVSITGIAKKTGPRILAELAVLPDDMIGPQWVAHAGLDPRPNESGTSTKKPRRISKAGNRYIREALFFPALVACQKDKHVKAFYEKLLAKGKKPMQAIVAIMRKLLLAIWGMFKSGTTWDGAKFYKIA

SEQ ID NO: 289262 - protein, 368 aa, unidentified
MSASIVTYERNPSMNSEKYIGLDVHQATISVAVLDSTGKLVMESILETKAATILEFFAGLRGTLSVTFEEGTWAAWLYDVLHPHVANLIVCNPRKNALVKDGSKSDRIDAHKLAELLYLNKLSSVYHGENGVRMLRELARSYLTMVKDLTRVMSRLKAVYRSWAIPCAGRDVYYTRHRAEWLGKIKEAGVRRRAERLYQQLDMLQHLRQQARRELLAESRKHPITARLRQVPSLGPIRSALAVALIQTPHRFRTKRQLWAYSGLALETRTSAEYRYVKGQLHRAKKQISIRGLNKDHNHDLKGLFKGAATRASVLPGPFQDFYQRSLAKGIKPTMARLTLARKIAAITLTLWKKGENFDADKLKSQAA

SEQ ID NO: 289263 - protein, 351 aa, unidentified
MSHKTAATVAHTIGIDTGKNTLHLIGLDDQGAIVLREKIARGRIAARLANVPRCLIGIEAGMATHYVARELGALGHDVKQVPPAYSKPFRQGHKNDFRDAHAIAEAVQRPSTRCVPVKTDDQLDLQALHRVRSRLVGQRTAVINQIRGFLLEHGIAVRQGLRFLRQQLPDILAKRSDVLSPRMIRIMEDLSGDWRRLDERIEHITKEIEVLADTDVNCGQLMTVPGIGPIVASAMVAAIGNGAAFARGRDFAAWLGLVPKQMSTGDRTILGRITKRGNRYLRMLFVQGARAILLRPKSWVKHSFGPWLTTAARRLHRNILTIALANKLARIALSVLIQGRSYETRIVPAAA

SEQ ID NO: 289264 - protein, 316 aa, unidentified
MTASLLFAGIDVAKATLDIAVRPSAQTWQVIYDDAHVEALVTQLNDLSPTLIVVEATGGLERPLVVALLTAGLPVVVINPRLARDFAKATGRLAKTDRIDARVLAHYGEAIRSSCRPLPDADMQQLRAMVDRRRQLVDMMTAEQSRLSCSPAHIQDSIECHIDWLRQQIASLDDNLESMLQNSPLWREHDAILQSVPGVGPIVSHTLMVHVPELGHLNRKQIAALVGVAPFNRDSGAYRGRRSIWGGRAAVRAVLYMGALVATRHNPAIREFYQRLLAAGKSKKVALTACMRKLLTILNAMMKHQRRWQPRGAASV

SEQ ID NO: 289265 - protein, 345 aa, unidentified
MNTGKDIVLVVDYHAENIVYRWFNEATGEELAGKYSTGREEILRQVEEARSAVVPDGEVVWIMESTTGWARVKELLEGKVRFVLANVLQMPLPPKARRRKTDKIDTGRLLREYLSGRLPQSFTPARCWREVRRLVDFRQDLVERSTALKNQVTSLLSHETWRSRENLWSGKGLKRLAAAELSPGDRALVALKLQQLELLDCQRATIEKGMQEIYRQWPEAQWVDEIRGIGMIMAVSILAHIGPIERFATAEDLIGYAGLAPGTRQSDSTLHHGRIGGGGTDGHLRYLLIEAATWLCQIPRYRTTYERIVQRRGRRIGRIVVARMVLRSIHKMLTAQVRFNPGKAA

SEQ ID NO: 289266 - protein, 345 aa, unidentified
MPIVGGLDIHRKQLTFDYLDTVTGEVKRGQVVPADRAHLRAWLARFAGRDDVAFALEGCTGWRYVAEELAGAGVAAHVAEPADTAFARGRKRHAKTDKTDSRHLRELLAQGRLPECWIPPAHILECRALLELYHDLRAEHTGWVQRIHAVFFHQGAPALGDGTLRTGQGVAAVRAAAAAHLSPAGQLQAATALEVIEALEARMHAVRHQLLTAARHLAGAKVLAERLYGVGPMTALAMTCWLGGAGRFSSSRKAVRFAGLDITVYSSDGKRSPGRLSRQGPPVLRWAVYEAGKTHARAPAPDHRYYAQVKDRQDGKRAALSEARKLLRQACHILAELGDDALSAA

SEQ ID NO: 289267 - protein, 368 aa, unidentified
MGDIIRIGVDTSKSVFQLHGVDAAERPVLRKKLRRRDFLSFFAQLPPTRVGLEACGGSHYWARELTALQHEPKLLPAQHVRPYVRRNKNDKQDADAICEAMSRPRMSFVRIKSAEEQAAQMLMTTRQRLIDYRTQLINTIRGHAAEFGLTAAKGPAHVEPLLARVAKDVTVPALAKELFAIHGQEYDRLKIELREIEAKLKVWHRGNEMSRRLAEVDAIGPIGGCLLTIKAADPRAFRCARDFAAWIGLTPKDHSTAGKVRLGVITRAGDEALRRTLVVGATSVIKQVRNGKADPSPWLRDLVARKPPKLAAVALANKVARIAWKLMVSGERYDAARAGIVSPTARIAPCSPRQGRCAPPAAVACGQP

SEQ ID NO: 289268 - protein, 416 aa, unidentified
MELVVERPAALDVGKDQVVACIRVPDPGGAGRGRGRRRQEVRTYPTFTSSLETLADWLQTEGVTQVVMEATGQYWKPIWYVLEERGFQLLLVNARHVKILPGRKTDVGDAAWLCELLECGLLGGSFVPPPAIRQLRDLSRYRKRLIQAHTAEVQRIHKTLEDAGIKLDSVATDVLGVSGRAMLAALVAGERDPKTLAELAKGKLRKKLPQLRQALRGRFGDHHALLVGLALDHLEHLEGAIAALDGRIDEVIAPLAVARDRLDTITGVGKRAAECIIAEIGVDMTVFPTAGHLASWAGRCPGNNVTGGKRRSGKPTRGNRWLADVLTECAWAAARSRDTYLSAQFWRLARRIGKKKAAVAVGHSILVIAWHLLTNDCTYHELGGDFFIRRDSDRARQRAVAQLQALGYQVTLQPAA

SEQ ID NO: 289269 - protein, 389 aa, unidentified
MLAGTSLAQSWVTERVLVFGLSDRCEEAPVFTERTSVGLDVHARSVAAAAIDGQTGEVFKARLTPSHAEVLEWIGKLPGPCAVVYESGPTGFGLARAVIAAGLRCQVAASSKLQRPAGDRVKTDARDALHLARLLRLDEVVPVRIPGPAEEAARDLVRAREASRQDLMRARHRVSKLLLRHGIVYSGGKAWTELHDRWLRQQRFDSMPTRAAFDDAYETVVLTTTRRARLDEKIITLAEDSEFTPVTRRLACLRGISTLTGFALAVEIGDWERFTGASIGSYVGLVPSEHSSGQSRVLGAITKTGNAHVRRLLVEAAWHHRTAYTPGVVLRRRWDQAPAAARARGHAGNQRLHARWVDLNLRKKRPVIANVAVARELAGWCWSLAVLPD

SEQ ID NO: 289270 - protein, 355 aa, unidentified
MNQEKYIGMDVHQATISVAVMESSGKLIMECILETKAATILEFIDGLRGTLSVTFEEGTSATWLHDLLKPHVSHLVVCDPRRNALLKDGSKSDRIDARKLAELLHGNKLHAVYHGEHGVRTLKELGRSYLTITKDLARVMSRIKALYRSWAIPCSGTTVYAVRHRAEWLAKIPEPGVRLRAERLYQQLDLLQPVRQGARRDLMVESHKHHAVKLLRQIPSIGPIRAALLVALLQTPQRFRTKRQLWAYSGFALETHDSGEYRFVRGKLRRNRERITVRGLNHNHNHDLKNLFKGAAISASTRPGPLCDFYVALVEKGMRPTMACLTLARKMAAITLTIWKKGVVFDAKQLNRQAA

SEQ ID NO: 289271 - protein, 384 aa, unidentified
MQASTVDTPTAGHCGRIFVAIELSQKSWLVTLHSPDRDRISRHKLEGGDHAGLLALIDRERDRASRTAGGVPAVMSCYEAGYDGFWLHRLLLAAGITNYVFDPSSIAVDQRARRVKTDRIDGERMLRTLMAYLRGEPRVVRIVRVPAAEQEDVRRASRERGRLIKEQTAHTSRIKALLRLLGMAVGNPRRHDWLSWLAKQRDWQGQAVPPQIMAEIKREHVRLMLVREQLDVLAQAPADLTPAAAQMAQRSELLLRLKSLGPAFATTLTSEVFYKDFRNRRQVASYFGLTPSPWQSGGIDRDQGISKAGNPRARCAAIELAWLWLRHQPDSALTQWFRQRTLNAGKRIKRTAIVALARKLIVALWRYLTTGLVPEGAVLKTAKA

SEQ ID NO: 289272 - protein, 329 aa, unidentified
MKVQHIIGADLSKKSIDLVCHLLNAHIQIENSIAGFKDLLQWMRQQKINTSETMIVMEHTGLYSYSFEKFLHQHPIAFCKVNALAIKRSIGLVRGKTDKLDAARIAAYGYEKKDKLVIDVPASDALKRLQILHSTRERFVRHRASLICSIKEYKHLGVSGKDVLMQTQQQLIKNFDKQIEKLMTEIETIISEDQSLKQNFHLLQSIRGVGKVLALVAIIKTHNFTRFPNARKFACFCGTAPFEHSSGTSIKKKSRVSHLADKKMKSLLDLSAKSAIQYDKELREYYLKRTEGGKSKMSTINIVRNKILYRMFAVIKRQTPFFENYLQTA

SEQ ID NO: 289273 - protein, 440 aa, unidentified
MIDTNQNKEIEFAAFVGIDWADLKHAWALQIPGHLEVERGDLDHTPQAVEDWAAELGRRFGGRPIAVALEQSRGSLLFMLTKYAHLVLFPVHPTTLYDYRKGFRPSGAKSDPSDAGLLVDLLVRHREKLRRLNPDTEQTRTLQFLVEARRKFVSDKTRYSNRLTAYLKMYFPQVLGWFSEVTSPIAGDFLERWPSLQKVQKARPETLRKFFIQRHSCTLDNVDRRLEEIRSALTATHDVAVACSCSAAVLALVRIVRTVRDAILSYDQQIETLARQHPDFAIIDSLPGAGPALVPRLIAALGTQRDRYQSASELQSYSGIAPVLASSGKQHWVHWRWACPKFVRQTFHEWAAHSIGSSAWAKAYYEQQRANGKPRNTVVRALAFKWIRILFRCWKERKPHREDFYREALARHQQRASKRAPVQLQWKTCAGFSKITAIPS

SEQ ID NO: 289274 - protein, 322 aa, unidentified
MLFVGIDIAKLSFDVAVLIDGRYHSRHFNNTPSGFSQLSKWVNSFKEPAYFCLEATGIYGLALAKHLVQANQKVIVANPIQTHAFAKMEMARNKTDKADAMSIARYCQHLFNQGAIEGKLFTPRPPAFERVQFLVTRLDQLNKLKSQENNRLDVSLDKAAARSIKTILTCINKQITAIKKEIATIVKQDKPLTAQVDLLNSINGIADKTAWALLAYIGDITLFENSKQISSYAGLNPSIAQSGTSINRSSLSKMGCARLRKSLYMPALVAVRFNPVMQAFYEKLLAKGKPKKVALVAVMRKLLVLAYGVLKSGKPFDVNYQN

SEQ ID NO: 289275 - protein, 365 aa, unidentified
MEKVRFVGLDVHEESITIAVADGDGSSPSVLRRIPHDLNLLVKALKDLSARATLKVVYEAGPTGFGIFHKLKAAKIECLVVAPSKLPKQQGQKTDAQDALRLATYLRSGDLKGIYVPGPDVDALRAVTRAREDAIKAQQGARGQLRQFLVREGRKFDGKSAWTKAHFSWIREQKFEHPAKAVVRDDYLREVDAVAARIVRLTEAVEAVVATSPLAPLIQALMALRGVQLITAATIAAEVGNFFRFTTAPQFMSYVGIVPREYSSGGRQSFGGITKAGNAHLRRVLGEAAWSYRPPAASGSAAMKRRENVPKVVREIADRAQERLHQRWQRMTLRRKESNKICVAVARELAGFIWAIGQEIPMQRT

SEQ ID NO: 289276 - protein, 349 aa, unidentified
MSRKLDNSPAVIGIDIGKNSFHIVGQNQRGAVVLRQKWSRGQVEARLANLPPCRIGMEACVGAHHLSRTLRGLGHDARLMPAKYVRPYSKGQKNDYRDAEAIAEAVQRPTMKFVATKTADQLDLQALHRVRERFVGQRTGTINQIRAFMLERGIAVRQGLRFLRAELPGILATRTNALSPRMLRILEDLSADWRRLDARIADLSGEIEALARQDKGCERLMSVPGIGPIISSAMVAAIGTGDAFSKGRDFGAWLGLVPKQLSTGDRTILGSISKRGNRYLRSLFVQAAWVVLVKIGPKRWDLLRAQVVDRGREEAPTPQCAGGCARQQAGPYRLGGSSQGARLRVRQDQ

SEQ ID NO: 289277 - protein, 324 aa, unidentified
MDQSGEILLHRNYRANPDTLLRAIAPYHEDIAVAVECIFTWYWIADLCSQQEIAFVLGHALYMKAIHGGKTKNDKIDSHKIAALLRSGMFPMAYVYPQGMRSTRDLLRRRLYLARQHAELQTHIQNTNTQYNLPHFEKRIDRRSNRTGIGTRFTDPVVRTSVEVDVVLMDAIHEQILTIERQINAQVPEHDPVAVHLLRSIPGIGKTLALVILYEIHNINRFPAVGNFISYARLVKCTHESGGKRKTGPNNKIGNVHLKWAFSEAACLFLRRNERGKLYHQRLLSRYGKAKALSIIAQKLGRTVYTMLKRRTPYDARRVFETVG

SEQ ID NO: 289278 - protein, 386 aa, unidentified
MKRNDLSRSLVAFDQASTMVAVVELSFRSWLVAGLVPGLTRQPLKKLGPDAQALLTLLRRWQGEATKAGSTINRIVVAFEAGRDGFWLARWLRARGIEAYVIHPTSIPVSREHRRAKTDRLDTGLLMRAVLGWLRGEPKHCSMAAIPTIAEEDARRPNREHQTLVQERTRIVNRMKATLIRFGIRTFNVKLRKASDRLAVLRSPEDEPLPPNTGAELRRDMARLQLIRDQIKVIEEARLQQLKHAPRKGTHPMLLMLAEILGVGVETADMLVHEVLSRKLRDQRAVARYGGLTGAPDESGTKRREKGLARAGNARVRRGMIQLAWRWLTHQKNSELAQWYQTRTTGAKPAARKTMIVALARKLLIALWRYVTTGEMPAGVTLHPAT

SEQ ID NO: 289279 - protein, 274 aa, unidentified
MMNIQLKTNDVQVNSIHQAGIDVGAEELVMVIRKNGKLFNPQTFTNTRADRARLVMKLVKLPGVIVCMEATGVYHFDLAVALHDAGVLVMVINPKSSHNFAKVLMKNSKTDAVDANTLAEYAARMDFAAWTRPSDETIAVRCFSRRITALTTQKAAAKNHLHALTATQETPKAVLRDAKLAITQLQKRIDRLTTEALLLIGKHPKLERTLALLISIKGIAQTSAISLMGELLLLPPDLTHREWVKFAGLDPKAFDSGKSVHKKSRISKAALPLS

SEQ ID NO: 289280 - protein, 331 aa, unidentified
MNMHVGLDVGSRTTAMGWRNGGRFAGQCNIDQTPAGRKAAVGKLLELKPISVVMEATGIYYLDLAMELAAAGLPVSVINPKSFHNFAKLMLKNSKTDAIDAQLLAEYGERMSPRLWTPPTSIQLELRAIGRHINRLTGHRTRAKNELHALKATQTTLLMLIEDEEEAINAFDKRIERFRLAGRALIDNCPTLSAQFAHMIAAPGMGEISVFAALAELTTLPVTLKSAQVSRHAGLDVRLTQSGTSIDKPGRISKGGNAYLRSAMYMPALTAIRCDPNVKAFYEALVARGKRKMQAIVAVMRKYLTGLWACMRAGEDFSTAKLFSDKHTQKA

SEQ ID NO: 289281 - protein, 442 aa, unidentified
MMKVVQPNAAGIDIGAKEIYVAIPEDRSKDSVRRFDSFTDDLHNAAKWLKQNDIESVAMESTGVYWIPVYQILDLYGFSVYLVNAKHVKNVPGRKTDVKDSQWLQYLHSVGLLESSYRPAQAVCAIRSLLRHRSGMVRMASSHVQHMQKALTQMNLQLHNVISDITGETGLKILDSILDGNHNPKKLAELKSKRIRASKSTIVKSLSGDYRTEHLFTLRQSLESYRFYQDQIHTCDLEIESLLKDFESNLKSENDAGEKPQIGTKKPSTGNSPRFDIQGEMYRVFGTDLTRVDGINSSTVLTLFSEIGPDLSKFPTDKHFCSWLGLSPNNKISGGKILSSGTKKNSNKAAHAFRLAANALFRSKSYLGDYYRSKRARLGAPKAITATAHKLARIFYHLVKHRKSYDDSVFAVAEENHRKRKLRNLKKQAEAFGLQLVEGISA

SEQ ID NO: 289282 - protein, 348 aa, unidentified
MASVKLVARTVERTSSRRVQIDSKAGHVRERLMEMKSVWIGIDVSKDTLDIAQGSMGRQWQVEYAASELRELVEMWRQESVKGVVVEATGGWEKRLVHALQAASIPVMVMNPRLVRSFAKAAGRLAKTDRIDAGMLALFGERMEPEERPATAPADEARRSLFDRRRQLTDMLTQERNRLWLAPKPLRKEIKHHVDWLRKQLKDLDQRIEKSMEADPAWKAKDECLRETKGVGPNLSLGLLGVLPELGRLNRRQIASLVGVAPFNCDSGKHRGQRHIFGGRRSVRNALYMATLSAIRYNQVIHAYYQHLVSHGKKFKVAIVACMRKLLVHLNTRMRQHLALQESINAVH

SEQ ID NO: 289283 - protein, 400 aa, unidentified
MTSIKAKKVKWINKKMMITTLDIGKTVHYGYFRAPNGSDVKAFPFYNSKKSFNTLWGKICQFKREHQLEEVVIGFESTGPYAEPLFHFLRKKDVKLVQVNPVHTKRIKELTGNSPDKTDKKDPRVIADIISLGHALTLIVPKGAAAHLRRMTQARERALKQRTATINQLQDLIFVIFPEFLSIMKNITTKTASYLITHHPSAESICAMGVKALVATMKKISRGQLGHQRAQELVAAAKNSVGIYEGKESILLEIEHLNCKIEFENSGCILSIKGIGTVTAAGLIGEVADFNKFDTISEVMKLAGLDLYEISSGRHKGQRRISKRGRPLMRKLLFFMAINTVKSKGIMHAKYQQMLAQGMIKMKALVAISRKLLGIIFALVRDNTKYMENYSGNYHYKLAA

SEQ ID NO: 289284 - protein, 332 aa, unidentified
MKFSETIGIDVSKNWIDARMHLARQERRFDNTIGGYKKLTQWVEKTLAIPKESILFAFEHTGLYSYGLSCFLSSVDYSFILIPGLELHRSMGIVRGKEDRIDATKIALYAYRRKEEIVPYQMPARIMDHLRHLLSLRNRLIAQRAGYQASLKENAHFLQKNQDPDFFQIHDRMIHYLSKQIERIDLKLNHTIQQDQNMNRLFEMICSIKGVGSQTAYYMIVLTHGFILFGEWRKFASYAGTAPFPYQSGTSIRGKTKVNHLANKKIKSLLHSCALSAILYNPEMKAYYNRRTESGKSKMSTLNIIRNKILARIFAVATRGTPYVDIHKYAAA

SEQ ID NO: 289285 - protein, 337 aa, unidentified
MSQNRTLMKTVCGLDVHKDSVFCCILSTDGRKIQHKFGVLTEELITLRDLMESEGVEECAMESTSIYWMPIWRVLENTVKLHLVNPYFIKQLPGKKSDVKDAEWIATCMTNNLIASSFVPDEKIQRLRQYDRRIFDLNTEISRKLVKIDQCVQRCNIRISNYVSTTDSKGYRSVVKLISEGVTDANVLVTKIHGRTVHRHGKETLVKSLTGVVNDTDMDIIRQLVEEVEMLQRHKDQAQQKMTALCKEWFPQELEHIQTIPGVSERSATSIIAEAGTDMSHFQTPKKLVSWVGLRPRNEESAGKIKSRRITHGNKFLRKTLIECSWASSRTKDSFFL

SEQ ID NO: 289286 - protein, 392 aa, unidentified
MDSPPPRHHSATVAFEEANGSEGETMKKHSSKHDSLSSTDVELCTTICVDLAKQVFQVAGEDATGRVIYEDRIKSRQAFHDFLTRLPTTVAVLMECGPGAQAWARLLQTKGNPVRILPAQRVAEHRSGAKNDRNDAHAILRAGRDTSIASVPIKSTTALAIQALHRIRRGNIRRHTALGNQIRGLLLEHGVSMPQGDAAISQQVPRALEDASLPLPDLLRELLDELLTDWLSLGERIAALSGRLEVTAQQDKVAQRLITIRGVGPIIATAIVAKQTEPSRFASGRMYSAFFGIVPDQHSSGNKIRLGRMSKRGDGYIRSLMIQGAHAVLSQLRPDSDQPDDRRLLRWLSRLGRKEAAIRLANRNLRIIWALLQSNQVYQRKPNSNPEAAMSL

SEQ ID NO: 289287 - protein, 374 aa, unidentified
MTMMQHRQIRYIGLDVHKVSITVAIAEQAGAPTSYGSIPNDPSAIRKLMTRLGGPEVELRVAYEAGPTGYALHRQLAKMAIDCIVVAPSLIPKQPGNKVKTDRRDALKLARLLRSGDLTPVWVPDEAHEALRSLVRARADAKADQLRAKHRLSKLLLRQGCRPPSGVRTWSQRHVQWLRQLEFEHLPDRVVFADYLAEVTAAGERIKRLEAALHQCAQSSSQVAVIRALEAFRGIGFLSAVTLVAEAGDLRRFRTAPQFMAYAGLVPSESSSGGKQQRGSITKTGNSLLRHVLGETAHHARHAPRVSSKLKQRQADLPREIVELAWRAQLRLHARYRHLSSRIGSLKALTAIARELAGFIWAAGQVLQEVPTAA

SEQ ID NO: 289288 - protein, 391 aa, unidentified
MSMYFVGIDISKYKHDCCIISAADQQIVSKFTIANDKDGFEHLLTTLNSLSNPEDIKIGFESTAHYALNLELFLENAHHSFMEVNPVLIKEYKKSTSLRRTKTDSVDCESIARWLMTVEYKPHSKGFYHAYSLKSLTRLRDRLIRQRSFYLVKITNVLDHTFPEFKPFFNKRLSKTAIYLLENYGSAEKMAHMNSTSYDKLRCVSRGKFSIQQFLRLKELAANTVGVNNSIFDIELNSLLTLYNSLCKEIKVLETEITRLIEEVHPHYMSIPGIGPISAAVIYAEYGDISNFSTPGQMLAFAGIEPGIDESGTESHGGRMVKHGSVQLRYVLLNACLPLIRFDITFATYYAKKRAEGKKHRVAITHVAKKLIRVIYALEKQDIDFNAQKLR

SEQ ID NO: 289289 - protein, 340 aa, unidentified
MNVTTIGIDLAKSVFQRHGGDAQGGIVLRKKLRRSAVLAFLRKLPPCLIVLEACATSHFWARKIGALGHDVRLIPPAYVKPYVKRQKNDAADAEAICEAVARPNMRFVPEKSAERQGVLMLHRTRALLMRQRTMMLNAVRGHLAEFGIITAQGPHKILILIQEIRKGEVTGLPQIARAALESLAQQLDNLAGEIRSLERQLMTWHRADETRQRLETVPGIGIITATALAASIPDPAVFKTGRQFAAFLGLVPRQNSSGGKDRLGRISKMGDGYLRRLLVVGATSVVRRAGSDTSATGVWVRSLLERKLSRLVTVAIANKTARVAWAILARGGSYRAPRAA

SEQ ID NO: 289290 - protein, 338 aa, unidentified
MSNLPVFVGLDYHQDSIQVCVLDQLGKVLLNRAADNDPDALGRLVTPLGTVTRVGIEACCGAADLGQELVERLGWNVSLGHPASVARMKASPDKSDYSDGRLLADLTRVGYLPHVWLPPAYIRELRQLVNHRQRLVDHRRAIKLQVGAVLREQRVTIGRDRGSRWSKAWAASVRDNEQLSTHARWIVNDLLDELVHYGGKIAAVEGRLREAVVDDPVVARLMRQPGIGEVTAWVLRACIGDFARFKTAKQLARYCGMSPRNASSGEREADAGLIDACNKTLRATVVQAAHRLVRTVERWQKLAASLKARGKPTCVIIGAVGNRWVRTLHHVMKQELTN

SEQ ID NO: 289291 - protein, 408 aa, unidentified
MKRYYMGVDWGDRLHQVYVGDEDGKKVREMKLQESPEGLAEIGRWLDEKRAEGFELWAAIEKPQGRIVDFLLDHGVEVYPVNPKAVDRVRDRYRMSGSKSDAFDAYVLAEFLRTDQVHLRALRPSSEKAQELKMLSRDQRRVVRHKTRFLNQLTTTLKEYYARPLEVFEDLETEIALDFLKQYPTPAHLSALTRKQFNRFATKQHHLSKQRCEELWEKLNKPQLAVPEHVVRAKAQLVEVLIEQLRAAIKAVKIYNHKVESFFASSPAAQFAKTLPGGKSGTLVAAVWAELGDAQGRWESSRHLQAEAGAVPVTKASGKSRVVHFRFACNKHLRYTMYWFSFVSLNHSEWAKLYYRGQRDNGHSHHQALRALGAKWLKIIFVMWRDHKPYDENYHLANIARQKMRQAA

SEQ ID NO: 289292 - protein, 416 aa, unidentified
MTEEVLWYVGFDWATEQHRVCLFDNEGKRMAERAVTHNGAGLAELCCWLLETTGARAQEIAVAIEAPRGPVVEALLERGFQVFAINPKQLDRFRDRFSMSGAKDDSRDAEVLGHSLRTDRHAFRRLAIDDPLVIELREWSRMYEELKQEQGRLANRVRDQLWRYYPQAGELGDVAANWFLDLLEKVPTPAQAARVSEKTIARILKNHRIRRFDAAEVLRILRQPPLTVAPGTVEAATAHIRAVAARLRLVNQQIKEAEHRLDELCAAIEAAAEATPGQICEQRDMAILRSMPGLGRITIATLLAEACEPLQRRDYHVLRVLSGQAPVTRRSGKSCIVLRRYACNTRLQQALYHWARTAMQHDPVSKQRYAELRGRGHGHARALRTIGDRLLYVLCTLLERQVLYDPDHRTPQLAAA

SEQ ID NO: 289293 - protein, 403 aa, unidentified
MNAVGIDVSKGKSMVAVLQPGGKLLARPFEVLHTKSGIQKLISFVHSLGGDTRIVMEHTGRYYEPLLQWLAASDLFVTAVNPKLIKDFGNNTLRKVKTDKADAKKIARYALDNWYDLPQHTGMDTTRAQLKTLNRQFAFYMKQKTACKNNLIALIDQVYPGANTYFESPARADGSQKWVDYVSAFWHVDYVCSMRLSAFTERYRKWCHRHGYNFQPDKPRLLMEKAKDLIAMLPMDKTTKMLVQTSIAQLNVLSKTVEALRTQMIALAEQLPEYPVVIDMNGVGPTLASQLIAEIGDITRFPRRGSLTAFAGVDPGAKQSGTMQLKSNKTSKAGSPHLRRALFQIVSGLLMRSPDDAVYNFMDKKRSEGKPYYVYMTAGANKFLRIYYGRVREYLASLPKEQE

SEQ ID NO: 289294 - protein, 423 aa, unidentified
MKPRSDPRFTAHVGIDWADAKHDVCLQAADSEQREFDRFAHQVGSIDHWAKSLHQRFGGPIAVALELAKGPLVYALQKYDFFVLFPINPATLAKYREAFKPSGAKDDPTDAELALDLLLRHPERFPPLKPQSVAMRTLLSLIEQRRELVDDKTRVTNRLGNALKQYYPQALDWFEQRDTILFCDFLRRWPTLAAVKRARNAGLKAFFYAHNGRRPTLIDERIEAIRAATPLTDDMGVIAPYRLQVLVLVEQLRVTLQAIDRFDRQIATVAATLPDYALFSPLPGAGPHLAPRLLAAFGEQRERFRSADELQKYSGIAPVTERSGKKHWVHWRWQCPTFVRQTFVEWAAQTVNKSFWAGVYYRQQRAKGSSHQAAVRALAFKWIRILYRCWQARTPYDESTYLNALRQRGSPLLKQLHPTAENA

SEQ ID NO: 289295 - protein, 353 aa, unidentified
MYSVGIDLHKERAWYCVFNAQGRQVSHGSLPASSELFKKFFAELPRPFKMAVEATYNWYYVIDIAEEHAAEVNLADSYQVKAFAKRHKKTDKIDARLITWLLHRGDLPTVAIPDKETRKRREVLRYRMRVVADKTRNIVRLKALLDKVGLKGTGDFNTAKRRDEIRRMSVPAPYGEIVQHYLARIDQLCAEVKEVNTLITTLAKKDDDVVNIMSIPGFDHFSALLIKAEIFDIHRFRSFSRLCAYSGLAPRVHGSGGHYYHGPLNTNRRKHLQWILLENAWHTMRKIPRLEQKYMAIKKRKGSNTAKVAVARDVLKIIYHVLKEKRPFYPEIIISNRTAVHHQSTGASALARV

SEQ ID NO: 289296 - protein, 362 aa, unidentified
MSITMIGLDTAKSVFQVHAVDGTGKPVIRRKLSRAELIPFFEKQEACIVVMEACGAAHHWARLLTSLGHQVKLIAPEAVRPFVKKGKKNDAADAAALCEAASRPDMKFVPMKTAEQQAILALHSARSLLVKQQTMLVNAMRGLATEFGLTVPKGINRLGELTALVGADEAFPETARGVFTELHERYDSLVESIDTTETKIVAHARSDETARRLATSAADAFRHIGSLRDPIPGIGPITASLIAATVADISVFKSARHFAAWLGLVPRQYSTGGKTRLGRITKTGNREIRRLLVLGATSMVFRAEQWNSVAGAWTRGVLQRRPVRLVTVALANKMARIAWALMTRQEVYQAKGRIAAAAEVAA

SEQ ID NO: 289297 - protein, 420 aa, unidentified
MKLWQEITHYAGFDWARDHHAVVIVNSAGEIVADFEFDHTLSGWQRFVEKTASWPHLAVAIETNVGAAVDQLLQRGYHVYPVNPVASESYRKRKAPSGTKTDHVDGWSLADALRVDGQGWKPLEPMDPLSQKLRLLCQDEVKLIEQRTVLVNQLQQALVEYYPAALQAFEDWTKSSSWDFVIEFPTPQVLVKSGRRRWEKFLHAHKLWRPETTERRLGIFAQADQFKASDPILVAKSQLAVSLSKLLRTLEQQLAQYRQQIEALFKDHPDHDLFGSLPGAKKVLAPRLLAAIGSDPVRYGSHQVLQCFAGTAPVNYQSGQMNKTHVRRACDKFMRHTVHLWANCFRRASAWGQTYYNQKRKQGMSHACALRCLSQRLLKILYRMLTDKKPYDAELHALNQKKHGSWVLSLVDKSAASACE

SEQ ID NO: 289298 - protein, 389 aa, unidentified
MYLIGIDISKYKHDCFIATEAGEIIKDSFSFDNDAKGFGQLLDVLQTLDPSQTKRIGLEATGHYGYNLKVFLDLHGFDYMEFNPILVKKLSTGLSLRKTKTDKADARLLSMILLSVDYRTYPVKSYHIQELKSLTRYYKSLVKKRSRELVELTNALDLIFPEFKPFFKNRFSQTAYFILEHYRTPEKIAKMSYQNFEKLHSVSKGHLSYAQFLRLKDLAKNTVGSSSDLLVFEMESCIRLLQSVNREIKELEILLKDWTLKIDSPVFSIKGIGFISALSLIAEYGNFTSFDSPAKMLSFAGLEPSIIQSGTSNKQGHMVKRGSGYLRDTLMNVAVPFMMHNPVIYDYYLKKKNEGKPHRVALSHVAKKLLRIIFFLVKSNVQFNETKLA

SEQ ID NO: 289299 - protein, 346 aa, unidentified
MDYFAGLDVSLETVSVCIVDGDGTVLLEQKVEAEPQEIIALLKEFGHPFKRVGLEAGPTSSWLFTELRAAGYPALCLECRHVKAGLSAMRNKTDRNDARGIAHLIRLGWFRVVHVKSDEAQQIRMLLVNRNLLLSKLQDIENSVRGSLKVFGLRLGQVTKRSFESRILDLVKGHPSIAAITEPLLRVRRVLLDEFCNLDRMAIKMARRDAVCRRLMTVPGVGVIVALTYRTGVDVPERFARSRDVGAHFGLTPRRYSSGQLDYDGHISRSGDEMVRTALYQAAHVLMHHGRWSSLRGWAMRIAKRSGAKLAKVALARKLAVVLHRMWISETEFHWTKSEQALGPAA

SEQ ID NO: 289300 - protein, 343 aa, unidentified
MEAITTIGLDIAKSVFQVHGIDAEGNVIFRRQLKRRYVLTFFQKLPPCLVGIEACASSHHWSRELQALGYTVRLMPPAYVKPYVKRHKNDATDAEAICEAVTRPNMRFVATKTPEQQSCLTLHRTRHLFIRQQTSVINAIRAHLAEFGIVAPVGRQGVEQLLGVAADSNDKRLPEVARTCVAALGAQLRTLKAQILQFDRMIRAWHRSSEASRRLDDIPGVGPTLATALVASVADPRAFRSGRDFSAWIGLVPKQNSSGGKDRLGNISKRGDRYLRSLFTTGALAVIRYAKTHSTRHRPWLTVLLTRRPTKVAAIALANKIARIAWAMMAKGERYKEPAALAA

SEQ ID NO: 289301 - protein, 372 aa, unidentified
MLIRYIDIAKRNFVIAVSSLSKTKTETNNPKGIAHTIEYLKKHKVALVVTESTGGLEIPAAKAIRRAGIAVIIANPRQTHQFAQSQPLTKTDAKDAKMPAFFTQMMTQKEDWQTMPYQPPTEAEEVLEALVNRRNQSADMRTAEKNRLHQVHETQVESVKQLIARFDRLIDESDKQIDDHTRTHFDGKAQVAEQIKGIGSITTATLMAMLPELGRLSHKRIASLAGIAPHPRESGETKFKSRCFGGRSTVRKALYMATVAATRFEPLIRDFHQRPLSEGKPYKVAVTACMRKLLETFAKFLSLTTTEIPTQVFGCFRPKYRLILPKYPLNPPRIPDNQASGLPFRRQRAHLTCWPLSTGSNTSPSGGFAHSL

SEQ ID NO: 289302 - protein, 350 aa, unidentified
MEIFTGKPEGVMKLTPVGIDIAKNVFQVHHIDEETGEIVNKPIKRAKFLEYFVNRAPCLIGMEACGGAHHWARQLTRMGHQVKLMPGEYVKAFNIRNKKDPADARAIWLAVQQPSKPVAIKTEMQQAMLALHRTREQLVKFRTMQINALRGLLTEYGEVMAKGRAPLDRAMPDVLARVADRLPAALIDTLREQWNGLTGLDEQIATIERRMREWKKEDQEVKAISEIPGVGLLTATAAVATIGDAKAFRSGREFAACIGLVPKQTGSGGKVKLHGISKRGDTYLRTLLIHGARSVITNAKQPDPWIEQMKKRRPPNVVVVALANKMARTIWAVLAHDRPYQRGYVSTKPA

SEQ ID NO: 289303 - protein, 367 aa, unidentified
MSSIAHRGFVHLGMDVSKDAIAVAVLSPDRDTAEVDKIFHDTDSVRRLVKRLGKPKEIWACYEAGPTGYDLHRLLTSMGVRCDVVAPSLIPKGSGDRVKTDRRDARRLAGLHRAGELTAVAVPTPAQEGVRDLCRTRGDMVQDLTRARNRLSGFLLRHSVVWRGGSPWTERHRRWLATLTFEDPAIATTYAHYLATVKLRDTELESVEADLVPWCTQDPFGEQVPRLAAYRGVTRIGALCLAAEVFDWRRFPRARPFMSFTGLVPGENSTGLTQRRGSITRAGNAHLRGQLCEAAWAYQHSPNVGAGIRERQQGAPPETVARSWAAQIRLSRRFRQLAAHKNVRSVVAAAIARELAGFLWAEMVAEV

SEQ ID NO: 289304 - protein, 330 aa, unidentified
MNSICLSTDSVAAALRVLGLDVAKASVQAELRTTGKRVRFGFANNAKGFAQLARILNQHNVPKVWAGLEATGPYSHAFALWLHGQGHRVSLLNPRRVKQYARSAGNRNKTDLLDAGLIADFICAIQPAPWQPPLLEVAQLQALVRRREELSLMLQAEKNRLEGVAPNVRSSLERIITTLSAEKTRLEKLITQQIRSHQQLSRDHQLLCTIKGIGSLTAAILLAEMARPGQVERARQAAAHAGLAPRREQSGTSVRRNRGLGKEGNRHLRKALYMPALVAIKYNAPLRYFASRLRAAGKPNMSVICAVMGKLIHIAFGVLKHQKPFNPSLA

SEQ ID NO: 289305 - protein, 343 aa, unidentified
MTIVAGFDVHRRQITFDALDTETGELTRGRIDATPAAVERWVARFEGREVQVALEACTGWLFVSRALERAGALPHLAEPVETSALRGRKRRAKTDREDARWLRTLLSEGRLPESWIPPEHVREWRSRARLRKTLVEERTQWLQRVQATLFHHGIGGAPAELHSDAGREFLRELELPADARERIAIALAMVDSLEGQLRPLESELRKLARRQTGCRALMAQFGMGELTALMTLTELGDVQRLSASRKAVRMAGIDIGVHRSDRRSRVGKLNRQGSPHLRWALYEAALSATRPKSPDHEDYLALKARGLSHTRASLTIARKLARRSFHILRELGPAALDPITTTN

SEQ ID NO: 289306 - protein, 418 aa, unidentified
MEVLCPCCCGLDVHKDTVVACLVRSVTAGVRTKETRTFGTTTGELEALGAWLRAVGCTHAAMESTGVYWKPVFNILTEPGDDLAVWVVNAQHARAIPGRKTDVKDAEWLADLLQHGRVRPSFVPGREQRELRDLTRTRTSLVDERSAAVKRVQKVLEDANIKLSGVATDVMGTSGRAILAALLEGTADPAELAALARGKLRAKIPQLERALAGRVREHHRQLLALHLSHIDFLEGAIAELDARIADKTRPFEAELARLDTIPGVDRRTAEVLVAEIGVDMAQFPSARHLASWAGMAPGNNASAGKRKGGKTRQGSKPLRRALVEAARAAARTTQPGRTAFAQQYRRIVVRRGPKKAAVAVGHAILVTAYFLVSRHTTYREPDPSQFDDRRRARVRQRALDHLRALGYHVTLAPKEVAA

SEQ ID NO: 289307 - protein, 350 aa, unidentified
MMVIGTDPHKRQHTCSAVDAVTGELRSSETVQASGAGHEALLGWGRGLDAQRVWAIEDCRHVSGRLERFLVARGERVVRVAPKLMAGQRRSSRQAGKSDAIDATAVARAALREGVASLPGAHLDERALEIKLLLDHREDLVRERTAIQGRLRWHLHDLWGADGVPVAALDRAKWLDRLARRLARCEQSARVRICREQLTRLRALARRATELEREIGQLVLAHAPELLALRGCGPLTAAKIVAETAGAQRFSTDAKFARHAGIAPIPAASGRNQRVRLHRGGNRQLNCAIHRIAVTQGRVHPPAIEYLARKQAEGKSRIEALRCLKRHLARTVWRTMTTNANAPATTPALT

SEQ ID NO: 289308 - protein, 472 aa, unidentified
MQKLNDLSRSLTALEPNGTLIAVIEMSLSSWLVAGIVPGVERQPLKKLAVDESALLKLLHRWREEAEKAGRRIERIAVAFEAGRDGFWLARWLKARGIEAYVIHASSVAVSREHRRAKTDRLDTELLKRSFLGWLRGERDHCKMVEIPTMQDEDAKRPNREHDSLIGERSRIVNRMKAALVRLGIRGFNPKLKRATTRLDGLHTPEGEPIPPNALAELRRDMERRRLVNNQIRQIEEERLERIEQAPCDGAHVMVRLLARVMGVGIETADMLVHEVLSRNMRDRRAVARYAGLTGSPDESGRKRREKGLARSGNARVRRGMIQLAWRFLLHQKNSALTKWFRSRTENARGTRKPMIVALARKLLIALWRLMREGIVPDGVVDAEGTTTVSACPYACDGTPMTVRGGGIPRRPLALTPNGRMGPPLRSFAADAHDCIMVRVLGPTGYKVVARLNRAPKAGFLRASTSAMRGSR

SEQ ID NO: 289309 - protein, 318 aa, unidentified
MTQDLFIGIDISKAKLDVAASPGEHSWSVSNTEEGIQELIAKIRQIGTPKIVLMEATGGFERRPLAMLGAAGLPVAAINPRNARDFAKSLGLLAKTDKVDAKALALFAEKIQPPCRPLPDAQTRALQDLIVRRRQMVDMISAEQSRLAIVENPKVRRELVQHIAWLKKRIHIADYDLDQAIKNSPAWQPKSDLLKSVPGVGPVTTSTLLALLPELGALTNKQAAALVGVAPFNRDSGTMHGRRCIWGGRTSVRNVLYMATLAATRFNPTIRAFYQRLCKLGKLRKVALVAAMRKLLGILNAMVRDQTPWRSDNVEISS

SEQ ID NO: 289310 - protein, 482 aa, unidentified
MKKRNIYLNQSQELLSLFEDAGNNSKIMCVPMDYAKKDHIVMFCDGNGHILKKPFSVRNNPEGIEYLTDQVTRSCHYRQIDHKHVFFGGEDVGSYAENFVNTLRSGGWIVAGVNAHDAKNQRTNLQASTDRLDLMGIASMLLNRRAKCSPAQSGIYRNLRTVVRHRKKLVALSTEVRNRIHTVVDRLFPGFLDEKKSGIYPFRGASLYLMEDRFSPRQIHRRKQPKLIEILRRYGIKKPKDTAKKLQSYSGCVLSTPNEYISTFQLSLSQHVKHFRCLRESIKQLEHEIAVWLAQTEGAFLTSIRGIGIVLAAGITGEIGNPHNQEPVKNLVSYSGIIPRVKQTGGTQGKTHTGKVAKRCNRILKDYVVQSANQLGLRGPQDLMTDYKRREAAGQHADFGIARRYLRIAMCLMRKPQIYLPPEFRTAETKPEERAGYYLMAWPALRDKWKKAGALETAFDDNHFLGHWRNMVQELYEIKLKL

SEQ ID NO: 289311 - protein, 319 aa, unidentified
MTKIVLGIDVSKKTLDAALIFDNRTLSKQFSNTPEGLQSLAAWLESLGIRQVHACLEATGTYSEAAALFLHERGHQVAVVNPLRIKGYAQSNLQRNKTDRLDARLIASFCLTQEPDQWLPPSAEVKKLQVLMRRIEVLEQMRQAEENRLANSVWEVQPSIERMIALLKEEILELERQIKEHIDRHPDLKQQSELLQSIPGIGTRTAHLLLSEIEFERYSSARSIAAQAGVTPRKKQSGTSLKQTNLSKLGNPRLRRALYFPAIVARQHNEIVKEFAKRLKKSGKTPMQIVCAAMRKLLHIAFGVLKHKRPFDASLAFSA

SEQ ID NO: 289312 - protein, 332 aa, unidentified
MPEPRRGLPPRRELVTNKAEFNPIFYVGKIYFGVDVCKESLAFCGPGVAGQVPNNAPGQRRLLARLPKGAHLIIEASGGYERELVSVAQQSAVPLSVVNPRQVRDFARGVGRLAKTDPIDAEMLARFGAEVNPPPDAVPTAAEVALQELVSARQQLVEERTVLLQQQAQHLNSIVRRLDSARLKLLQRQIAQLELAIGSILEEHSALKQKVERLQQVKGVGLITAVTCVALCPELGLLSRRQTAALVGVAPYDDDSGARKGWRHIAGGRPRLRRALYMAAISAMRSNPILRRFYQQLRLRNKPPKVALVAVIRKLAILLNHLLRNPSFLPTS

SEQ ID NO: 289313 - protein, 351 aa, unidentified
MRKIAYLGMDAHASHCVLGDMGADGTFRGNCRFPTSELNIIEALEKIKAKEKYLTLEECNLAYWIAQVASPYVTKVLPCDPKENALIYKGPKKADKVDTKKLCRLLRLGELKEVYHPENDARAIFKAAARHYIDLRDQQVTLKQKIKAMYRYWGVIDVAGEAVYSVKRRHDYLKQIKHFQIKNQLNRLYTLMDETEAMQRNALKAMKQMGRRYPEIKEFKKIPGIADVNAHIFDAFIQTPDRFANRSRLWRYCKLGVTDRSSDGKPLGYKRLDRSGISEIKALTYQAWMSTLSGDNEVRRFYSESLSRTLSRVHARLNTQRKIIAVMYGIWKRGEAYRPQLFLDSLKSGVV

SEQ ID NO: 289314 - protein, 400 aa, unidentified
MNDSDEIGVFLGLDVGKSAHHGHGLTPGGKKVFDKQLPNTEPKLRDVFTKLSTKFGTVLVIVDQPASIGALPLTVARDAGCKVAYLPGLAMRRIADLYPGEAKTDAKDAAVIADAARTMPHTLRTLEVTDEITAELTVLVGFDQDLAAEATRTSNRIRGLLTQFHPSLERVLGPRLDHQAVTWLLERYGSPAALRKAGRRRLVEVIRPKAPRMAARLIDEVFDALDEQTVVVPGTGTLDIVIPSLARSLAAVHQQRRALETQIEALLEDHPLSKVLTSLPGVGVRTAATLLVTVGDGTSFPTAAHLASYAGLAPTTKSSGTSIHGEHAPRGGNRQLKRAMFLSAFAALHDPASRTYYDRCRARGKTHTQALLRLARQRINVLFAMLRDGTFYEPRTPRLA

SEQ ID NO: 289315 - protein, 455 aa, unidentified
MTGAKSPGADALSMVNPGAAAIDIGSTMHMAAISPQADDNPVRAFGTFTGELHEMARWFKASGVTSVAMESTGVYWIPAYEVLEAHGFHVILVNARYAKNVPGRKTDVSDAAWLQRLHSYGLLRGSFRPEAGVATMRAYLRQRERLIEYAASHIQHMQKALMEMNVQLHHVVSDITGVTGMRIIRAIVAGERTPVTLAEMRDVRCHASVEIICAALSGNWRDEHIFALCQSLALYDFYQTKILECDRKLEVALKALAIDKGHDIRRLPKVRTKRRQVNAPAFEVRSALYRVLGVDLTQIHGIGPSLALKLVGECGTDLSAWPSSKHFTSWLCLAPGNKISGGKLLSSKTRRSSSRAAALLRLAATTIGRSDTALGAFYRRLSARAGKAKAVTATARKIAVLFYNSLRFGMAYHDPGATQYEERYRSRVIGNLQRRAKAFGFSLQELTPEPDMAVS

SEQ ID NO: 289316 - protein, 356 aa, unidentified
MNQLTTVGLDLAKDVIAACALDLHGAVVQRRVLKREAFQRWAEQLPVCTVAMEACGSAHHWGRWFAARGHTVRLIAPQFVAAFRKGGKNDAADAEAVAIAARQPTMRFVPIKTIDQQTILAWHCAREGWKEERTALMNRVRGLLTEFGIVIARSSDRLLAELPRLTEDPRLPDAMQGLLLEAREQLASLHARLARCEAQIANHARSNAAAQRVSALLGIGPITSSALAATVPDSTTFRSGRQFGAWLGLTPKQHSSGGKTRLGRISLRGNVYLRTLLIQGARSTLQSALRADLSRASRLQRWIIELYGRRGYHKTLVAIANKHARIVWAILAKDERYDASAWQRHPMAQALPAASS

SEQ ID NO: 289317 - protein, 341 aa, unidentified
MYYAGLDVACKGSFLYVQDRHGRKVEGREILTTRWSIKEAFKKYKSSLVEVAVEAGGSTRWIYDTLKAIGIRVYVVNPHKVKAIAESKRKTDKIDAKLLSDLLRLGALPQEVIMVEGEIRELRDLMQARQKIVEGYGRLINYLRGLLRQEGVRLPQRSFRSDRWLAEISKQRLPEHVRQIMDRYTELIDNMVEEKKNLEEKILKCNNQDIELIKTIPGIGDISSRTISAAIGQIKRFKKAKQLTSYCGLVPSVRASGERVEYGHITREGRSEVRRVGVQCAHAVLLSRTKESEPLRLWHARIARYRGYRTAIVALARKMITIVFYVLRDKKPYDYRLLTVN

SEQ ID NO: 289318 - protein, 340 aa, unidentified
MFTNFVGIDVSKSKFDLALINGQDKDHVIQGVFSNTQKGIKAMSKFLEKEHAVQLSETIFCMEFTGVYCYPLTNFFIKQECHVWIEMPVNIIRSLGLQRGKNDRVDAHRIALYAYKNRDDVKLWKPQREAILKLRDLLALRERLIVAQKSLQMPINEKISMGDKKGAEMLRKGCQKSISSLENEIGQIDKNLDDIIKDDPQLKDLFQLATSVPGIGKLTALFMICFTNEFSMYTNPKQLACYCGVAPFEHSSGSSIRGRTRVSHMANKVLKHMLHMGAMSVISRDPELREYYQRKVAQGKNKMLVINAVRNKIIHRLCAVIKRGYGYQSEIIFKERLVLS

SEQ ID NO: 289319 - protein, 451 aa, unidentified
MANSKTRADRIISRQISHCTVEAAHLSAVGVDVHHDLLVCCFQKLDPIAGELTSEHRSFGTTIPQLQEFAAWCRVREPSVILMESTGVLWFSPYRSLEDVGFDNDTLALVNARDVKAAAGRKTDAQDAERLAEYARLGKFHKSFVPSRPFRDMRMVSRNIIRLSDDISRQKNRYNKNLNSVGCRATSVFCDVHGKAARKILDAYIRGDRDFEEIVRSARKQLRATQQEILEAINFAMPDALREFLRSSYEHLQYLIARRDSQIALLERMQAPYQEYIDRLMTIPGVKELSARLLFCEFTNEQQSFPDAAHFASWLGLCPGNNKSAGKSSSGKTPKGNRWARKTLTEVAHGIGLMKRGALKALFQAFKERRGARRAVVAIAHKVAMIMFAMIRDGSEYVETTCSALRDTRVKRLLQTSKNLREQRTVITLSGQIVDKDTGELIGQLSVDAAA

SEQ ID NO: 289320 - protein, 412 aa, unidentified
MKDLLEISCGLDVHKEKIVACILTGPLGKPTRSEIREFSTLIPDMIALRNWIVSKNCHHVAMESTGIYWMPIYEILEDAFSGDITLLVVNARHMKNVPGKKTDMRDSEWISTLLRAGLLNGSFIPEKRIREFRDLNRYRKSVIRDITSQKNRIEKFLQSSGFRLSSFISDIFGASGRNIILHLMEHGQIDKTALDSCLKTKTRNRIDEILMSVNGTLSEHQKAFLRILMTHYDSLKKHLAEIETSLEEDMAPFALQVEQLNSIYGISTTASCAIIAEIGIDMKPFKTAEHICSWAGLCPGNNESAGKRKSTSVTKGNPYIKSMLCEIAWVIAGKRNTYLSAWYWRIKQKKGAKKAIVALARKLLVIIYTMLKQGTLFDESCFETRRKHCEQKQLSRYIRELEKHGYHVEAQS

SEQ ID NO: 289321 - protein, 340 aa, unidentified
MGLYTGFDLHANNSYVGIINEDGRKEARRRLPNDPGLILQFLTPYKSDIVGVVVESTYNWYWLVDALMEDGYRVHLANTTAIQKYSGMKHSDDKDDAFWLAEMLRLNILPTGHIYPKDERPIRDLLRKRGHLVKLRTSLILSLQNIIDRNCGVRIKANDIKRLREDKVAPFMEANEDLALAGLVSKETIDFLTGKIRTLESFIENRSKLKDPYNHLLTIPGIGKILGLTIMLETGAIDRFEKVGNYASYCRKVATKWTSNDKKKGKGNKKNGNKYLAWAFSEAAEFARRYDQQARAYYNRKMQKTNFMVAHNALAHKLARAAFHVMKEQTPFMPERLFSS

SEQ ID NO: 289322 - protein, 446 aa, unidentified
MKKRIYRRMPVNDFQPQTISHADLGGKLVFAIDVAKVDMVAAVAAADGRVLHTICWKAPEQNPAVLSILRGFRTAGVTVEAVMEPSGTYGDVLRHQLELDAFPVFMVSGKRTHDAKEIFDGVPSLHDAKAAAIIARLHADGLSTRLRDEGPDRRQLRAALAIMDLYQERYLQLVHRLESWLARHWPELPTLLELTSSSLMALLARIGGPADVAAAPEQATKLLLGISHRLIADDKIAAVIASASTSVGVPLVGLERNALMAIAEDAYRAHRAFTTAKTKVDQLAAATPAATLAPVVGHTTAAAVFAEVGDARSFPCTRAFLKAMGLNLKEKSSGTVQGQIKITKRGPSRVRQYLWLAVFRWIQDDPIANAWYQRKKQRDGGRASRAAVALMRKLAKGLYHVGRGGSFDSSKLFDTRRLQVGDVARSFVGKGAKPSPLMLNAQISEG

SEQ ID NO: 289323 - protein, 360 aa, unidentified
MSNSIAPDGPPVKVIVGVDTHKHEHVAVAINDLGARLATFRAPANGAGYADLVAWACTLGDLEAFGIEGTGSYGVGLASFVRRQGFRVVEVNRCDRRKRRNNGKSDTLDAEAAARSVLGGVATGTPKTADGAAEMVRQIKIARDTAVKARTAAMTTLKTLLVNAPSRVREALEPLTDRKLIDRCAALRPGDIIDPTAAVKHALRALAARWRTLSAEIDQHDELLDILTRAAVPTLREAIGIGPESAAEMMIVAGDNPGRIRSEAAFAKLCGACPIPASSGLTNRHRLFRGGHRHANAALYRIVIVRMRWHQPTIDYARRRTAEGLSKRDIIRCLKRFVAREVYHALLDDHRVGAACAEAA

SEQ ID NO: 289324 - protein, 399 aa, unidentified
MFCGWDWGSTIHGVCLLDEDGVTIKTWMVKHTDTELAALFAELDQLGDPGLMPVAIERGEGLVVGLIARAGHPVLMVEPAAFKAARPRWGAAGAKSDAADAFMLADYARTDSHRLRRVEPRAQATRELAALVRARTSLVEARTAASNQLWAVLAEHWPGAALVFQKLTSQIALAFLADYPTPRSAARLGEGRMHQFCRRHSYRGGKPPAELISRLRAAPASANPIAEKVLEAIVRSSIAQIGLLNVEITALERQTADALAAHPKTALLKTLPRVATVSLAALIAEIGPLLERCENPEQVAAMCGAAPVTKASGKSRNVGFRYTANKPARVAITSFADNSRHCSAWAGDSYRRARARGARHPHAVRILARGWVRVIWACWTTETPYDPSRHRGEQRLAAA

SEQ ID NO: 289325 - protein, 473 aa, unidentified
MAGYVGKLLIEPQTLEHQSGHFKVAFALVRQAQKEHHIQDTIVVVERTGNYHLAPKRAFASAGFETRVIHPFATKQYRMPADPGNKTDETDLHAQHRAAVAGFGLCERELPITYRELQLRSRHRRNLVEKSSSLACQIRDNLHLSMPGYAALFDRLLEHQTAMLVGRCCESPAKVLKLGRDGICKRLRKESLRCNKRTIDKIISWASQSVDAPIRDGALHHAIWTDLEELYQHLNQQITAIERELASVLVQTPYVRLMSIPGINVVSAADLAGEMGPIDGYANANAITGRCGLFPSRHQSDQTDSSGPIIRKANRRLRCALMRIADNLAAHCAYYRGLAEQDFARGVDIRASRVKTAKKFSRLAFACLAGDQPLRHPAFRAPDSVLEKLREFHRIHQTPMQQVLADLTRAVEQLPGHTQGHEAIVVASVLRKHSERRRGPVEIGELLTAVLARLGVPPNETNKSNSLEIEERP

SEQ ID NO: 289326 - protein, 404 aa, unidentified
MRSPWGTIPLHPLTERLMPQPNDLSRSLSSFVQGNTLVAVIELSLSSWLIAGVVPGVERQPLKKLAPDEKELLRLLHRWRGEAVKNGCTIERIVVAYEAGRDGFWLARWLRTHGIEAHVIHSSSVAVSREHRRAKTDRLDTAMLLRVFMGWLRGECGHCGMVAVPTIDEEDAKRPHRERESLVGERTRIINRMKAALVRLGIRGFKPELRRAPKKLDGLRTPEDLPIPPNTLDELRRDLARLAMVREQIDMIEQARLARIEQAPETGPNAMVRLLASIVGVGVETADMLVQEVLSRNLRDRRAVARYAGLTGSPDESGSKRRDKGLAKSGNARVRRGLVQLAWRFLLFQKDSALAQWYRARTGVQGVRKTVLIVALARKLLIALWRMVTTGEVPHGVVLRQAVA

SEQ ID NO: 289327 - protein, 343 aa, unidentified
MKKFNLYVGIDIGKNVLDVAIGKNENEIVFYKFSNDVKGIGSLLSLIAEYKVRENEVLICCEHTGVYLNKLAFAVQSTECVLWVIHPLLLKHYSTEINRYKTDKADAKKIMTYALLNQSKAQQFKLLEHDSQLLRDLFTARKQLLQTRTQYLNRKDASKQKVLVHGLTDLINETIIKFLNDLISELNKEIKRTIASNPKISKLYHILISIPGIGPVIAQHFLFVTDCFEKIKDWKAFACYIGTAPNANDSGIRKGRARVSKHSYKPLKADLNQGMVSLIRPGQFFHEYYKYLISINRHHLYILNKFKNLIIKTTFVLIKKQSEFDQEIFWKNKKNLFQCLQVS

SEQ ID NO: 289328 - protein, 449 aa, unidentified
MPKKRTKVVSLPMIEPNAAGIDVGATEIFVAVPADRDPEPVRCFPTFTVDLERLGDWLQQCRIRTVAMESTGVYWIPLFQILEKRKIDVRLVNAHHVKNVPGRKTDVEDCQWIQHLHSVGLLRGSFRPDEEICAIRSLWRHRDNLIQLATLHLQHMQKALDQMNLQIHHVISDLAGTTGLAIVDAILAGERDPHKLAQLRNRHIRASTETIMKSLVGDYREEHLFTLRQSLKSYRHYQELIQEVDLQVKQMVQRLPSKIAAGEKPPKGDKIRRTPWRNEPPQLRNDLYRAFGVDLTEVPGINSLTAQMLLTEIGPNLSRFPTAAAFCSWLRLCPDPKISGGQVLSSRTRPTKNRAALALRMATQGLHRSNTFLGDYFRRMKARMGAPKAMTATAHKLARIVYHMVTTQQEYDTTVFQQQEQRRRLHKSARLHAQARELGFQLVPINVVP

SEQ ID NO: 289329 - protein, 414 aa, unidentified
MADSRIPRFVGVDLHKHFVVVAAVDAQQQLVLKPTGRIDLDDWPAWVATHLGPQDAVVVEATSNAWWCYDIVAPRVGRTVVANSLQIKWIAAAAVKTDKHDAVKLAKLLAANLIPEVWVPPAHVRELRALLAHRHALVKQQTAAKNRLHSLLHRHHLTPPTGDLFAAQNRAWWADLDVSPSERLRAQHDVATLAQLQGQLAAVEHELARLSQNGTWRAAAPFLIQLPGFALVSAMTVLAAIGDISRFPAARQLVGYAGLGAGVHNSGEAHHDGPLTKQGRRDLRRVLIEAAWSAVATHPHWKQEFVRLCRRKPEGVASVAIARKLLVVVWHVLAERAADHHADPVMVATKLMRWSWELTPEQRGGLTSRQFVRYGLMRLRLGHDLTGFRYGGQPRGLASEAEILARFPELATPA

SEQ ID NO: 289330 - protein, 405 aa, unidentified
MTDTEQHDSVQVFVGVDVGKGAHHAVALDRNGKRLLDSALPNDETKLRALIGKLKEHGQVLLVVDQPATVGALPVAVARDEGVLVAYLPGLAMRRIADLHAGEAKTDARDAYIIAEAARSLPHTLRSLKLADSQVAELTMLCGFDEDLAGQITQVSNRIRGLLTQIHPALERVVGPHLDHPAMLDLLERYPSPAQLSALSQKQLANRLVKLAPRMGKTWAAQILQALSEQTVVVLGTQAASIVLPRLAQQLAALRIQRDEVAKEVERLVLAHPLHPVLTSMPGVGVRTAARLLIDVASRAFASAGHLAAYAGLAPVTRRSGSSIRGELPSRRGNKQLKRAMFLSAFAALRDPVSRAYYARKISQGKRHNQALIALARRRCDVLFAMLRDGTFYSPPRPQISLTTT

SEQ ID NO: 289331 - protein, 407 aa, unidentified
MDVVIERACGMDVHKDNITACIMTPEGKEIQTFSTKTVFLIQLVDWIKEHNCTHVAMESTSVYWKPIVNLLEAEDIEFLVVNAQHMKAVPGRKTDVKDAEWIAKLLRHGLLKASYIPDRNQRELRELVRYRRSIIEERARQHNRIQKVLEGANIKLGSVVSDVMGVSARDMLNAIAEGEDDPEKLANFARRTMKKKKEELALALKGYINSHQRLMLKTILKHIDFLTEQIEMLDQEVAQRVSTYQEDIERLDSIPGIATRMAEQILSEIGTDIKKQFPSAAHMCSWAGLVPGHNESAGKRKSSKTKKGNKYLRSALTEAAHSVRGSKNYLGALYRRTASRKGKKRAGIVVAHAMLRISYYLLTRKEMYVDLGEDYFDKQRQQSIVRHSLRRLESLGYTVSLQEPEAS

SEQ ID NO: 289332 - protein, 334 aa, unidentified
MSFTHFIGIDISKKTFDLALINENAPDKAITAKFSNNHKGIVRLEQFIRKQELVKQQVLFCIEHTGLYCRVLSNYLVENQYAVWLEMPAQILRSLGIQRGKTDQVDAKRIAAYAFTFRAKARLWQPPREEVQKIHDLMALRDRLVESRKSILTPIQEFEATGLDEVAATLRKHCQKSIESLDKEIKQIEKELDEIIDKDTNLKNKYKLARSVPGIGKITAMTLLYFTNEFTLFRTAKELACYCGVAPFARESGTSVRGKTRVSNFANKVLKKLLHMASMAAISSDKELKAFFERKVAEGKNKMLVLNAIRNKLLHRLVAVIKRNSPFQSEYELV

SEQ ID NO: 289333 - protein, 432 aa, unidentified
MNNRLQVGIDFSQKRADFCLLFPDGRPLESHIAVDNSSPGYSLAKRLLLDALDSHSFDGVDVSGEATGYLWLPFFLQLAADPELELHDLKLYLLNPRWVKWFKKCFAQDHKTDERDPFYIAERTRTRRPDVTWSADPSILALRFYTRLRFHLVQSLAREKCYFSTFLFLKASSYRRLKPFSDVFGVTSRLVLTQQPSLDELAELPVEDLAMHLHEMSGHHLRDPFKNARKLKRVCQESFPLDDRLALPVQRILDLTLEHIRFLEGQVEQVNRWIATERQVHPSIAQLATIPGVGPVFSSGIGAEIGRTQRFLQGHKWDKKHKRHRPRNLRDAEDAVAKIAGLWWPRTSSGDFEAQDRRMAKTGNRYLRYYLIQAANLMRNRIPEYAKFYDRKYQEASKHHHKRALVLTARKSVGLVVGLLHRNEPYRSLERR

SEQ ID NO: 289334 - protein, 340 aa, unidentified
MGDITTIGLDLAKNVFQLHAVDEAGSVVMRKRLRRGQVLAFFAGIPPCLVGMEACATAHHWARELIALGHEARLMPPTYVKAYVKRNKHDVADAEAICEAVRRPSMRFVPVKTVEQQSALMMHRARDLLIRQRTMLVNALRGHLAEFGLIEAQGLHKVARLIAVVMDENDRRVPDIARQVLKVIVNQIEDIQTRIAGLETQVMAWHKSNPVSQRLATIPGIGPIIATAIAATVADPSIFRSGREFAAWLGLVPRQNSTGGKARLGGISKRGDSYLRRLLVNSAHTVLLCSKQAKTAPWLMSLLGRKPRLVAAVALANKTARVAWAIMRRQDTYRHAAVAA

SEQ ID NO: 289335 - protein, 410 aa, unidentified
MEVLHTHCAGLDVHKDSVVACVRRMAAGRVTTHVKTFKTTTQELMALSDWLSTEAATHIAMEATGVYWKPVWHILSDGEFELILANAAHVKNVPGRKTDVNDAAWLADLMAHGLIRASFVPDEPTQQMRDLLRTRKQIVRERSSHIQRIQKTLEDANIKLDSVVTNILGLSGRRIIEALIAGQTVPQALASLAHRNLKATTNELEASLHGRVTRHHRFLLKLHLDQIDAFDATIAAIDKEVDGNVEPFRVAIEMLSAIPGVGDLSATVIVSEIGIDMSRFETAGHLISWAGLCPKNDQSAGKRRSTRMKKGAPWLKSTLIQCAWSASRTKDSYLQAQYLRLRSRRGAKKAVCAVAASILTAAYHMLKNGTLYQDLGASYFDNRAKDKQALRLISRLKNLGFEVQITPMAA

SEQ ID NO: 289336 - protein, 341 aa, unidentified
MMHVGLDLSRKRLDVQLLTEQGERRQRLAAIPTADGLQDLVSQVATYQQPVRAAIESMTGARFVHDQLELAGWEVAIADGLKVKGLAPLACKTDKIDAWVLAELSRRDLVPAIWLPDPGVRAERERARWRLHLVHHRTALKNRIHQTLITFGHPRPVSDLFSVGGRKLLAGFALPEPWLGSVTAALQMIDDLNHQIADRERELRELGADHPYIPLLRTVPGIGWVLSYTIAAEIGDIHRFPSATNLIGYTGLCPSVRQSGEHDHRGPLTKHGPRFLRWALIEAAQHAARTPAYRTRYQTMKRRLGRQRGAKVATVDVARRLTNAIWYMLIRNQPFAPGGAA

SEQ ID NO: 289337 - protein, 447 aa, unidentified
MTTPSLPVLDPLAAFVDVGSEQMYVSIAGGPPEVFGTVTDQLHRLRDWLQERKVKSVAMEATGVYWLPLYGVLEAAGFKVVMVNGKQTRNLPGRKTDMKDCQWGATLHAHGLLQAGFVPPAQIRRLQDYLRLRADHLVSAAANVQHQQKALERMNVKLHDVISSLVGTSGSKVIAAILAGERNPDRLLALCDVQIQKKKAERVKESLRGTWAEEHLFALRQAVENWEHYQRQIAACDQRIEAVLREINGPDQPANPHPPIASSKRAGANAPEIDDLHSLLVKLCGGKDLTVLPAHTDYSLLQLIGEVGTDLTQWATEKHFTAWAGLAPGSHQSGKRKGSVRRKRNRAGRLFCVMARSLARSKHIALGGFYRRMAARRGGLVANIALARKLALLFWRVMVKGLSFAEAGLKAYEEQVLETKRRALCRLAKQLGRVVLPSLAEMQTKPA

SEQ ID NO: 289338 - protein, 415 aa, unidentified
MERLFERCAGLDIHKDTVVACVRVPGEDGGRHHETRTFGSSTEQLLVLLDWLRGWGVTLVGMESTGIYWRPVYYLLEDHMECWLLNAQHLRNVPGRKTDVKDAEWICQLVEHGLVRASFVPPREIRELRDLVRYRKAQIEERTREVQRLEKTLQDAGIKLSSVASKVLGVSGRLMLDAMISGTHDPEVLAELAKGKLRNKLPALREALEGRFTGHHALIVGQQLAHIDYLDEAIVVLSEQVDQVIAPFAHKVALLDTIPGVDKRTAELLIAEIGADMSVFPTHRHLASWAGICPGQNESAGKKRSSKTRKGSKWLRAGLTEAAKAASRSKGTYLSAQYQRLRGRRGHQKATIATAHSILVAAWHILAREVPWQDLGEDYFIRRQAEHAERYRNRLIRQLERLGHKVTLEPIPEAA

SEQ ID NO: 289339 - protein, 365 aa, unidentified
MYDSTTTVAVGLDVHARSIRLAAVRADELLEERTLPYDEGAVERLLRRWPVVRCCYEAGPTGFGLHRHLVERGIDCLVVAPGLVPQRPGERVKTDSRDARKLARLLAGGLLQPIHVPSPELEAARDLVRAREDARLDRMRDRQRLSKFCLRHGRTLPTSSWTVVRRKWLGEQRFGFAAQQQSFDTYVHAVDLVDARIEQLERAIRETAEQEPWRALVARLRCLRGIDTLTALALVAEIGDFNRFDTAEELMAFVGLVPSEHSSGQKRRQGSITKVGNSHVRRLLVESAWHARRRPKVGYELARRHRGQDAAVIERAWRCQQRLYQRWQRMAGRGKPHQKIVVACARELAGFVWAIATEQPLRAEG

SEQ ID NO: 289340 - protein, 344 aa, unidentified
MDYFAGLDVSVKDTSICIVDDAGRIVREVKVASEPQALLAVLKIPAYRFKRIGLEAGPLSQWLYSALAEAELPVVCVETRHMQAVLKAQINKTDRNDARGMAQMMRVGLYRPVHVKTLRSQKLRMLLTHRQLLQSKAIAIENDLRGTLRNFGLKVGMVGKVKFEARIKELVENQPDLAELVQPLLIVLRALREQIVVLHRRLLAIVRDDEVCRRLMTIPGVGPVVALTYRASVDVPARFRKSKAVGAVFGLTCSKYQSGEIDRSGRISRCGDEMMRVMLYEAAQSMLRSKKWSWLKAWAMQIARRRGIKKAIVALARRLAVIMHRIWADGTEFRWAREQALAAA

SEQ ID NO: 289341 - protein, 352 aa, unidentified
MTRITTIGLDLAKKVFQVHGVDAEGKVIVARQLRRKEVLAFFAKLPPCLVGMEACGSAHYWAREIAKLGHTVRLMPPKYVKAYVKRGKTDAGDAAAICEAVSRPSMTFVPVKSVGQQGLSMLHSVRSQLVSQRTQLVNAVRGHLSELGIVAERGLLGLAELAAVVRDKTDERLPVAARGALLVIVNQIETIGAEIAKLDTALRKENKASDLGRRLETIPSVGPVIASAFRARVTKPELFKNGRHLAAWIGIVPENDSTGGKPKQKGLSKKGDRYLRALLVTGAMAVVRQARIRPERYPWVANLLTRMSAKQAAIALANKNARIAWVVMVRGGVYEAGHRAPAYRGAAMPVVA

SEQ ID NO: 289342 - protein, 315 aa, unidentified
MNETSHNVGIDVSKLTLDIAIHETGESWSCSNDPEGVQDLSSKLKQAKPTRIVLEATGGYETLVTATLVAAELAVIMVNPRQVRDFAKATGQLAKTDRIDARILAHFAAVIDPPARPPKSPAAQHLEALLARRRQIVDMLVAEKNRLSSNHDRAVVKDLKSHIAWLERRLKASDDELQRVLKESPAWRERDNLLRSVPGVGPVLSLTLLAQLPELGQLNRRQIAKLVGVAPFNRDSGQWRGARHIWGGRAVVRPPLFMATLAATRSNPIIKSFYRRLLEAGKAPKVALTACMRKLLTILNTIVKTQTAWRSTYSS

SEQ ID NO: 289343 - protein, 412 aa, unidentified
MQVLYPCCCGIDVHAKTVVACLIKQGKRQTLTFSTMTDDLLRLSDWLTTEGCTHVAIESTGVYWKPVFNILEATLAVILVNARDAKAVPGRKTDVRDCEWLADLLRHGLLRSSFIPPLEIRELRELTRYRQTIIKEHTAVANRIQKLIESANIKLGQVATDVLGVSGRLMLRALADGEEDVERLVELARGSLREKKPELRRAMTSRLTPAQRFVLNELLIRLCELESATARVGAQIIKEVAESTDPFVPEAVKLLQTIPGIGLRVAEVIISEIGVDMTRFPTDAHLASWAGVCPGNNESAGRRRSGQTTKGSPYLRAAITQAAWAASHTKNTYLAAQYHRLIKRMGKNKALVAVAHSLLVITYHVLAQRADYRELGGDYFDRQHQQTQQQRLVKKLEGMGLKVTVEALPEAA

SEQ ID NO: 289344 - protein, 415 aa, unidentified
MEATVERCAGLDIHQASVVACALVGPPGCKPRKETRPFGTATRELEALRAWLEELGVTHVGMESTGVYWKPVHAVLEGRFELIVGNAHHIKAVPGRKTDVKDAEWLADLVRHGLIRPSFVPPPPIRELRDLVRLRRSLTEARSTERDRTLKLLETANIKLASVASEVFGVSGMAMLRALVEGEAAPAEMAELARGKLRSERERLTLALEGRLTEHHRYVLAFHLRRLAAIEEDLRALDARIEAKAEPFRAQRRLLQEIPGVDALVAVTIIAEAGVDMSVFGNAKRLAAWAGVCPGNHQSAGRRRSGATRRGNVHLKTALVTAAVSGSRRKGSYYRDKYHRLRARRGRLRAAVAIAHKILVAAYHMLAEGVPFRELGEAFLDQQARQRNVRHLLNRLNHLGYDVLLQPRAVEAAGP

SEQ ID NO: 289345 - protein, 391 aa, unidentified
MYLIGIDISKFKHDCFIATETGLVIKDSFSFDNNQEGFKKFLNVLLSLDQTQEIRIGLEATGHYGTNLKLFLHENNFSFIEFNPVLSERYRQVSSLRKTKNDKIDAKLISKMLLSYDYKTNSSISYHILKLKSLTRFRKRLVKNRTVFKERLINILDIAFPEYSKHFTQVWGKVSFYILKNYPTAKDIANINVEEVMTTIHSLSKGHYSMIKLMKLIETAKTSIGFKNDYHVLELQLTINMIEQLDSSIDKIENEIIEIILIQYNFKTATIPGIGIISAASIVSEYEDFSKFQNPNQLLSFAGLEPAIYQSGTQQTYGHMVKRGSSYLRETIMNIIPYVMAYNSVFYEYYRKKKSEGKHHRVALTHLAKKLIRIIYHLETNNISFDSSKIK

SEQ ID NO: 289346 - protein, 412 aa, unidentified
MTSISFGWYVGIDWATQAHQVTVLDAERRVLGERSVAHTGSALAELASWLTEICGGEVDRGAVAIEIPRGTVVETLLERGFAVFALNPKQLDRFRDRYTVAGATDDRRDAFVLAASLATDQPAFRRVRLDEPLGIRLRELSRLEAELHQEEGRLTNRLRDLLHRIYPQVLRLAPAADEPWVWELLELAPTPAAAQRLTRPALSKLLRAHRIRRLAADAVLAHLHAPPVSVAPGTVEAVSEHIELLLPRVRLGHAQRVRCLGRIERVLQAMAGAPPGQGEHRDVEILRSLPGVGRLVAATMLAEASQLLAQRDYHALRAQGGIAPVTRQSGTRARVDMRYHCNHRLRNALYHWGRVSAQCDLLSRQHYEALRRRGHSHGRAVRGLIDRLLVILMAMLRSQTVYDPTRRRAYAA

SEQ ID NO: 289347 - protein, 409 aa, unidentified
MKLFVGIDVSSQDMKACIMSFDGKTLASLTVDNNLIGASYLRDQIVDIAQKHVIQEIVIGMEATSVYSWHPAMFFHEDESLKRFQTKVLTINPKLIKKFKESYVDLDKTDHIDAWIIADRLRFGRLRQSVVMQNQFIALQRLTRMRYHLVHNLTREKQYFLEHLFYKCSSFTTEVESSVFGNAIMELLLEQYSLDEISAMDIQDLAEFLRIKGKNRFTDAEYVAKSIQKAARSSYRLSKCVEDSIDLLLGTSIESIRSVTKQIKELDKAIKKLLDGIPNTIQTIPGIGPVYSAGILAEIGQIERFDNQASVAKYAGLTWNKHQSGLFEAEETKMIRSGNRYLRYYLVEAANSVQRNEPEYRAYYLKKYHEVPKHQHKRALVLTARKLVRLIDTLLRNDQIYTPRRKVNK

SEQ ID NO: 289348 - protein, 341 aa, unidentified
MNYAGIDLASKSSAVAVVDEQGNVMEQREVATDAGQLAKVLAPFAPVSVVVESSPLAEWACQVLEEAGHRAQIIDARAAKHLMDARKKTDRRDAQTLAQIVRSGWFQPVHRKSDSARLERSQLQGRQGLVRTYCSLDSQIRGLLRAHGICLGRVSKSRFAQRVRERAQQHSEALVAVLEPLLAVYEHSLEQAEAMKKQMQAQQREDELQQQLQSVPGVGPLTAKVFASTVDDPRRFANGEQVADYAGLTPGVTQSGERCVRGSITRQGDHLLRWHLVEAAHAMIRQGGDCRLKRWARQLAETKGAAKARVALARKLAIVLWRLWLKGERFEPEHGTTGAAA

SEQ ID NO: 289349 - protein, 377 aa, unidentified
MTSIDVPAEARETVYAAIELSKKTWMLGIAHPDRDRPSIHRVCGGNIVELVSRLRVAARNNRRILVCYEAGYDGFWLARALTKIGIECRVLDPASIQVNRRARRVKTDRIDVLALLRALIATDRGERHVCAIVRVPSVEEEDARRSHRERQRLVRERTGHINRIKGLLFGQGIRDIKPKLRRTRIDFAALQTAEGHPLPDRLRRELEREYARLALIETQLREVEKERDTADAQDPVVERKRQMLVAVQGVGGTSAAILAREVFARSFASRRQLGSYLGLTPSAYDSGSITRSQGISKAGNSWARRILIEVAWLWQKYQPRSPLTSWYLQKTAGQSSRIRRIMLIALARKLAISLWRYVETGLVPEGVVMTRAEPHSA

SEQ ID NO: 289350 - protein, 394 aa, unidentified
MNEQKESAVLGRIIGLDLHPDVFSAAALSGREAVTAKITQQWDRLPTAQLEGWAKSLAAGDLVVLEATGNSFECCERLRRANVATVVLESQRAGQIRKTYCVNDRVDAVKLARIYLSGLAQPVWQPDATTRERREVLHAYRKSVATATRTRNRLKSYLSDHGVRLKPGVRLTQTSGQKTVRISREWSTLQSVLIEQMLAELSLAAERRTVLSAVIAQEVVSDPKLLRLVRLLGVRHLIAFAIAAVVGDIARFANPKKLVAYLGLAPTVDQSGNGPRGQQSLITFGRGDLRALLTQSAHNALNQRSSPLHTWGWKLCLRKAHKNVAITAIARKLTVSIWYLLRGLFTPLKTIDATLRLKITKIATTIGTEKIKQLGYPSKAAFIEEKSLWLLNPT

SEQ ID NO: 289351 - protein, 342 aa, unidentified
MQISTIGIDIGKSSFHFVGFDARGGIVVRRQCSRTQLIRELAKVPPCLVGMEACCGAHHLGRILIAQGHDVRLIPPQYVKPFVKSQKNDLLDAEAIGEAVQRPTMRFVPLKTMEQLDLQAIHRLRTRLVARRTAVINQMRGFLLERGVTFPIGRRALVERFPEVLDNPALGLSVRFCRLLQQLRDEWRLLDSAIQEVDQEIHTLAHDDEACDRLMQVPGIGPLTATALVAAIGNGAAFAKGRDLAAWLGLVPRQHSTGGKTVLRGISKRGNAYLRCLFIHGARAVCRHHRQKPHRLGRWLANLEARAHPNVVVVALANKLVRTAWAVLQRNNHYDGRLLANA

SEQ ID NO: 289352 - protein, 343 aa, unidentified
MQSISTIGLDIAKSVFQVHGVDAAGQVVLRRQLKRRYVLAFFQGLPPCLVGIEACASSHHWSRELQALGHTVRLMPPAYVKPYVKRQKNDITDAEAICEAVTRPNMRFVPTKAVEQQSCLMLHRARHLFIRQQTAVINSIRAYLAEFGVVAPVGRRGVEQLLEVVADPADRRLPEVARVCLAALGSQLRALKAQILEFDRRIIAWHRSNATSKRLDAIPGVGPALATALVASIADPRAFRSGRDFSAWVGLVPKQNSSGGKDKLGSISKQGDRYLRSLFTAGALAVIRYAKIHGTAHRPRLTGLLARRPTKVAAIALANKLARMAWAMMARNECYKEPAALTA

SEQ ID NO: 289353 - protein, 404 aa, unidentified
MRVIGLDVSRTVGEIAYLEDGQLREGGRVVLRHDALERFAHGLRPSDEIVLEATGNTSAIVTALKPHVAKVVIANPLQVRLIAEARVKTDKIDAAILAQLYASGFLPQVWMPDSYTLALRRQVARRSQIVRHRTRLKNQIHAVLAAHLIPQCPAADLFGRKGRTWLAEQPLPMDERLAIEQRLRELDRLGEDLDAIDKLLCESVLHDEQLKRLLTITGVNCIVAIGLLAAVGDISRFASPEKLVSYFGLNPRVRQSGLQPAQHGHISKVGRAHARAMLVEAAWASANAPGPLRAFFLRIRGRRGQQIAAVATARKLAVITWHVLAGHEDYEWARPALAAKKRRELELRAGLPVRKGHRGSAAEYSIKEVRDRERATAEMAERAYTRFVSSWKPNRPPSSMREAP

SEQ ID NO: 289354 - protein, 339 aa, unidentified
MELYSGIDLHSNNSHVAIIDDQQNRVFYRKLANDPEIIANAFAPYRERLKGVVIESTFNWYWLADLLIERGYSVHLANPCGIQKYSGLKHADDRHDAFWLAHMLALNILPEGYIYPKEDRPLRDLLRKRAHLVRVRTSLILSLQNIVLRNHGIKIRSSDLKKLTQDPVAEILKDQEELALAGKASKETIDFLTRQIQRIERVAQNKAILKEPFSKLLTLPGVGEILGMTILLETGPIERFKAVGHYVSYCRKVPSRWTSNEKVKGKGNTKNGNRYLSWAFSEASDHARQTHGPSRDFYNRKLNQTNASVAHNALAHKLARAGYYIIRDHVEFEEDKMFR

SEQ ID NO: 289355 - protein, 407 aa, unidentified
MRRVIGMDIHRTFAEVVFWEDGKLRPAGRVSMTRSGLEGFGRSLGKQDEVVIEATGNAMAVVRMLSPYVARVIVANPLQVKAIAHAHVKTDKIDAGVLASLRAADFLPEVWLPDPDTERLRRLVARRNQVVRHRTRIKNEVHAILHAHLILPCPHADLFGRLGRIWLAQQVMPDDECAAIERHLRELDRLSEDLGVLDTQIAQTGSADPAVKRLLTITGVNLIVAAGLVAAIGDVRRFTSPQKLVSYVGLNPRVRQSGLGLAQHGRISKRGRSHARAMLVEAAWAAAKAPGPLRAFFLPYPRPRGHQIAAVAVARKLAVLCWHLLTKSADYQWARPALVANKLRAMELQAGQPARKGNTRGTAYAYNVKALRDAEIELARHAEQAYERFVSHWQRRGTAKQRTGAAK

SEQ ID NO: 289356 - protein, 403 aa, unidentified
MQHVIAFDVSMGKSYMVIYNAQKQCIFESEINHSKPDFEELRKRIDQLMNENKKSPHIVFEATGVYSRQLERFMQDNKFEYFLLNPLEAKLQCDSLRIHKTDRSDAHQLALTHFTASRREKTGTDNLFYQLKSLSRFYSELDDGLSLIRSRMHKVIQLTFPELEQIFTTKSDLFLNFVQLFPHPDFVQNLSKTVMKNQIRKNTNKNISISIAEKKAMEVLEAARYSYPAVRQDDVLCEQLKSYAKRYQELLYQKEQCITKMVRLAESRTEYPIILSFPGIGPNTAIRLLAEIGDITRFENNKQLNAFAGIDIRRFQSGKTFFKDKINKRGNKHLRKLLFLIIQNMIKLRRYGQNHIVEYYDKLKTQPYNKCHKVASIACVNKLLKLLFYLITHNIHYDYRLTA

SEQ ID NO: 289357 - protein, 447 aa, unidentified
MDTESATQYAAYIGIDWADKDHAYALRATEGKKVEQGKVEAKPEAIEEFVAQLRQRFGGKAIAVALEQSRGSLLFTLSKYDHLVLYPVHSSTLDSYRKACHPSGAKSDPDDAALILDLLQKHPEWLQPFAPDTVPTRTLQFLTEERRDAVNDKTRYLNQLTAALKTYFPQMLEWLDVDSKVMCEMLQRWPTLEQLQQQKPSVVEEFLREHRYPVVRVKPLQEAMEKAIPATTDQAVIEAKKFTVQRTIAQLEALRENIAELDRRIEQITRLHEDYRVFASLPCAGKVMVPRLIAAMGTQRDRFQTASELQCQTGIAPVKEASGQREWIHWRWACPKFLRQTFVEWAWLSTRKSQWAREFYDRQRAKDKSHHAAVRALAFKWQRIIFRCWKDRCPYDEARYLATREQRARTAKASTDGSPQLKSSQAGGVEITWKNVSGFSRPDSISC

SEQ ID NO: 289358 - protein, 413 aa, unidentified
MLKIVYPICCGMDVHKSFLVACIASTNNQGVTTYVNKRFSTFTGDLRKCSAWLANHNCKDVCMESTGKYWIPIYNILEPTCNIVLAHPKYVKAIRGKKTDKKDAKWIADIFKHDLVSGSFIPPADIRQLRDLVRYRWKLTNFTTGEKNRAQNCLTVSNIKLDDVFSDVFGKAATAITTRLLEAPSEKLTDVSAFRTKGMKATDEQILAAVDGEMCVEQAEKLRIIRSHMDGLDLCKANLESLILSVAQKYLSQLELVMTVPGIQAFAAIGIISEIGVDMSVFPTSKHLCSWAGLTPQNNESAGKKKTTRISRAGAYIKPLLVQCALCAIRKKSNPEIRNRYNNLKKRRGHKKAIIAIARMLLTAIYNILKKNEPYNPELYAHINTPPEHRTVSVEEAIFILQRQGYLVTPSAT

SEQ ID NO: 289359 - protein, 323 aa, unidentified
MTRIICGVDIASSSLAARVGQEGDAASFPNNTEGIAALATFCHAHQVELVAMEATGGYEQQAFAQLSEQGLGVAIANPRAVRQFAQSMGLLEKTDAIDAGVIAWFAQVKQLQPLCLAPHTQLELRARVTRLRQLTELRTMQMNQQRLVTNRAVQATFRKMLALVAKQIQELEKAIAALIQADPLWRELDQAFRAIKGVADRTVARIMAEMPEIGTLSNKTISKLAGLAPLANDSGKHQGKRSVRGGRASVREILFIVASVVGRYEPDFVAFQKRLRAAGKPPKVVRIALAHKLLVRLNAKARQVRQRLTAVQLQPIALPAGCL

SEQ ID NO: 289360 - protein, 331 aa, unidentified
MFESSKIKVEVKVEVEAATPSTFVGIDVSKEKLDVCVMPGGRLHAFANDAAGHAKLVALSQSLGNVLLVIESTGGYERPALFALQDAGLAVALVNPRQVRDFAKGIGQLAKTDALDAAVLAEFARLVAPRPTDKTSEKQRELEALVTRRRQLLEVRVAEKNRAGQTVDKFIQKTLDRMIQTLDCEIKAIEDRIAALLESDDQWKAKLELLVSTPGIGKIAAATLVAELPELGKLNRQQIASLVGVAPFAKESGTMRGRRSTWGGRRKVRSVLYMAALTARRCNPVIQAFAQRLAIAGKSFKAIQVACIRKLLVILNTMVKNNTPWENVLKK

SEQ ID NO: 289361 - protein, 357 aa, unidentified
MGKSIKNLSSVTIVGLDIAKNVFQVHGVDAKGAAIVARSVRRGGLLKFFASLPPCLVGMEACSSSHHWARALSELGHQVKLIPPAYVKPYVRRNKNDAVDAAAICEAVGRPNMRFVPVRSVENQAELMRHRARELLAGNRTRMLNALRGHLAEVGIVAAQGAQHAYGLKRLLTDGCDENGEIVVADCVRKALAPLVQQIDAIDEEIEAIDDHIKAQVKADDTARRLARVPSIGPITASAIVATIRDPSAFASGREFSAFIGLTPRQSSSGGKERLGRITKMGDRYLRKLLVVGACSVLNHRKGHNDALRVWADQLLARKAVKYKFKLTAVALANKVARIVFALMTRGGEYDDRPLAA

SEQ ID NO: 289362 - protein, 397 aa, unidentified
MHFAGLDWASQEHVVCIIDERGSVLERFAAAHDQAGLDALCERLLRYDDLSISIERPSGLVVDTLLEAGLRVVAVHPNVVKAARSRYRTAGKSDAADAYVLADLLRTDGHRFAPLVPHSEEIKSLRLLVRLRKDLVHNRVGLANQLRALLHEVFPGAAGLFSDVDSAIALTFLRTFPSEAAGTKLTEKRLARFLTEQGYSGRRSAAELLARLRTAPRGIVSEDLCEASAAGVMSLVTVLEPIVAQISALTAKIDRRLDELPDAKIICSVPGSGRVTAAAIVAKLGSDRHRFKTPEQLAALAGVTPVTHSSGKHHAVRFRWACDHELREAFTCLADNSRKRSAWAASMYRRARDRGCDHPHAIRILARAWTRVIWRCWQDGVPYDPTKHGEAAKLLAA

SEQ ID NO: 289363 - protein, 394 aa, unidentified
MNSNQKKYFVGIDISKNSFDATLIDMHQKKLFYQNFSMDKVGFNALLTKLKPFNKPSIQITVESTGVYFISLYNYLLNTGFDITVINPLLVHNFHKSMSLRKTKTDKKDSFIIALFTLKNLEILSKYNKNTSTIKRLCRERDKISEKIARIKTAIKSDLNVLFPELENNVNIFTNTMLLLLAKHSASNNIAKMRINQINGIFNKTKGNKVKITSKELKRLAKDSIGHGDKHLEKVLRNKIKELRFYQEISNDYDTEIQTFIKENYSFDFEILTSIEGIGEITAQKFLIEIDNIKNFTNYKQLTAFIGTDPSRKQSGTSIMYQGRISKRGNKYLRRTLYQMAVSCIRKNDTFNLYYQKKRMEDKKYKQAVIATGNKLLRVIFSMLTKGNYYSKAY

SEQ ID NO: 289364 - protein, 412 aa, unidentified
MNIRVEKACGIDMHQAFLMATMLDLAGTKDTRRFSTCIEDLLNLREWLIDNKCQRVAIESTGVYWIPTYTLLEGKVETIVANPLHIKNIPGRKNDVLDSEWIAEICLNGQIKPSYIPPKEIREIRELTRSHVKLTQARTAFKNRAHKVLSRAGIHISGVISDIFGKSGMIILNGILNGKTIDQTFVEIKNKKIKIKKTELKDSLKGELSQNDIFVIKECLESIKFFDKKINEFDSKINENLKGMSKEMKILMSIPGVGFTTAAAIMAEIGNIDVFSKPKKLVGWSGLAPSINESAGKSSNGHITKKGNKFLRTILVLAANSIAIGRPNKLRFFYQRIKGKKGHKKAIVALARKLVSIIHHLLTFKEVYSEEEGKQKQFKLPKFIPVKDFSIDDMIGILCEAGYSVNKTAANS

SEQ ID NO: 289365 - protein, 369 aa, unidentified
MASRKALTIGIDLGDKVSQYCVLDEEGTEVVWGSVKTTPQAFGKEFGEMARCRMAMEVGSHSRWVNELLTKLKHEVLVAEARRIPLISSSDNKSDAVDAEMLARLARLDPKLLHPIRHRGREAQKDLTMIRARAALVEARTKLINCVRGLVKPTGTRLGKASSEAFPQRATAGLPESLRVALTEMLEVIERMNEAVAAYDEQIEKLARKQYPETARLEQVNGVGALTALTYVLTVDDPHRFERSREVGCYFGLRPKRSQSGQSDPQLGITKAGDAYMRQLLVNCTHHILGPFGADCKLRRWGLALAQQTLERDRQKKQAGQKVKKSRAKKRAITAVARKLAVLLHRLWVSGKPYEPLRGCQQEPAAAKG

SEQ ID NO: 289366 - protein, 325 aa, unidentified
MQGKDRSEQETKTQSTVGIDVCKLWLDIHILPSEEAFRVPNTKAGSKEIVRRLGRYDVQLIAIEATGKWHRDLHRNLADHGYPVRVVNPLRARLFAEAMGLLAKTDQLDARMLAVFAASLTEARPPAPEIIEALKELVQARCSAVEEQTSLTNQFKSAATVFLRRQLKRRLTQIAKHIKALETESLKRINADPGLARRYDILVSIPGFGDVVAMTLLAWLSELGSCNDKQIATLCGLAPWPDDSSDRMGARHIRGGRQVIRNILYLAAITAKSFNQPMKAFFQRLTANGKAKKQALVAVARKLIVLANTLVRADRLWQKEAPKCA

SEQ ID NO: 289367 - protein, 313 aa, unidentified
MNEVFVGIDVSKAQLDVAVRPSGEVWSVSNDETGFAALVAKLTPLEPKLIVMEATGGYQAPAVAALSVAGLSVAVVNPRQVRDFGRATGQLAKTDVLDAQVIARFGEMLRPEPRSLPDEETVALNALVVRRRQIVDMITAEKNRLGTAEKVVRRDIEEHIKWLQRRLKDADDDLYDGLKKSALWRVKEQILKSVPGVGRVTTVTLIAQLPELGTLTGRKIAALVGVAPLNRDSGTYRGKRCIWGGRAAVRQALYMATLTAIRRSPTIRAFYERLIAAGKPRKVAHVAAARKLLVMLNAMIRDGASWVERTQPA

SEQ ID NO: 289368 - protein, 330 aa, unidentified
MGTAATCFAGIDVSKDTLDCCLLLPGGETKGAAFGNDPKGHAALLAWAGRHARGAAVQFCMEAAGPDSEAPATAIAAAGRRVSVVNPTRVRYAGLARGRGNKTDKADARLIAEYAARESPPAWQPPPPQVRELRGLVRRIDELTEAAAREKGRLASPALTASVRRSVTRVVRLLETEAARLRGAADELVASSPALRADRALLESVPGIGRQTATVILAELPAVDRLPSAQSAAAYGGLSPREFTSGTSVRKRTRLSKAGNPRLRKALFLPTQTAVRFNPLLKGFFDRLAAAGKPKMRAIGACMRKLVMIAYGVLKNRAPFDPAWSSRTAP

SEQ ID NO: 289369 - protein, 450 aa, unidentified
MEKKKRENYKPFRVLKPNAAGLDIGARSIYVAVPDDRSKESVRRFDTFTEDLHKIAEWLKSCKIDTVAMEATGVYWIPIFQILEAYGFEVFLVNARHIKNVPGRKTDVQDCQWIQHLHTVGFLNSSFRPPQNVCTIRTLLGHRDNLIKASVVHVHHIQKALSQMNLQIHNVISDITGHTGLAILDAILAGERNPNKLAKNRDRRIKSDETTIAKSLVGDYLPEHIFTLKQSLDTYRYHKTLIYECDCEIEKYLNKFDSRIDSDKKTLPKSKPSRKKKQGNDPHFDLQEHMYRILGTDLTQVNGINSLTAHVFFATVGPDLSKFPTSDQFCSWLKLCPYNKITGDKVISSKTLKTKNRLAKALRLSAQALWNSKSFLGDYYRRMRAKHGAPKAITATAHKLARIIYYLVKNRVPFSESVFEEQEKRFKKQLENRIRKQAKTLGLKIVPILS

SEQ ID NO: 289370 - protein, 397 aa, unidentified
MAVAVGIDVAKEFHWAAAVDERGGELVSRRVDNEPAQIQALIDELERVRAECGPVTVGIDVVGGIASLLTATLAEAGFALVHVPGLAVNRARQGTTGGEHKSDPRDARVIADQVRTRSDLRAIEPTGELDVELRLLVGRRRELVTDQTRRIGRLRDLLASIHPGLERIVEPTQKASLWLLSRYVTPAEIRRAGRSRLLNHLLRGGRLPRPQLERLADAALAAAQAQRRALPGERLAADLVRELAREALAVRERLKTLDADLEQALGHHPDAALIRSLPGMGATLTAEFIAEAGGIGRFPTPDRLAAAAGLAPVLRQSGKVRYLQRARGGNKALKRVLYQSAFCSLSHPASRAFYARKRREGKRHHQAVIALARRRVDVLHALLRTRQPYRYREPRAA

SEQ ID NO: 289371 - protein, 391 aa, unidentified
MFLLGIDIAKLNHVASCIDSSTNEVVFSNFKFKNDFKGFSALLNKIKSFDAKNLIIGLESTSHYGENLINFLFIHNFKVALINPLQTSHLRKANIRDAKNDNIDSLNIAKSLIFTNLNFVSKKNIECFSLKKLTRFRSNLIKQRSKAKIQLTSLLDLLFPELQYLFKSKIHSKAIYSLLKKYPSAEEIAALKDDEISNLLYASSKGHFKKEKSIELKSLAKTTVGIKDTSISLHLIQLIELIELYTKQIKDIEIKITDIVKNLDTTLLSVPGISVIACAIILGETNNFENFSSSKKLLAFAGLDPKIRQSGNFNASSCRMSKKGSPYLRYALIFTAWNIVRHSEKFNKYYSLKRSQGKSHYNALGHVAHKLVRILFTLIKKNISYQEEKLE

SEQ ID NO: 289372 - protein, 322 aa, unidentified
MGLDVAKHTLDAILLVGNSTKYKVVPNKADGFRQLQAWVIKNGYLQGRVCLEATGQYGYEAAEYLHKCGYMVSVINPARIKAYAASRLQRNKTDKVDAKLIAEFCQREKPRLWSPPRPAYNELKGMVHYLDDLMGLRQQEKNRTEFGKEVEMVGEMLNDHIAYLEEKIKFIRKAIHNLIQQDPQFKHDCGLLMSIPGVGELTAARLLAEVRDFRAFKTSRQLTAYAGLNPRQYQSGSTIRRKSRISKTGNTNLRYALYMPALVAYRYNPLIKTFCQRLLDNDKSKMVVICAAMRKLLVLAYGVIKSNKPFDPNHTNFEVAFS

SEQ ID NO: 289373 - protein, 343 aa, unidentified
MTIIRIGLDTAKHVFQLHGVDESEQPILRRQLRRGEVERFFAKLPPTRIGLEACGAAHHWARVLRALGHAVVLLPPQYIKPYVKRGKNDALDAAAICEAMSRPSMRFVPIKSAEQQAALMMLRARELLVKQRTMLINAMRGHAAEFGVVAAKGPVKVRELLPRAHAAEAGVPELALEMLRLLASQLDALDGKLKMIEATLMAWHKQDAVSRCLASQPGIGVPGLDPGIGAVSFALRVSDPKLFRSGRHFAAWLGLTPKENATGGRSRPGRISRQGDQSLRRLLVLGATTVIQFAKPGRASPWLLQLLARRPRKLAAVALANKMARILWAMMVSGELYRRPQPV

SEQ ID NO: 289374 - protein, 343 aa, unidentified
MELTISWRFIVGIDISKNKLDCYLLDRKTSQGFELQVINSSEGLQRLGRWLADQQVDDSQTILVSEHTGRYGEHLLRWTTNEDWPHAVVKTTALDKVTPEHHRKDDRYDAQALTDYGVRFSDRLRLTEAPSPAVGQINRLQAERRKMVTQRAALKSKLTEADTHDADMSQLTAMWREQVELLSEHIDQLEQTMDELIRKDSSLKNRHKMMQTAPGMGLVLGRFWLSLFAGQDILDPRKISSRFGFAPHSHTSGTSVRSPDRSSGYGNSEMRRLMHLSARSVAEHHPHYREYYEGKCEEGKHELVAINNIINKLLRLYCAMWNNRAEYDPDYIQKNKHKWKKSA

SEQ ID NO: 289375 - protein, 358 aa, unidentified
MLLSRINCEERQYKRILSNKNETMYTKTVVGIDMSMDDFHVCLMQVKEDHKSVVKGSRKFANTAKEFEEFLSWCSTKSKTKVPVIFVMEATGVYYEDLAVYLHEQQKYVCVELANKTKHFAQSHNLKTKTDKVDAKMLAQYGIERQLERWEPMSPQYKELRDVCREKLSIQKELSRARNQLHAMSHSSSMSKHVTELKVKQIQFYQQAIDELKQEIKRLVDKDPELKRKLAIVQTIPGVGLELAVILACETNGFRLVKNIRQLVSYAGLDVEFRQSGLYNGKTRITKKGNARIRQALYMPALSAIQWNEPIKQLNERVCSRNPTLKKKGVVAAMRKLLILTYILWKKEEEFDTSYQWI

SEQ ID NO: 289376 - protein, 439 aa, unidentified
MTNRIPEMVLAIDFSLDRLDVSLRGDEREWRWAHQAYPNNWPGFQQLKQDLLTELNQVGPVRLTTVGESTGPYWWHAFYQFGHDEALQPFSPQLALLNPARVKGYRKALAEQDKADPDDARLIDQYYRAVGVDHPYQFPDRYLRLRTFTRAYARVTHTLASEKAYLLSVLYLWGSEYQRREGKPFSNLFGATSLYVLDEFADIQAIAAIPLEELTTLLAQRSGHTFSDPQANASKLHQAALHSYPIPAPLADALHRVIQHTLAHIRFLSDNQKAYRQLIEQELATLPEAKRALDFKGLGPILVAGCLSEIQDTTRFVTGDKFDRRLKQRRPRTYHDGQASVAKLAGLWWPRHDSGHVQGLQPYLARERNPYLRYWLVQAAHTLQRYQPDYHRFYWKKYREALSHHHKRAIVLTARKAVRLVFALLHKGRQACLEEGLLT

SEQ ID NO: 289377 - protein, 414 aa, unidentified
MTIVAHAHPFVIGVDTHARTHTLAVLVAATGELVATEQFPATDAGMNRAVAWAARRTDGELTALWVIEGVATYGARLTSAVKRSGFEVVEAAAMDARAHRGTGKSDPLDARRIAASVLSLEAEQLRRPRSDDGTRAALRVLVTARAHMTTERTAAVNALTALLRVAALGIDARKPLTTSQIGEVARWRTRIEDLATITARAEAVRLAKRVVDLNGELAANQVQMVDLIHASKAAVLLDTTGIGPVTVAVVYAAWSHAGRVRSEAAFAALAGVNPIPASSGNTIRHRLNRGGDRRLNRALHMAVITRMTHDPETRAYVERRRAEGRTTKEIRRCLIGGVSPLRLGPRLAVAPRSCRGMASLPSHRLMASLSTATLDTPRPSTGVRDMPDPGPNNEEPAKASTPRSQPPTPMGGKG

SEQ ID NO: 289378 - protein, 346 aa, unidentified
MEQITTIGLDLAKQVFQVHAADAGGVPIFNRKLRRAEVLRFFEKTPACLVGMEACGSAHYWAREISALGHDVRLIPPVYVKPFVKRGKTDAADAEAISEAVTRKTMRFVPVKSADQQAAAVVLKTRALLVNQRTQVINALRAHLSEFGIIAAAGTTKVAGLISIVRDEADLRLPKAARHALMEVASQIEALKAQIEKLEKVIVATVKRDDDARRLVTIPGVGAITAASVRALVPDPGGFKSGRHFAAWLGLTPKPHSSGGKERLGRISKMGNPALRSLLVVGATAVLRHARGNPNASRWLTALLARRPYRIVAVALANKTARIIWALLVKGGTYQDNGASNQRATA

SEQ ID NO: 289379 - protein, 401 aa, unidentified
MGSLWAGVDVGKTHHHVCVVDDDGTVVLSEKIPNDQQAISGIAGRLGKRRKPIRWAVDLRGGPASLLLAVLFDRGADVRYVSGTVTSRMAEAFHGERKTDAHDAYGIAQTLRMRADLPTLTLADGVQQQLKLLVSRRLDLVADRVRITARIQDLLTMISPALEKTLNLRSKGAVRLLAQWQTPGGLRRAGEARILAYLRQHGVRAAKALTVKALTAARTQTVAVAGEATAASIVAEMATDLEAVNDRIAAIEETIAAVVADHELGEIVTSLPGIGTTLAAEFLAHAGTLTTYPSAAALAAHAGLAPISRDSGRRQGHQVRPHRYHRGLRRVFSMSSFTALTHCPRSRAYYDKKRAEGKTHRQATAALSRQRLNVLWACIRDKTPYQPKQPRSAEVALYELA

SEQ ID NO: 289380 - protein, 370 aa, unidentified
MSVRRILAKTINTDLEYEAIGIDLAKNCVSAALLTTDGEVVCIDRLDYSELEKSAQALSSTTFAMEPCTEMNYLVQKLEAWGHRCLVIGGKNVQNYVENHFSGQKTDLNDAQALAFLAQDTQLRTIKAKDMEQQKYASLTTLREQYIKQYRQTIVSLKGICQAWGLNISKGISGKARLKDLIENHAAFPEELKESLVDMVTHAQTAQKALNKITKTLEELAKSDKVCQLIQTIPGLGSICSCRLRATVGDIKRFKSPKDFPAYYGLVPRSIATGHNERKGKITHRGDRTMRSLMVQAAGSLVNMATKGKLKSKQLTKWILKKQKEKMPWGKLVCAVAAKLLRIVRAVLISRKAYDPKLAGVAKCSLPKAT

SEQ ID NO: 289381 - protein, 322 aa, unidentified
MHSLGIDIGKTTMHVCLLTDDGKALRRKLDAGETGRVALIEWIEKKVGEPVHACMEATGGWEEAIATLLHEHGHTVSVVNPRRIKAYGDSEGARSKTDHADAGLIARFCRTQCPTQWHPPTEAERTLTDLVRRCADLEQMRCAEQNRLASPLRSSIVRDSLERSVTELNEQIAALTDDIRNHIDRNDELKGRRDLITSIPGIADATAEIILGELGDIMRFQSAQQLAAFCGITPCEWTSGTSVRRRPSISKRGNARLRAALFYPAMSAMQCNPVIHAFSERLRSAGKTGRQIVVAAMRKLLHLVYGVIKHQMPFNPAWTLDS

SEQ ID NO: 289382 - protein, 385 aa, unidentified
MSQTVAAPIPAAVDHERTLAIEVSNKSWVIAAQVPGLPHTKAKRTIDPEAEALLAAIAAYRARAAATGRSIERVIAVYEAGWSGFWLARWLMRHGVEVYVVQPSSVPVDRRIRRAKSDGIDSELLLRTLLAWLRGEPRVCSMVPVPDEADEDARRCVRERSELISERIGLTNRIGAILATLGVSDYNPLLRNRGGRLAELRTALGEPLPANAHAKLKRLLARLELVLTQIAELERERDAVVETEASDGASKMIQQLTALRGIGVQSATVLVREAFVRRFANGKALGSYAGLASSPYSSGGIDREQGIGKAGNRLVRTVMVELAWLWTRYQPGAAQVCWFRERVASTGRRVRKIMVVALARKLLIALWRFVIDGVLPEGAVLKPAA

SEQ ID NO: 289383 - protein, 403 aa, unidentified
MIFVGDDWAEDHHDVYLMDEAGTRLASRRLPEGITGIRALHEIIAAHCEDPEQVVVGIETDRGLWVAALVAAGYGVWAINPMAAARYRDRHHVSGAKSDSSDAKLLADLVRTDRHNHRPVAGDSPDAEAVKVLARAHQSLIWARTRHANILRSALREYYPAALEAFDSLTDRDALAVLGRAPTPERGARLSLAKISTALKAAGRQRNIDARARDIQAALRTEHLAAPEAVAAAFGATTTAAVHVIAELNDQIVELETALAAHFETHPDADIYRSLPGLGVILGARVLGEFGDDPNRYTTAKSRKNYAGTSPLTVASGKKRAVLARHVRNRRLYDAIDQWAFCALTNSPGARAHYDAHRAAGDTHHQALRALGNRLVGILHGCLRHRTHYDETKAWAHRATAAA

SEQ ID NO: 289384 - protein, 385 aa, unidentified
MNNTTIVFIGLDTAKEYSEVAYTFDDRNHKPCLLSRIRSTKQGITKLARQLQSKYPNATLYFVYEAGPCGYWIYRLLTRLGHQCFVVAPSLVPKKPGIRVKTDKRDAVMLAQLLKNGDADPIYVPEPEDEAIRDLSRARERAMRDLNDARYQLKALLLRNHILYDGTANWSLKHLRWLTELVLPFPAQQMVLQEMIQTVSERTARLKRLDEELAYQVKQWRYYPLVKALQAMRGVRLLIATGVIAELGDLTRFDHPRKLMAYLGLVPSEHSTGGKRRLGGLTKTGNGRARRLLVEGAHSYRYAANISTELQKRQEGLPKAIIDIAWKAQLRLCKRYQRLMKRGKHYNLVTAAIAREMAAYLWVIAKEVVLPPVDPKTRMARMPCA

SEQ ID NO: 289385 - protein, 423 aa, unidentified
MDVMFERVAGLDVHKAMIVTCVRQMSGGKAERESRTFETTTSGLLDLLAWLTESRCSHVAMEATGVYWKPVWNILSDGDFELILANAAHIKNVPGRKTDVNDATWIADLMACGLIKASFVPEEEIQDLRSLLRARKQLTREQTRYTQRIQKTLEEANIKLDSVISDIMGVSGRKMIEAMIAGVRNPSKLAALADRRLKASPKQLYDTLHGRLTDHHRFMLKLYLSQYDALDAASIEIDQQVDAAIAHMDAEVEAGHATFRSLISLLGTMPGVSALSATTILSEIGTDMSRFAQAGQLVAWAGLCPGQNESAGKRKSSRLRKGAPWLKTMLVQCAWSAVKKRDSYYKAQFNRLRARGGAKKAICAVAASMLTAIYHMLKNGVEHHDLGGDHFDRRATDVKAKRLVSQLNKLGFDVALRPLQKAA

SEQ ID NO: 289386 - protein, 359 aa, unidentified
MGKRIERMGNVKSLALSEGDAVVVGLDVHKKSVHAAVRRNGAEVGSWVCRMDAEAITRSLLPMKPFLKKVVYEAGPTGYGLARALQKAGLPIEVLAPGKIEREPNPGSKTDRLDCRKLAEYAEEKKSLKAVAIPTEEEEADRQVWRLRDQLVTQQRRVKQQIKSLLLQNSLAEPDGLSHWSASALEALKRMGLRHQIQLSLAVLIEELEKIIALRQRVERHLVWVGQRKRHRQGQSLLRSHPGVGPLTAMAFCLEVYRPERFVEAEQVACYVGLAPRVRQSGSKRLEGPLIKAGRGALRALLIEASWRWVREDARAATLYKRLVRNTGSAQKAIVGVARHMAVDLWCMMCRNERYRASA

SEQ ID NO: 289387 - protein, 419 aa, unidentified
MSFKILKNNCCGLDVHKTWIYACIGITDSLKRTEYKEARFSSFTKGLNELCDWLSKYNCTDVCMESTGKYWIPVFNVLEKNNIWVTLSHPKYTKPQKGNKTDRKDAKWICDLYMCGMVKPSFIPPADIRELRDLVRYRFKLTCMITGEKNRAHNCLTVSNLKLDDVFSDIFGKSSRSITEQILQHPGETFDVAPFVDGRCKTPIEEIQAAVDGAISKEQAVKLRQCLNHIDELEMHKAEIEREIFRLSDKYESVLSLIRTVPGFDKTPMTAIQVLSEIGGDMSVFPTAKNLVSWAGCCPRNDQSNHKIKSTRISRAGSYFKPVLVQVANALIKSKKHPEFTTRYRRIKARRGHKKAIIAICRMILTAIWHILTDLKPYTPEGFLESRPVNESKILTTSQALNLMKQRGYIIKDDVVPVT

SEQ ID NO: 289388 - protein, 472 aa, unidentified
MQFIGGGSQQEYVERTRGLDPSHCLAAGVDVGKYEALCLIADHRGEVVGEALTFSLTEPGIRSLEAMLAAATQSRGAVSVRIGVETAGHYHRTVVARLVAAGHDVVELNPAHVKAARTQQGSRRLKTDLRDAAAIVDLVISGSGRAPQQRSDALIEQLVWAGVRRRRVRSRTALSNQLLGTLDLIFPGLDGCFDDLLGSKVGPVLLHDIADPGRLHRLGVEGLQAFTARRGVRLQRRKAEQLHRAAADALRLPVVERACRAAVLTADLAVLDMLNNQIDQAEEHLTRVLLNTPAGVLTSLPGVGVVRASNYGAALGDPARFANADRAYRASGLVPASYESAGRARGGQGISREGNAELRAAIIELGRGLAQRDPNFAAYRASVSERMKPLMAAIAVGHRAHRLAFALMRSGESYDPARLAESVATNGERRTKEAGRPVKKNSREATCRHDVTYPPVTTVPRTTATSKTLART

SEQ ID NO: 289389 - protein, 380 aa, unidentified
MRGLLGRRAARPFRHTWEAPVFVERTAVGLDVHARSIVAHAIDGETGEVFTSRLVPDAGSVIGWLGRLPGPVAVAYEAGPTGFGLARAVRAAGVRCEVAAPSKLQRPAGQRVKTDARDAEHLCRLLRLGEFTAVVVPDEDTEAARDLVRAREDCRSDLMRARHRVSKLLLRHGIVWSGGDAWTGSHLAWLARQRFDHAAIQAAFDEQLDQVLATVARRDRLGARIEALAADSRWTPVVRRLGCLRGISTLTGFALAVEIGDWSRFDGNSIGAYVGLVPSEHSSGSSRALGPITKTGNGHVRRLLVEAAWHHQPRYRVGKTLRDRWGLASPAARARGDAGNRRLHARWVNFQARKKGHNVATVAVARELAGWCWSLATIDD

SEQ ID NO: 289390 - protein, 354 aa, unidentified
MNDAKYIGLDVHQATISVAVRDSAGKLVVEAVLETKAETVLQFLRGVRGSLHVTLEEGTWAAWLHDLLLPHVTRVVVCDPRRNALLKAGNHNDRVDARKLAELLYLNELNPVYHGEHGLRTLKELARSYLTITRDLIRVMARLKAIYRSWAIPCVGEQVYAPRYRAEWLAKISENGVRRRAEHYYQQFDALAALRQGVRRELLAESRKHSATKLLRQIPAIGPIRSALLIAILQTPNRFRTKRQLWGYCGLALRTYTSGEYRFVKGQLQRSKKVLAIRGLNLNHNHDLKNIFKGAATRAAAVGPFKNFYEACVARGMKPHLARLTLARKIAAITLLVWKKGVRFDAEHLKPQAA

SEQ ID NO: 289391 - protein, 420 aa, unidentified
MKGYNVDNFATLIGVDWADTKHDICEHPVGTNDYQYSVIKNKPESLHDWAMDLKTRYPNQQIAVACELKKGPLIYALTKYSHITIFTINPSTVAKYRKAFTPSGAKDDPSDAYTQVEILSLHMSKLTVIEPEPASIRSLTQLVEYRRSVVQDGVDLTNKITATLKNYYPQVLEWFDEKDTLIFCDFITKWPSLSLVKRARKQTLLDFFTQHNSRYADTNEARIAKIKAAMPLTEDQGVIEPNQMLIEVFIPQLRVLLQGVAKLNKAIKLAYKRQNDRVIFDSLPGAGPQLAPRLLVAFGSNRDRYSEAAELQKYAGIAPVIERSGKKKWTHWRYSCPTFLRQTFVEWAGFSIRYSFWAKAYYDQQKAKGKPHNTIIRSLAFKWIRIAFRCWKTSTPYDESKYLEVLKRRGSPLLKFAINS

SEQ ID NO: 289392 - protein, 402 aa, unidentified
MQTSSIDVFIGIDVGKSDHWATALDRDGERLFDKALPNDETRLRDLYERLSHHGRVLVVVDQPATIGALAVAVAQDMGITVGYLPGLSMRRIADLTPGNAKTDARDAAVIAQAARTMPHTLRAINGSDEDAAALSMLTGFDLDLARQVNQTSNRIRGMYTQIHPALEKVLGPRLEHDAVLEVIASWPTPAALRKAGRARINAKLKAHGARHHEAWADEIISALKAQSVVVAGTDAAGIVLPHLARQLIALHAQRSDVAAKVEALVEAHPLYQVLTSMPGIGVRTAAVLIAETLGRDFATGAHLASYAGLTPVTRRSGSSIREEYTSYAGNKRLKRAMFLSAFASLRSDPASRAYYDRKIAQGKRHNQAVIALAHRRILTLHAMIRNGTLYDPQPTHQLPAAA

SEQ ID NO: 289393 - protein, 312 aa, unidentified
MTKKSVAVHAGLDIAKATLQLHLQGQQHVLDNSEAGHRQMVALLQAVPGAHVVSEATGGYERTVVAALQLADLPVSVVNPAQVRHFALAQGRRAKNDPLDAAVLTAYGKALCPAPTAVPDEALAQLRALVQWRDQLKEQLTRTRQYVEHATLPFARRQQAKLVKHLTTQIKTVEKELAAALARAPRIQEQVRELATLDGVGTLTAVSVFSQMPELGRLNRQQAAALAGLAPWIRQSGPWEGQRHIGGGRAVIRRALYMSAVGLARQTQTTLGKFYHRLRAAGKPAKVALTAVMRKLLLQMNQLLKNHALKSA

SEQ ID NO: 289394 - protein, 343 aa, unidentified
MRHYAGLDVSVKETSVCIVDESGKVCRETKVPSHPEDLARALHDRAWCLERVGLEAGPLSQWLFSGLAATGLPVVCIETRHTKAFLQAQVNKSDRNDARGIAQMMRVNLFRPVHVKTLTSQKRRALLTARKLLQEKALAVDNDIRGLLRNFGLKVGPIGASRFETRTRELVDGMPELAEIIDPLLEARRKLRELFAVLHRKLLVIVRDDTVCRRLMTVPGVGPVVSMAFTATIDVPARFKSSKAVGAALGLTPILNQSGESKRLGRVSLCGDGMTRTLLYEAAQVMLTRTTKWSWLKAWAMKVAARRGIQKAIVALARRLAVILHRIWVSGTDFRWTREVQSP

SEQ ID NO: 289395 - protein, 316 aa, unidentified
MAMRVSKSIVGVDVAKIELVTYQVDLELLASIANEKPAIKRWLKTLPRTTAIAVEATNIYHVDLVELAYESGFDVYIIDGFQLSNYRKSIGGRSKTDASDARLLARFLKNEGEDLRPWSPPPAVYGKLQSLLRRRASLVQAKTSLTQSWANDASLKAAFAAFLKSIERLDLLVKKKLKDTLREAGLLEQVARCQAVEGIGFLTATALVMAYSRGDFNSGDSYIAFLGMDLRANDSGQKNGRRSLTKRGCSEIRRLLHNAAMSASRSSAWKEFYDHHRSRGKATTQVFVMLARKLARVAFALMKNQSEYQTKGRIVA

SEQ ID NO: 289396 - protein, 416 aa, unidentified
MNFNKLLSGNITKYQKEGFIMISVGIDVSKGKSTVCIMKPCGEILESPFDIGHTADELDSLISLIKSFDEETRVVMEDTGHYHLPVATYLSSHNIFVCCVNALRMKKFCSQSIRRAKTDKIDSIKIASFGITYWNELVKAYPSNVIYDELKFLARQYYQVTGMLVKSKVNFSNLLDQVMPKINDVLSNQGENHKLTEFVSRYIHFQNILDMGEMKFTSDYCKWAKKKGYRLNERKAAEILAIAQNGIPTLPNSQSVKIAVSEAVKLIHSIEESRNTILAQMQDLCNTLPEYSVVKEMDCIGDTLAPRIIAEIGDVRRFKNKHSLIAYAGIDAPPYQSGAFHASERHISKRGNSYLRKTGYEIMQSLIKHKPADNAVYDFIQKKRSEGKCGKEAMIAGLNKFLRVYYGKVMEFYSEH

SEQ ID NO: 289397 - protein, 451 aa, unidentified
MAKRKEKQERRSVVLEPDAAGIDIGAEEIYVAVPPDRDEESTRRFSSFTCDLHALADWLGRCRIQSVAMESTGVYWIPLFQILEERGFKVYLVNAHYLKSVPGRKSDVSDCQWIQYLHSVGLLRASFRPPEAICALRTLWRHRGSLLEMAAEHILHMQKALSQMNLQLHHVLSDITGTSGQAILDAILSGQRDPVALAQLCHRRVQSPRDKVAQALVGDYRPEHLFTLKQSLEGYRYYQKLILELDQETARLMQALPSATEDPMPPRTKATAYHRQGNDPQFDLRRELYRIAGVDLTDIPGVSAATAQVILTEIGTDVSRFRHASAFASWLGLCPEKRISGGKVLSCKTRQVKHRAATALRMGANSLCRAKGYFGEFFRRMRARLGTAQAITATAHKIARILYHVLSTKEPYAESVFHRCDEQAQRRAEIRLRKQAARLGFQLLPIPATRQ

SEQ ID NO: 289398 - protein, 372 aa, unidentified
MREDSEAYVGLDTSKLKISVALAEAGRDGPIRFLGEIDSTPEAVERLVRKLAKRHRRLAFAYEAGPTGYGLQRQVAALGHDCAVVAPSLIPKRPGERVKTNRRDALTLAKLHRAGELTPVWVPDPGHEAMRELVRAREAAMEDLRAKRQHLQSFLLRHGRVFTGRGAWTRAHTRWMCELSFEHPAQHLVLAEYRRAIADAETRLERLDRQVAELVPSWSMAPMVAAYQAMRGVAFLSAVTFVAEIGDVRRFDNPRQLMAYLGLVPSENSTGERVRRGGITKAGNGRARRVLIEGAWTYRFRARMSRLLEERQAGLPKSVREIAWKAQVRLCGRYRKLMARGKRQGVVTAAIAREMAAFLWAIGREVEPQLAG

SEQ ID NO: 289399 - protein, 335 aa, unidentified
MKKIDCYIGIDVSKLTLDVSVLREEGDIAKTEYYKIENSEKSISQFVKKQLGHYVLEQMLFCFEDTGIYSIPLVYYLNDNKLAYWQVPSLEIKRSRGITRGKSDKIDAKDIAFYAYTQKHKFKPSRISTKPVQQLRLLFSEREKVLKSLASFGRTSENKDFISKDVFKVVVSINSTVGKQLTASLKSIEEKMMSIITSETKLNQQYELITSIPGVGKQTAIYIIIATKGFNVFEHWRQLACYAGIAPFPYQSGTSIRGRNKVHPLADRKMKSLLNMCALVSIRHDKSIKAYYERKVKEGKPKMLVVNNIRCKLLARVFAVINRGTPFVNICKFAA

SEQ ID NO: 289400 - protein, 350 aa, unidentified
MGKNVTTAPSSAGWIGMDISKDFFDVALWGDQEGPAMANGRFPRSKSGAAEVVAWIQMQGREVAGIVMEWTGSYSRELAEWLMALRPDWAVALINPSLVKAFGASYGLRNKTDQVDARLLARYGAERTPAAWRPPEPDRDRIQSIYRTRLKLTLMVTALRNRDEDCLHADSVARSAHRKVLATMESQIKALEKAAAAIIKANPAWQKDRNLLMSVPGIGPITSLATLAEAGDLRRFRRGRQLTAFAGASPKRKQSGTSVNGKTRMCRIGGKFLRPALYMAAVAVTRTESPLSNFYRHLIDQGKPPRAAIGALMRKLLLIMRSVLIHDRMYEPHPVQRNLKDKSAPVARPA

SEQ ID NO: 289401 - protein, 412 aa, unidentified
MPEHEYDLYVGVDWASEAHQVCVLDPEGARRTDLAVRHTGAGLAALRTALQQRVSEPSRIAVAIEVPHGPVVDALLEQGCHVFAINPKQLDRFRDRHTVAGAKDDRRDAFVAADALRTDRRAFRRLGLEDPQLLQIRELSRLHGELVADQGRLTNRLREQLWRFYPQLLGLSPAADEPWLWALLEQAPTPAHGRRLPLSALRALLARQRIRRLTAEAIYAALQEPALPVAAGTLAAAREHMDLLLPRLRLAHAQRLRCARRLDKVLEELATPATGEEPAEHRDVTILRSLPGVGRVVAATMLAEASQPLGARDYQTLRAHAGAAPVTRQSGKTRLVAMRRSCNGRLREAVFHWARNAIRLDPPSRAHYDRLRQRHGHARALRGVVDRLLSVLVRMLSTGTLYDSTRRHQSAA

SEQ ID NO: 289402 - protein, 409 aa, unidentified
MQPIIKSCCGIDVHKKMIKACIAKGPLDKPPKFQVRTFSTMTSDLLKLKDWLKENEVEKVAMESTGVYWKPIFNILDDEFPIVLANPQALKTIPGKKSDVSDSKWIATLLRCNLVPGSFIPPRPIRELRDLNRTRRKLVGIMVSDKNRLQKVLEDANIKLTSVVSKIDGVSSMNLIQALMTKDELTREEIKALVHGKLRSKIDQLVEALNGKLTDHHRFLLKIHLENIAFMAEQIQELDEEIAKRMIPFHKESNLIQTIPGISTTTASAIIAEIGVDMSQFPDAAHLSSWAGICPGNNESAGVKKSGKTRKGNKFLKATLVEAAWSASKKKDSAYSAIYNNIAKRRGKKRATVALGHQILMDAYRVLKTGEPYVDEGAEAVFQRNSAGRQKSAIRLLEQSGYIVTKAAA

SEQ ID NO: 289403 - protein, 341 aa, unidentified
MDHYVGIDVSLEALSICVVDSNGKIIREGKVASEPGALIEWLRNLKLQLTRIGLEAGPLSQWLYAAMRQAGLAVELLETRHVRNALETMPVKTDRNDARGIAQLMRLGWFRPVHCKSTGAQETRALLTARKLVQVKLHDLEMSLRGILRGFGLKVGPTTPVRFEGRIRELVAGHPSLEAIAESLLAVRVTLRREFERFEKQLRTMARCDTRVRLLTSVPGVGAIVSLTFVAAIDDPTRFKSSKEVGAYFGLTPTKYQSGETDIDGHISKIGDAGVRAALYEAAHIILTKPLKGCTALKSWGMKLAKRGGMKKAKVAMARKLAVIMHRMLADGTSFRHVAAA

SEQ ID NO: 289404 - protein, 407 aa, unidentified
MKKKNVIEFEQVVERGCGMDVHKDLIVATILGKDIKMQTKSFNAFTSSLIKLKDWLLKNGVTHVAMESTGIYWKPVFNILGDDFTVLLVNARHVKNVPGHKTDKKDSRWLAKLLLSGLLKGSFIPERPIRELRDLTRYKTKLTNQVTAEKNRFQKILEDANIKLSSVLNDVFGATGTKIINHILEHESYRPEDILQYVHGKVKSSREDIKEALTGYITPHHRFMLKTIMRNISRIENTIAEVDTQIEVCIEPYKVERELLENIPGVSKVGSTCIIAEVGVDMGQFPDQNHLASWAGICPGSNETAGKNKSGRITHGDKYLRSLLVECGWAASRTKNTYLSAKYKSLVGRRGKKKAIIAVGHKILIATYFIIRDKIEFKELGPDHLSNFKRDRLIAYYRQQLEKLTAA

SEQ ID NO: 289405 - protein, 312 aa, unidentified
MKQVACFVGIDVSKRELEVAAYPSGETFKVGNDDAGLARLVERLACLSPQLIVLEPTGGYEKRALKALLAAQLPARRVDAWRARRYAEALGRRAKTDPIDAAVLARFAHDVAKDEPQAQERSHPRLSALVEARAQLVQDQIRLGNQLAQADDDLVLHLLQQRLDLVEQQLTAVAATLQALVAEDAELKARFDLLRTAPGVGPVTAFTLMARLLELGARDAKRIAALVGVAPCDRKSGTYKARSAIQGGRGDIRRVLYMAALSAAKAYPPWRAFAKQITARGNPPKVGIIAVMRKLLVALNAMLRSNTTFKAA

SEQ ID NO: 289406 - protein, 336 aa, unidentified
MERRYVGIDLHRRRSVIFIMNSAGEKLSCVRIANEPLRLLEEVSKAGDDAEVVIEATYGWYWAVDLLQDNGFNVHLAHPAGNDWGKRRVKNDERDARDLADLLRLGRLAEAWIAPKPVRELRELVRYRAKLVQLRTGLKAQVHAVMAKEGVLPSRFDMFGPGGNAQLDGMQLAENYAARIESLRAAIRHYDREVVALERRIHQQLRHDKGYQAIQAIPGVGRTIAAIFVAEIGDVSRFPNAEALTSWAGLAPKHKESDTKVTRGPITKAGSKLVRWAAVEAVSGRRGGTKLRADFDAIAARRGKYKARAAVARKLLTLVYYGLRDGEIRCLTAEAA

SEQ ID NO: 289407 - protein, 348 aa, unidentified
MLIIGCDYHPGFQQIAFVDTETGEVGERRLTHREEAEQFYGTLKERSVRVGMEASGHARWFERLLTDLQFELWIGDAAEIRTKRVRKQKTDRQDAQLLLRLMMEDRFPRIWVADAANRDLRQLLWHRHRLVQMRTRIMNQLHVVALNEGVRRKKALWRPAGRRELESLLLAPWAKRRRQDLLDLLDQFTPKIQQLTRALEEEVEKRPVTRRLMTHPGVGPLTALAFELVIGTPDRFHCGKQIASYVGLVPSEESSGDRRRLGHISKQGNVLLRFLLVEAAQVTVRSQAQWRSKFFHLALRRGRKIAKVAMARKLAVHLYWMWRQGWDYGQFEKLGSHAGEPGNRHGVQ

SEQ ID NO: 289408 - protein, 357 aa, unidentified
MSSENNILNFNNQRFYIGIDVHKKSWKVTIRSGAIALKTYSMNPSSQELSKYMHEKYPGGIYHSVYEAGFSGYWTHRQLEQLGFKNIIVSPNNVPTNAREKVYKTDSVDSRKLARELESGSIKGIYVPDQLHQELRSIVRLRYQIMKSNVRLKNQIKSYLNFYGHKFPENYETKHWSGIFIKYLRTLSFEYTMGKEQLEIYLSELTEKRELMVEIIKRIRHYCQGYGFDKEIQLLMKVPGIGFITAVTIYSELIDINRFPKLDNLASYVGLTPSVRSSADKEKNLGLKMQHNKYLRSMLVEAAWIAVRKDPALTACYNEYIKRMSKQEGIIRIAKKLLNRIRAVLMGNREYVCSVVK

SEQ ID NO: 289409 - protein, 335 aa, unidentified
MKVFYLGVDVSKKKLDLCLRSNGKDILYDVIPNDLSSIKSWLTRTFEKFFLSEDSLVVCAEHTGQYTYPLVCATKSIGVYLCLEDAAKIKYCHGIPRGKNDKIDACRIAMYAERYNDCLQPYTASELIIQKLKNLSTERSMLVADRAKYQSQLKDQVDYMEHSIYIAKCNRVEGIINTFTDYIAQIDLEIKELINQAPVIAHQMDLLMSVDGVGERVALKMIMETDAFTSFTDPRKFCCHAGVVPFVYVSGSSQRAINRVSNRADKSIKHLLHMAALSVSQVKNSPLKKYYDRKVEEGKNKMSVLNAVRAKLVTIMFAVIRTDAFFSRNYQNSLA

SEQ ID NO: 289410 - protein, 343 aa, unidentified
MQTITTIGLDIAKSVFQVHGANAEGNVVIRRQLKRRYVLAFFQKLPPCLVGIEACASSHHWSRELQALGHTVRLMPPAYVKPYVKRHKNDAIDAEAICEAVTRPNMRFVATKTREQQSCLTLHRTRHLFIRHQTSLINAIRAHMAEFGIVAPVGRNGVEELLAVVADASDKRLPEIARASVAALGAQLRALKAQILQFDRLIMAWHRSNQASRRLDDIPGVGPALATALVATVADPQAFRSGRNFSAWIGLVPKQHSSGGKDRLGSISKRGDRYLRGLFVAGALAVIRYAKIHGTKHRPWLTALLARRPTKIAAIALANKIARMAWAMMARGERYKEPVALAA

SEQ ID NO: 289411 - protein, 431 aa, unidentified
MPNRLQVGVDFSQKRTDFCLLLPDGQPLEPHVSFANSLPGYALAKQLLLDALDRYSFDGVDLSGEATGYLWLPFFLQLSADPDLAPYDVNLFLLNPRWVKWFKKCFAEDDKCDQKDPFYIAERTRTRRPATTWSPPDCLPLRFYTRLRFHLVQNLAREKCYFSAFLFLKASSYRCLKPFSDVFGATSRLVLTEYPTLDELAELPVEDLATHLYELSGHHLPHPSDNARKLHRVAQESFPLEETLALPVQRILDLTLEHIRFLEVQVDQVNDWIATELETYPVIAQLATIPGVGPVFSSGIGAEIDDTQRFLRAPKWDRKHKRYRPRNLRDAEDAVAKIAGLWWPRSDSGEFEAEDRRMAKSGNRYLRYYLIQAASLMRQHIPEYAAYYARKFKEAAKHHHKRALVLTARKSVGLVVGLLHRNEPYRSGRDY

SEQ ID NO: 289412 - protein, 368 aa, unidentified
MKPITSYVGLDVHKSTISVAVAEEGRRGEVRHHGAVENRADVMIKLVERLGRRGERLQFCYEAGPCGYGLHRLLSGRGHDCVVVAPSLIPKKPGDRVKTNRRDAAMLARMHRAGELTAVWVPDAAHEAMRDLVRARATAARVLTKARQHLTGFLLRHGKVYAGPRAWTVAYRRWLTTVRFDHPAQQIVLQDYIHAMEDAEKRIARLVEQIEQLLEHWSMAPVVKAIQAMRGVAFINAVTIVAEIGDFARFSNPRQLMAYVGLVPSEHSSGDSVRRGGITKAGNSQARRALIEGAWTYRMQARISRKLHDRIEELPQGIRDTAWKAQVRLCARYRRLVAKGKPTVVVTTAIAREMIGFIWAIARQVQTA

SEQ ID NO: 289413 - protein, 342 aa, unidentified
MKSTTIAVDVAKEVLEVAVSVRPGQVREQHRLSRTAFMKFCTDQPPATFLLEACGSAHYWGRRLETLGHHVVLLPPHATRPYVFRNKTDRTDTRGLLEAYRNEDIHPVPVKSVPQQALTALHRLRSTWLAARTTRLNTVRGLLREFGCTIPLGAHHVLPRAWDLLADADSGLPDALRPALAEACTEIRDLEGRIRVVEAQLQALADQTPAVARLRSIPGIGLITATALVAFVGDVQRFPSGRHFASYLGLTPRERSSGLIRRLGAISKRGDVYLRMLLIHGARAVLWAARKRRTPDRLRAWALHLQKLRGHNKAAIALANKLARVVWAVWKHDVDFREVPAA

SEQ ID NO: 289414 - protein, 323 aa, unidentified
MAKRITICAGIDTGKRKLDVALDGSSEQLQVENTPEGYQILVERLQRRKVKRVGIEASGGYEQAVVAELRRKRFVVVVFQPAQVRAYAMFHLQRAKNDKIDAALIAACTAAVKKIHTAPDPRLQSFAEHLTMIEQIGEDIATLKNRIESCRNERIQKLWKEDIACLAKRRRAEFKALLAAIRKHRDLAARIDLIHSVGGSGLPTAVSILVRMPEIGQITREQAAALAGLAPYDDDSGDHLGNRHIDGGRERLRRALYTAALPASFRWNPQLIALYKRLIAAGKGHKRALIACARKLLVFINTVVARGTPWQVEPPKTASAPAT

SEQ ID NO: 289415 - protein, 356 aa, unidentified
MTTYYIGADVHSNSTELAIERNKKIVHRYKLPTSIAALSSVLDSLHGEKHLAIEEGPMAGWLYRNLSKKVDELIICDPRRNKLIDSDGDKDDKIDAAKLACLLRGNFLRSVYHSDDEGRTELKHWVGLYHDRVRDAVRNINKIRSRCRMHGISIPRLVVRQAKARDKWLSETSNTTLAKQLELLWIGYDATSRQVRIARRQLSIFSGKYKIIKLWSQLPGIGLVRAVTLFAYLDTPWRFRKKNKLWKYCGVGLQRTTSGTDSKGRPKPARLQLPWAVNRTLKNAVLGVVSSAINQKNNLFKEYYERMLEDGIMPSNARHAVARKLLTVMWAMWKTNSRFDESMCKPDTQTTAASLG

SEQ ID NO: 289416 - protein, 399 aa, unidentified
MIIVGIDIAKHNHQAVIIDERGAALCKSFAFANSNAGVKKLTDAIAQAAADPSEVIVGMEATGHYWLALYSALLPLGFTIHVINPIQTDAMRHATTIRKSKTDVIDCELIAQTIRFGRFSVTHIADEDMIALRQLTRFHFSLVDSVAEVKLQVITLLDQVFPEYQTLFSDTFGKTSVELLLSHTTPEDILALDTDALTEILARCSRGRLGVEKAEQVKSAAANSFGVKFGLEAFTFQIRSLLAQIQLVETQIDQLDAQVAEIYASFDTQLHTIPGVGPVLAAAILAEVGDITRFGSDPARLVAYAGIDPSVKQSGGFTGSHNRMSKRGSPYLRRALWLAATVAYRHDPTLAAFYQKKRAEGKAHMTAIGAVARKLTYIVFAILRDNKPYSPATPPQLTP

SEQ ID NO: 289417 - protein, 313 aa, unidentified
MSEKQWVGIDVCQKYLDIYVRPQGKLFQETNDEVGINKLVQTLEKIQPELIVIEATGGMEINAAVKLTQAGLAVAVINPRQGRDFAKATGQLAKTDAIDAEVLAHFADAIRPPVREMSDESSRQLEDLVQRRRQISDMITAEKNRRRGKTNSVKASIDEHIEWLEQQLKEIESQIQQAIAVNDNWKQKIDLLTSVPGIGEVVAVTLISSLPELGAISHKSISYLVGVAPLNQDSGKFRGKRRIWGGRAKVRCVLYMATLVAVRFNPTIKAFYERLLGKGKLKKVALTACMHKLLIILNAMMKNHQVWQPTTVS

SEQ ID NO: 289418 - protein, 463 aa, unidentified
MARNNKSKKRKKPVRALKTIQPDAAGIDLGSREHWVAGPPLDDNTPNVQRFGTTTPELLRLADWLKEQEVKTVAMESTGVYWIPLFEILDSRGYEVILANARQVSHVPGRKTDMLDCQWLQLLHACGLLRGSFRPSDDICRLRALLRERNTMVDQRSDWVRRMQKSLDQMNVCVHHAVSDITGVTGMAIIRAIVDGERDPRTLAQMRDRRCKKTEEQIAEELTGNWRPEHLFNLRLALKMYDQFCQVVAEYDAEILAYIKSLPSCVDDDQSAPAPVSKSKARDIAKKGQEPMRQALFQLTGFDLTTIDGIGVDTAAVIISELGFDYRAFPDEAHFVSYLRLAPNLSISAGKKVPNKIKGTTTSRVAGALRMAALAVRNSKTALGAFYRRISRRKGASVAVFATARKIAQIIYRLVCHGQAYIDIGAKAYEAQFNNRRLKYYTKALKDMGYKVKPLTAPEDKAA

SEQ ID NO: 289419 - protein, 414 aa, unidentified
MIEIVKKSCGLDIHKRFFIATILSTSSEKQQQRFNRDDDGILALKNWVISEKCDVVACESTSDFWVPIYDSLIKHLPVIIGNARDMKAFTHKKTDKIDSEVIAQLALNNMIQPSRVFPKYHREFRSYVRLRHKLVQKRTDIKNEAHAILALEMFNLNDVLTDIFGKNGRAILSGISSGKNVDEIIESLSPNVRKKSAQIKEILDREISQGAALRLQICLKLIKHLDDEIEALENEIFNYAYGKHKREMEILMSVPGIGELGAATLIAEIDNFKDFSSGDKLASWLGIVPNVYQSADKFYNGRITKRGSKEARWILTQIAQAAARKKNSKLKEFFNRKKKSIGHSKAIIALARKIATIIWHLITNDEMYEDETGYQKGQIQKRKIVETEIFSVDERIKIISGIIAVMGKDEGEST

SEQ ID NO: 289420 - protein, 432 aa, unidentified
MPSKRNNSSVVSVVHEVCCGLDVHKKSITACLVYTNASEGERSEVLEFDTFTDDLIRLRDWLLDSECPVVAMESTGPYWTPIHNILEGYFQVILVNARHMKNVPGRKTDISDSRWLAGLLRYGLVKGAFIPPKHQRQWRDLTRMRKNYIASLGDFKRRVHKLFQEANIKIDSVLSDLFSLTGRNLMSLLISKESSPTFSEVQDCLRGSCKDKANEVYRSVKGFFEEHHRCLLVMLLETIEKLQKQIEDLQVRISQGQRASKELIERLKEIPGVSEISAHSLLAELGSSLEAFPTAAALSSWCGLCPGNNQSGGKRFNGKIRVKKHHLKTIMVEVAWSAIKTKGSYYKAKYYALKSRLGPKKAIIAISHRILKAIYYMIKNGVCFKDLGEAYLLERNRASRIRYLSKQATLLGLKLTPVTQVATTPTMEMSSI

SEQ ID NO: 289421 - protein, 323 aa, unidentified
MNCIQKSIGVDVSKSKLDIYIKGQTDGERDISKEIPNSPAGFKVVKDLARKHEAVVCCEPTGGYEHGLVWYMHKANVPVAYTPGLLVRYYAKSQGYNHKNDKIDAKMIAEFAINSQVKLVTPKDVLVDRLCREVRLYHYYLEMGRKPAGMLEHEYDADSRRQLAREVKHYRLATAKQLEKCIAIAESDPQLADLLGRMCLVRGVSSITALSIIAELPEIGRFDDAKLFAMAGLAPVEKQSGDKEWRRKIYGGRQRVRSALYMSAIACLSHNTILREYYQKKRDEGHPFKWCIVPVMRKLLSLLNAIARNPNFVPIATPAIKRK

SEQ ID NO: 289422 - protein, 415 aa, unidentified
MEALRPKYFVGLDWASAAHAVCVLDPDGRPVVQDVIPHTAAGLTDLVRRLTRLAVPAEIAIAIERPSGLLVDTLVAAGFRLVPIHPNALKATRPRYAAAPGKSDPGDAYILADLLRTDGHRFRPLRPPADSTRALRAAVRTRDDLVATRIQLANQLRSLLESFWAGAAALFADIDSPIALAFLDAYPTPDSAVRLGEQRLARFLQRHAYCGRRAPAALLARLRAAPRGYAGELESETKGQLVRSLVAVLRPLVEQLRELEALIAAQLAQHADGPLLQSFPRTGTVNAAQLLAELGEDRGRFPTAAQLAAEAGVAPVTRSSGKHCSVACRFACNKRLRQAATTWADNSRHANPWAAAVYRQARARGCDHPHAVRILARAWLRVLWRCWQARTPYNPAQHGRALPFLVSRPPTSRVA

SEQ ID NO: 289423 - protein, 418 aa, unidentified
MKKHSKSCRRSEVSSKRAKSRGPVQRDAKEVMAEVLGKLTGKLDAPTVSTSAQENRRGNTVGPNRDRLTVGVDLGDRWSQYCILGLEGETLAEGQLRTTQEDVGEFFRGLTTARVVLEVGTHSAWVQDVITELGHEVLVANPRLMEGWKRRKRKNDRIDANKLARLGRVDPQSLYPIRHRSREVRQDLVVLRARDALVSVRTELINSTRGLVKSMGTRLPRCSSPSFAEKVKDAIPAEVREALQPLVQLVETVNECIERYDERIEELGRKKYGHTTLLRQVKGVGPITSLAYVLTLEDPQRFASSREVGPYLGLVPKQEDSGDIPPQLGISKAGDRMLRRLRVGSSQYMLGAFGPDTDLRRYGLRLCERGGKNAKKRAVVAVARKLAVLLHHLWVTGDVYEPLHRTETGTGTAQAAAA

SEQ ID NO: 289424 - protein, 349 aa, unidentified
MSAKFNSEMTVIGIDIGKNSFHIVGLDRRGAIALRQKWSRGQVETRLANLPPCLIGMEACVGAHHLSRKLTSLGHDARLMPAKYVRPYSRGQKNDFRDAEAIAEAVQRPTMKFVATKTTEQLDLQALHRVRERLVSQRTGIINQIRAFLLERGIAVRQGLRFLRAELPRILAAPRDVLSPRMVHVIEGLAGDWRRLDERIEGLSSEIEALARRDVSCERLMSVPGIGPIISSAMVAAIGGGDAFSKGRDFAAWLGLVPKQISTGDRTILGKISKRGNRYLRVLFVQAAWAVLIRPKSWDRHGLKPWIEAAKKRLHHNVLAIALANKLARIAWSVLARGRAFEAIRIQAA

SEQ ID NO: 289425 - protein, 372 aa, unidentified
MEQFTKFFGIDISKDVFDVCTSEGKHFQFTNSTDGFVAYAQLLDENSQSVMEATGSYHQRLVAWLFAHGYVVSVMNPLVIKRFAQMRLRIAKTDKADAKIIQAYAQAEHPALWNPPQEYVSQAFEINGLLELLIRQRAALKNKLHSVSSKSDSFSKITRSIEKMIQFLNAQIVIQESAMEKLIRENQGEMFDNLCSIPGIGKKTAMFLIVITNGFESFESSKQLSAYLGLAPTVRISGKTVRGQSRISKAGNSTIRNLLFMCSFTASERNKACRELFNRIVDKGKSKKLALIAVANKLLKQAFAIAKTKMVYEENYMSVSPQYFCLLFSTVHCYVLFALLLNPILRSCFMETSTVRGQKSFKLSASYPRELF

SEQ ID NO: 289426 - protein, 311 aa, unidentified
MENVVGCDVSKEWIDVCTVDRAFRIDNNVQAAARLARDLPQASVVGMEATGELHIVLADTLAKRGHVVFVINPRWIHNYGKSLGLRGKTDRTDAALIARFVAAEGHGLYRYVTASAQSRQLRKLLLQRRKLVELKVATRQSLGKVGASIVRQFDRSIERAERAIEQLVRQSPDWNSIYERLLGQPGVGPVLGSHLLDVLTRIPFKNQDAFIAHTGLDPRGCDSGQKRGRRYLTGHGDAALRSTLFVAAMSASRRGPWRPYYQAQLQKGLAPTAAIVILARKLARVAFSLFKSGNKFDLALVPEPKISGHRP

SEQ ID NO: 289427 - protein, 407 aa, unidentified
MFAGIDWAADEHAVCVIDAGGRVAERFTIAHTADGFERLVRRLARHGDPAELAVAIERPDGRLVDRLLDAGHPVVPVKTTAIKAWREAEVGSGAKSDPGDAQVIADYLRLRRLDLRELQPFSAETRALRAVVRTRSDLVDARIAASNQLAAMLAAFWPGAGELFADVWSEIALAFLERYPTPTAAAHLGEGRMAGFLRKHGYSGRRSSAELLERLRSAPAGLADGPESEARRDAVLAMVRLLRALNRSIRDLDRSVVAHLDEHPDAIVFRSLPRAGQVSAAQMLAEWGDCREAYDGPEAVAALSGMAPVTRRSGKHLAVGFRWACNTRFRNAMATFADNSRHASPWAATVYGEAVGRGADHPHAVRIVARAWIRVIYRCWIDRVAYDPARHGAAHRLQGGRSVVVAA

SEQ ID NO: 289428 - protein, 357 aa, unidentified
MRIIGVDLHTRQQTIAMLDDQTGELVEQELPHEGNHVREFYAGLPKPVLVGVEATGSMHWFLRLLDELRIEFRVGHPAQIRAAEPRKQKNDRRDARLLLKLLAEKRFPAIWMPSREQRDLQILLRHRDQFVRIRTRVQLSLQALALSYGLRRGHSLWSCGGQHALRSLPLSAHAGEQRDALLALYPQLQGPIDELDRQVESEAQRRSQSRRLMTHPGVGPITALATEVFLGDPHRFSDGKAVASYIGMIPREHSSGGRQRLGRISKQGNSLLRFLWGEAAIHAVRRDPELRRFYRRKLVQKGMGKARVAAARKLGIRLWIMLRDQIDYAEFCRRGCLRRQSSGAAGAGMPAAGQWSN

SEQ ID NO: 289429 - protein, 345 aa, unidentified
MENMYYIGLDVHKKTISYCVKDGSGQIHSQGAIPATRLDLDRWMKTLPQPWTAAMEATIFTAWIYDHLLPHAAALKVAHPLMLRAIAAAKKKNDRIDAHKIADCLRCDFLPECYMASTEIRERRRTLRYRNLLVRQAVQMKNKIAVLLMEAGVSYNKQKLHKVGYFRELLATNQDIDEGLKPLLRLCRETVVRLGKTESALVRSLQRDSLLMERVERLMTIPAVGPITALTWALEVGDVQRFSSIKKAISYCGLCGAENSSANIIKRTPLSKQRNKHLQTVLIEAAKMAPRNSPELAMVYEQEKQKGNANRATLAVARKIVAYLVAVDRRQKGFLVVENKNRTAA

SEQ ID NO: 289430 - protein, 423 aa, unidentified
MRQGPGCQGAPLVPHNTSTSASEVFAGIDWGGSFHQVCLINAHGEVIVQQRVQHDLAGLAELDRLLLVHRNAAGRLRVAIERADGLLVEHLHTIEVEVFCVSPKISARARERYRLAAAKSDAFDAFVLADTLRHEHRHWRALSPASPALAELRAISRDRDRVVIAQQATENRLRAVLEAYHPAPLHLFSSLDRDITLDFVTDYPTPEQAARVGEARMQQFCRRHGYSGRTDPTVLVERLRPHLLSAAEGTEAGKAFSASMFTEELRLLNAHLRAYDKRLVELLDQHPDTPIFTSFPGIGPVVAAALISEMGEDRGRFPAPEALLAEAGLSPVTRASGRTRQVRFRYAANRRMRHMIDWWAFVAAREDAWSRRIYDDARARRQGKYRALRGLGSRWTRILWRCWTDHTTYDPAIHHKQQEPAQA

SEQ ID NO: 289431 - protein, 318 aa, unidentified
MSHGYDKFVGIDVSKDGLDVHGLPDGSPSRFDNTAAGRAKLLSLLPQAGACLSVVEATGGYERDLVAEAVTAGHHIAVVNPRQVRDFAKALGLLAKTDRIDASVIARFAETTRPVPKGYDERQEQLRELIVRRRQLLDHRTAEKNRSEMAHSSLVRKSVLKLIETLNKDIQRIEKAILQLVESNDDWRERFEKLKGVPGVGGQTAATLMAELPELGHLNRQQVAALVGVAPFNRDSGQFRGRRAIWGGRQSVRNALYMAALSAKKHNPVIREFAARLMAKGKPPKLVLTACMRKLLIILNAMLQSGDSWSPRLATLTP

SEQ ID NO: 289432 - protein, 325 aa, unidentified
MNEKINHCGIDVSSETLDLYFINKEGIHQHLQIANTVTGFRKMLKEAGTEAHFVMEATGVYHLNLIFFLQEKNIRFSIVNALKIKRYIQMHLERNKSDKKDAKRIYEYGVDCRPEMYSMPDSSYFECRSLNNAIHHLTKEITKFSNQMHSLKKCPYDTKSTEKSFERILKKLKEEKQNLESELQEKLIIWNQETLELVSSVKGIGKRAAAELLIYTQGFKDMNSYKQLISYAGSSPTEFRSGSSIRGRVRICKQGGKQLRHILYMCALNAKKTNAQCRALFDRLVEKGKNKKAAVIAVCNKLLKIVFGVVKNREFYHENFIEISA

SEQ ID NO: 289433 - protein, 392 aa, unidentified
MKVTFQTCCGVDVHKSFLVATIIKTSSGIEPSYQKRRFSTFNNSILEFKKWLLENECLYVCMESTGKYWIPVFNLLEDEINVTIANPKWVKAVKGNKDDTKDSKWIGDLFRLGLVRGSYIPCKKIRILREFTRYRYKLVSCRSSEKNRYQNALTVCNVALDSVVSDIFGKSSTSIIDYLLGQSGTSIDHEVIASKLLKRLKAKEDAVIESIEGYQMTDSQKYRMHLVRAHMDYITAAINDVDSEIESLISSDPDYENAVELLCTIPGVKYDSAITIISEIGIDMSQFCSSKRLCCWAGLTPGSNESAGKKKSVRITRAGVYLKPALVQCAHAAVKSDKSPYYKKKYESLVKRRGKKRAIIAIARMILTAIFQMLTTGETWNPCDLYKIDSNM

SEQ ID NO: 289434 - protein, 367 aa, unidentified
MADIVTDLYSTAAGIDIHQSLAVVSVIVPVGDGSQCRFVRGEFDTFTGQGLKALVSFLAPFGVEIVLMESTGVYWMSAYDALLEAGVNIAVANAREIKGMRGRKTDKNDADWLARVAKQGSFHPSFVPGREPRGLRSLSRYATSLRTVLAGEKNRLGKLFNAAGYRLNTVFTDMYGLGGMLCVRGILDGGKPAELLDRLPGRAIYKHSREEMLLALGGKFEEPDLIAAKAVLKHIDYLEAEIGKLVASLQELVEKHDARKHELLQTIPGVDAHAASIIMSEVGGGGLEAFDSAEALCAWAGVAPGQNESAGKKKPAKTRKGNKALRRVVCECAQAAARTKKTTLQSKVSVPENTCLDELGGGVSMAG

SEQ ID NO: 289435 - protein, 313 aa, unidentified
MEESFFGIDVSKADLDLFIVPSNKVLKTTNDEKGIEEIVKIAKELKPASIVVESTGVYQNNLVFSLLKENLPVVVTNPRRIRDFAKAKNKLAKTDKIDSEIIALFAKEIKPEYRSFKDETLQELTALITRRDQLINMITAEKNRLEVSHKSVRNDILRIVRTLEKHLRRIDEDIDDFLKKEGPINHKSDILNSVPGVGKILTTTLLAVMPELGTLNRKQCASLVGVAPFNKDSGKYRGKKSIWGGRSFIRKILYMSTLSSIRFNDVIRTFYDRLVSKGKPKKVAIVACMRKLITILNSMMKNDKMWDATMLSA

SEQ ID NO: 289436 - protein, 409 aa, unidentified
MKKVGFVAGIDVHKKMLAVVIRRGAGEYEKRKFGTTQGEITHLVAWLQHSGVTEVVMESTAQYWRPIWYGLEPHFQLHLVHPLKVRAPRGRKRDYRDAQRLADRWQSGDLEESFIPAAEQRMWRWLTRSRVQLKRMIVVVRNQVEGLLEEGGIKLTSVASDPFGVSGWAMLQLLAKGEQDVTVLAGQARGVMRKKEAQLREALAGTLAPQYQFLLKQRLEQVELLRRQISEINEQLAHAMQAHVAELTRLTKMPGVDLYAAQEFRAEIGPGASAFATADQMASWIGVCPGSQESAGKNYSRRSAKGNRYLRRLLSQVAWAAIHAKKSFFAGLFGRLKPRIEGKGAAWAVAHRIAKVVWLLMHEGVEYEEKGAAPLHPKVLKRKLNRLLKEFAKAGIDAQAALSQALVAS

SEQ ID NO: 289437 - protein, 397 aa, unidentified
MYANGFFVSAPSEFFVFRRIIEGAPVEYGVSVLKTHLRQRSTLMSNGIRYVGLDVHRDSISIAVRDYRGKIVKETVIPTSESALLGFLQELPGTVHVALEEGTWAVWLYELLQGRVRRVVVCDPRKNNRQGNKNDRIDARELADLLRCDRLAPVFHGATGLRSLRELARTYGVLTKEQTRTMNRIKALYRSYAIACAGQACYGPKQRSTWLAKLPHSCICERAKVYYEQLDGLRQLRKKVRQQLLAEGKKQSAYGKLKSIPQMGPVGTVLLIAFVQTPQRFRSKRQLWAYCGFALETHSSGDHRWVNGQQERSKKAALIRGLNSNHHPVLKWIFKSAATRACAKEGPLRDFYSSLLQQGARAEMARLTVARKIAAIALALWKKGESFDAQKLKSQAA

SEQ ID NO: 289438 - protein, 455 aa, unidentified
MPKTTTADRPELKPVNVGAAAIDIGSKMHMAAVNPVCTDVSVRTFGTFTQDLHSLADWFKTSDVTSVAMESTGVYWIPAYEILEQRGFEVILVNARYAKNVPGRKTDVSDAAWLRQLHSYGLLRGSFRPDAEIATLRAYLRQRERLVEYAAAHIQHMQKALMEMNLQLHHVVSDITGATGMRIIRASVAGERNPDVLAIYRDVRCHSSTETIRAALMGNDREEHVFALTQSLELYDIYQAKMLDCDRKLEVLIAALSNREAKPVGKLSKPRVKTKQVNTPTFDVRTALYGVLGVDLTEIHGLGPSLALKLVGECGKDLRAWPSAKHFTSWLCLAPGNKISGGKVLSSRTRRSSSRAAALLRLAATTVGRSDTALGAFYRRLSSRAGKSKAVTATARKIAVLFYNTLRHGMSYRDPGADQYEQQHRSRVLANLQRRAKSLGFVLQAIPCNANQAVS

SEQ ID NO: 289439 - protein, 410 aa, unidentified
MGLFCGIDWATEHHDVAVIDDDGHVVARGRVSNDAPGFAALLTLLAQAGDSAADPIPVGIETDRGLWVAALRETGRTIYPINPLAASRYRARYGVSGAKSDATDAVLLANIVRTDPGAHRPLPADTELAQAIRVLARAQQDAVWARQQIGNQIRDLLKDFYPAALTAFADLPEGGLARRDARTVLAAAPTPAQAAKLTPARRRRLLIKAGRKRYLDRDIARLCEVFTDTYLHQPPVVENAMGIHLAALLGQFEAACTAADALAEAAVAHFEQHPDAEIITSFPGLGMLVGARVLAEIGDDRSRFADARGLKAFAGSAPITRASGKKTVVLHRYIKNRRLAAVGPIWALGSLRASPGARRHYDARRAAGDWHQQAQRHLFNKFLGQLHHCLHTGLRYDEHLAFPPPLQLAA

SEQ ID NO: 289440 - protein, 370 aa, unidentified
MKEPTTSYIGLDIHKESIAMAIADAGRAAPRFIGTINPAPAELCKAMRRVCTKETTLIVYEAGPCGYGWVRYLRKQGWACDVIAPSRITRQPAEKRLKTDRRDALLLARESRAGNLTSIVVPDERDEAIRDLVRAREDVRVARHRVRLQMQAMMLRHGRHYQGKRNWTQAHDRHLSTIRFEHPAQELAFNEYRLASKEACERVERITEALRVQCEDWRMNPVVKALMCLKGFDFVAAVTFVAEMGDLTRFAHPRALMAYLGVVPSEFSSGASRRQGGITKSGNKHARRILVEAAWNNRFKAQVSRELEVRQEGHPKIIRDISWKAQLRLSKRWRSLSMGRKLAPNKICVAIAREFAGFIWDVARHVKVSP

SEQ ID NO: 289441 - protein, 342 aa, unidentified
MEGYHYVGLDVHKKMIAYCVKTAAGSIVEEGTVRATRRDLAAWSEALPRPWLGAMEATLFTDWVYDFLKPRAHDLKVGHSYMLRAICSAKKKNDRLDARKLCDALRCDWFPESYMAPRELRELRRVLRYRNMLVREAVRLKNKTAGLLMESGAEYDKSRLHGRRYFDDLVGGLDYVPASVVELLRHSHDSMLLFDSASKRLVAALRDHSLLRDRVELLMSIPGVGEVTALTWALEVGDPARFRSRKQAVSFCGLCSAQDESAGKTRRGPLSKQRNKHLQTMLVEAAKLAPRWNPRLKDVYDRAVARGANRNQATLAVARKLVAYLLYVDRARKKFEFGGGAV

SEQ ID NO: 289442 - protein, 347 aa, unidentified
MVTLGIDAHKRTHTVVAVDQHGRQLATKTVGTNTKDHLGLLKWAEQFRDDEGLLWAVEDCRHLSRRLERDLLRSGQAIVRVPPKLMAHVRDSARTYGKSDPIDALAVARAAQREPDLAVARLDGPDRDLRLLCDHRESLVNDRTRVICRLRWFLHELDPSWEPKARSLDRVRALQRVTDHITGLEGTVARLAHELIDQAITLTVKINELTVEITELASGMAPALLAIPGCGALTAAKILGETAGIDRFKSNNAYARHNGTAPMPVWSSNKARHRLSRTGNRQLNTALHRMALTQARWHPPAKAMIERRKAGGNSGREALRVLKRRLSDVVYAALQQDLAVNHQLLSA

SEQ ID NO: 289443 - protein, 338 aa, unidentified
MKVYVGMDLHATNTYVGMVDEENTVLYKQRFRNELPLILSALDPFRKDIQGIVVESTFNWYWLVDGLMAEGYRVHLANVSAIKQYEGLKQIDDRRSAFWLANLLRLGILPTGYIYPKEERPTRDLLRKRLQLVRHRTSHVLSVKNILARNLGLRMKSEDVKKITDAEVKRFFPDREMQTMVLSSVGLIRHLEDQISAIENMITKKLKVRKEFAKLMTVPGIGKILTLTIMLEVGDIHRFPTVGDYSSYCRCVKSIRTSAGKIIGYGNRKNGNKYLSWAYIEAAHAARRFHEMVRSYYEKKMARTNRIVAIKALSHKLTRASYYVLRDQVDYDPARLFR

SEQ ID NO: 289444 - protein, 332 aa, unidentified
MDYSAFIGIDVSKLTFDAFIHSKGVKEKFANNSKGFSAFLGWLKKQLGACQLNSILVCFEHTGIYSLNLSLFLEKQTILFAIVPALDIKRSLGTTRGKSDQLDAQRIAAYAYLKRETLCPTKLPGKVILRLQPLLSLRDQLVTDRARHKLTSNERKAVYTGEDHQELFAVYQDLIKVLTEKIKAIEQAIERLLASDPETKQTYGLITSVKGIGPLTATYLIVYTRNFTRFGHWRKFACYAGIAPFPHTSGTSVKGKTRVSHLANKHIKSLLFLCANNAVKTDPELKAYYQKRVNEGKSKMSTLNIIKNKLVARVFAVAKRQSPFVLNFALAT

SEQ ID NO: 289445 - protein, 347 aa, unidentified
MNFYTQQHKHYCGIDLHAKAMYVCLLDQHGTKLVHKNLPTTPEAFLRSIAPYREDLVVGVECMFTWYWLADLCAKEGIAFVLGHALYMKAIHGGKAKNDKIDAHKIAVLLRGGMLPQAYVYPAEMRATRDLLRRRCHLVQKRAELLAHIHNTNSQYNLPEIGKKLAYKANREGVEEHFPDPSVRKTIEVDISLIDHSDKLLGEVELYITRSAKAHDGQTFARLQSVPGIGQILALVILYEIQDIARFPRVQDFVSYCRLVKCAKESGGKRVGTSGKKIGNVHLRWAFAEAAVLFLRHTQPGKEYFTKLEHKHGKAKALTVLAHKLGRAVYYMLTREQAFDLKRFVTA

SEQ ID NO: 289446 - protein, 400 aa, unidentified
MSARLIVGVDPGRYGHGVVARTAEDAEVVRERVDNDATAIDELVTRVVGFAGGAGQALWVIEADGGDGAVLIGELLARGELVATLTPTEVAVRRKGRRQAHKSDLIDAEVCARIGREEQASLRHLVAVPGTVAEMRVLARYQDGLIRDRTRLINRLRFLLSQYWPEFLAARAFAALDGDAVTALLVAFPTPSALRTQHPLELASFLARQRYRRRPLERAQQLLAAAQVGVRPQETVYGRLVAEVAGELARLKQRIGALDVEIRDRFLSRPEAPIVLSLPGMSHRTGPRFLAEVGALERFGSPDALAAYAGLTPTLWQSGRSSGTHFLSRRCNLHLRQALWSAALGSLRTPASRRFYDRKRAEGKSHHQAIIALARTKLRVLWAMLKAGTLFMPERALEAA

SEQ ID NO: 289447 - protein, 412 aa, unidentified
MEVLYACCCGIDVHAKLLVACLLKAGKKEVRTFSTMTEDLLRLLDWLTQAGCTHVAIESTGVYWRPVFNILEGILDVILTNARDAKGYKARKTDVIDAEWLADLLRHGLLKPSFIPPLPIRELRDLTRYRESLVREQTALANRIQKLIESANVKLGQVASDALGASGKVMLRALAAGETDAEQLSHLARGILKRKQPQLQQALQGRFTQAQRWILAELLDQYDQVEAALQRAEARIRQEVENSADPFVPKAVPLLDTIPGIGETVAQIIVAEIGVDMARFPTVHDLASWAGMCLGNNESAGKRKSGKTTKGSRYLRAALVQAAWAASHQNETYLAAQYKRLVKRMGKKKALIAVGHSILVIAYYVLQKRTPYQDLGGDYFNRRNVDKQRKRLIRQLERLGVKVTVEEIKEAA

SEQ ID NO: 289448 - protein, 437 aa, unidentified
MKDQRQEIVLAVDFSIDQLDVSLRQSDKRWVWPHRGYNNNWPGFQQLKQDLLTELSRCPQAQLTAVGESTGPYWWHAFYGLSHDEDLAGYDPSLVVLNPARVKAYRKALPEEDKLDSNDPKLIDQYYRAVGVEHPYQFNDRYLRLRFLSRSYCRLIHTLASEKAYFRSVLYMVASQYQPYQPFSDIFGTTSRHILDEYDDIQAIAEIPFAELVNLLDKISRQKFKDTADTARKLVGVVQDSYPLPPHLQATLHLILQSALDHIRFLEDNKKAYAQLIKEELQRLPEAQFALDIKGLGPILVAGFLSEIQDTRRFISGSKYDRKLKRTRPRTYRDGQAAVAKLAGLWWPKRSSGRFQAQNLHLSRERNTYLRYWFVQAAYTLQRYRSDYNAFYLKKYHEASKNHHKRAIVLTARKSVRLVFALLHKGQRLWLKEGEIT

SEQ ID NO: 289449 - protein, 403 aa, unidentified
MNSVGIDISKGRSTVAVMRPFGEVVISPFEVRHTDSELSELARQLKSLNGETRVVMEATGNYHAPVAKLLHDAGLYVSVVNAKLVHGYGNNDLRRVKTDKKDSVKLANYGLDRWLALTRYVPEEDTRLLLKNCYRQYRQYSKVQTVLKNNLISLLDTVFPNVNRLFSSPAREDGSEKWVDFVAEFWHCRCVSEKSEKAFANKYQRWCRKYGYNFNEAKAHTIHAEASGHIGVMPMSETTKLLVEQAVAQLRATSAALAALKHEMQALASMLPEYPVVMDMFGVGPTLGPQLMAEIGDVRRFYSKKALVAYAGLDAPPNDSGDVTGRHKSMSKIGASSLRRTLFLVMTVYLQNAPLDEPVYQFMDRKRAEGKPYRVYMMASANKFLRIYYATVKAYLESLEHTA

SEQ ID NO: 289450 - protein, 386 aa, unidentified
MQRNDLSRSLVAFDQNSTLVAVVELSLNRWVVQGLVPGLSKQPLKALGPDASALLALVNRWQLEGTKGGGRIKRIVVAFEAGRDGFWLARWLRSRGIEVYVIHATSIPVSREHRRAKSDRLDTELLMRALLGWLRGERKHCQMVRIPTIEEEDARRPNREHQTLVGERTRNVCRIKSTLVLHGIRDFNPKRLKASERLETLRCPEGGSLPPNTLAELRREMAQLRLISGQLREIEKTREERLKRAPRQGTHPMVLLLAKILGIGIETADMLVHEILSRELRDERAVGRYAGLTGSPYDSGAKRREKGMSRAGNARVRRGMVQLAWRWIRFQKDSQLTQWYNSRTESARGDIRKTMIVALARKLLVSLWRYVTTGEVPVGAKLKAAA

SEQ ID NO: 289451 - protein, 373 aa, unidentified
MKKRSKSQKSQKPTVKTKGMQERVTIGIDLGDKTSRYCMISHGGEILREGQVTTTKAGMVEAFGSLGRARIAIEVGTHSPWVSRLLGSLGHEIIVANPRQVKLITESSRKDDRLDAQTLARLARIDPQLLRPIRHRSETAQTALMVIRVRAALIAVRTSLVNTARGLAKAMGERLPKCDADQMGVLRAESVPPKLRQLLEPLLKEVESLTEKIKDSDREIEQIARKDYPETALLQQVGGVGPLIALTFVLTVDDKTRFQKSRDVGCYIGLRPRRSDSGQRQPQLRITKEGDPYLRTMLVQGAHYILSRRGPDTDLKRWGLRLAERGGKRAKKKAVVAVARKLSILLHRLWVTGEVYEPLRNQNLRDLQKKSAA

SEQ ID NO: 289452 - protein, 413 aa, unidentified
MRLFIGDDWAEDHHDVELMDASGRRLAKARLPEGVAGMARLHAMAGEALGDDADGGGPGQVVVGTETDQGPWVAALIAAGYTVYAINPLQASQYRKRHGVSGAKSDAADAHVLADMVRTDSHQLRAVAGDTAQAAAVKVVARAHKTLIWERARHMQRLRHSLRDYFPAALEAFTDLAAPDALELLAKAPDPASAAKLTTAQITAALKRARRRGIPAKAAAIATALRSEHLGQPSVVAAAYAATVRAATAVLTVLNEQLKALEEQVEAHFGQHPDAEIIRSQPGLGPILGARVLAEFGDDPHRYADARSRKNYAGTSPITRASGKKKAVLARYIRNDRLIDALTRQAFTALTTSPGARAYYDQLRGRGASHYAALRQLANRLVGILHGCLKTRTLYHEATAWPQHTTKAEKAAA

SEQ ID NO: 289453 - protein, 416 aa, unidentified
MDIVHEQCAGLDVHKKTVVACVLRSAPGGVIDKEVRTFGTMTADLEAMRDWLAERGCSHVAMEATGVYWKPVYNVLEQREALTLLVINAQHLKTVPGRKTDVKDAEWIATLLRHGLLRASFIPDRHQRELRELVRYRTALIHQRAAEVNRLQKTLEGANIKLAAVLSDVTGVSGQRILEALIEGESDPEQLAELAHVRVLKHKREALEQAVVGRLSDVLRFVVQQQLQHLHDLEAQIATCDAKVEDLLCPFEAELGRLRSITGVGPRTAEIILVEVGLAIQRFPTARHVSAWAGMCPGNRESAGKRQRVGTRKGSPWLRAALAEAAWAASKSKDAYLPALFRRLSARRGKKRAIVAVGHSILVTAYYLLTRGAMYQDLGETYFDERDRQNVVRRSIRRLQGLGYTVHLESTDTKAA

SEQ ID NO: 289454 - protein, 370 aa, unidentified
MKEVYAGMDIGSKECAVVAIESGGSQIDSVVFKTSERNMVAFFSRHPNSKVLIEECEMAAWVRATIKPHVASVIVCDPKRNAWVAKGTNKNDRVDAAKLAELNRLGSFSEVWHPDDEDVAGFKVLVKHYDDTSKRLAEVKCQIKARLRKQGVVTRGEAVYGPRRDEALSRVGNTFARIAIEQDYELLDYLEGAKKAANTFARIAIEQDYELLDYLEGAKKAARSSVVAASGRFPVIALLKEIPGVGPILAARFVAYVADPHRFNKRTLASYSCLGIVKRSSDGSPLGREHLSKAGNSALKDLSRTAFERAMATRSPNGIKEFYAGSLTRTGDKTKARLNTQRKILALMLAIWRDKTEDRDELVTRAFTGA

SEQ ID NO: 289455 - protein, 343 aa, unidentified
MEYYVGLDVSLKQTSICVVDQAGLVVREGVVDSDPEAISVFVRSKAPGAVRIGLETGPTSTWLWTELKRLGLPVICIDARHAKAVLKMQINKNDRNDAIGIARIMQTGWFKEVHVKDIDSHSVRALLASRALLVKIKRDLENHVRGLLKNLGLVIGRATFNVFAARAEELIEGRPDLVAAVRPLLEARNAVEQQVSELDRKVMKLARRDAQVQRFMTVPGVGPITALAFKATIDDPARFARSRSVGAYVGLTSRRHASGEIDWSGRISKCGDAMLRSYLFEAAGVLLTRVPKWSTVKAWGTRLAKRNGLRKAKVAVARKLAVILHRMWIDGTEFNWSKKEIAA

SEQ ID NO: 289456 - protein, 341 aa, unidentified
MKTTTISIDLAKNIFQLMGFTFDGKRVFNKRLNRVQLYEFLLKHELCHIVMEACYSSHYWGRTFLEMGHTVALIPAQHVTPFVRGNKNDSNDTLAIFEASNRVYIRHVPIKTEAQQEILMLHSLRERLVRNRTAASNQLRGLLTDFGIIFPLGAKAFDDKMKALSDDETLSAIVRGVIKDVYKEYKSLMARLKEIEKTLKLSVEQGELGKILLSIPGIGYLNASAFIASIGSGQAFATAREFAVWLGITPKQFASGNKSVMAGISKRGNGYLRKLLIHGARAIVSRAGNKQDSLSLWINQLRARKSYNCTAVATAHKLARIMWTLLQKQCHFTPQEIKVAA

SEQ ID NO: 289457 - protein, 341 aa, unidentified
MRLYAGLDVSLETTAICVIDEDGRIVQEAVASTDAGAIADVLERHRADVERIGLEAAPTSEWLMRGLEERGHQAVQMETRHVHLALSASAVKTDRKDARGIANLLRMGWFKPVHVKTVSARERRVLLTARDCLVRRLKDLDNSVRGLLRCFGLRPPRALRGRWSAVVGELIDGHPILTDAIAPILAARDAIAKQLDHIDRRVRDEAKNDAVCRRLMTVPGVGAIVALTYVATIDCPERFRSSRTVGACLGLTPRRYQSGETDRAGAITKMGDPAARVALFAAAHVIMTRVQRWFPLKAWAMRVAARRGAKRAKVALARKLAVILHRMWIAGTEFQSRPANA

SEQ ID NO: 289458 - protein, 368 aa, unidentified
MRKSNTFIGLDVHKNSIDVAIAEAGRNAEVRHYGTIGGGLDDLDRLVKKLASPGKELHFVYEAGPCGYEIFRSLTDKGFDCVVVSPAHIPKSPADRIKTDRRDAMTLARLHRAGELTYVFVPRTDDEAMRDLTRAREDAKKAQRVAQQQLGGMLLRLGFRYSGNNWSQQHFRWLANHKMPTPAQQVVFQEYINAINDTTARVDRLAKQIESLVITWRMAPVVNALQALRGVSLIVAATMVAEIGDLTRFEHPKKLMAYLGLVPSEHSSGEKKKQGNITKTGNGHARRVLVEAGQAYRHPARITRPLLKRQEELGREVREIAWKCQVRLCARFRRMTAKGKNHNTIVTATARELAAFMWAIANQTPIAV

SEQ ID NO: 289459 - protein, 401 aa, unidentified
MVTLFYLGIDIGKRNHEVGLIDEKGNPIGKTLRFANSKAGSDKLLAFFNQHDLIPDNTVIGLEATGHYWLSIFSFIHKLGFKTTVFNPLQSDALRHFYIRKTKTDTKDAYLIAQVIRIDSPDETPFIEEDLLRLRHLERLRYAFVDQSSDLKRKVISLLDQVFPEYERLFSDVFGKSSTEILLHTPLPEDLLDIDTDTLASLLNQVSKGRFGESRALNKANQLHDSALNTFGINIATDVFKLQIKLLLEQIHLIEQHLKQIEQAMIEISNRQEHYLTTITGISDVTACVVLGEIGSIKRFERPEQLVAFAGLDASVHQSGDFNGSKTRLSKRGSPYLRRAIWQAAFVASFHDPALSVHYQKLRKRGKAHGTAVGAVARKLTHIIFAILRDKKPYEPRPHVQ

SEQ ID NO: 289460 - protein, 310 aa, unidentified
MHPCVGVDVSKHHLDWAFGEDGPVEHLPNTPAGIRRLLERARRQEPILIAVESTGGYERQLVIALQEAELPVVLVNPWRVRRFGEGLGRLAKTDPIDARLLALYAERAQPARRPLPGPKARRMADLVARRRQLLEIVVAEKSRLENAPAWIRRDITSLVAVVERRIAKLDAKVDAAIAQDPEKHETSEILQSTPSVGPGVARALIVDLPELGALSRRQITSLVGLAPYARDSGRKKGMRKIRGGRPGPRTALYLAAMNAARFNPVLKEFYQRLRAAGKPAKVAFVAVARKLLTLLNAMVRDRATWRKAII

SEQ ID NO: 289461 - protein, 372 aa, unidentified
MKSTTKFVGLDVSKESISVAVADAGQGPVRFLGNLPNTPEAVRKLVVRLGKPEELLVCYEAGPTGYGLYRLLRELQVTCIVVAPSLTPRRPGDHVKTDRRDALRLAQLLRAGELTPVWVPDEEHEALRDLVRARHSAKLDLKRAKQALNSFLLRHDVRMPNGKRWTKTFMRWLDTLSFAHRASQVAFQEYLHAIRELATRIERLEAEMCAIAQDSRFGPVIQAVQALRGVALVTAITLVAEVGEFSRFRSPAQLMAYAGLVPREHSSGVQTRRGGITKTGNSHLRFVVGEAAWSYRRKPAVKAALRKRQEGLDPEVLSIALKAQERLHRKYWHLVGRGKAHGVAVSAVARELLGFVWAIACYVEAKAQKQAA

SEQ ID NO: 289462 - protein, 461 aa, unidentified
MPQPNSPSTVESLVGVHPNAAGLDIGAREIWACVPQERAPEPVRRFGTFTPDLNALADWLIACGVATVAMESTGVYWIPVFEMLEARGLQVFLVNARHIKNVPGRKSDYLDCQWIQKLHALGLLTASFRPDAEMCALRAYLRHRAQVLQHRAPHILHMQRALHQMNLQLTQVLTDVTGVTGLAILRAIVAGERDPLTLARLRNPACKSSEEKIVKALTGNWQPEHLFVLKQSLELYDFYTAQVAACDVTLEQYFTALKPRYEPAAEDLTGPALPRAKPGSKSKNRPAFDARAHLVRLLRIDLVAVEGVSASLAQTLLSEIGTDMTKWPTVKHFASWLGLAPHNDISGGRVLRSRTLKTDNRAGQAFRQAAASVTRSDSAFGAYYRRKKAQIGPQQARVATAHKIARTVYHMLKHRLAYHETGALVYEQHQRERELAHLQRKAAKLGFTLTAHEPVLAPAAT

SEQ ID NO: 289463 - protein, 394 aa, unidentified
MILVGIDIGKNKHTFSIIDKNSGEILLSPSDFSNNLKGFLFLIQKLSSYTKSELLIGMEDTGHYHFALLKYLLDRRYTVALINPTTTDLTRKLQGGITKNDPLDSLTICDVISSNHRNKPYRVTTLNRFDLYEQKQLTRHHHNLKEELNTYKNRLQKCIDIVFPEFNSLFHSKYGIVYMNILKAFSSAKAIANADIRSIRKCFEFKGQGKRISLSAEQLKLTAKSSIGIPSVAEEIQIRHLVSQIELLEKQLSEIDKRIEEFSLKNNSPILAIPGISHFSGTSIISELGDICNYTKASQIIKFAGVAPYHYESSQFTAQHTAITKKGSKYLRKTLYQIILPVISNNEVFYAYYTKKLNEGKGHRCAQGHCIRKLLRVIYHLLCTRQPFNPKLLV

SEQ ID NO: 289464 - protein, 417 aa, unidentified
MKPKALKQPRKSFQKGDADLKRYIGLDVHKNFIMIAAVDRVQETIMAPRKVKMTQFDDWIAGHITPEDTVTLEVSNGSWEIHDRLRQHTRNILVANSNKLKIISRSSVKTDKRDAMVLARLTSVNILPTIWVPPAAVRELRSLIAQRKNHIKMRTRVKNRMHGILMRRHIQRPMKSVFSDKYITWWQSLPLTKVEKLQVKQGLEQIQFLKHQIIELEECIGEMSVESPWKEQVVYVLQIVGIGLMSAMTILSAIGDVHRFSTAKALVGYSGLGSRVHASGDSYRTGKISKTGRKELRTALVECAWVAIRFSDHWRLKYEELIKRKDPQKAITIIARKMLVVIWHVLTKKVKNKHITVETIARKMLKWAMTYRLATKQGGSRPAFVRRELDRLGVGRQLKCFIYGNRHFILPDSQFVS

SEQ ID NO: 289465 - protein, 414 aa, unidentified
MIVADDATGARVCAGVDWAKDDHAVCIVGAEGEALQRFMIQHDRAGLKEMVRRLLSAGVDEVGIERPDGPIVDALLQAGLTVLVIPPAQVKNLRSRYGSAGNKDDRFDAYVLADVVRTDRRRLRPLERDTAATTALRSTVRTRRDLVIHRVGMGNQFRAHLQVVFPAAAGLFAEIDSEISLKFLDRFSTQTQADWLSVKRLGSWLASVGYSGRTEPAVIHARITAAPRGTTGPEATALAGVTHAYIEVLRALNTQIRGLAVSIAEQLDVHPDAKIFTSLPRSGTVRAARLLAEIGDARGKFPTASSLACLAGVAPSTRQSGKVKAVTFRWGANMDLRDALCDFAGDSRHSNPWAADLYAKARARNCDHPHAVRILARAWANIIWRCWQTNTPYNPADHGGLQRILNQDQQPVAA

SEQ ID NO: 289466 - protein, 381 aa, unidentified
MGKLTRTNVGMDVCKRFIQVALLTPGGEWIEWQTRNESRAIAKMIGRIRREAGESEIRTCYEAGPTGYALQRVLRAAGLHCIVVAPSLIPRKPGERIKTDRRDARKLAQGLRNGDLTEVQPPTPEQESLRDLCRVREATQKDLECRRHRLSKFVLRRDRIYPGKVTWTRAHLTWIEQQRFTDEYATMTFDTLIRAVTEAQQMLADLDAKLEAAAQREPYATPVRHLRCFRSFDTVTALSVVAELYGFLRFESASGLMAYLGLVPSEHTTAGRHQRGEITKAGNGRVRRLLNQAAWNYRHVPRVSRALKARREGQPGWVVNVADKAMKRLHKRYWHLVNGGKPTPVAAIAVERELVGFVWDVLHRDAHEQLEREASTGKKAA

SEQ ID NO: 289467 - protein, 344 aa, unidentified
MIYVGIDIAKLNHFASAISSDGEELIKPFKFTNDNDGFQLLLSKLDPLDKDRLIIGLESTAHYGDNLVRYLVAKNYKVCVLNPIKTSTMRKNNIRKTKTDKVDTYIICKTLMMQESLRFVTFYDLDLMDLKALERFRQKTIKQRTRLKIQLTSYVDEIFPELQYFFKSGLHQKSVYALLKEAPTPEAIASMHMTHLAHLLKVNSHGRFDKEMAQQLRVLAQKSVGANDSSLSIQVTHTIQQIELLDSQLERVEAEMTEIIKFNDSGIMTIPGIGYINGGMILGEIGDIHRFSSPNKLLAYAGLGPSVYQSGNFQASKTSTSFYIKFLLYTSFSSIINLISPFFT

SEQ ID NO: 289468 - protein, 356 aa, unidentified
MTIVADTHPFVVGVDTHARKHVYTILTAATGVVIDTNDFPTTTAGINRAMAWVARRTEADADTLWVIEGAASYGAILTGTVASHGYPVAEAPRMDAKNHYGVGKSDALDAHRIAVAALPIPIEKLRRPRLNDGVRQAIQILVGARNSMTKDRTRSVNALTALLRSNDLGLDARKSLSKTQVVEVSKWRTRKEELSLSIARTEAIRLAKHVLELDEQLTKNEQQLDELVRVSEAAPLLQETGFKAISAAKCLAAWSHHGRVRTEAEFASLAGVNPIPASSGNTVRYRLNRGGDRALNSALHMVAISKMTHDAETRAYVAKRQAEKKTDREIRRCLKRYIARRIFRTLNAQNKVLQPV

SEQ ID NO: 289469 - protein, 469 aa, unidentified
MTPRLQKNLRQRPSPEPLRVTHRHAAGIDVHAAAHWVAVPPEDAPPPPANHPTNLPPNVRRFGTCTADLIALADWLRQCGVTTIAMESTGIYWIALFELLESRGFEVYLVEPRQSRHAPGRPKTDVLDCQWLQRLHSYGLLSASFRPAEQVVVLRSYLRQRQMLIRYAGQHVQHMQKALEQMNVKLTEVINDVTGVTGMAIIQAILRGQRDPLELAKLRNDKCKRTQAEIARALYGNWRAEHLFALKQAVALHTFYRQQLRECDLQLQAYLGTFVDQSKGQPCPRRPRRRTKSVNEPAFDLESALYRMAGVNLTVLEGIDPNTALVLLSEVGPDVSRFPTVKHFTSWLGLSPQHQGSAGKIRSRRVQRGASRAGRALRLAVQGCYHAKHALGAFYRRIQARAGAPKAVVATARKLAERVYRLLKYGAEYVCQKIEAYEAAYKARLVKGLSRRAAELGYRLEPTTATTST

SEQ ID NO: 289470 - protein, 338 aa, unidentified
MFYGAIDLHSDTNTIGIINDRGERIYKRIMPNDLAGIKKLFDPFRAELKGIVVESTYNWYWLVDGLQEAGYRVHLANTTSSQQYSGLKHTDDDSDAWWLADLLRLGLLKEGHIYPVQQRAVRDLLRKRGRLVEQRTRNIISIENLTSRNWGVRLKGDQVKELTVAEVEQSYGDENLALAVTSTLRIIEALDAQIKLIGKRVKQQIKLSEPYQLLKTVSGIGEILSMTIMLEAGEMSCFPTVGDFSSYCRCVDSLRLSNGKKKGSGNTKNGNRYLSWAFIEAANFAIRFNPIIRRFYQRKSARSKVVVARKAVAHKLARACFYVLRDQAPFEVERCFGH

SEQ ID NO: 289471 - protein, 337 aa, unidentified
MEHLGIDVHQKYSEICGVGEQGEVTVRRRLATTESSLRRFFKSRPRCRVILECGPMTPWIYRLIRELGHEVVVVNPRRVRLIAESTLKTDKMDAEVLARIGRLDLGLLRPVYQRSEAAQELRTRLRVRSALVKSRTALINTIRGTLRAQGYRMASSTPRGFVARYLTIQLPESLAAAVDPLVETIAELTQRIDELQAELIEDSRSDELVARLQTVPGVGPLVSLAYVAWMDRSDRFAKSRDVGACLGLRPSLRSSGGREYRGRITREGDKEMRWLLVQAAHAAMHCTKESLLLRWARQLEQRVGKSKAVVALARKIGVLLHRLWITGESFRPFPQAA

SEQ ID NO: 289472 - protein, 383 aa, unidentified
MKTETTRRDEYNSFEQHLYMAFELSKAEWKLGFTIGFGQMARIRTIRARNLSALQREIQTAKQRFGLPEDTPVMSCYEAGRDGFWLHRFLQTLGVESLIVDSSSIEVNRKARRAKTDKLDVRKLLMMVMRYHLGEKKVWSVVNAPSLEAEDHRHLHRELETLKAERTQHINRIKGLLTGQGVCISIRGDFLEQLDMIRLWDRSTLRPGLRTRLQREYERMQFVQSQIKILEAERLDLIRNSTRPDVEMVRQLLRLKGIGVASSWLYVMEFFAWRNFRNRREVGALAGLAPTPFQSGDDAREQGISKEGNTFVRSMAIQIAWGWLRHQPESKLSLWYEKRFGHGSKRLRKIGIVALARKLLVDIWRYLETGLIPQGAELKTRLF

SEQ ID NO: 289473 - protein, 315 aa, unidentified
MANLNKSKTIVNVGVDVGKHFLDICIHEKQMYWQEANTGKGIKQLLKRLAHYQVERLVMEATGRYEFELAQAAYSKGLPVCIAKPLSVRRYAGAVDQLAKTDRIDAGIIAQFAAVIQPRVTPQKSKNLIAIKNLITRRRQLVNLRTQEMNRLKIMGKELEVSCRRIIRCLDTEIQRMEKRLASHVEQQAEWSDKQTILKSAPGVGDALIYTLLADLPELGELNNREISSLVGVAPINRDSGRLRGKRRIQGGRAAIRTVLYMATLSATQCNPVIKAFYKKLVAQGKHKKVALTACMRKFIIILNTMVKNKTEWAF

SEQ ID NO: 289474 - protein, 385 aa, unidentified
MSQFSGSPQAAIDYNSTIIGALELSEKKWVLAVQLPGVDRHSRHVLDACGERFVSFVERLKARCASAGRKIARVILTHEAGRDGFWLARFLARRGIEVHVMQPSSLPVDRRARRAKTDMIDAEMLLRTLMAWLRGEPRVCSMVPIPSEADEEARRAHREREDLTRERRSIVNKIDGILATLGVKGYKALRRDRREQLNCARQPGGDPIPQKARARIERLLDRLDLVLKLINQVESARDAVLKKDAPADEAERMIRSLTDLRSIGPDIATLLVREAFVRQFRNRRALAGYVGLGGTPFSSGGSEREQGIGKDGNRRVRAAMVELAWMWLRWQPDSALSVWFRGRVGAMGGRIRKIMIVALARKLLVALWRYVTDGVVPDGAKLKAA

SEQ ID NO: 289475 - protein, 433 aa, unidentified
MPTNHPYDLVIGLDRSDRTADLHLIDTRTGNVQKQTVATSPEALQDWLAQLRQQQSQATVALCLEQPAANLIVFLETYSWIRLYPINPISLQKFRETFVTSRAKDDGKDAQYLAELILSHHEKLKPWQPDDSQTRQLQQLVLHRRAVVDQRTGLTNRLKALLKAYFPQALDLCGEDLWRPLATAFLLKWPTLQSLKKARKPSLKQFYYLQGSRSQTLIEQRLERIDKAVPLTDEIALLQSYTLRVHLICKELQLLLKTLEQFDQQIAKVFQQHPDRPIFQALPGAGPVLAPRLLAGMGSERERFPQPGNLQCLSGVAPVTKQSGGKCHVHRRYLCPKFLKQSFHEYAKESILHSRWAAAYYGQQRNKGCDHHTAVRALAYKWQRIIWKCWQSRTIYKEAIYEAALKKSKSPLTGLLDQIELGKSPVKNRAKKS

SEQ ID NO: 289476 - protein, 355 aa, unidentified
MGERITTGERVTIGLDLGDKWSEGCVVDASGRVVLRHRMRTTRAGLDELRAYAGARVVLEAGTHSPWVSRHLKGSGFEVIVANPRRVRLIAESDTKSDGFDAEVLARLGRADPKLLAPIAHRSESVQRDRIRLQVRDGLVRARTQLINQVRGFAKSLGVRLPGGSAETFAKRLREAELGDLFPGCVVLLAMIEQLTDEARRLEREIDRTGAARYPVTQLLRQVPGVGAITSLAFVLTLEDPARFRSSRAVGAYLGLRPRRRDSGERTPQLRITKAGDALLRRLLVGSAQYVLGPFGPDTDLRRFGLRLAERGGKAAKKRAVVAVARKLAVLLHRLWVTGEAYVPVGYATRTQEAA

SEQ ID NO: 289477 - protein, 390 aa, unidentified
MNQTEGKRIIGLDMHPDVFAAAALSVDARREHADWVQDRLATADLERWAKKQLRKEDVIVLEASGNSFEVAARLHALGHPAVVLESAQAGKIRDNFCNDDRHSAVKLAKVYRSGLAKEVWQPDAKTREYREVHFAHRNAVKDATRCRNRIRSFLNEHCVRLKAGVRLTQPSGEAIAKASKAWTPLQIELLSDAFAQLRQVEVRRKNLERLMVRELIANPRWASLWRLMGIRHRVAFALMAMVGEVHRFATAKKLVGYLGLAPRKTQSGNDKKGRDTGVGKFGRGDVRALLIQSAHNALIQRQSPWHKWGWKLLVKKHRNQAAAAIARKIIVSVWHLLMGHFTPLIEATDHLRVKLLRLATVVGKDGIKSLGFNDREAFVQAQIKSIQLST

SEQ ID NO: 289478 - protein, 341 aa, unidentified
MEKATIIGVDLAKHVFQVHGACADGSVAFRKKISRAKFLPFLSSQPRCVVAMEACAGAHGWARDIQAQGHEVRLIAPVYVKPFVKRQKNDMADAEAITEAAARPTMRFVAVKSAEKQASGMVFKTRDLLVRQRTQTINALRGHLTEHGIIAPQGVFHIGRLAAEVENVNSHLPRIVIELCMLLLRHIARLDEQIALLDRRIRDRAREDETARRLMSIPGVGPVCATALEALAPPPETFARGRDFAAWLGLTPRQNSSGGKARLGQISRMGQRDLRRLLISGAMAVVRWAARRGAPAGSWLARMMARKPRMVVAIALANKIARVAWALMAKGGVYRIPAAVA

SEQ ID NO: 289479 - protein, 341 aa, unidentified
MTTALPRHYVGIDLHRWRSVVATMNEEGEQLGCERIDNSPLELVRAVTAYGGEIEVALESAYGYYWAADVLAAEGLKVHLVHPLGLHWESRRVKNDERDAAELANRLRRGDLPESWIAPPEVRELRELSRYRLKLTAYRTSAKAQIHAVMAKEGILPELSDMFTPAGQRLLDKMPLDGAYAIRVESLRDLLELVDREITMVEKELARRLKDDKGYQAIQALHGVGPILGAIFVAEIGDVTRFASARHLCSWAGLTPVHHESDTTVHRGHITKQGSTYVRWAAVEAVARYHGGSPIAPTYERIVKRRGAMIARVAAARKLLSLVYYGLRDGEIRCLADKEAG

SEQ ID NO: 289480 - protein, 358 aa, unidentified
MKIIGCDLHARQQTIAMLDSDTGELEEKTLEHQGETVREFYSALSGPILVGIEATGSMQWFLELLEELGIECRVGHPAKIRKAETRKQKHDRRDARLLLTLLAENRFPTIWMPSNEQRDLRTLLRHRHQWVRLRSRVQHTLQSIALNHGLRRGHALWSQAGQHALRALPLAPHASERRAALLSLYPLLQGSIEELDKEVCEEVQQHPQARRLLTHPGVGPITALATEVFLGDPKRFIDGKALASYIGMIPSERSSGRRQRLGAMSKQGNTLLRYLWCEAAMHAVERDPELKRFYRRKLVQKGLGKARVAAARKLGIRLWIMMRDQINYQEFCRRGKARQESGRVRAGMPAINSGPAQQ

SEQ ID NO: 289481 - protein, 339 aa, unidentified
MNVVIGIDPHKASHTAVAIDEAEDELSSVRVRATRRQVEQLIGWAEPFEKRTWAIESAGGLGYLLAQQLVARGEMVVDVPATLASHIRVLATERSNKNDPNDAHSIAIAALRAPRLRTVEEADHSEVLRLLAKRNIDIGNQRTRVICRLHALFAELAPGGIAKEMYVSDAEVLMAKLGPETPAQQIRFDLALELLDDVRRLDSQLKESHRRIRLAVRASGTSVTDVYGVGPIIAAQIIGYSGDICRFANRDAYASYNGTAPVERSSGGRVVHRVSMRGSRKLNHAVHMAAVTQIRQSGSEGRAYFDRKVAEGKTKREALRSLKRQVSNAVYRQLVLDAR

SEQ ID NO: 289482 - protein, 412 aa, unidentified
MAVVMNQDSGFDIWCGLDVGKTGHHACPLDAAGRKVFDKPLPQDQKRLEELFDKLQTHGRVLVIVDQPNTIGALPIAVARSMGIQVAYLPGLAMRRAADLYPGNAKTDARDAFVIADTARTMPHTLRRVDAGEETLSELKVLVGFDEDLAAEATRLSNRIRGLLTQIHPALERVVGPRLTTKQGLAVIEQLGGPQTMAAASKSKLLRVISKAYPRGAQEFADAITTALAEQTVIVAGTAAAEQVLPQLAASLRQTLDQRHALAAQIEQVVDAHPLAEVLTSMPGVGVRTAARILLDVGDASQFPTAGHLAAYAGLAPVTRRSGTSIRGEFPARAGNKHLKRALFLSAFAALRSDPTSKAYYDRKRAQGKKHNAALICLSRRRCDVLFAMLKNREPYRAPTPTREPSPLPLAA

SEQ ID NO: 289483 - protein, 322 aa, unidentified
MTSSKLATRVIGVDVSKDKLDISDSRGKIQKEVKNSTASIVKYIVKNIAEPGETFVVCEATGGYERTLVKAMQTAGVAVCVTNPFQVQQFARGIGVLEKADPIDAGKLRQFGELVDLQPTAPKSAEHERHEALVRRREQLLTLISMEQNRRAQSYDPTVTAMIDKILKVMKTQQKLLENEIEAMLKKAAETNPAVAVVQSVPGIGPVTTSTLICDLPELGKLNRSEIAKLAGVAPIVNQSGKRDQQRSIFGGRSQVRRVLYMAALVATRHNPVIRAFYTRLIARGKEKKVALVACMRKLLTILNCMVCNNETWRTEKVVTGT

SEQ ID NO: 289484 - protein, 414 aa, unidentified
MRIVYQHVAGLDVHKKVVVAAIIVQQADGSWRQEKRNFGTMTADLLALLDWLLAQGVTHVAMESTGEYWKPVFNILEDNLEVLVVNAQHISKVPGRKTDQSDAEWIAELLQYGLLKASFIPPKGQRELRELTRYRTSFIRERANLINRVQKVLESANIKLASVATDVLGVSGRAMLEALVSGQASPEEMAELAKGRMRDKREQLAKALEGRVQAHHRFVLTELLTQIDSLDETIARFNQEIEDYCRPFEEAVVLLDTIPGIARETAEIIVSEIGTDMSRFPTAQHLASWAGVAPGNHESAGKRRSGKPAKGNQPLNAALTQAAQAASHTRDTYLAAQYHRLASRRGKKKAIRAVAHSILVIAYHLIQRKEPYRDLGGDYFDKRRPETTKKRLVKRLEKLGFQVSLSPLPVPAAA

SEQ ID NO: 289485 - protein, 414 aa, unidentified
MSNKRIALDRTLVVGVDVASEEHVGLIRGPAGLELGPFPFANDRSGFRLLASKVSEARAASGVEDVALALEPTGPYGEALGRWAVKRGWRVLGVLGAHTKRAKELWGNSPLKSDAKDARVICDLAVEGKWVTFSLREGAYAELKALAIYRQQLVRRQTALKHQTRALLCVLFPEFLTVVGRGLFKKSGLNLMEQFPTPRSYATIDLDQLTLLLRGWSRGRLGKERAQRLLSAARESVGVGAGLKTRSWILRRAVRRLRGLESEIQAVEARMERWLKRIPYGACLLSMPGVGVVTAASLLGECGDLRDYPSSGELLKFGGLNLVSFSSGKRRGRNRISKRGSGLVRHQLYLLAGRLVKQDAVWRSDYDQLRGRGAARKEALIALSRKALRVIFAIARDGSLYISPVVEEDLKKAA

SEQ ID NO: 289486 - protein, 411 aa, unidentified
MHNRQNYLYVGVDLHKEHHTAVIINCWQEKLGEIQFDNKPSAFSKFLLEVETYVSDGLSVVFGLEDVGGYGRALAKYLVDHEQVVKEVNPALSFLERKSQVMIHKNDSWDAECVARILINKFNQLPDAKPNDLLWSIQQLVSRRNALVKAQSSLKNQLHIQLNHHYPSYKKFFSELDGKTALAFWQQYPSPSCLEGANIKQLTAFLLDVSNNTCSVKKASDILKLVKEDGHTMKEYQETRDFLVRSIVRDIEFKKTEMKYIERELKQLVNLLDYQLETMPGIELVTASALIAEIGDVRRFSNANKLARFAGIAPVYFGSGGKGKTHKSKQGNRALHALFYNLAVQQVQVAKGSKLPRNPVFHAYYQKKLKEGKTKGQALVCIMRRLVNIVYGMMKYKTAYELPVVEEKEVV

SEQ ID NO: 289487 - protein, 408 aa, unidentified
MQVLYERCAGLDVHKDTIVACVRCVSEPVHQEVRSFGATTTELLALADWLGEHECTHVAMEATGVYWKPVWHILEPEFELVLANAAHIRNVPGRKTDVNDAMWIADLLAHGLIRSSFVPPQAIQDLRDLTRTRKQLVREVSQHSLRIQKVLEDANLKLGSVLSDVLGKSGRAMLDAIVAGEVDPGKLAALAQGTARNKTCELREALRGRITEHHRTMLRLHLQVVDALQRTLAEMDVAVGKALAPIRQRARLLTTMPGVSDLTANVIVAEIGVDMSRFPTAGHLISWAGLCPRSDESAGKRRSTRVRKSGTWIKTTLVTAAWSAVRVKTSYLHAQFLRIKARRGAKKAILAVAASMLTAAYHMLRDGVEYADLGADFLYRQDRSKVIHRLLKRLQDLGCDVPVGAHVA

SEQ ID NO: 289488 - protein, 321 aa, unidentified
METQEQRLVLGVDVSKQTLDCGTWPATSGWQEGRDAAGIARLVQWAIEHPVRLVVLEATGGLEIDVAAELARAGVPVAVVNPRQTQRFAQALGILAKTDQVDAGVLARFGAMTGIEPRPLKDELLRELDEVVARRRQLVEMLTMEKNRLASARDPRVCKNLKAHIVWLEKRQSDLDNELRQRIKDSPAWKAKDDLLQSVKGIGDVNAATLIAELPELGQLNRKQIAALVGVAPFNHDSGKHQGKRSIWGGRATVRHALYMATQSAQRYNPQIKAMSDRLSAKGKVPKVVIVACMRKLLTILNAVMRTKQPWNPQHNVIQSA

SEQ ID NO: 289489 - protein, 387 aa, unidentified
MPDVTPCLHPGEVRRWISFDQHKFSIVAGVLPPDGGKPEVCRIETTERAIRRFIEKQGGPEGLSVCYEAGPGGFALWRLLTRIGVACDVVAPSLIPVRAGDRVKTDRRDAKKLVSLYRAGMLRFVHPPTPELEGLRDLLRARDDLRGVRLAARNRVLKQLLRHGRIFREGKTAWTKLHRRWLAIQRLDDPLAQEALEQLLIHVDGIERQLDTLDARLAEIAGSERWAGQVQILTRFRGIATITALGLIAEIGDFARFSHPRELAAWLGIVPSEYSSGDQQHRGHITLSGNKHARRLLIEAGWHYRHAPRLPKNGPPPDERAWHAQVRLYHRHRHLTDHGKRSTVANVAVARELVGFLWAAMTNQPLRITDSAAPSPSTAGQLQEAAA

SEQ ID NO: 289490 - protein, 350 aa, unidentified
MNEITTIGLDIGKRVLQVHGADAAGNTVIQRKLRREEVLPFFAKLSPVLVGMEACGTSHYWARELRAVGHDVRLIPPSYVKPYVVRQKNDAADAAAICEAVTRPSVRTTPIKSIEQQAARVVHRAHEFLSRQRVTLINAIRGHMAEFGVLAPAGTQNLGRLLERISNPETALPASVRKVLNVLADQLVALSKQIDAMEAQMRKRCREDADAARLVTIPGVGVITASAILAGVPDIHAFRSGRGFAAWLGLVPRQNSSGGQGSLGTNYQNGRSRNAQAPGCRRDIHDPLGKDEGGLRPILARQDACTQTRQTRSRCTGKQNGTHHLGGVDTWRGLSPGLTRRAPDRKERRS

SEQ ID NO: 289491 - protein, 393 aa, unidentified
MPEARIPSQSSTAVRIDIAAIFVSLELSQSKWLVTSISPGGGARMSQSILPAGDVASLLKRLGDLKRQTRDRVGGDFPIITIQEAGLDGFWLHRVLVSEGIESHVVDPASVAVSRRKRRAKTDKIDGEALVRTLLAYKRGEPRVCSMVIAPTPVDEDARRLVRERKTLIRERISHVNRIKGLLYSQGIKGYEPLPRDRRERLEALITGDDRPLPPHLKAQIKRELDRLELVLKQIAEVEKARSAMLASASSASSNSTRPSGPDMLLGLKGIGEEAAAILWTEGLSRHFDNRRQVAAYAGLAPTPWQSGQVNREQGVSKAGNPRLRTALIQIAWLWIQHQPDSALTKWFKARVLQNGGRLKKPTIVALARKLIVALWKYVNAGVVLEGAIVTHI

SEQ ID NO: 289492 - protein, 355 aa, unidentified
MTSSKYIGMDVHKESISIAVRNAAGKIVMESVIQTKASMILQFIEGLRGEVHVTFEEGTWSAWLYDLLKPHVTKLVVCDPRRNALLKEGNQNDRVDARKLAELLQNNQLRPVYHGDHGLRALQELVRSYLTITKDLSRVMTRVKAIYRSWAIPCSGTQVYSARHRAEWLEKIREPGVRRRGETYYQELDGLRSLRQEVRKELLAESKKHEVWKRLGGIPSIGPIRAALLLGIMQTAHRFRTKRQLWAYSGFGVEGHSSADHQVVKGQLQRKKKPIETRGLNKNCNHHLKNVFKSAAVVASTKPGPLQEFYAALVAKGMRPEMARLTLARKIATIVLIVWKKGVCFDANHLKPQTA

SEQ ID NO: 289493 - protein, 427 aa, unidentified
MTYRIAGIDVHKKMLAVVVTDIAVDGAYQFVHRRVGTSPSELRELAAWLVAEAVEEVVMESTAQYWRPVWEVLERAWMPARRARDGASPMAGRLHLAQAQSNRGARGRKRDFVDAERLVKRLVAQELTLSFVPDAEQRLWRTVMRRKYQLTRNRVQVHNRLEALLEEAHLKLSSLVSDLLGGSARRMLQAVAEGETDPAALAALADRRLRATPEQLSDALGASTELNPVYRQLIGMALEDLRLIEEQIRRLDLEMAGLIRPHQDAVQRLADVPGLGVDSAQQMIAEVGPTAATFPSPKHLSSWVGVCPGAEESAGFNASHRSPNGNRQMRRLLHVAANAAVRTKGSIFQLAYRRLVPRLGHAQAIGAVAHRLCRLIWKILHHGVRYEERGPEVSRARIQRRAATMIRDLRRLGYRIELVPPPSGSPA

SEQ ID NO: 289494 - protein, 346 aa, unidentified
MTIIEAERPVTGGVDTHLDTHVAAALDPVGGLLGVESFSASAAGYGELLAWLRGFGPVSLVGVEGTGSYGAGLARHLRAAGVGVAEVDRPNRQARRRQGKSDPVDAVEAARAAQSGRALGAAKDRDGAVEAMRALVVARRSARSARVKSLNQIRHLSFTGPDQLRERLKGVSALCLAAEVASLRPRPGGDQVMFATKVALRSLGRRVLALEEEEGALDELLTELVTAGAPDLLALYGVGVDSAAALLVAAGDNPQRLRSEAAWAHLCGVAPIEASSGKVTRHRLDRGGDRQANAALWRIVMVRMRHEPPTRAYVDRRTAEGRSKLEIMRVLKRYVAREVYYYLPRH

SEQ ID NO: 289495 - protein, 387 aa, unidentified
MQKPHDNSKVCRAAFVQDSTLVVVIEMALTSWLVAGMIPGVDREPLKKIAPDPEELLQLLYRWRDEAIKAGREITRIAVAYETGRDSFWLARWLRARGIDAHVIHATSVAISREHRRAKTDRIDTAMLRRGFLGWLRGEPGHCSLAIVPTVAEEDAKRPHRERESLVQERTSTVNRMKSILIQFGVRNFNPVLRKASEKLDAVRTPEGIPLPPNAAAALRRHMERLRVIKEQIKAIERTRLQRLQRDPADKMNAMVFLLVRIIGLGVETAEQLVHEILFRDLRDRKAVARYAGLTGSPDESGSKRREKGLSRSGNGRVRTILIQLSWRLLKLQPGSELVLWYQKRTADAKGSRKPMIVAFARKLIIALWRYVNTGLLPEGFELKPAA

SEQ ID NO: 289496 - protein, 457 aa, unidentified
MAQRKRGKQSSRSLSTLNPNAAGIDVGSTFHVVAVPADRAEEAVRTFQTFTSDLHRLADWLQEVGITTVAMESTGVYWIPVFEILEARGLEVLLVNARHVKNVPGRKTDVNDAQWLQQLHQYGLLRGSFRPHDRMVGLRAHLRHRERLVESAASHIQHMQKALMQMNVQLHHVVSDITGLTGMRIVRAIVAGVHDPEALAHHRDIRCKASHETIREALTGNYRAEHIFALRHALELYDFLQIKISECDVEIEAIMRTLNEDRSAPTMPIPPVRHTRGKNEPDFDVRTALYTMLGGDLSQIHGFGPYTVLRLVGECGDDMRKWPTAKHFTSWLTLAPGNKVSGGRVLSTKTRRSANRAAALLRIAAVNIGKTRTALGAFYRRLAARVGKAKAVTATARKLAVLFYNALRSGMVYADPGADYYEERYRQRVIHNLQRSARQLGFMLVESIDPNPGLGVS

SEQ ID NO: 289497 - protein, 341 aa, unidentified
MDIDILGIDLAKRVFQLHGADRRGHALHGSKVLRAELLGAVRKLQPRIIAMEACSSAHHWGRQFQAMGIEVRLISPQYVAPFVKTNKNDANDAAAIVEAASRPTMHFVTVKSIEQQDMRAVHRVRELLVHQRTALINQVRGLLAERGVIMAQTPTAFKRALPSILARCDGELTSICQTLVTELLEQLRILEERIARTNQWITSFLKSSALCKKIEAIDGVGPITATAIVAAVGDAKEFKNGRHLSAWLGLVPRQYSSGGKSRLQGISKRGDIYLRTLLIHGARVVLRYAIGKADARSRWLQDLIARRGYNRAAVALANKNARVIQALLSGTEDYRSPAVPA

SEQ ID NO: 289498 - protein, 345 aa, unidentified
MSEFYEGQQFVGMDLHRRRSVLVRMTETGEHLETVRIVNDRDQLADVMSRAGESPEVVLEATYGWYWAADALAEFGATVHLAHPLGVKAFSYRRVKNDQRDASDLADLLRMGRLPHAWIAPPETRELRELVRHRAKLVAMRSQCKAHVHAVLAKGGIWVPMTDLFGVEGNLLLDRVTMPAPYKARIASLRRLIEALDFEIGLFTNLVRGRLAHDPGYTAIQQIPGIGPVLAAVFVAEIGDVHRFAGPAQLTCWAGLTPSHHESDTTVRRGRITKQGSRLVRWAAIESVQILPETSHIGGIREKVAHRRGNRNIGAVAAARKQLELVYYGLRDHHVRALHRSPRAA

SEQ ID NO: 289499 - protein, 396 aa, unidentified
MLTIGIDIGGKQHVVARCRGSQTRADREILRVRQDRAGFDALDAWLARQPEAVDLVTMESSGHYWMALASHLGRQGIPIAVVNPLAAKYFAKSRLGRTKSDPADARSLALMAMRDQPAARDPLAGVELRQAARFAMTLVTEQARVCQRLIRLVELGFPELGGLFDDPTCRTAREVLRVAPTASEARRRRVGTLADANKGPGHRRLGPARAERLKAAAAHSIAVPELDDEVAFEIDLLLDQYDLLEAQIAQADAHVAALLDGELARRLRTIPGVGPSTCAALIAEIGDIERFDDVDQLLAYAGVHPAERSSGRKGSSPETSWHMSKAGNAHLRAAAYRLAVVGIQHNPVIAAHYARKRAAGKTKMNAIGHCMAKALSLVWGVWRNGIDFDPNWQKGA

SEQ ID NO: 289500 - protein, 372 aa, unidentified
MKSILYVGMDVHTTNYTLCTYSIEDDREFGLVKFGPDYLNIVRYVRRLKEHHGQDIRIVCGYEAGGLGYSLYRSLNASNIECVILAPSTMPKAPNERKTDYRDAAKIARCLAYNSYRSVYIPDAEDEAVKEYIRMRDNTKDHIKQLKQRIVALCTRWRKEFNGTKKLWTIAHMKWLQNLEFENQIAQEAFDEYVIQLNEANARLKRYDERIEKWAKLPRYAENVSKLTCFCGVKTHVALATIAEVSDFNRFPNANRFASYLGLVPGEYSSGENINRLGITKQGNSHIRKLLTEAAQCYSRAVPGRPSVELMKRQEGNDPKVIAYANKGNERLKRKYRSIAARKPKPLAVTATARELACFIWGMMTNHLEQVY

SEQ ID NO: 289501 - protein, 380 aa, unidentified
MNEVTIVGCDLHDRSMLLKVALGKSEAHEKSFVNDVDGRCSMRDYLVQFARKHGSQRIVFVYEASGQGYGLYDLLTDQGIEAYVLSPAHLPRTPKGRKNKTDARDAQMLLEQARGFVLAGNRLPIVWTPPQRLRDDRELVRGRLEAAEAVTRIKLQLFSLLKRYGVATPEWFRKNRNWTRRFVRWLKDQAERMGEVLTPVLLALVERFEVMHKQVTHFDLHLRHLAKTDRYQSAVTAVRALPGVGLLTALTFLTEMGDLTRFSNRREVAAYLGLCPSAFESGEANDRKGHITRQGPGRVRKVLCQAAWVRIRLDQTTRDVWLRIQGGKASRNKKAVVAIMRKLAIGMWHRALAAGVSQELTAAPRSPPRWMEDPSQILAG

SEQ ID NO: 289502 - protein, 347 aa, unidentified
MRFYTRQHRHYCGVDLHARSMYVCVLDRDGNVLVSKNIPSAPEPFLELIAPYREDLAVAAECMFTWYWLADLCAREGIVFVLGHALYMRAIHGGKAKNDRIDAHKIAGLLRGGMLPQAYVYPQAMRATRDLMRRRNYLMRQRAELLAHITNTNHQYNLPALGVRPARPAERSGLLEHFTEPQVRRSVAVDLSFIEHYDRELPALERYLESNAQAHDPLALAIVRTVHGMGKVLGLSILYEIQDIGRFARVQQFLSYGRLVKPTKESGGKILGHSGRKIGNAHLKWAFSEAAVCFLRANKPAQALRARLMAKHGKGKSLAIIAAKLARAVYFMLKRGEAFDAERFFAH

SEQ ID NO: 289503 - protein, 343 aa, unidentified
MQAVTTIGLDIAKSVFQVHGIDAEGKVLIRRQLKRRYVLAFFQKLSPCLVGIEACATSHHWSRELKALGHTVRLMPPAYVKPYFKRQKNDAADAEAICEAVTRANMRFVETKTPEQQSCLMLHRTRHLFIRQQTSVINAIRAHMAEFGIVALVGRKGVEQLLDVVADARDRRVPEVARACIAALGAQLRLLKAQILEFDRRILAWHRSNETSRRLDELPGVGPALATALVASVADAKAFRSGRNFSAWIGLVPKQHSSGGKDKLGSISKQGDRYLRSLFTAGALAVIRYAKIHGTKHRPWLTALLARRPTKVAAIALANKIARMAWAMMARGERYREPVALAA

SEQ ID NO: 289504 - protein, 341 aa, unidentified
MDEYIGLDVSLEETAISIRRDGRRLWRGKCKSDPNVISALVRKRAPDAKRMVFETGPLSVWFYHALSAEGLPAICIDARHAKAVLNMAANKTDANDADGLAQLAEVGFYREVRVKGYDSMLTRTLVAARTKLVRICTELSNQIRGLMKTFGLIVPPGRGRTFEQNVRELLDGNKALSPIVVTILEAWCGMRKQAAKLSRQLTAIARESAPCRLLMSIPGVGVVTATSFVTAIEDPENFRKSRSVGAWLGLTTRRYQSGEVDYDGHISRRGDAHLRGLLYEAATVILTRAGADSSLRSWGLKLREKVGFKRAAVAVARKLSVIMHAMLKSGEFFDRSAGVAA

SEQ ID NO: 289505 - protein, 342 aa, unidentified
MTIVAGFDVHRRQITFDALDTETGELMRGRIDATPSAVERWARSFEDREVKVALEGCTGWLFVSRALERAGAVAHLAEPVETSALRGRKRRAKTDREDARWLRTLLSEGRLPESWIPPEHVREWRSRARLRKTLIDERTQWLQRVQATLFHHGIGGVPDKLLSGAGREFLCELELPADARERIAIALAMIDSLDGQLRPLESELRALARRQTGCRALMAQFGMGELTSLMTLTELGDVERLSASRKAVRMAGIDIGVHRSDRRSRVGKLNRQGSPHLRWALYEAALSATRPTSPDHEDYLALKARGLSHTRASLTIARKLARRSFHILRELGPAALEPIATT

SEQ ID NO: 289506 - protein, 337 aa, unidentified
MEQNFYRFVGIDVSCRKLDIAFKTGGVWVRHQIVNDWATVQVFATELAATQTNCCCIVEYTGTYSTKIVLALHRAGVKVSLITPSQSNAFAKMKHKTTKNDRQDAQLLAEYGELNAADLRFHEPVDEKQVQFKQLLDAIAQVETMRQQVRNQRHAYEQLPPDHQQEIILNTYKDSEKQFDKQIDELEKKVKELDNHDEDLAQTKELMMTIVGIGEKTANTILAKTGGIKRFGNHKQLAKFAGTAPTEQSSGSSVRGRRGINRSGNGTLRKAIYCATWSAVKSNKACKALYNRLRAAGKPTKLALIAVANLLLRQIFAVVNTQKRFDNEFHLKNCSPT

SEQ ID NO: 289507 - protein, 307 aa, unidentified
MTSTQYIGMDIHQESISIAVRNAAGKIVLECVIETKANAILDFIHGLRGDLQITFEEGTWATWLYDLLKPHVTKLVVCDPRKHSRQGNKNDRIDARELSDRLYLNKLSSVDHGGAGVRTLRELARSYLTIRKDLARVMSRVKAIYRSWGIPCAGKQVYAPRHRAEWLAQITEVGVLRRAEFYYPQLDALRSLRHEVRRERLAESKKHPATKLLCQIPAIGPIRAALLIALIQTPQRFRSKRPLWKYIGFGIEMHSSADYRKVQGELPRSRKQVSVRGLNRDCNHDLKNLLKSAATIAAVKPGPFQEF

SEQ ID NO: 289508 - protein, 406 aa, unidentified
MIFVGDDWAEAHHDVYLCDEAGTRLGKARLPEGIEGIGRFHELVAVYVEEPGEVVVGIETDRGLWVQALIEAGYTVYAINPRAASRYRDRHTLSGAKSDPGDAKLLAELVRTDRHNHRPVAGDSDLAEGIKVLARAHQTMIWDRTRATNRLRSALREYFPAALATFAELAHRDTLAVLSAAPDPATARQLTPGRVRTLLRHAGRQRNIDTRAQTIVDGLRAATLTASPAVVSAFAATTRAQVALIAELNTQIAGLETELAAHFEQHPDADIYLSQPGIGVILGARALGEYGDDPNRYAEAKSRKNYAGTSPITRASGTRCVALARVVRNNRLAAAIDQQALCALTTSPGARAFYDHRRARGDSHHQTLRALGNRLVGILHGCLRTHTPYNESTAWGHRQDTDQIAS

SEQ ID NO: 289509 - protein, 328 aa, unidentified
MSDQYIGIDLHKAFFQACALASDGTRLWEGRFPRSEDGLAALTARCTAKTAMAVEASTPTWHFADAMAPRVGDLRVVDPFRTKLKAGYAAKTDRLDARRLADALRRESVVGIYYPPLAIRELRELCRERHALIHTRTRLVNRIRAVLLRQGIADARRLAKYADDRWLTTLALPPRAAASVAAMRHVLAVVREEIAHADAEVAQLSAADPIAHGLQTVRGIGPVLALTIRAEVGDMRRFPSGAELASYAGLVPRVDSSAGRTRYGRITRRGSPWLRWALIEAAMHSPRRSDRVGRWGRALAVRKGMLKARVALARVLCTELHQRWLALE

SEQ ID NO: 289510 - protein, 472 aa, unidentified
MSKKDKSRSPQTKRRVSNKPLPVQLMERINANAAGIDCGATHHYVAVPEDRDDEPVRHFKTFTDDLHALADWLLHCDVDSVAIESTGTYWIALYEILQARGLDVTLVNARHVKNVPGRKSDVSDCQWLQWLHTVGLLRASFRPDAEIVSLRVYLRHRQTLVEGASDHIRRMQKAMVQMNLHLHNVLSDITGVSGLRIIRDIVAGIHDPVQLAQHRDRRCRATIEEVQASLTGHYREEYLFALRQSLELYDIHQRQMQTCDEHIESLLQDLAASVPEPEPPTAPARRGRRKVSANAPTFDLRERLYQLTGGVDLTRIDAIGPYAALRLISEIGTDMSRWPSEKHFTSWLTLAPQNKITGGRVLSSRTPRSANRAAAVLRMCVMSLIRSNTALGAFYRRVAYRTGKAKALTATARKLAILVYRALSGTLVYEDPGADAYEQQHKARVLATLRKRAQRLGFALVLDDAPQSASVS

SEQ ID NO: 289511 - protein, 325 aa, unidentified
MSTKAANLVEWVGIDVCKAKLDVYILSDKTYRVFENSEEGIAELMVWLKSYSNVAVVCEATGGYEAAMARQLYTADMQVSVVNPRPVRDLAKALSKLAKTDPIDAYVLAKYGEVTEPEPTVFASEIADELKQWVTRRQQLVEILSAEKNRRTLLPAGVARDEVNEHIEWLEEKIKKLDKKIDALSESTQEWRATKKILRSPKGIGPVISASFLVLLPELGKLSRKQISALAGLAPFNRDSGKFRGQRKIWGGRSAVRSLLYMATLSALRSNPPIRMLYQHLIEKGKAKKVAIIACMRKFLTCLNSMVKNNEEWDDYKVTALLQNS

SEQ ID NO: 289512 - protein, 383 aa, unidentified
MKSVCGLDVHKDSVYLCILSEFGELIEKVFGVLTYELEEMRDLMLHHHVVEVSMESTSVYWIPIWRVLFPHFKLNLANPYFIKQLPGCKSDVKDAQWIAECTMKELVRSSFVPPEIIQQLRQYDRRIFDLNEEIVRKLSKLDAVLQRCNIRLSNYVSNVDSKSYKAVVRAISQGITDPEELVKLIHGRIIKHHGMDVITASLKGVVSLAEIDMISQLRDELDMAEAHKEKCQARMLEICEREFPEELKRLQTIPGIKERAATSLIAEIGTDMNKFETANHLASWSGLKPRNDESNKKIKSRSITHGNVYLRKTIIECAWAASRTKDCFFSRFSFHQTQVRKKNKMKVLVAVARKMLIAVWHVLHDNTIYIDFTTDRKTSRIKG

SEQ ID NO: 289513 - protein, 427 aa, unidentified
MTSFRKEFPFMNYCLSFDVGKNKSCYGFFRVKDVTLGIKDGMECIIKQTYFNHTAEEAEKIEDRITSYSKNEIAVIMESTAVYHRPLQKYFEDRGYKVSVINPFLTGHDNSSLRKTKYDKGDVAKIAFVYFKGNCNIQFAETVLEKNRRILSRFSEEITDTLSKRKTELLMKLVETAPEYEKTFKKSGIYTNSVLSLIDKYPHSDLIREANEKDVAKAMHYAKKNYHVKDYTVWAEKLKRENGRWLPGTDRNSAELESIHYLIAKIQEETIESDEKIAELVSVCEGEKIYKVLLTFRGIGPDIAAHLTAELGNLARFQKPQSIIAYAGFDPSKEQSSQSLDVNGKITKRGNKHLRRWLFVAVQSMIMHAKEGDREFADYYASKRGDKRKGGQSHHHFYAMTACCNKLIRKIYFRYLDACKAETEKTK

SEQ ID NO: 289514 - protein, 351 aa, unidentified
MTIVADLFRFVVGVDTHAATHTYTILESSGRVIDQQQFPTSPAGLARAIDWIGRRTEGDLDATLVTAEGTGTYGAVLAGRLAASGYRVVEAPTPRRDPAAGKNDAMDSLAAARSTLMMRTDRLRDRRGGGDQHTASVRSALQVLLTAREQANGERTRAVNALTALVRTHDLDIDTRRALTITQIKTISRWRRRAEPIDLATARAHAVRLALRITELDTQLTDNADQIRSLVHDQAPILLDQPGIGPVTAAIILTAWSHPGRVRSEAALAKIAGTAPLPASSGNTQRHRLNRGGDRRLNRALHTIVLTRMRCDPATRAYTERRRAEGKTTREIRRILKRYTTRQLYRTLNTA

SEQ ID NO: 289515 - protein, 333 aa, unidentified
MVYAAIDIHKRVFQAAVLDAETGELVQARLPATREALADWATRWAGKLEAVALEATTGWRWVWRVLSGRGFEVRLCDPGQARALRGSKRRPKTDRLDAAWLARLLAKEMLPTCWLPPEDIQYLRDRTRLRRALAQDRMRFAQRLHALLTHEGWPCSRGRLLSVSGQRWARALALPPAALANVEAMFALIAVLDEQLAVIDAELRQRARSDPRLKALCTIFGVGPVLAAHLLAEIGQADRFRRARQVVRVAGLDPVTRTDYRTRPGRPPPLTRRPLPCRALVEAAHHACQPRSPDHALYLAGKERSGSKRAALTVARKIARRAHHVLAELEQAA

SEQ ID NO: 289516 - protein, 345 aa, unidentified
MKITTVGIDLAKNVFQVHGIDERGKAVLRKQLRRAQVAVFFGNLPPCVIGMEACASAHHWARTLQRFGHTVWLIAPQFVKPYVKTNKNDVADAEAICEAVGRPNMRFVPIKNIEQQAILSVHRVRQGFVKARTAQAKQIRGLLGEFGLVIPQGIYNVAKRVPEILEDASNELAVPFRHLIDRLTKHLKELDRQVKEFEQEIIAWHRSSELSRKLEKIPGIGPLAASALVASIADAHSFKNGRQVSAWLGLVPRQSSSGGKPTLLGMSKRGDAYLRTLLIHGARSAILAAKNKVDNTQGWLTNLLKRRHPNIAAVALANKNVRTVWAILAHGREFKVDYVPIRMAA

SEQ ID NO: 289517 - protein, 458 aa, unidentified
MTPRQDHLPHPQRRSRCVRLHVTNPDAAGIDVGADAHWVAVPVERDPEPVRRFGTCTADLEALADWLQACGVTTVALESTGVYWIPLYELLQARGFQVLLVDARQVARAPGRPKTDVKDCQWIQRLHSYGLLSAAFRPAEQVVVLRAYLRQRDMLVTYAGQHIQHMQKALEQLNVKLTEVVSDITGVTGMAIIKAILGGARDPVGLAKLRDPRCKESEATIARALQGTWREEHLFALRQAVTLYEFYHQQIGVCDQAIEAHLRTFADQSGGQPLPYRPRRRKREANEPRFDARARLYAACGVDLTAIEGIDETTALVLLSEIGTDMSRWPSLKHFASWLGLCPQHKISGGKILSRRVRRGSSRAKRALRLAARSLHHSKSALGAFFRRLKARQGTPSAITAAAHKLARLVYTLLKHGTDYVAQEMAAYEVRYRERKVQSISRQAQALGFVLVPAVAGE

SEQ ID NO: 289518 - protein, 344 aa, unidentified
MDNHTQYSGFAGVDLAKKVMQIHFVTEDGEITDKSTKRAEFLDFFRNRGKCLIGMEACGSSQDWARKLEAMGHGVHLMSPKAVKPFVSGQKNDHNDAIGIYKAMFNGVRRVPVKSTEIRDLQTLRRIRSQVTKDKVKEINHVRGLLAEYGIVMGKSLKAFNKDISSALESLKERGDVSPLVAEELRTTVEAIKTKIKRQKKLDQEIEQLARGCKSYENFLKTPGVGPVTAAMLCVLLCDPSIFANGRQFAAYIGLAPRSRGSGGKNYVIGIPSKFNCDCESRAVFVECAQAIARCKNKSPWVEGILRRKPKKVALIAIANKLARQVWAMANKGESFKQMAILTA

SEQ ID NO: 289519 - protein, 348 aa, unidentified
MRLYSGSHEFTCGIDLHARTMYLCILDRTGKIVLHRNLPCRPEAFLAAIAPFRSDLVVGCECLFCWYWLADLCESEAIPFVLGHALAMRLIHGLKAKNDRLDSEKIARLLRGGNFPLAHVYPKALRATRDLLRRRLYFVRFRSELLAHLKMSESQINLEPVRGRLDRPANRVGFPDRFPEGSMRRSIAADCAMLDALEDLVGALERDLVASAKTDDLAAFYRLRSVPGIGPILALTIFYEVPDFDRFDTVQQFASYSRLVAPRSQSAGQLAGSRGRKQGNVFLKWAFSEAAVLLLRNNPQAQTLHARLVARYGKAKALSVLAHKLGRAVFYMQKRKQPFDARRFYAEA

SEQ ID NO: 289520 - protein, 346 aa, unidentified
MNITTIGIDLAKNVFQVHGVDERGKGGLKKQLKRAQVLPFFANHPPCLIGMEACGSAHYWASKLNELGHTVKLMAPQFVKPYVKTNKNDAADAEAICEAVSRPSMRFVPVKTGEQQAVLSLHRAREGFVKARTAQANQIRGLLAEYGIVIPVGIDNIVKRLPDILEDGENNLPGVFRQLLLRLGEHLKELDRQVDELNEQIQLWHRENAASRKLADIPGIGPITASALVASIGDAKDFENGRQLAAWLGLVPRQHSTGGKQTLLGISKRGDCYLRTLLIHGARAVIRVSERKVEQADSWLTRIVDRRNKNIATVALANKNARIVWALLAHNREYQSDYVPVVATGA

SEQ ID NO: 289521 - protein, 344 aa, unidentified
MQIRSVGIDLGKTTFHLIALGSRAQVIVRKKFSRSQLLTYTANLPSALIGMEAGVGSHFLGRALREQGHEVRLIPAQFVRPFVKSNKNDYCDAEAIAEAVERENMRFVPIKTEDQLDLQALHRVRDRLVARRTSVINQIRAFLLERGISFRKGPASLRRQLPEILENADEQLSPRMRSLLDFLWQEWKGLQLQIESLNEDLERIASSDPACVRLQQIPGVGPLIATAVVSAIGNGAAFHKGREFAAWLGLVPRQWSTGGKPKLLGISKRGNPYLRKMFIHGARAAVLRVKRERSSLGKWMGQLETRTARNVVIVATANKLARISWAVLASGNNYHPLPEAAFSN

SEQ ID NO: 289522 - protein, 339 aa, unidentified
MEHIAIDLGARESQICVRNDRGEILDERRYPTARLSRYLAKREPGGRVLVETSSEAFAVADLARACGHQVRVIPSSLVRALGVGERKLKNDQRDARKVSEMDCRMEVPSVHIPSAERREQQARITARQALVEVRTKLVNTVRSYFRSVELAQVKATPKTLAKNVRAKLKQQSEEIPDYIEQVLCVLDSVNAQVAEADEALKELAIADETCRRLQTMPGVGPVTSLCFAAAIDEISRFESAPRVASYLGLTPGESTTGFKTKRIGMTKSGSSRVRWTLVQAAWAMVRTRPNDPLTTWFQAVAGRRGKKIAIIALARKMAGILYAMWRDQQPYDPRKAVAA

SEQ ID NO: 289523 - protein, 409 aa, unidentified
MSSDACTNALVGLDWAVHTHAVCVIDAAGAVLDRFEVAHDRDGLTDLMRRLARQGQRLRIAIERPSGLIVDALVDAGHEVFPIHPNAVKASRPRYRSHGAKSDASDAYLLADLLRTDGHRWRALAPQSDDIRALRALVRSRDDLVAARVAAANQLTSTLQAFWPGAAVIFADVASPIALAFLRRYPSPRSAKRLTEAQLQRFCKTQHYSGRRSATDLLARLRAAASGHVGAHTEQAMAEVVRAQVAVLLPTVTQIAELTRRIEQFMHSLPDGLLMMSFPRAGQVCAAQILAELGDVRERFPSADLLAAEAGAVPVTYQSGKTRSVAFRWACNHRLRQAITCLADNSRHANDWARSLYQAARGRGCDHPHAIRILARAWLRVIWRAWTDRKPYDPALHGSAVALASSQGG

SEQ ID NO: 289524 - protein, 347 aa, unidentified
MNFYTNTHPYYCGIDLHARLLYVCIIDDKGEVLVHKKISDSPEALLALLEPYIGNIVVGVECMHCWYWVSDLCRLHGIDFVLGHALYMKAIHGGKTKNDKIDSFKIAKLLRGGNFPLAYNYPNELRATRDLLRRRTKLVRFGADLKGHVTNTVSQYNYRPHSLNLRYQPCRDQMREVFAQPSVQRNVDIDLTMVGHIETELRKVECFIEKQAKQHNPKDYYLLKSIAGVGRILALTILYEIGEIQRFESVQKFASYSRLVKCKAESAGKTYGTQGNKIGNAHLKWAFSEMAVLYLRGNDKAQAYLNKLQKRMSKAKALSALAHKLGRCVYFMLKRQKAFDESRSLTG

SEQ ID NO: 289525 - protein, 418 aa, unidentified
MSRVDSNAVLSVVHHHCCGLDIHKDKVSAALITTHEDGMVEESIYEFGTFTEDLYRLKDWVLEHGCHVVAMESTGVYWRPVHNVLEDSCQVILVNARHVKHLPGRKTDVSDSRWLAGLLRHGLLKGSFIPERHVRQWRDLSRLRKTFVESLADYKRRVHKLLECANIKIDSVASDLFGVTGRNLMDLLVSGEEITLEAVLRCTRGRLKGKEDELFKSIKGFFTEHHRFQLESIRTLIEGVEAQIRRVHERLSSLLSDRREKIHRLMEIPGINDVSAHALLSEIGDTLDQFETAASLASWAGLCPGNNESAGKRHSGRSPVKGGHLKTIMIEVAWGAIKKKGSYYREKYYGLRARKGAKKAIVAVAHRILKAVFHVLKFDRPYQELGEAYLIQLNNKARLHSLHKQAAKLGYTLVPAEV

SEQ ID NO: 289526 - protein, 354 aa, unidentified
MTFYIASDIAKKRCVTCIRDEDGAIKEISSYPNTSQGASEFARRVIDTYGSDCKAVVESTASMWVKTYEAFEAKGIGVRLSNPVKTRVIAESKMKTDRVDAMVLSNLLRADLIAECYVPSKEVRLSRALLGHKVNTTREQTKLKNRVHSLLTKYDLECEYEDIFGAHGMDWLKRIRLDGHDQWILSSLIRQLEFLDEEGEKADKEISKDAIENEYVPIIMSMAGFDYYGASFLAAYIVDINRFPSPPHLVSWVGLCPSVHQTGETKYMGKMKGGSKKACWIMVQAANVAVRADPRLERYYERKARRLHHNVAITHVANKMLRIIWHMLMENRLYDQRNEERYQSKLKRLQKMTE

SEQ ID NO: 289527 - protein, 343 aa, unidentified
MQAVTTIGLDIAKWVFQVHGVDATGAAVIRRQLKRRYVQAFFQKLPPCLVGIEACASSHHWSRELKALGHTVRLMPPAYVKPYVKRQKNDAADAEAICEAVSRANMRFVATKTPEQQSCLMLHRTRHLFIRQQTAVINAIRAHLAEFGIVAPVGRKGVEELLDIVADPSDERVPEVARACIAALGTQLRALKAQILEFDRRIMAWHRSNQTSKRLDEIPGVGPALATALVASVANPRAFRSGRNFSAWVGLVPKQRSSGGKDKLGSISKQGDRYLRSLFTAGALAVIRYAKIHGTKHRPWLTALLARRPTKVAAIALANKIARMAWAMMAKGERYKEPAALAA

SEQ ID NO: 289528 - protein, 331 aa, unidentified
MSVHVGLDVGSRTTAMGWRDKGRAAGSWEIAQTPKGRKAAVKKLMALKPLSVVMEATGIYYLDLALELSAAGLPVSVINPKSSRNFARLMLQHSKTDAIDAQLLAEYGERMAPRLWVPPSPVQLELRAIGRHINRLTCHCTRAKNELHALQATGTTSALLIEDEEEAIAMFGKRIERFRQAGRAIIANCPALRSQFDHMMAAPGMGEVSTFAVLAELTALPVTLKSPQVSRYAGLDVRLTQSGTSIDKPGRLSKGGNAYLRSAMFMPAMSAIRCDPHVKAFYDVLIGRGKRKMQAICAVMRKYLTGLWACIRTEEDFNTAKLFSEKHLLKA

SEQ ID NO: 289529 - protein, 348 aa, unidentified
MALTIVETRAVTGGVDTHADVHVAAALDPVGGLLGVEEFPATPAGYARLLGWLGGFGTVCLVGIEGTGSYGAGLSRHVTGAGVRVVEVDRSDRQDRRRQGKSDPLDAVSAARAAQSGRARGAPKGRDGTVEAVRALMVAKRSARSGRTQTINQARALVLTGPADLRTRFARHTVAALVAETAALRPRPGDVVGYATRVALRELGRRAEFLDSQLGRLDELIVPLVAGHAPALLALYGIGPDTAALLLIAAGDHPERLRSEAAWAHLCAAAPIPASSGKVTRHRLNPGGDREANHALWRIVITRMSSHPPTRAYVDRRSKEGLSKKEIIRCLKRYVAREVYPCLRPPAG

SEQ ID NO: 289530 - protein, 450 aa, unidentified
MNLYIGVDIGKELNYASFLNEKGVEIDKRFKFKNNYLGFLKLKDNIDKLTYDYNLKYDDILVGFESTGHYWINIDWFLTEKLNIKTVMVRNDAVRHTRALNSQGKGKNDSLDSRTIAECLKNGYYFDVQGRKEDYIVLRRLTRERSELEKEIARYKNRFRAWLDVNNPIFLENFSNVFSAGALALLKVYPSPLDIIQDSYLEVREKLREVGYSRTNKTLKIYYEEVQTYKNIINGISYADRLEISEYIEALEMYIKKKENLDERIEVLMNFLEGKVYTSLSEIKGMPKAQVASLIAEIGNINNFKSARHLLSYAGLNLQGEGSGKNKGYSWISKTGNRKIRKELYVITFNLIIHNDYFRGLYCYYKSYKRPNEKSSKEMLIALMCKLLRVVYGMLKYNLEFNLNEMLKNYDFRNINKEKFIDEFLGNSEKKQKVITQEIEDIFLNNIKSN

SEQ ID NO: 289531 - protein, 376 aa, unidentified
MGQRPFIPQEYDVFGGLDVDKKSISVTFINHQQGFIRSLHMPYSVEHLVKHVRKHFAEQKVAFAYEAGPTGYGLYDGLSAQGYNCLVAAPSMIPRALGQRVKTNRLDSRGLSENLRGGQLKSIHVPSPIYRELRHLTQLRDTLVSEGAGSKQRIKSLLLFEGIPFPLAPAGSQWSLKGKAQLRKLQCSKSVRFKLDQLLDRVEFSEKQGVKVSKEIRQFCHNDPELSQCIEYMMSVCGIGWIVASQLLARIGDWRELQNVRQLAGFLGLVPSERSTGEKTHRGAITHSGDGRLRSKLIQASWSAIRQDGELREFFRSVCRRHPRGVGARVAIVAVARKLSTRISVVLMQQRPYVVRQKIHSAPLTQEETSPQGTTR

SEQ ID NO: 289532 - protein, 419 aa, unidentified
MSFKILKFNCCGLDVHKTWIYACIGITDSNNRTEYKQARFSSFTKGLNELCDWLAKYNCTDVCMESTGKYWIPVFNILEQHNLWVTLSHPKYTKPMKGNKTDRKDAKWICDLYMCGMVKPSFIPPADIRELRDLVRYRYKLTCMITGEKNRAQNCLTVSNLKLDDVFSDVFGKSSRSITEQILQHPGEKFDVAPFVHGLCKTPIEEIQAAVDGAISKEQAVKLRQCLDHIDELNKHISEVEQEILCLSDKYEAALNLIRTVPGFNKNPMTAIQVLSEIGCDMSVFPTDKHLVSWAGCCPRNDKSDRKIKSTRISRAGSYFKPVLVQVANALIKSKKHPEFITRYKRIKARRGHKKAIIAICRMILTAIWHILSDLKPYTPEGFLESRPVKEEKILTISQALNLLKLRGYVIKDAPLPTS

SEQ ID NO: 289533 - protein, 401 aa, unidentified
MRAADWFFVTIAAFDNSGDRTTLASVGDSVRSNTTIYAAIELSKKSWVVAIAHPDRDRPSMHRIAGGNLADLIGRLRKAAGERRIVVCYEAGYDGFWLARSLLKIGIDCRVLDPASIQVNRRARRVKTDRIDSLALLRSLIAVDRGERHVCAVVRVPTVEEEDARRSHRERQRLVRERTGHINRIKGLLFAQGIRGIEPKRRRTRIDFGKLTTAEGRPLGERLRRELEREYQRLELVQNQLRIVEKERDTADAQDPAVERKRELLCALQGVGSTSAAILAREVFARPFASRRHLASYLGLTPSAYDSGSMTRCQGISKAGNSWARRVLVEVAWLWRKYQPASDLSEWYVRKTAGQSPRIRRIMLIALARKLAISLWRYVETGLVPDGAVMAKTALHQGAAT

SEQ ID NO: 289534 - protein, 346 aa, unidentified
MEHYAGIDVSLEFSSVCVVDAQGKIVREVKVASEPEALVAFFASLGFAVKRVGLEAGPLSQWLHAGLKRAGFDTLLLETRHVKAALSAMMVKTDRKDARGLAQLIRMGWFRPVHAKSMGSQEVRALLVARKQLLGRLIDVELSIRGILRGFGLKVGVVTRKSFEGRIRELVSGHITLERIAGAMLSARATLKVEYEKLHKSVLTIVREDAVCRRLMTVPSVGPLVAITYKTAMDDPNRIAKSKAAGALFGLTPKKYQSGEKDLTGGITRAGDEMVRTALYEAANVLLARITRFSKLKRWGMDVAKRRGSKRAKVALARKIAVILHRMWVDGTTYRWTNAHPTAVQV

SEQ ID NO: 289535 - protein, 321 aa, unidentified
MQGKVTTEETASVYVGVDVCKDHLDVCLHPLGERFRVGNDRDGRRALVRRLGRHKVALVAMEPTSKYHRSAHRQLATAGFAVALVNPLRARLFAEACGRLAKTDAIDAAMLALMAERLAPAPTAPPTLAEEQLEELASARSSAIAERVALDNRRSMASAPFLRRELAARLHSLDRHIARLEREIEIAIAADPATARRAEILRSIPGVGPVTTIAFLAWMREIGQLNAKQAAALAGLAPVAHDSGPARGKRRIRGGRGALRTTLYMAALVASQRNPDLKRFYQQLKSRGKPPKLALTAVARKLVILANRLVSENRTWMPLAS

SEQ ID NO: 289536 - protein, 353 aa, unidentified
MFFAGIDAHTRYVVVVLINRMGERVLGPARVKVGQPERLVALLAPYRPLDAIMETSSSWPWLHEVLTGAGVHFVLAHARRLRAIAEANYKRDDVDAELLARMRLAGLIPEVYPTPFAQREWATLLRHRTTLVTQRTALVNRIHAQLHQRGLHLERGRLLTRAGRQWLRTVARPALGLEQRALVRSHLRVIAGLRPLIRALDRHIAQVAATIPQAQLLATVTGIGPHRALVICAEALPITRFRTSGHLASYAGLVPRSKQSGQGPVRHGTIPAAANRWLRGALVRAVVAHVQHAPDSWLTRYYVAQKARLGWPTARVAAARKLARALHAMLRTNTGWTNNPARGELEGSHAALR

SEQ ID NO: 289537 - protein, 359 aa, unidentified
MENIALDVHKHYTWARVENPEGKQLYENRLAHAHGTIKNFVRRWTPGSLVAVETVGNWYWVVDEIEAGGGKPQLVNARLAKLMMGSVNKSDKLDAKGMNRLQRTGTLPTVWIPSSSVRDARELPRTRMVLSEQRTQLKNRVHATLSKYGYVVDEVSDAFGKRGRQIIKELLTQLPPHTRQALQHVLDQLDHVMENLKAIEADMISTFAPCPQTTWLKSLPGVGEILAVVIWTEIGSIERFDRAEQLASYSGLVAREHSTGGKFHYGAVRRDVNVYLKWAFVEAANSSILNRERCGYHHISRLYQRIKARRGHNRAKVAVARHLSEASFWMLKKGELYRDRCCPRNAKRVRLMGPSRPVS

SEQ ID NO: 289538 - protein, 316 aa, unidentified
MISCFVGIDVSKATLDVGFWPELSKPFQLRNDPEGIAQLIACLNELEVERIVLEATGGYEKAVFKALRIADLDVVRVNPKRSHDYAQAIGQLAKTDRIDALMLAKFAQHLASPSKIEPSQARDELSELVKLRDQIVEHRDDDRRRIKQATSPVAITFFTEHIASLNAQIKALDKHLAQASKALNSEKAKHLASVKGVGLITTAKLMAYLPELGTLSGRKITALVGLAPYNKDSGSKSGPRKIEGGRYKVRGVIYMAAWVMIRHVPEFKTRYDALVARGKRPKVAVVACMRVLLVRLNAMLRDGTPWKDHKTQAPAA

SEQ ID NO: 289539 - protein, 422 aa, unidentified
MKPFLQADFAAFVGIDWADRKHDICFQPAGGKRQLLQIQHTPQAIDAWAQSLLERFAGEPVAVCLELTKGPLVYALMKYPHLVLIPVNPAALAQYRKTFTPSGAKDDPTDAELALDVVQRHFDRFQPLTPDSPEMRTLQELVVYRRKCVEDRIRISNRIVCALKNYYPQVLDWFDDRNTRVFCDFLTRWPSLSQVQRSRTSTLERFFRTRNVRRRNVIERRIDGIRSAHPLTEDPAALRANQLIVQTQVPQLKLMIQIIKQIDGEIAGLCGALEDYEIFTSLPAAGPTYAPRLLAAFGENRDRFQSARHVQQCSGVAQVLERSGKKSWVHWRYACSTFMRQSFVEWSGETVRYSFWAKAFYEYQKQKGKSHHAILRALAFKWIRILFHCWQNRVKYDESTYLNALKERNSPLLAYAVTQGAD

SEQ ID NO: 289540 - protein, 409 aa, unidentified
MLLFLGDDWAEESHDVELQDQTGRVLARAKLPEGMGGMARLHAMVGEYVGDDEDVTVVVGIETERGPWVQALIAASYQVHAINPLQVARYRERHGVSGAKSDSADAHVICSMVRTDHHRLRPVAGDSPQAEAVKVVTRAHKTLIWERTRHTLRLRQALLDFFPAALAAFDDLTAPDALELLAAAPDPAAAAGLSVEQITDALKRARRHNRAVRAEQIATVLRGDQLGQPPAVAAAYAATVRAQAAILTVLNTQIKAMEKQVEAHFGKHPDAKVYLSQPGLGVVLGARVLAEFGDDKQRYADAKARKNYAGTSPITRQSGKRKVVLARWVHNDRLLDALGLQAFCALSVSPGARAYYDQLRARGIGHRAALRQLSNRLVGILHGCLKTTTVYDEAKAWSHQHKKDLAIAA

SEQ ID NO: 289541 - protein, 454 aa, unidentified
MARRRPAKSTRQQMLLTVHPHAAGMDIGSRFHVVAVPPDRSPEPVRTFESFTADLHRMVDWLVELGITTVAMESTGVYWIPAFEMLEARGLEVLLVNARHVKNVPGRKTDVHDAVWLQQLHQHGLLRGSFRPAPTLAALRAYLRHRERLLEYAAAHIQHMQKALMLMNVQLHHVVSDTTGATGMKIIRAIVAGNHDPATLASYRDIRCQASVETITEALTGHYRAEHVVALRQALELYDCYQAKVAECDQAIEAALASCEQADPEMPLPAARYRTRQANEPRFDVRTALFQLLGTDLTQLHGFGAYTALRLIGECGTDMTKWPTAKHFTSWLTLAPDNQISGGKLLSTKTRRSANRAAKILRLAAVNVGKTQTALGAFYRRLAARVGKAKAVTATARKLAVLFYNALRHGMAYQDPGATYYEEQYRQRVLQGLRRRAKALGYELRESAAVEGVS

SEQ ID NO: 289542 - protein, 437 aa, unidentified
MSNIIFNPDEFYLSVGMDVGADFTWMSIALPNNTIHGKPFKILHSSVDSLQAAVSRIKEAEELFSMKSRIFLESTGIYHYPLFYFLCDKGFNCSVINPIITKNSTNIIIRKVHNDRNDSKKVALIGLKPDLKVSLIPSDLVLNFRNLTREYYYLTDCRRAFVNKLTAELRMIFPQYLGIFSKLTTMTSLHLLKEYTTPDAFLEATDEEIITSIRGIARFGIKYATSKCIEIKKAAQKAKIFGHAVNSNYIRILLFIDSIELYDRQIALVLSELNELADANENTQFVKQIRIIESFHGAGFLSAVSLMAEIGDFSAFTKPKQLFAYFGLDPAVKQSGKFIGTKVKMSKRGSPIARRVLHTMALNNIGTYRDGTAKNPVLRDYYLEKCNSKPKRAAVGAVMHKVCNIIFAILRDEKNFQIITPEEHRKNFLSARCDIAA

SEQ ID NO: 289543 - protein, 291 aa, unidentified
MLFVGFDLHKNYSEFAIMDNDGNLIEHRREEINLEDMTRFSNSLPSSTNVAIESSSTWYSSYKLLSSRHKVSLSDPVKNKAIACAKTDKVDSVMLATLLRGKFLAESYVPPWEVIDPRELVRHIASLVREMTKMKNPVHSCLLMNNIHIDAHPFSKEFTEELRKIDDERVRSYLRLIDSLNAEIREASSIIVDKAKDNQYAKLLMSIPSISYYSALLITSEIGEIFRFKDSSSLIAYAGLAPSTYSSGGKIYHGAITKQDSKYLRWMLNQCTRAHIKTEPDGTVARFYSKL

SEQ ID NO: 289544 - protein, 357 aa, unidentified
MASRSMTETQTDVTVGVDTHGEIHVAAAFTTGLGRPLGQLEIPTTPSGYRRLLVWARSFGATVQFGVEGTGSFGAGLTRFLRSEGCSVIEVNRPNRQTRHSRGKSDPVDAEAAARAVLSGEATSIAKEDHQLVGMICSLRVARRSAVKMRTQIANQMHSLLITAPAELRELLRGLSRDQLIARAASMRPGAVTTPLAATKLAMKGLALRHELLAEELVTLDVELARLTKEAAPELCSLLGVGPDVAGALLVAVGDNPERLRSEGSFANLCGAALLPASSGKTSNRHRLSRGGDRIANGALWRIVMTRLASHQPTQDYMARRTAQGLSKREIVRCLKRYVAREVYRTLNLERDLAGAA

SEQ ID NO: 289545 - protein, 411 aa, unidentified
MNNTLFVGIDISKRSNVATFMNCEGKVVGRLTFSNSGSGADRLVAKILSYYEKGDFEAIRIGMENTSVYSKNLVWFLYEHEALNEHKLSIIPLNALMVANYKKSFLDMDKDDITDSFAIADFIRIRPGLLPFKLDDRQEALKIMTRSRYNYVQALSRMKSQFLTRLFLSFSEMEAGKPFYSIFSKTSLSPLEEAFTLDELAEKPIPELVEFLQEKGGGKFQNPEEIAKVLKKAASSSYRVPAMVRESLNRTMASDMEIMRILENEIHNCDKNIEKLMKSVPAILVSIPGIGPVLAAGIMSEIGDISRFQKQGSLGKMAGFKWKRNQSGKKESEDKAAVLSGNKKLRYYLVEAANRVRIHDPVFEAYYRKKYAESKTHAHKRALILTARKLVRVIFYLLKENKLYKPDVGIS

SEQ ID NO: 289546 - protein, 380 aa, unidentified
MSESTSVLSSASDPKSMHYVGLDVHQKRSSICILDANGKQVKSLEVKGHWPKVLEEIARQVPRPFSICYEASCGYGYLYEKLSPLASHVSVAHPGQLQLIYRSKKKYDKVDGQKLAKLLYLDMVPQVHVPRADVRAWRALITYRHKLMNKRVGIKNNLRALLRGLGIVALSGKKLWSRKGLQWLREQSLEESDALRRDIAVEELDEVNAKIRRVEKDLNKRADAHPGVTLLRTIPGVGVRTAEAVVAHLDDVSRFSRNKKVGSYFGLVPCQDSSAGNNRLGHITRDGPASVRKLLCEAAWQGIRHNARIKAYFDRITHGDPDRRKIALVATAHHLARVMAAMLRSGEVWREPAVATPADKPNKPAPDNKEKNPELMKRRK

SEQ ID NO: 289547 - protein, 416 aa, unidentified
MNAVGIDVSSRKSTVAVLRPLGEVVCLPFDVTHDIAGLASLAEKLKAIDGETRVVMEHTGRYYEAVAKALHEAGFFVCAVNPLLIKEYGANSLRRVKTDKADAVKIARYALDNWADLRDFTPMDAIRYDLKTLNRQFQLASKQRTASANNLIALLEQSFPGIRKCFDSPVRSDGTQKWVDFAHSFWHVDCVRKQPFAAFCERYRKWCKRHAYLFKLSNAEEVYALAKRAVVLTPKSKVVKVLVQEAANQLISISRSVEVYRAEMDRLAAMLPEYPVVMAMYGVGKSYGPQLMAEIGDVRRFERKQALVAFAGIDPMPNQSGDKNVRSNKSSKRGSPYLRKTLFNVIRTYLQCAPQDEPVFQFLNRKRAEGKPFYVYMLAAANKFLRRYYAKLRDYFASLDTLQPVASIPTILKATL

SEQ ID NO: 289548 - protein, 460 aa, unidentified
MNRNRSKSRVDRTMPMVHPNAAAIDIGATMHMAAVRADRAPEPVRSFGTFTADLHRLVDWFTECGVETVVMESTSVYWIPIFELLDARGFAVFLVNARDAKHVPGRKTDVSDAQWLQRLHSFGLLRASFRPKGQIAELRAYVRQRERLLEYAASHIQHMQKALTEMNLQLHHVVADITGATGLRIIRAILAGERDPDALAGLRHYSCHSSAETIAKALTGSYRTEHLFALEQALSLYDAYHEKASACDVRIESVLKELIIHRGHDHGSAPPVSRRRNRTDQANALAFDVRAALFGLLGKDVTTIDGLGPYLSLKLIAECGDDLTSWPSAKHFTSWLGLAPSNKVSGGKMLSSRTRRSGGRAAALLRLAAVTVGRTDTALGAFYRRLSSRIGKAKAVTATARKIAVLFYNAVRHGMDYVDPGASSYETRYRTRVINNLHRRAKTFGFVLQPLEPKAGAAVS

SEQ ID NO: 289549 - protein, 344 aa, unidentified
MEFIGTDVHKRDSQVCILSEEGEVVLEQRLRTQRERLGELLGKRPKARVLLESSTESEWVARCLEELGHEVVVADPNYAAMYATRSRRVKTDKRDARTLAEACKLGAYRPAHRASDESRHQRAQLAVREALVRTRTRYISLVSARVRREGLRVADGGAEAFVARVAALALPGRLRAEVAPLLSLMLHLNAQIAFLDGVLGRLARQDAQVARLCTMPQVGPVTACAFASAVDDPTRFSGPHQVEAYLGLVPSERSSGEKQHKGPITKAGNERVRWLLVQVALSLLWGKNPQTAHLREWAERIAARRGKKTAVVALARRLAGILFAMMRDGTEYQPPKPAEMEAAA

SEQ ID NO: 289550 - protein, 330 aa, unidentified
MGTAVTHFVGIDVSKDTLDACLIATGGPARSRQFPNTPAGHAALLAWADRRAAAADTHFCMEASGGYEDALACHLHAAGRRVSVVNPARVKYAGLVRGRGNKTDRADAGLIAEYAQRESPPAWSPPAPAVRELQALVRRRDDLRELAAHEKARLDAPLLTPAARRSVARVVKLLGREADRVQAAADALIAVTPALAADRDLLASIPGVGTQTASTVLAELPGLDRVRSAEAAAAYAGLCPKEFRSGTSVRKRTRLSKAGNARLRKALYLPTLTAVRFNPVLRGFFERLVAAGKPKMQAIGACMRKLVMLCYGVLRNRAPFDPGWSSSKTR

SEQ ID NO: 289551 - protein, 407 aa, unidentified
MQVIHRRCAGLDVHKQTVVACVRIARDREAAQHVQTFATTTTGLLALADWLASHEVAVVGMEATGVYWKPVWHVLEGHFELVLANAAHVKNVPGRKTDVSDAMWLADLLAHGLIRASFVPPQAVQELRTLTRTRKQFVRERSSHVQRIEKVLEDANLKISVLLSDIVGKSGRAVLDAIIAGHDDPAYLATCISVRVKARRAELIEALRGCITPHHRFMLKLHLSHIDALNAAITNIEKEVGLGLEPFRESAEHLSTIPGLSAVSASVLIAEIGVDMSRFKTAGHLVSWAGLCPRNDESAGKRRSTRLRHGGNWLKTTLVQAAWAAVRVKGGYLQAQFHRLRARRGAKKAILAIAASMLAAAWHMLRNQTDWHDLGANHFDRADRTKTVNRLLARLRQLGVNAKVLPV

SEQ ID NO: 289552 - protein, 352 aa, unidentified
MTEVTANTILIGVDTHKATHVAVAIDANGSRLASISAPATTKGYLTLESWASALGTIAAFGIEGTGSYGAGLSRHLLAQGHKVVEVTRPNRQLRYQHGKTDSLDAEGAARSVLAGQAVAEPKTQTGSVEMIRHIKIARDTAVKSRSQSLVTLKTLIINAPASLRDALDQIGGKMALIRHIAAFRPGAITSTTASAKTAMRALAQRWLTLHDEIQGHDKALEHLVAARAPALIASHGIATMTAAEMLILVGDDPTRIRSEAALAKLCGVCPIPASSGKTNRFRLNRGGNRQANAALYRVAIVRMRNHPPTLAYVSKRKKDGKSNREIIRCLKRYIVREIFAHLCRPETVPTPA

SEQ ID NO: 289553 - protein, 415 aa, unidentified
MKFEKDTRGIKRYIGFDIHKEYALVGGQNAQQEWVMAPRRIGMEKLREWAAANLRKGDAVVIETTTNVWDVYDIVEPLVSYVVVAHAGGVRQIAEARVKTDKKDIERLIRLLIADIVPEVWVPPVEVRELRGMISYRNRLVKTSTMIRNRLQSLIHRHNLILPKGMLRDKVWWEAQKVGALEKIQIRQELAMLDEMEKHKGEVDGELGRQSLGKVWGKQAMRLLQLPGFGVIVTMTVLSAIGDASRFESAKKLVGYSGLGAGVHDSGKEHIEKRITKSGRKELRWAMVEAAWRAIRISPYWKEQYEKYLRRMRKPNQAIVVIARKLLVVVWHVLTKEETDERVSEEDLAYKMLVLSWDLDENVRMGLTYKQFAKYALMKLGVEKDITRFVRKEIPRRLAPRAEVLERMAELGIAL

SEQ ID NO: 289554 - protein, 374 aa, unidentified
MTNHSEGFVGLDTSKLRNAVAIADGGRSGEVRFFGEIDNNGTAIAKLVRKLATKYERLTFCYEAGPTGYGLYRQIKSLGHQCILVAPSLIPKKPGNQVKTNRRDAIDLAKLLRADELTAVWVPDRGHEAMRDLTRARETAMKDLRSKRQQVSAFLLRQGRSYPGKKTWSKAHMNWLASQKLEYPQQRIVFEEMMLAMRQAQERLARLEQAIRDVMPDWSLAEVVTALMAMRGMDLISAATLMAEIGDLSRFRTPVQLMAYLGLVPSEDSTGDKIKRGPITKAGNRRARRMLTECAWSYQHPARVGQAKQLKLDATAPAVRAIAWKAQCRLYGRYRALIRRGKLKTVAITAIARELAGFIWAVNGAITAAGAAAK

SEQ ID NO: 289555 - protein, 396 aa, unidentified
MICFGIDVSKGKSTVTAISSDGVLMYPITQVEHNLNSMLELANYIKTLSQSDEVRVVCESTDYYHWPLANTLLQEGIWVSILNPIVTSKFSKNSLRNVKTDKIDARKIATYGLMYWDSLQCSPQFGEIFDELKTYSRQYYQYLALRVKARINLICILDQVMPGIQNLLKEDHNNHKLSDFADHFWHFDNITKHRLSTFSRQYQEWCKKKGYIFRSSKAETIYNLAKNSIPILPCTPSTKVLVHEAVKSLHFQEESSVLILTHMSNLAKQLPEYSVITDMPGIGDALATRFIAEIGDVRRFKNKHSLVAYAGIDAPPFQSGNYEGKNRHISKKGNKYLRKTGYEIMRCITSANTDSGTNDVYDFICRKRSEGFEYKKACIAGLNKFLRVYYGKVMAL

SEQ ID NO: 289556 - protein, 452 aa, unidentified
MAKLAKKKQTAKGLRFEVVNPNAAGIDISPKEMQVCVPADRDGDCNRTFDVYTEDLHFIAEWLKACRIDTVAMESTGIYWLPIFRVLKDAGFDVILVNASDVKNYSGRKTDASDAEWLMMLHSYGLLKPCFQPENIARTMRNLVRHRDNLIRSASREVLHLQKAMEQMNLKLDNVFSDILGKSGQAIIKAILAGERDPKILSTLADPRCKKGKEEIEKSLQATWDEEHLFEMKQSDSLYQTYQQLIAECDSKINEIATQYAAAVDAPKAELLRSKKYNVKKNQIGFDVEKAAFELWGVNVMRMPGMSRSSLLRLLGELGADFTTKFPSVKHFVSWANLVPNNKISGGALLSSKVPKKKNPVGITFRQAANTLKAAKCPLGDYFRHMRAKGGHLQAMVATGKKLASIFYIMVQRKIEYNEDVYTNHRKLQLQNKVTYLQKRLERMELELANCG

SEQ ID NO: 289557 - protein, 341 aa, unidentified
MGIAVLGIDLGKNSCSVVGLDDSGKVILRRRMQRKTILNLAAKLPPCIVAMEACCGAHHLGRILFAQGHTLRLMSPEYVRPYVKAQKNDDRDAEAIAEAATRPTMRFVTLKSQEQLDMQTLHRARDRMVHERTSLMNQLRALLLERGIIVPQGRVKLRHRITNLLAQPCKELSPRICVLIEDMLARWEALDDRIAAFDAEFVAEVKQNEAARRLTSIPGIGALNATALVAAVGDARTFARGRDLAAWLGLVPRQATTGGKPRLLGITKRGSKYLRKMLIQGARAALPTLSRGNTLLGQWLRGLLARAHSNTVVVALAAKMARMVWALLRHGRTFEHRAITA

SEQ ID NO: 289558 - protein, 413 aa, unidentified
MGHKTAEVELHYERCCGLDVHKELIVACFRNGSKNTIREFGATSKELQRLAEWLISVDCEMTVMESTGSYWKPVYNILELLGLDVMVSNAREVKNLPGRKTDVNDAEWMARLLAQGLLRPSFIPDRPQRELREVTRYRKSLTEERAREINRLGKMLEGANIKLTSVVDDVLGKNSRALLEAAIAGEPITGITIEGMLKGKIKGKSALLVDAMDGVLSKTQRLLIKAVLDHIDDMTRRISDLDDIIRGEMEKYDEAIRRLDTVPGIGFESAQTILAEIGLDMNQFPTAGHLAVWAGVCPGNNVSAGKSRSGTTRKGNQTLKTTLVQCAQSATNTKGTFFRAQYDRLLVRRGKNRAKMAVAHSIVIVIWHMLKYESDFVELGGNYYNSFNPEKKINMYLKKLADLGWVPPVPVVA

SEQ ID NO: 289559 - protein, 339 aa, unidentified
MKLYGGIDLHSNNSVVALLDEQDEVVYHKRLGNDAQGILAALAPYEEAIEGLVVESTYNYWYWLVDALMDAGYQVHLANTAAIVQYSGLKYSDDDSDARWLAKLLRLGLLAEGFIYPKAERAVRDLLRRRSRLVQQHTANLVAVQNLMARNRGRSLSANAVRRLTPEAVERLLPEPNLALAVQSTLLAMRGQEAAIDLLEHQACAQVRLRPAYRHLLTVNGIGKVLGLIIMLETGPVQRFAKVGNYSSYARCVGSERFSNGKRKGRGNTKNGNKYLAWAYIEAANFAVRFNPTIKRYYQRKSAKTNGIVAIKTVAHKLARACYYILRDGTDFEVTRTFT

SEQ ID NO: 289560 - protein, 340 aa, unidentified
MSIVGGLDVHRAQITYDYLDVDTGEVETGRIVPATRLVLRDWLARFDGLEAGFATEGCTGWRFVVEELRRAGVEAHLAEPADTATLRGRKRRAKTDRADARHLRQLLSQDRLPESWIAPPHVLETRIKGRLYVTLMDQRRAWQQRIHAQLFHQGVEKRRNLLAAEQRAWLLEADLSDAGRQLIEVALRVTDSLDTEIEPLRAELGGLARRLPGPRALRQGIWGIGPLTAPIIWAEMGDTRRFSSSDQAVRHTGLDVTVWDSDGKRSPGHLSRQGPPVLRWALFEAAFLAAKKISPDHNYYLSVKERLGANRAALSVARKLARRVHHILREVGDQAWQEAA

SEQ ID NO: 289561 - protein, 359 aa, unidentified
MGVQINKLDFTGQHLFVGIDVHLKSWSVAILSDHSVLKKFRQNPDAAALYNFLSSHYPNAHYHSVYEAGFCGFWIHHQLVGLGINNIVVNAADVPTMSKEKLRKTDAVDCSKLARELRSGTLKGIYVPCVETLETRSLIRLRKSIVKDTTREKNRIKSLLHFHGIAIPEEFTKHSVGNWSKRFLAWLRTAELSTEYGRNALDLHIEQFIRLRAMLLQKTRLIRALSRTESFAEPLRLLTSVPGIGVTTGISLLTEIDDVSRFKNAEHLASYIGLIPMCYSSGEKEGVGGITIRRHATLRCHLIEAAWVAIRKDPAMTMAYTEYRKRMNAQKSIVKIARKLVNRIYFVMKRKQEYVPCVV

SEQ ID NO: 289562 - protein, 347 aa, unidentified
MRFYNQQHKYYCGIDLHARKMYVCILDQKGKTHVHKNIKTDPEMLFELIFPYIDNIVIGVECVFCWYWVADLCSEHKVTFVLGHALYMKAIHGGKTKNDKIDSYKIAALLKGGNFPIAYPYPAKMRATRDLLRRRMYITRRCGELVAHIQNTNTQYNLPAFAKKISRKYNRKGVAERFEDPAVKKSIEVDLAMIDAINPILAQLEWYIEKTARQHDYQTLYLLRSIPGVGKILALVILYEIHDIKRFPRVQDFSSYARLIKPVKESAGKWAGKTNKKIGNAHLKWAIKEAAILMLRESGQAKDYLARLQKKYNKGKALGILTHKLGRAIYYMLKNNEAFSMEKFFKQ

SEQ ID NO: 289563 - protein, 362 aa, unidentified
MGQQYHGIDLHKRCATIIVRNSEGTEIQHLSRCTDFRGYVEKLTCEDVVVIESINNAFFWADEIEKRGACCYIVDPHKFKIIKDSWNKTDKRDAANLSLALWMAEMRQEFKMPTVYKPSPEIRELRRLFSQYQLITEQITQYKNSIQAIFMENGISLTKEEKIEWYKAEGDRSHPVNYSLTRASLHCIEVSRSMIQCLLEQKERVKNSILKMGVFFEREIRLCSTIKGVSPFLVLAFLADVGDITRFKNVRGFNAYLGVVPTVKSSGGKTQMGHITRQSRKLARTLFTQPLNHIIHSSDMMDTFYNGIKIRRGSGRSRIAVIRKTFNIMRRMILTGEEYRWKDEDNYQKKIKEFEKVIREAA

SEQ ID NO: 289564 - protein, 427 aa, unidentified
MSVTQNEKIRQVTDTTMVIGVDIASELHWARAFDWRGLELGKAVKFENSAEGFNFFLRWVSELTVEQKKDSVMVGLEPTGHYWFTLAAHLQGGDFKLVLVNPYHVKRSKELDDGHPSKSDKKDPKTIAKLVLEGRYVYPYIPQGLYAELRVAMNCRWRIRKELASIQNQIQRWLKIYFPEHSKVFGCFTGAGSMALLHSAPFPSDLISLGVEGISGIWKQMKLRGIGRKRAQRIYEAAQTSIGCTTGMEASRMELQILLEDYDAKLQQYERVMQVVENLCSQIPAVAELLKIQGLGRVTVAGLFAEIGDIRRFESPRQIQKLAGLAITENSSGKHKGPTEISRRGRSRLRAILFRAAIPLLAKNREFQLLHRYYTTRQNNPLQKIQSVIAICCKLLRVFYALATKDCAYSPEKMLADIQRNQPLKAA

SEQ ID NO: 289565 - protein, 414 aa, unidentified
MLSPEIRCVVGIDVAKQAHVVCALEAPSGTIRHKPSRIEATAAGYALLLAWLETWSAREMILIGLEATGPLWEPLYDTLTQHGYAVVLLNPRQTASWAASLGLRAKTDGLDAHTLARGLLAGWARASTLPSESIQALRTLTRARRDLIQSRTAARQRLHDELVVLFPEFVRFLPSLPGRTDLGTPAVLQLLSTYSSAQALAHAAVDDLTTTLEHVSGGRWGPDQAVPLQELARRSTASSRAVSARSLVARTLALHVLELDAHIAELEAASADLLKDDADGQRVQQIPGIGPLGAATIRAELGDVTRFGCVDQVVAYAGLDPRTRQSGAFIGQKRLSKRGPGALRHALYLAAFVAARCAPEWRIRYARLLDRGRAKKEAFTILARALLRVIYHLLRTGEAYDPALLKQPSAPTAA

SEQ ID NO: 289566 - protein, 386 aa, unidentified
MKRDDLSRSLVAFDQASTLVAVVELGLRSWLVAGLVPSLTRQPLKKLRSDPDALLGLLLRWRDQATKAGGRIKRMVVAFEAGRDGFWLARWLRARGIEAHVIHPTSIPVSREHRRAKTDRLDTGLLMRAVLGWLRGEPKHCSMAAIPTIAEEDSRRPNREREKLVGEQTRAINRIKSTLVRFGIRAFKIKLRQASKHLEELRGPEGEPLPPNTMAELRRDLARLQIIRAQITEIERARLERLKRVPRQGTNPMIRMLTKVMGIGIETADVLAHEVLTRKLRDQRAVARYGGLTGSPDESGIKRRERGLARAGNARVRRSMIQLAWRWLMYQKTSALAQWYQARTAGAKSGLRKAMIVALARKLLIDLWRYVTIGKVPPGAVLRPAT

SEQ ID NO: 289567 - protein, 400 aa, unidentified
MRAVFGIDVSKASSEVAILVNGEKVHGYTMTNDAIGFSRLLGDLKTVHKPEIIFEATGVYSRRLQAFLDEHGYAYTRLNPLEAKKQLDSLRVRKTDQIDAEKLAQSQFVLNRKTTYVQEEIYQNLRDLSRFYQNLTEDIVRAKNRLHKVLQVTFPELENILSTPSGEQYWNLVIAFPCKDFVLELSKDKLSESIRQSTSKRISDKRVAYLVEKLIALANQSYCAVKKNSPMLEEVRYYTKELLRLSEQRQAVLDEMVELAQPLPEYDILLSIPGIAETTATSIIGELGDIRRFQSANQINAFIGIDLRHYESGNFIAKEHITKRGNPYARKILFKCIHNIASASHTNPCHIADFYEKRKRQSQTTSTKPHTIASIHRLIRTMYYLIMHNKLYDYASTQNR

SEQ ID NO: 289568 - protein, 355 aa, unidentified
MTVTIVEEARPVTCRAAVTGGVDTHADTHVAAALDPVGGLLGVAEFPATTAGYARLVGWLGGFGTVCLVGIEGTGSYGAGLARYVTAAGIRVVEVDRSDRQDRRRQGKSDPLDAVSAARAAQSGRASGAPKGRDGAVEAIRTLMVARRSAAGERTRTINQARALVLTGPDDLRARFAKHKPAALITGLAALRPRPGDVAGHATRIALRELGRRAQFLDGQLVRLDELIVPLVTARAPGLLAVYGAGPRTAALLLIAAGDHPERLRSEAAWAHLCGVAPIPASSGKVTRHRLNPGGDRQANHALWRIVFTRLGSDAATRAYAERRTAEGKSKAEIIRCLKRYVAREVYRQLRPAVG

SEQ ID NO: 289569 - protein, 403 aa, unidentified
MNAVGIDVSKGKSMVCVMRPFGEIVASPFEVTHTGSELSELAGKLKSLNGETKVIMECTGSYHLPVAHSLQESGLTVCTVHAQLIHDFGNNTIRKVKTDKADAIKIANYGLANWLDLSEYVPEDDMRHMLKAYSRQYNKYTKIKTMLKNNLISLLDQTFPGVNELFTSPPRKRDGHEKWFDFATQFWHCQCVCSLSQKTFVERYRKWCRRNGYYFNEAKAEDIYIESLGHFNIMPMNETAKLLITQAIAQISTIAESLAVCARGMKSLAEQLPEYSVVMGFHGVGNILCPQLMAEIGDVYRFARKESLVCYAGLEAPPNQSGKFEAGSTGISKKGSPHLRKALFQVMDCLLKLSPADDPVYQFLNRKRAEGKHYYSYMTAGSAKFLRIYYARVTEFLDNLYED

SEQ ID NO: 289570 - protein, 354 aa, unidentified
MSQNLNSAVAVIGIDIGKNSFHIVGLDSRGAIVLRQKWSRGQVEARLANMPQCLIGMEACVGAHHLSRKLKTFGHDARLMPAKYVRPYSKGQKNDFRDAEAIAEAVQRPTMKFVATKTADQLDLQALHRVRERLVSQRTGIINQIRAFLLERGIAVRQGQRFLRAELPRILATSPDVLSARMVRVIEDLADDWRRLDERVEGLSSEIESVARQDAGCERLMSVPGIGPIISSAMVAAIGSGEVFSQGRDFGAWLGLVPKQISTGDRSILGKISKRGNRYLRVLFVQAAWVVLIKPKSWERHGLKPWIEAAKKRLHRNVLAIALANKLARIAWSVLARGRAFEARTNTNATAQAV

SEQ ID NO: 289571 - protein, 299 aa, unidentified
MSSEKYIGLDVHQATISVAVMDSQGKVVMESILETKASTLLEFFAGLRGSLFVTFEEGTWAAWLYDLLKPHVTEVLVCNPRKIPLLKQGNKSDKIDARKLAERLRLHDLKPVHHGETGIRMLRELARSYLTIVKDLSRVMNRLKALYRSWAIPCAGRDVYYTRHRSQWLEKIPEAGTRRRAEQLYQQLDMLQHLRQQARRELLAESRQHAITAKLRQIPSLGPIRSALAVALIQTPHRFRSKRQLWTYSGLGLETRDSGEYHFVKGQPRRRKKQATIRGLNKDYNHDLKGLFKGAATPA

SEQ ID NO: 289572 - protein, 328 aa, unidentified
MPIAYLGIDIAKRTFDVALLTQDGKPKHKSFANTKDGFEQLSIWLRQNFVTDLHACQEATGTYGDALARFLVAAGHRVSVVNPSAIRAFARTELSRTKTDKADAVRIARFCQMHQPAVWTPPTEEIAILQALVRRLEALRQMHLMEKQRQEGAPAPIHASVTAVLSVLAEQIAQVEQQIRDHVDRHPDLRDQSDLLQSIPGIGPATAATLLCELGDWSRFASARSAAAYVGLVPRVHESGTSVRGRSSLCKIGNGRLRKALYFPAMNAVRFNPVLKAMAQRLTALGKSKMAILGAAMRRLVHLAFGVLKSRKPFDPRIALPQGDPTIA

SEQ ID NO: 289573 - protein, 354 aa, unidentified
MSGEKYIGLDVHQATISVAVMDSQGKVVMESILETKASTILEFLAGLRGTLSLTFEEGTWAAWLYDLLKPHVAHLIVCNPRKNALLKQGNKSDKIDARKLADRLRLNDLKPVYHGETGVRMLRELARSYLTVVKDLSRVMNRLKALYRSWAIPCAGRDVYYTRHRSEWLGKIPEAGTRRRAEQLYQQLDMLQHLRQQARRELLAESRKHTITAKLRQIPSLGPIRSALAVALIQTPHRFRSKRQLWTYSGLGLETRDSGEYHFVKGQVQRKKPVWIRGLNKDYNHDLKGLFKAAAMRASIQPGPFQEFYQRSLAKGIKPTMVRLTLARKIAAITLTVWKKGENFDVEKLKSQAA

SEQ ID NO: 289574 - protein, 320 aa, unidentified
MMAQNDSVVVGIDVAKDKVDACIRALALRQTFTSTVQGHRKLVRWLRKHRVNKAVMEASGGYERVWARVLREADIEVRIVDPKRVRNFALSAGRLAKNDAIDAEMIAWFAEIFSEAPSQRHDAAREELQALVKARLSLIDSRMRLVSQSEHVAPGLVQKAHGRILKSLASEIARLEAAISIKIKSTPDFAERAEIIESVPGFAKTSSANLVAGMPELGQVSDEIAAALIGVAPYDDDSGKRRGERHIKGGRRWVRNAVYMPCVGAATQNNPVLQAYYQRLIAKGKEPKVAIIACMRKLIVILNTMIARRQKWDPSRYSLT

SEQ ID NO: 289575 - protein, 386 aa, unidentified
MQKLNDLSRSLTALEPDGTLIAVIEMSLSSWLVAGIVPGIERQPLKKLAVDESALLKLLYRWREEAEKAGRRIERIVIAFEAGRDGFWLARWLKACGIEAYVIHASSIAVSREHRRAKTDRLDTELLKRSFLGWLRGERDHCKMVAIPTIKDEDAKRPNRERDSLIRERSRIVNRMKAAFVRLGIRGFNPKLKRAAGRLDGLRTPEGEPIPPNTSAELRRDMERRRLVSNQIRQIEEARLERIEQAPGDGPHAMVRLLARVIGVGIETADMLVHEVLSRDMRDRRAVARYAGLTGSPDESGRKRREKGLARSGNARVRRGMIQLAWRFLLHQKDSALTRWFRARTENARGTRKPMIVALARKLLIALWRLAREGVVPDGVVLRPAQ

SEQ ID NO: 289576 - protein, 409 aa, unidentified
MRVIGLDVHRSFAVVAILEDSVLSSGGRVELARDAVVAFGRKLRPKDEVVIEATGNTAMIVRLLRPFVQRVVIANPLQVRAIAHAKIKTDKIDAAVLAKLHASGFLPEVWMPDEATETLRRLVAQRSQIVQQMTRIKNRVHGVLHTNLIPPYDGELFSASGRLWLGSLPLEKDEMLAVRRYLADLDQRMADLAVLDRVLAEHALRDERVRRLMTLSGVHVTVAMGLLAAIGDIKRFASSEKLVSYFGLNPSVRQSGNGPAHHGRITKQGRSHARGMLVEAAWAAARVPGPLRAFFLRIQSRRGKSVAAVATARKLAVLVWHLLSKGEDYAWARPALLEAKLRKVELAAGHPAVKGRRQGRAHAYNSQEVRERERAWLAQAEHAYTRFVASWQTRPPEGRTDAANRKRTN

SEQ ID NO: 289577 - protein, 336 aa, unidentified
MTIIRIGLDTSKHVFQIHGVDENEKPVLRRQLRRSEVEKFFAQLPPTRIGIEACGASHHWARLLRGLGHAVLLMPPQYIKGYVKRGKNDAIDAEAICEAMSRPTMRFVPVKTAEQQAALTMLGVRDLLIKQRTMLINALRGHAAEFGVTAAKGPNKIVELLQRLATGEGVPALAREMLGMLASQLEAVNGKLKAIEARLMAWHRQDQTSQCLATIPGVGPIAGVSFALKIPDARAFRSARHFAAWIGITPRENSTVGKHRPGKISHEGDESLRRLLVLGATAVIQRAKRGRASPWLLGLLARKPKKLAAVALANKMARVIWAMMISGEVYRRPQEA

SEQ ID NO: 289578 - protein, 339 aa, unidentified
MKLYSGIDLHSNNHVLVVIDQKDKVLFQKRLPNDLETTLRMLKPYQKNIQGIAVESTFNWYWLVDGLMESGYPLHLVNTVAVKQYEGLKHTDDEDDAFWLAHLLRLDILPTGYIYPKEQRAIRDLLRKRCRLVQQRTALILSAMSLYTRLTGRHASSNVIKRPHAEDIYLTNMDDQNRKLEMQSSLTLIQAFEAQISTIEKVVLKQIKLIPGFMGLQSVPGIGDILSLTIMLETGDINRFATPGNYASYCRCVSSKRVSNGKKKSENNRKNGNKYLSWAFVEAANFAIRFNPRAKRFYQRKLAQRGRVVAIKATAHKLARACYYIMRDQVPFKDSMLFQ

SEQ ID NO: 289579 - protein, 328 aa, unidentified
MQTILHNCCGLDVHKESVVACIIKTSNLSSDSNDEEVEKEIRVFETFPDALKELKSWLELEDCHHVAMESTGVYWCPVYEVLESSFGGDIELLVVNSRHMRNVRGKKTDIKDAEWIARLLRAGLLAGSFIPSLEVRELRQLARYRKNIVEDITAQKNRIEKTLQTANIKLSTFLTDIFGVSGRNLINVLVEKGYLSHEDVETETKRISQEKKDAIKRVVNIQLSTHVRNFIKMQLNLLDELFVHLESVEESIDELSAQFQEEIERLDTIPGIATTAATAIIAEIGIDMSKFPTAEHFCSWAGLSPGSNESAGKKKVHASPTETHILKV

SEQ ID NO: 289580 - protein, 371 aa, unidentified
MDESSKTLYVGLDVHKDSIAVAYAPEDRGADVVPLGAIGTRQCDIDKLIRKLQSKGATLVFVYEAGPCGYWLYRYLTRKGLACHVVAPSLIPRKPGDRVKTDRRDAVMLARLMRSGDLSSIYVPGIEDEALRDLSRGREDAMRDLKATKYRLKAFLLRQDIRYEGRANWNAAHLRWLSEVVCPTPPQQIVFQEYVRAVTEQHERLQRLERALHDQVRSWRLYPVVEAIQALRGVELTSAVILIAELGDLTRFDTPRKLMSYLGLTPSEYSSGERRRQGGITKAGNTHARRALVEGAWAYRYPAKVSRHLQLRLEKLPAEVQAIGWKAQVRLCRRYRQLIARGKHANEVVVAIAREMAAFAWAIARIVPLAP

SEQ ID NO: 289581 - protein, 348 aa, unidentified
MRFYTKTHKHYCGIDLHARSMYLCILDCDGEILLHQNMKATPEAFLGAVAPYRDNLVVAVECIFTWYWLADLCAEEGIDFVLGHALYMKAIHGGKAKNDKIDAHKIAVLLRGGMLPQAYVYPKRMPATRDLLRRRNHLMRKRADLLAHIQNTASQYNLPPLGTRVDRKGERDSIPTHFPDPVVRRSIELDLSLIAHYDELLKTLKQELALMAKGHDAFSYHLLRSIPGVGRILTLVLLYEIENIDRFPRVNEFLSYARLVKAQKSSAGKIHGHSGKKIGNAHLKWAFSEAAVLFLRKNPDGQRFVERLARKHGKGKALSILAARLGRAVYVMLRRREPFNAQKFLAQT

SEQ ID NO: 289582 - protein, 348 aa, unidentified
MDHIGIDLGKRESQIAILTEDGELIDMRVRTERRRLTEVLGSRGRARILLEASTESEWVARGLEELGHEVIVADPNFAPMYAQRTRRVKTDLRDARALAHACKLGAYRPAHRTSDGRRQLRTVLAVREALVRTRTAWISRIQPVLRREGYRIRSGQAETFAARVEELAVPASLKAAIAPLLQLLLPLNEQIAVLDEHLATIVAADDLTGRLITVPGVGPVTAVAFVVTVDDVARFRGAHQVESYVGLVPREWSSSETQRRGQITKAGNSRMRWLLVQAAWCILRRRKKPETAALRDWADRIALRRGRRVAAVALARRLAGILYALWRDEAVYSPAKLQARITAGMATV

SEQ ID NO: 289583 - protein, 276 aa, unidentified
MHYLYYVGLDVSKETFDASLVAFEDANEMAHRKFANSRKGICSCLHWVEKRHGIRLDGVIFCAEDMGSYISEMAVCASDRTLNFNFSLISPLVIKYSMGIARGKTDRVDARRIAEYAITHYRKIALYLPAEKELCQLRTWLILRAHLAKQRVAKLVLLEKLDYKEKFADVSIQRSMLQEEIAYAETHMKTIEREMKELIAADSNICRNYKLLTSIKGVGPITAIVMLCSTLNFTKITDHRKFACYCGLAPFEHSSGTSVRGDATHRAWRIETLKYN

SEQ ID NO: 289584 - protein, 359 aa, unidentified
MPRSIPTTTAEMITVGVDTHKDIHVAVALDGLGRRLGTLHVPTSLAGYKELVAWANGFGPLERAGVEGTGSFGCGLARFLRAKGIEVFEVIRPKRRDQYRSGKSDPIDAEAAARAVLAGTATGRPKGTDGEVEMIRALRAARRSAVKARAQAANQLKAMLITAPEGLKSELRALSTAKLVTKVSRFRPGTSPSDVETATKFALRSVARRYQRLSEEISELDEQLDRLVAEAAPELLVVEGVGTDTAASLLIAAGDNPERLKNEAAFAHLCGVAPIPASSGKTVRHRLNRHGDRDANRALYVIALCRMSHEERTRTYVARRTKEGKTKKEIIRCLKRHIAREIYRILASVSLNNPPNSVP

SEQ ID NO: 289585 - protein, 349 aa, unidentified
MRCFLPPADSRFYAGVDLHARSLFLAVLDRDGQERFARNLPAAPAPFLKAVQPFRDGLVVGCECMHCWYWLADTCREADITFALGHAWAMKAVHGQKTKCDRHDAQAIARLLRGGNFPLAYAYPKERRGLRDLLRARLRLVRQRAELYGHVHTARRQANLPPVSNDVKYKSKRAAITADIGDPFVRRRVETHLALLEPLDTAIRRLEAEIEEAAQEHYPTELAALQTTPGVGAVLSLTILLEIDTIDRFATRQQFCSYARLCGAVQESDGKRVGRGNARAGNAWLKWAFSEAAVLAAQKDERIGAFLERLSSRLGKPKALSALAHKLGRAFYHMLHAKEVFDVDRFVRP

SEQ ID NO: 289586 - protein, 427 aa, unidentified
MKYKQNFKIMQVTDKTLVIGVDIAKKKHYARAFDWRGMELDKTISFKANSSGFADFMGWAKDVAKKNKKNKIIVGIEPTGHYWFTFAQAVIVKEVMLVQVNPYHVKNTKELDDNTPSKSDRKDPKTIAMLVKDGRYQIPYMPKGKYAELRKANNIREEWLKKIWSIKNKVQRWLDTYFPELLEVFSSWEGKAAVKTLEEMATPAKIMKNSAKEIVSVWREEVKRAVGIKKAQKLLEAAAGSVGMKEGLEMAEYEMQLLMKEYKDIRQILDGIEEKLESIVNTIPGAENFLEIKGIGVKTVAGFFAEVGDIRRFTHPKQIIKLAGLNVRENSSGEYKGQTTISKRGRSRLRALLFRAILPLTAKNAEFNALHKYNIKEKENPLKKMQSLIALCGKLIRIVYTLVTKDVKYDPERLLKDIHRDEVPKAA

SEQ ID NO: 289587 - protein, 434 aa, unidentified
MPSDSTTLYVVLDIGKNVHWLGAYAGFDLHPVIAPLEIRSDRPGFERVTTLIDGLLAGGAYSRVVLGHEPTGVYHEAWARALMERYAPHRQGSATPRLDYRFLNPLLTKRQREQLAKGRQRKTDASDLQAMAYCLRDDLGQPAFLATDQELRLQLWGNAYRQNQHERRRLILFILSQLDRLWPGMVVNVKRFRQMHPDLEVPVPLALSKPLERQRVRAILTHCPNPHDFLALGQTGIQAFYRAHIGRCGATTARLAYQLVRNALLPPPQVAALLADQLQADFTRYLALEADFLALTQQAEALVPDSPAAALTTMPGVSPLLAARYLAHLGHPRRFTQAAEVWSLAGFDTVTEESGDFRRVGHISRKGHPGLRDTLYLIGLHTAHHIPAITRAKQRALARGMGDVGATLHAAHKANRILHHLLYYQEPFDPNRVR

SEQ ID NO: 289588 - protein, 412 aa, unidentified
MFSERKARIWVDEIRTWIGLDVGKADHHATVIAADGTVAFGRGVRNDEQAIEQLLDDAGPDAVLVIDQPGSIGALAVAVARRRGLPVAYVPGLVMRRASELYPGEAKTDRRDSFVIADTARIHQARVHWLAQGEELLEELRILGGHDDDLAHDRTRAANRMRDLLLQASPAVERVLGGRLEHPAVRALLERYPAPSAMRAAGRRRMLRVVQPRAPRMGARLVDELLAALEAQTVTVPAEETIGRVIRDLALELSRLAAARERLAGEIEAVFRRHPQAPVLLSIPGIGARTGARILTEIGDAARFPTAGHLAAYAGLAPVTKQSGSSINAQHKSRRGNHRLKNALWLSAFCSLHHPPARDYYARKRSEGKKHNAAILCLARRRCDLIHKMLTSGLSYGELPAGKTGPPAPAAA

SEQ ID NO: 289589 - protein, 342 aa, unidentified
MEKVSIIGLDLAKRSFQAHGARADGSVGFRKKLSREKVLAFLAEQSRCIVAMEACGSAHHWGRAIRDMGHDVRLIPPAYVKPFVKRQKNDAADAEAICEAASRPTMRFVAVKTKEQQARAMLFRARDLLVRQRTQLINALRGHLSEHGVVAPQGPANVKVLMEAVEDATTSLPLLVVELSRVFLEQIDGLSKKIAELEKATAHEAARGATTRRLQTMPGVGPITAMAIETFAPPMTVFKRGRDFSAWLGLVPRQHSTGGKQLLGKTSKMGQRDIRRLLIIGAIAVVRWASRKGAPQETWLHHMLARKPRMLVAIALANKMARSIWAMLTKNEDYKAPVAAAA

SEQ ID NO: 289590 - protein, 377 aa, unidentified
MPLGDPIQAGADHDPRPERTRPVPSLAELVDAVIGVDTHRDTHEAEIADATGTPIATLKISNDSAGFAAMLAWIAEHAPGPRIVVSMEGTRSYGVGLARALSEVGVMVLECEQPNRKQRRGKGKSDPIDAHLAVLAALRLDAGHLPAVRADGDREALRILLGARQDIVTASTAQTNRLRALLLSGQDAERQSARGALTDAALAALARRRLPSDATREHTIRHEEIRRLALALREAERQLRQNRKQLQTIVNDIAPGLTGRYGVGPVSGAQSVVSFSHPGRCRNEGAFAALAGTSPLPASSGRTVRHRLNRSGDRALNRAIHTIALTRMRSCPRTRAYVERRTAEGKSPREIRRCLKRYIARELYRTLTQAMTPLTQS

SEQ ID NO: 289591 - protein, 340 aa, unidentified
MEWTVAVGVDTHKDAHVCVALDRLGRQLERASFPASEAGYGACLAWALALGEPAFAVEGCGSFGAGLARVLTGAGLPVWEAERPRRRERRRGKSDTLDALRAARRLLSDGEGLSELRSLPGREAVRVLLVERRSAVSARTQALNQLHGLALTAPTRLRERLETLAGGRLAEAALRLRPAERADVDERVLVEVARRLGRRAQALTRELAALDARIAELVRSLAGKLLAEPGVGPVCAAQLVVSSGDPARLRSEAAFAALAGTSPVEASSGRQKRHRLNRGGDRRLNEALHVIALNRIRHHPETAAYHARLLERGKTRREARRCVKRVLARYFYRQLCALLA

SEQ ID NO: 289592 - protein, 353 aa, unidentified
MKKIIIGIDVSKEKCDATAISVEKGIPEVSKLDYICIENRPCGFRKLLSWSRKLVKDTADEEILFICETTGAYDHSMCDYLYAKGMDIWREAALRIKWSSGVRKGKDDTADSLMIAEYAMRHMDKMQLYESPDKRISEIRAAFLYRRSLEQDKVSRLVRVRELEATAGKSKTNTSILRDVKKHIRNIEKSIRECEEMIRSLIGEDEALSRSYSHLDSVKGLGIVNITALIVYTNNFRSFRTSRQLASYWGVAAFRCKSGTSMDKRSNVGYLSNPMLKAYLTQAALHTIAVNGIFHEYYQRLIDAGKPRPVAFNNVKNKLLHLAMSLIRNDMDYEENHTHKWTRRDTLQPRLIH

SEQ ID NO: 289593 - protein, 326 aa, unidentified
MHYVGIDVAKATFEVSDAEGQRRRSCKNTAAGIGRFIAWLDRSFQGEVQLVIEPTGRYHHLLLDRLQAHGIPRTVINPARTKAYGVLAGKRAKTDRIDAQLLARMGGSERPEPSRDADPDQERLKSLRRHRDQLEEEMRATRNRLESASHSPWISPQVARSLRRTIAHLEGEIADASEKLDEAVEADEMLSTAAALLESVPGVARRTALLILSELPPAQTCRGPRSWVAFAGLCPEPRESGKAKWSRLSRVGSGRIRKQLYMAALAAMRWNPAVAAYVARLAERGKTGKLAVVAAMTKLVRICFGVLKNRRPFDPQLHLRYTTPAP

SEQ ID NO: 289594 - protein, 343 aa, unidentified
MQTITTIGLDIAKSVFQVHGVDATGQVVIRRQLKRRSVLAFFQKLPPCLVGIEACASSHHWSRELQALGHTVRLMPPAYVKPYVKRQKNDMADAEAICEAVTRANMRFVPTKTPEQQSGLVLHRTRHLFIRQQTSVINAIRAHLAEFGIVAPVGRHGVEELLAVVADPNDRRVPEIARACLSALGAQLRRMKEQILEFDRLIRVWHRSNEMSMRLDEAPGVGPVLATALVATVADPKSFRSGRNFSAWIGMVPKQHSSGGKNRLGNISKQGDRYLRGLFVAGALAVIRYAKIHGTKHRPWLTALLARRPTKVAAIALANKIARMVWAMMARGERYKEPVALAR

SEQ ID NO: 289595 - protein, 351 aa, unidentified
MPNAQTESKPSSRIVVGGVDTHADTHTVAVVDQVGRRLGCAVFPASRAGYRALTGWLAGHGEIYAVGVEGTGSYGAGLTRWLTAHQVRVVEVNRANRAERRRRGKSDPVDAEHAAAAVLANTATTIPKARTGLVESLRLIHATRAGAVKARTAARNSFINTLRSSPDAVREALQPLSRARQLKAAAGYRPQGDDPVATVKRCLRRLAVRITELTAEITAADRDLDRLTQLLAPSMRSQPGFGPETTAQLLITAGDNPERIGSEAALAGLCGVSPVQASSGRTRYHRLNRGGDRQANRALHMIILNRLRHHQPTRAYLAVHSRDGRATPHLRRVLKRYLVREVYQLLSQLQP

SEQ ID NO: 289596 - protein, 387 aa, unidentified
MPQPNDLSRSLVALDHNSTIVAVVELSQSSWLVGGVLPGIERQPRKKLEPSPERLLAVLHRWRDEAVRAGHTITRIAVAFEAGRDGFWLARWLEAHGVEAHVIHPSSVAVSREHRRAKTDRLDTELLKRGFSGWLRGERGHCSMVRVPTIAEEDAKRPNRERECLVGERTRINNRIKATLARLGIRNFKPTLRQAAERLATIHTPEGMPLPPNVLAELQRDLARLGLVISQIREIENARQKRLEQQPETTPHAMVRLLARVVGIGIETGDLLVNEVLSRPMRDRRAVARYAGLTGAPDESGARRREQGLARAGNARVRRGMIQLAWRFLRFQKQSALTLWYRARTADSRIGTRKTMIVALARKLVIALWRFVTTGEPLDGVVLRPAA

SEQ ID NO: 289597 - protein, 338 aa, unidentified
MEYGAIDLHLRHSQIRIVREDGSVVLERRISTTRESLTAMFQARPRMRVIVETGTESEWVAQTVEACGHEVIVVDPNYTLMYGTRQRRVKTDRRDVAALAEANRHGIYRAAHRVSAAQRHQRRVLRVREQLIRVRTQAINLVRAQLRQEGYRLSSGSAGRVVARYRALAITGALAQALAPVIALLEHLAPAIGGANTDATAAAQQDPIVRRLTTAPGVGPIIGLTYRATVDDIARFRAPASASAYFGLVPCEDSSADRQRRGRITKRGPTTARSLLIQAAWGGWRQRTRDPLQRWARRLAERRGRCIAIVALARRLCRILYAMWRDGTAYQPAMTGVA

SEQ ID NO: 289598 - protein, 344 aa, unidentified
MTKYAALDVSMEQTAICVVDENGRKIVEGKVPTDPGAIAAWLAEKVGDVARVGMETGPLAVWLWNELVMRGMPVVCLDARHANAALSMMPNKTDRHDAAGLAQIVRTGWYKEVRIKSHGAYVVRALLSARDALVGIRGKIENEIRGLLKTFGVMFGKKVGGFTRRAEEIVAGELTAAPEIKRVVEVLLEARRSILDRLKTLDARVHAVARQNAMVRLFMTAPGVGAVIALSVASAYDDASRFRRSSSAGAYLGLTPRRYESGEVSRNGRISRRGNKLTRTHLYEAANVILTRQTTFSSLKVWGLRIAKVSGFKKAKVAVARKLAVILHAMWKTNKPFRFGAAAA

SEQ ID NO: 289599 - protein, 356 aa, unidentified
MSQKLDTSPAVIGIDIGKNSFHIVGQNQRGAVVLRQKWSRGQVEARLANLPPCLIGMEACVGAHHLSRKLQALGHQARLMPAKYVRPYSRGQKNDYRDAEAIAEAVQRPTMKFVATKTVDQLDLQALHRVRERLVSQRTGIINQIRAFLLERGIAVRQGLRFLRLELPGILATRADALSPRMMHVLEDLSGDWRRLDTRIEGLTSEIEALARQDQHCERLMTVPGVGPIISSAMVAAIGTGDVFSKGRDFGAWLGLVPKQLSTGDRTILGSISKRGNRYLRVLFVQAAWVVLVKLGPEKWERYGLKSWIEAAKKRLHHNVLAIALANKLARIAWAVLNKGRAFACIKTDAMASCPA

SEQ ID NO: 289600 - protein, 475 aa, unidentified
MPRRRVKAKSQAKATEPTENLAMINPNAGAIDIGSEQHVVAVPPGRDTESVRTFGSFTADIHEMGRWLKGCGVTSVVMEATGVYWIAAFQILEQDGLEVHLIDPRAAKNLPGRKSDVLDCQWHQKLHSFGLLSSCFVPPAEILPLRTYLRLRQELVQNRSQAVERMQKALFAMNVQLVNVISDITGETGLAIIKAILAGEREGTKLAELKNQRIQASKAVIAKSLEGNWKEELLYALQTALASHEFYQQQIEQCEQKITETLERLPSRQIPPQDNCQANELQPLNKEAVKVYQLKELPPASNSCSREPLSPLAAELKRIAGVDLSSIDGIGEQTAQVILSEFGPDLKSRFKTEKHFSSYLGLCPGTRISGGKVLNRRSRKVSHRVATALRLAARSLHSSQSALGANYRRLKARLGAPKAITAMANKLAKLVYRLLVNGQDYFDRGIKHYEEKFRQQQIRRLEKQARILNLKLIPA

SEQ ID NO: 289601 - protein, 356 aa, unidentified
MSYIAVDYHKKYSYVTILDQEGKCLKEGKVVNKKESLKSFIGKYSEGSEAVVEATWNWAVMYDWLEEIVDKVKLAHPAKVRAIAEAKIKTDKIDANVLAQLLRCDLLPEAYVSDKETREVKNILRQRMYFVGMRTMLKNRLHIMLERHPELTEEKRVIGTDLFSKKGMSWIRSLKLRGEEQGILERELRLLEEIDSKVKESNLLVKRLGKKDERVQRVKTIPGMGDFFSLLMVTEIGDISRFRDPKKLAAYAGLVPSTYSSGGKTYHGRLIKQGNKWIRWAMVEAVWPAIRCDFSLRCLYEKIKKRKRPNQAKVVVAKRLLTILYRVLKENRNYEERPFNINSRLPLHPSGCYSFN

SEQ ID NO: 289602 - protein, 336 aa, unidentified
MEPTTIAIALAKRVFQIHYVEPDTGTIRSKVLKRAQLVPFFANRPASRVVMEACGSAHHWARVLARLGHDVRLIAAQFVRPFVKSNKNDAADAAAIWEAAQRPGMRFVAVKTEDQQAMLALHRIRQQLVRIRVMQVNQLRGLLYEFGVVLPQGRRASVEAAKVALASLADQLPAMLTDSLQDQVSRLRTLDEQIARIEQRILEWRRDDDACRRISEIPGVGVLTATAAVSVIGQANTFRSGREFAAYLGLVPRQNSSGGKTKLCGISKRGDVYLRTLLIHGARSVIAASKHLPERVRALLVRRPTNVVAVALANKMARTIWALLAYGRTYQPTPAQ

SEQ ID NO: 289603 - protein, 352 aa, unidentified
MQHFIGCDVHTRNQVVAWIEEETGEIRNRRLEHAGEEVRKFYAQFPRGTVVGIEATFPAYWFERLMGELGHELWVGDAARIRASEVRYQKTDLRDAGDLLDLLRTGRFPRIWVPSLEERDLRQLLVHRMKQVRARTQVKNQLHALAISQGVCRGRKLWSAKGRAELEKLALLPWAARRRKELLESLDRLDEQVRELDRAVEEAGRTRPEVALLRTHPGVGMVVGLAFVLSVGPVERFPNSRKLVSYWGLNPRESSSGGRQRLGSISKQGNTMMRWLLVEAAQTAARLDPQLRRTYQRLRKQKTSGVAKVAVARRLAVRLFWMLRTRHNYTQLVHMSGSPSSAVVPPQGGPTV

SEQ ID NO: 289604 - protein, 341 aa, unidentified
MKTHTPTQPPSRYCLGLDISSQTFTAQLLEEGAAVGKAIDFANEPKGYRQLIQWLKNYGVALAQTHAVMEATGVYWEECALYLHGQGIRVNVINPAQIKAFANVTLRRSKTDRTDANLIARFGATMPLPLWQPPSLEMEALQITMRHREALIDMLTEEKNRLHALERRPGTPKEIIKTVKKHIAFMQQQVKNLDDTFKKKLKEQPEWQECYELLQSLPGVGGIIAAVLMGETGGMASFMEARQLVADAGIAPQQHESGTSVKRTACISKIGNARLRRAVYMAALSAIRCQGPLKDFYQRLVGRGKAKKLALVAVARKLLVLAFKIVRSGKPYDAQYQAQKA

SEQ ID NO: 289605 - protein, 360 aa, unidentified
MSTATAPVLETSTGPNVVIGVDTHKHTHMAVALSANGGLLGSLKLEAKRSGYDGLIRWAADFGSNPVFAVEGTGCYGAGLCRALHTAGLEVVEVNRPDRSTRRRLGKDDTIDAESAARAYIAGTARVIPKAGDDLVEMIRMLKVVKDSATDNRTAALNQLHAIVVTAPAALRERLQRLTGKDLVECCSGLRSGEISTPLAAAKMALRTLARRIQQLDLELKETVAQLDRLTMQHCPELRNTYGIGVDISATLVVAVGDNQERLKSEASFAALCGVNPLPASSGKVVRHRLNRSGNRQANCALHRIVICRLRRHQQTRDYVERRAAEGRTMKEIIRCLKRFVAREVFGILRGGPAVRTAAA

SEQ ID NO: 289606 - protein, 383 aa, unidentified
MKKTQETLRKNVSTKAAVLHVAFELSNSKWKLGFSDGNKMRFKSVDARKLEQLEEEIEKAKSRFRLDDDVRIVSCYEAGRDGFWLDRYLLSHGIENVVVDSSSIEVNRRKRRAKTDRIDARKLLMMLMRYHGGERKLWSVVRVPSVEAEDGRQLSRELESLNKERTSHRSRIRGLLIREGLEVKNPSGKKFLEELDSLCTWDGKGLPGDFKARIVREYERLRMVEEQMGTLRKERETRVGSAETLSMRKVAQLRTLYGIGVTSSWDFVMEMFGWREFRNRREVGAFAGLTPTPYDSGGSQREQGISKAGRGRIRALNIQIAWGWLRFQPQSKLSLWYQERFAGGGSRMRRIGIVAVARKLLIDLWRYLEYGVVPEGARLRPVK

SEQ ID NO: 289607 - protein, 398 aa, unidentified
MTESSDYESVQVFIGVDVGKDTHHAVAINRSGKRLFDKALPNDENKLRSLISDLKQHGQILLVVDQPATIGALPVAVARSEGVLVGYLPGLAMRRIADLHAGEAKTDARDAAIIAEAARTLPHALRTLKLADEQIAELSMLCGFDDDLAAQTTQASNRIRGLLTQIHPALERVLSPRLDHPAVLDLLQRYPSPEKLASLGEKKLAAQLCKLAPRLGKRLAADIAQALAEQTVVVPGTNAAAVVLPRLALQLITLRKQRDEVALAVEQRVLAHPLYPVLTSMPGVGVRTAARLLTEVACRAFASVAHLAAYAGLAPVTRRSGSSIRGEHPSRRGNKALKRALFLSAFAALRDPLSRAYYTRKMSQGKRHNQALIALARRRCDVLFAMMRDGTFYTPQAS

SEQ ID NO: 289608 - protein, 357 aa, unidentified
MTYYIGCDAHKHYSLFAVLDDEGQLNQQIRVNHAPNAIRDFLSQFPEETPVALESVGNWYWIVDEIEEAGCIPKMAHAAKAKVMMGNVNKTDKLDARGLATLERLGTLPIVWLPPGELRDERDLPRTRMAISKMRTALKNRIHSTLAKYNLSLDTSSDIFVPKWKGQLLQAFKALPPETRRCMEQELELLDHVKDHIKRLEERILERVEFTNTIQLVKTLPGVGMILSIVIEREMGCVDRFPSSENFASYAGTTPKVKGSGGKFRYGKMRKQSNNYLKWAFIEAANVIVRHRNYPGWRDKHVSRLYERIRRRKGHSVAVGAIARHLSEAAFWVLKKGEPYKEPEPRTALPKQGRARG

SEQ ID NO: 289609 - protein, 319 aa, unidentified
MAQNDLVVAGIDVAKDKVDVCIRALSLRRTFASTAEGRRELASWLRRQKVGKAVMEASGGYERDWAKALRGAKIEVRIVDPKRVRSFAQSAGRLAKNDTIDAEMIAWFAETFDEARSQAYDATREQLHQMVNARQALKGMQAKLESQGEHALPAAVQRMHARILKTITVELVKFEAAIAAMIQATPRFTELAEIIESVPGIGRTTSAALIAAMPELGQANNKIVAALLGVAPYDDDSGRRRGERHIKGGRRRTRNVFYMACLGAATQHNPVLKAFYDRLVAKGKEKKVALIACMRKLISILNIMIERRQKWDASRYALS

SEQ ID NO: 289610 - protein, 343 aa, unidentified
MQAISTVGLDIAKSVFQVHGVDDAGEVVIRRQLKRRYVLAFFEKLPPCLVGIEACASSHHWSRELKALGHTVRLMPPAYVKPYVKRQKNDATDAEAICEAVRRPTMRFVETKTPEQQSCLMLHRTRHLVIRQLNAVTNALRAHLAEFGIVAPIGRRGVEELLKVIADVNDTRVPEVARTCLAALGEQLRVLKAHVLRFDRLIIAWHRSNEMCKRLDELPGVGPTLATALVASVPDPKAFRSGRNFSAWVGLVPKQSSSGGKQRLGSISKQGDRYLRGLFTIGALAVIRYAKIHGTGHRPWLTALLARRSTKVAAVALANKIARMAWAMMARGECYREPVALAA

SEQ ID NO: 289611 - protein, 426 aa, unidentified
MTEAFEWFAGIDWASQAHQVCLIDAGGKIVGERAFAHDGAGLAELSAWLLSNTGAKPATIAVAIEVPHGPIVETLLERGFQVYAINPKQLDRFRDRFTVAGAKDDRRDAHVQADSLRTDRHAFRRLSVDDPVIVELREWSRMSEDLQRERSRLANRVREQLWRYYPQMLTLGDDLAAAWFLDLWRQAPTPAKAARLRETTIERLLKAHRIRRLQAAEVLQVLRQKPLSVAPGVVAAATAHIDAVAARIKLVNQQLNAAHRKLDQLCDQLIPPAQTAPGEGCKENVPGQRCEQRDVTILRSLPGVGRIVLATLLAEAWQPLRRRDYHALRPLSGVAPVTRRSGKACVVVRRYACNKRLENALYHWARVATQHDAASRGRYAALRARGHSHGRALRTVADRLLSVACTLLERQTLFDPNYKPPEAAAA

SEQ ID NO: 289612 - protein, 350 aa, unidentified
MLIIGCDYHPGFQQIAFLNTDGGELGERRLAHREEAEQFYGKLKEQNLCVRVGMEASGHARWFERLLHNLGFELWIGDAAEIRTKRVRKQKTDRQDAQLLLRLMMEDRFPRIWVADAQNRDLRQLLWHRHRLVQMRTRVMNQLHVVALNEGLRRKKALWRPAGRHELEALVLAPWASRRRQDLLDLLDQLTPKIQELTLALETEVEKRPVTRRLMTHPGVGPLTALAFELVIGTAQRFHCGKQIASYVGLVPSEESSGDRRRLGHISKQGNALLRFLLVEAAQVTVRSQPQWRSKFFHLAIRRGRKIAKIAMARKLAVHLYWMWRQGLDYGQFEKLGSHAGEPGNRHGVQ

SEQ ID NO: 289613 - protein, 342 aa, unidentified
MTIVAGFDVHRRQITFDALDTDTGELMRGRIDATPSAVERWAARFEDREVQVALEACTGWLFVSRALERAGAVPHLAEPVETHALRGRKRRAKTDREDARWLRTLLAEKRLPESWIPPEHVREWRSRARLRKTLIDERTQWLQRVRATLFHHGVAGAPAELRSGPGREFLEELELPADARERIAIALAMIDSLEGQLRPLEAELRKLARRQTGCRALMAQFGMGELTSLMTLTELGDVQRLSASRKAVRMAGIDIGVHRSDRRSRVGKLNRQGSPHLRWALYEAALSATRPRSPDHEDYLALKARGLSHTRASLTIARKLARRSFHILRELGPAALEPITTT

SEQ ID NO: 289614 - protein, 377 aa, unidentified
MAIVTQPPPNPGPSRNPQPATAVEPVAVVGVDTHTDTHTAALLGRTGAILAQLVVPADPTGAAQLLAWATELAPAGGPLCWAVEGTRSHGVGLTRHLQRCGQHVIEAPRPRRRGRRSGKSDQLDAIAAARAVLAALDGGTAHTLAVPRTDGDREALPQLLVVRRHYSDTRTATVNLFKSLILTADDPLREALRGLSTARQVRALLTGTVPAGEPSDTEAALRRTHLAELAADIRTGNRRLYANEKQLTALISTIMPSLLDIYGVGPVTAAVLLTTWSHHGRCRNEAAYAALAGVNPIPASSGRTDRHRLNRGGDRQLNAALHTIANTRRRSHQPTIDYINRRRTDPTRPRTDREITRSIKRYLARHLYRHMQTHTRP

SEQ ID NO: 289615 - protein, 354 aa, unidentified
MIEKLSSVIAVIGIDIGKNSFHVVGLDGRGAIVLRQKWSRGQVETRLSNMPACLIGMEACVGAHHLSRRLKLLGHDARLMPAKYVRPYSKGQKNDFRDAEAIAEAVQRPTMKFVATKTADQLDLQALHRVRERLVSHRTGIINQIRAFLLERGIAVRQGIRFLRAGLPGILATPPDVLSPRMARVIEELADDWRRLDERIEGLSSEIEALARQDSGCERLMSVPGIGPTISSAMVAAIGTGEAFSKGRDFAAWLGLVPRQISTGDRTILGKISKRGNRYLRVLFVQAAWVVLIKPKSWERYGLKAWIEAARKRLHRNVLAIALANKLARIAWSVLAWGRNFEARKTDDAAAQSV

SEQ ID NO: 289616 - protein, 341 aa, unidentified
MQITTIGLDIAKNVFQVHGIDAAEKVVVRKQLRRSQVLEFFKALPPCLIGMEACATAHYWARELTKLGHQVRLMPAKDVKAYVKRNKNDAADAEAICEAVGRPTMRFVRVKSAEQQGRLMQHRTRDLLMRQRTQVINALRAHLAELGIVAAQGREGIKELLAIITDEGDERLPLDARTSLIVLAAQLQALQTMIGSIEKRISAQHRANEASKRLETIPGIGILGATGIAATLTDPQAFRSGRDFAAWIGLVPRQDSTGGKQKLGPISKQGDRYLRRILVVGAHSVLRRAKQSPQKYPWLTQLLARRPFKVVAVALANKMARIAWALLAKGGSYRAPALAAA

SEQ ID NO: 289617 - protein, 402 aa, unidentified
MTYDYVIGMDVGKYFHHACVLDIDGTQVLSKRINQNEQSLRALFSAFSAYDHKVLVVVDQPNNIGRLTVAVAQDIGIDVRYLPGLAMRQLSRIHAGNAKTDIRDAYIIAHAAKNLPESLRSVDRVEEAFLQLKVLNGIDEDLARSYTRLINQIRSALVGCYPQFEQALRGQIIHRKWVLHLLARYGGPTKIKRLGKAKAAAFARRYKARNPEPVLDAIFAAISEQTVTIAGAHYAEMGVAMSAKDALLKLEHRQQIEKEVIELINDIPHTQFLLSMPGIGPKTAAQILMTAGDMSDFPSAGHLASYAGLSPRTNQSGTSIMSNSLNRAGNKKLKNALWQSSFASIRFHERSRQFYERKRREGKRHNAAVVALARRRLNVLYAMMRNHEHYHDPAPSQEDLAA

SEQ ID NO: 289618 - protein, 347 aa, unidentified
MRFYTKQHRHYCGIDLHARSMYLCILDEDGTVLLHRNLHANPDAFLKAVAPYREDLVAAVECIFTWYWLADLCRSHGIHFVLGHALYMKAIHGGKAKNDRIDALKIATLLRGGMIPQAYVYPPEMRSTRDLLRRRLHFRRKRSELLAHIQNTNSQHNLDQFEKKITYPSNRTGVSERFDDPHVHKSIEIDLELIAHYDDLLRKLEYFILRTAQQHDHNTIYRLRTVPGIGKILSLVILYEIHDINRFQRPQELASYARLVKCAKQSAGKLRGTSGKKIGNVHLKWAFSEAAVGFLRNNPDGKKYYARLERKHGKGKALTVLAHKLARAVYYIWKRDEVFDQQKFLAT

SEQ ID NO: 289619 - protein, 352 aa, unidentified
MSKDIKICAGIDIGDRYCQIAVLDEDGDVSEQIRIRTTPRAVQRCFKGRQPMRIAMEVGTHSPWLSQLLNQMGHEVLVANACKLRLIHKNDQKSDEVDAELLARICRLDPQPLYPINHKSEVARAAWSVIRARDALVRSRTMLINHARSIVKTTGHRLPVCSSTRITKHQTDLPESVRPTLMPIFETVIYLNNQVKDYDKQIEWIGQEQYPQTRLLRQVAGVGPITALTFVLTIGDLSRFSRNRDVGAFLGLVPRRSQTGQRDPALAITKAGNIFLRRLLVQCACYILGPFGPDSDLRRYGQRIASRGGKNAKKRARVAVARKLGVLLLSILKTGEVYEPKRWSKDEQTSVA

SEQ ID NO: 289620 - protein, 337 aa, unidentified
MMYGGIDLHSNNNVIAIIDDTDRIVAQKRLPNDISKIIGFLARWQDEMAGVVVESTYNWYWLVDGLQDAGFQVHLANTSAIKQYEGLKHSGDDTDAQHLAHLLRLGILPTGTILPREHRAVRDLARKRMQLVQSCTAHVLAVENIMTRQLGGRMTCNQIKRLTDDAIDSLPLAADVSLAIKANVAVIATLQSQIELVEKRLQERVKPRPQYGLLISVPGVGRTLATVILLETGPIDRFADVGNFASYARCVDSVHTSNRKKKGEGNVKNGNKYLAWAFVEAANFARRFCPEAKRFHERKKARTNNIVATKALAHKLARASYHILKEGKPFDITRCFA

SEQ ID NO: 289621 - protein, 448 aa, unidentified
MSERTIACEAPGIRMTFDSAAVRATKGKIMKPFNEITHYAGFDWARDHHDVVIVDRQGQTVADLRLQHTLEGWQQFRDQVKQYPVLAVAIETNQGAAVDQLLQMDGAVYPVNPISAKSYRERKAPSGNKTDHLDAWSLAEALRLDGQHWKALQPLDPLTQQIQLLCRDEIALIEQRTALVNQLQQALCEYYPAALQAFDDWTQPYCWDFILQFPTPEKLAAAGRRRWEKFLHTQKLWRPQTAPQRLEIFQNAGKFCGSTPVISAKSLLAVSLARLLKALQLQLDQYRQQIQALFQKHPDHDLFGSLPGAAQTLGPRLLGEIGGPPQRFEDTQTLQCIAGTAPVSFQSGQIHRVRVRYQCNKILRHTVHLWSQCCLRVSPWAEVYYRQKRAEGKSHACALRCLGQRLLKILWKMLQTRQPYDADLHARHQKQHGSWVLALIKPEVKACE

SEQ ID NO: 289622 - protein, 429 aa, unidentified
MSGKETMQPQLEFVAFVGIDWADQKHVWCLQEAGSRHREYGELEHKPETVEAWVGELCRRFGPGPIAVAVEQVKGALVCMLRKYECLHLFPVPSTMSAAMRKALYPSGAKDDPRDADLLLDLLVQHRDRLRHLQPDNEGTRRVQNLVEERRKLVEEKAAQVNRLIGYLKIYFPQMLQWFQRLDTKLVCEFLERWPSLEELKKVPPAELRKFFRQRQGRHHKLTEDRIQGIVQAMPAIQDQAVIEAKQVVVQVIAQLLRSLLEGIANLDRKIEEAAGAHPDFFIFQSLPGAGAAVAPRLLAAFGSQRDRYDSADEVLKHSGIAPVTETSGKKKWVHFRWACAKFLRQSFHEWAGHSIAQSVWARAYYQQQRERGHGHHAAVRALAFKWIRIVFRCWKDRVAYDENKYLAALARRGSPLNSTLIAATATTV

SEQ ID NO: 289623 - protein, 342 aa, unidentified
MNEKEQTKKSFIGTDVSKLTLDVSIINHDGFHLHEQFENNTKGFKQLNTWLQASQVFNYNQALFCLEHTGIYTRQFVEYLILQGAKVWMESALHLKRSMGMTRGKNDKIDSYRIARYAMTNSDKVKLVSLSNKTLQLIKDLMSNRDRINKSFQSIKVSISEMERVDKATAKVLIKLNQPALKGLLKSKGGIELRMMELINGDEELSNIFKLVTSIKGVGPVLATELIIYTHAFTRMNNGKQLACYCGVAPFSHTSGTSIKGRMGTSNFANMNLKSTLHLAALSSTRYVPDIKIYYERKVAEGKSKMSVLNAIRNKILQRVIAVVKRGTPYIENYPEINLEYS

SEQ ID NO: 289624 - protein, 467 aa, unidentified
MPRTSRRQIQNTRRAKPPKGRVPQLEQMHFHAAGIDVGATEHWVAVPADRDAQPVRRFGTFTADLYALAAWLTQCGIETVAMESTGVYWITLFEVLEERGFDVQLVNPQHLKQVPGRKTDVSDCRWLQELHTYGLLRGCFRPSDEVCVLRSYLRQRESLIATAAQAVQHMQKALEQMNVKLTEVVSDITGETGMRIMRSIIAGEHDPQVLARHRDRRCKHDVETIAKALNGHWRQEHLFALTQAVAHYDFVQQQMGACDAQIEACLHTMLPSEELAEPPAPPGGRPRRHSKNAPAFNVWAYLYTLTGVDLTRIDGIDAVTALKVISEIGLDMTRWPSAKHFASWLGLCPGNKISGGKRLSSRSKPTANRVATALRLAAQSLARSHSALGAYYRRMRGRLGGPQAITATAHKLARLIYSLLRYGTEYVDAGQHAYEQQYRDRVLSNLQRKAHAFGYKLMRVEEAAAMP

SEQ ID NO: 289625 - protein, 349 aa, unidentified
MRYLGVDLHKTNFVVCFLSDDETTHTETYPLTKAGIRRFIEQLEAEDQIAVEVTANIYYFYDQVKPHVARVVLVDTYRFAVIAQSKKKTDKADAAALARFLKLDYLPGVPVPSERVRQLRHLLQARETLVGMRTKLKNMGHGALTRNGIALSRSAFASRLSRARLEKRDDLAPADALIMQAALRQIEELDREIETLGVEIVRVGKRLAGVKRLLQVHGMNLLSAISLLAEIGDINLFETSKQLTAYAGLATSTRQSNETTRHGGITKRGRKRLRTVAINTVLSMVSRTQTPLMEFYQKKKKEKGSGKAICATARKLLTIIFVMLKKELDYWYLEDRLYNRKLRLLDAAA

SEQ ID NO: 289626 - protein, 340 aa, unidentified
MSLALQLFLPFPNSCQGTSPHQQGRGTKMTEHCYCGIDVAKDRLDIQVLPHRQRFSVGNNATGWAELVARLHALPIAAVGIEPSGGYERGIIRTLLAAGLSVRRINPSKLRQFARARGILAKNDRLDAQLIAEYVCIMPTRVVQRAATAERLAEVVTMRRQLCDEHVTIENQAAHIEDGILQRLNKRRLARLKADIHLLDKRMAEIVAADAILAQRYELLTSMRGVGPTLAFTLIALLPELGQMSRKQIAALVGLAPYDFDSGKLKGHRCIYGGRMPVRNVLYMAALSAARYNPVLKIFHNRLAATNKKPKVIIVAVMRKMITTLNAMVRDNVAWQPRAV

SEQ ID NO: 289627 - protein, 410 aa, unidentified
MLFIGDDWAEAHHDIEIEDEAGRLLVRKRLAEGLAGVTLLHELIAEHLDPSGEPDQVLVGIETDRGPWVQALLATGYLVYAINPLQVARYRERHSTSGAKSDPGDAHLLAEIVRLDRAHHRRIAGDSEIAEHVKVAARAHQTMIWSRVRQVNTLRSLLREYYPAALAVFGTDLASPDALAVLAAAPTPELGRRLSQARIETLLRKAGRQRNIAATAARIKTALGSDQLTARPGVVPAYAASASALVAVLTTMVTQTEVLAGQVEQGFGRHPDVEIYRSQPGLGVILGARVLAEFGDDSDRYADAKARKNYSGMSPITRASGTKRVVLARYARNRRLGDALFRQAYSALRASPGARACYDRQRARGASHYQALRTLANRLVGILHGCLSHHTLYDENQAWHTPDDKLTIAA

SEQ ID NO: 289628 - protein, 482 aa, unidentified
MKKRTIYTNQSQELLHLFEQAGNGGKLMCVPMDYAKKDHVVMFCNGYGDILRKPFSVKNSPEGVKYLIDQVTRSCRRRGIKPEHVFFGGEDANSYAENFVNAIRSEGWIVANVNAHDAKKQRANLQASTDRLDLMGIASMLLNRRANCSPAQSGIYRDLRTLERHRRKLVVMRTEVCNRVHAVVDRLFPGFLEEKKSGIVGFTRTSLYLMEDRFSAKQIRRRRRPKLVEILKRYGTTEAEATAGKLQQYAGQVLDTPVEHINTLQLSLSQHVKHLRCLDDCIEQLEHEIAVNLAQTQGAFLSSIRGVGIVLAAGVTGEIGNPFEQKPVNNLVSYSGIIPKVKQSGGPDGETYTVAVSKRCNRILKDYVVKSAHHQGLHGTPDLMADYKRRDAAGQHADFGIGRRYVRAAMSMMRTSQIYLPPRLREAGCKPEERGGYYLTSWPYLREKWKKYNALGTAFDSKQPLGQWRDIVQELYEIRLKL

SEQ ID NO: 289629 - protein, 454 aa, unidentified
MKRKKKALQAPKLESLKQINPNAAGVDVGASELYVCVPEDRDPRPVRVFQTFTSDLHEIAAWLKKCRVTSVAMESTGIYWIPLYEVLEEAGFEVKLVNAREAKNMPGRKSDILDCQWIQQLHSYGLLTASFRPPRDIVALRSLVRHRDRLIVARAVHIQHMQKALHLMNLQLDNVLSDITGVTGMRILRALVAGERNLDTLASYRDPSCKSSTQVIRESLKGNYQEEHLFPLRQSLELYDYHTTMIQQCDREIEQKYRALPSRVDLQRKPLPPSKKQQKKPRKNAPTFDLRSRLYEMAGVDLSAIDGCNAATIQVVLSETGVDMQPWRTCGHFTSWMCLAPHNDISGGKVLRSRAKKTKNRANTALRLAAQSLTNSDSWLGAYYRRQRARLGAPKAIIATAHKIARIIYYMLKYQREFVDLGANHYEAQYRKRQINSLTKKAASLGLLLVPAKA

SEQ ID NO: 289630 - protein, 412 aa, unidentified
MNSVYERCAGIDVHKRNVVVCAITPDQQGQRRKEQATFSTMMPDLLRMRQWFQRLGVTHVAMESTGSFWKPIFNVLEGQMEVLVVNAQHLKAVPGRKTDLKDAEWIADLLQHGLLRSSFVPPAFQRELRELTRYRTSVVEERSRTINRLQKILEDTNLKLSAVATDLMGLSAREMLAALLAGETNPTVLAEFARGKMRAKRDLLVQALQGQFKPHHRLLIGEQVAHIDALDEEIERLSTDIAQRLRPYEAQLKRLETIPGIKRRLAEVILAEIGPDMQRFPSARHLASWAGMCPGNRESAGKRLSGKTRKGDPWLRTALVEAAHAATHCKDSYLSAQYHRLVLRRGGKKATIAVGHTLLVIVYHVLADEKDYQELGGNYFDEQDRQAVQKRLVHRLEKLGYEVILAPTSPAL

SEQ ID NO: 289631 - protein, 351 aa, unidentified
MWIIGVDYHPSVQQIAFVNNDTGECGERRLSHSDGEAEKFYRELKAAGCKVRVGMEATGHARWFERLLAELGFELWIGDPARVKAKRVRKQKTDRLDAALLLQLLLEDRFPRVWVPSPENRDLRQLLWHRHRLVQMRTRIMNQLQAVAMNEGVRRRAALWSKSGRAQLESLPLAPWAARRRHDLLELLDRLNPRIEELSAAVEQQAQQRPEVLRLMTHPGVGPITALAFVLIIDSAERFACGKQIASYVGLIPCEDSSADRRRLGHITKQGNTLLRFLLVEAAQAAVRRDPDWRRRYTHLAMRRERRIAKVAMARKLAVGLYWMMRKEWNYLQLKKFGSYAGESKYGHGVQ

SEQ ID NO: 289632 - protein, 416 aa, unidentified
MNAAGIDVSSRKSTVAVLRPFGEVVKLPFDIVHNAEGFASLVRQLKSIEGETRIVMEHTGRYHEPVAQILHEAGFYVSAVNPLLIREYGGNSLRRVKTDKADAMKIARYALDNWGELRDYTPMDTIRYDLKTLNRQFQLASKQKTAASNNLIALLEQSFPGVRKCFDSPVRKDGTQKWVDFIYTFWHADCVRKQSLNAFTERYRKWCKRHGYFFKQSNAAEVYDLAKSVITLVPKGPVAKVLVQEAASQLTSISRSVETYRAEMNRLASMLPEYPVVMRLYGVGESFGPQLMAEIGDVRRFERKQALVAFAGIDPMPNQSGEKNVRSNKSSKRGSPYLRKTLFSIMMCLLQTAPADEPVFQFLDRKRNEGKPYYVYMTAGANKFLRRYYAKVRDYLATLDGLPPVDMDSTGLPQTR

SEQ ID NO: 289633 - protein, 365 aa, unidentified
MPYAYAQSQTPYTCGIDLHAKKLFATVINQQGKVSSRKELPCEKKDVLDFIMPFSGDISIGVESTFNWYWLADLCKEQQIPFYLGHALYMKHIHGAKQKNDPLDSKKIGNLLRTGFFPQAYAYPQAMRAVRDLLRHRLRLVRLRSSIYTNIKNILYQAGIIEFPQTIVSSRKHWPDLLKSISDTATLTRVTSSLALLETYDKQIVVLEKQALTMAQEQDKPSMTLLHSIPGVGNILAMTLLYETHTTERFKTPARYSSYARTVKVDHSSAGKIAGVSNHKIGNPYLSWAYAEVCFQAKKNNPQIKCYFDSLLTKHSKNTALSRLRHKFSVAAFYMLKNKVPFDIKRFCNIDKDDNPTGRLEKTQS

SEQ ID NO: 289634 - protein, 343 aa, unidentified
MQAITTVGLDIAKSVFQVHCIDAHGSVVVRRQLKRRYVLAFFKKVPPCLVGIEACATLHYWSRELQALGHTVRLIPPAYVKPYVKRQKNDAADAEAICEAVQRPSMRFVPTKTPEQQSCLMLHRTRHLFIRQQTAVINTIRAHLAELGIVAPVGRNGVEELLYAVADTKDDRIPDVARACLEALGALLGKLKAQILEFDRQINAWHRSNETSRRLDELPGVGPALATALVASVADPKAFRSGRDFSAWIGLVPKQNSSGGREKLGSITKQGDRYLRSLFTAGALAVIRYAKIHGTKHRPWLARLLERRPTKVAAIALANKIARMAWAMMVKDECYREPIALAR

SEQ ID NO: 289635 - protein, 338 aa, unidentified
MDKFTKKQWFIGIDISKDTIDVAWLKKQSPDKFQEKQFKNNLQGFEDMKNWLTKKKVSIADSIFCMEHTGTHGLLLFVWLDQQGMDFCVEPGLQIKRSLGLVRGKNDRIDAKRIASYALEHKMKLKSFVIPASNLIQIKQLLTYREQLVKIKTGFLNSLKSHQQYHQVTKLDFVLNDIELQIEQLVKRIDQVEKQIIKIIKSDQELKKNYDMANSVIGIGPIISAFMIVTTNNFTSFENGRKYACFAGIAPFEESSGTFKGKARVSHLANKKMKTLFSNGANSARHWDPEIKAYYERKMKEGKAHNSIITAISCKLVNRVFAVVKRQSPYINLYKNNF

SEQ ID NO: 289636 - protein, 411 aa, unidentified
MAQVIFAGIDVSASKLDLVCIDENGNQLSPARSFSNNAEGANALVDTLVSLATKSNVSQLNLGLEATSIFSIPLRDFLLDAPQLKPYSVQVYEINPSLVSGFKKAFGSRLPKTDALDAYIIAERLRFGHLTPYSHEVSVTAPLRQLTRLRLHLVELLVDEKNRALNLLFLKFSNYKQDNPFTNVFGRASIEVLKEFTPDEIAQISIEELAEFIQSHGKNRFTNPEEIATALKQAANRAYRLNSKMEQACEIALSLTLQNIEHLKRQIKSLDKVISRELKAIPQTLTTVKGLGDVSAAGIIAEIGDIKRFKNEASLAQYAGLTWTRYQSGDFDAEERRLTKSGNKYLRYYLVMAANSLRVHNEEYKAYYQTKYQEVQKHQHKRALVLTARKLVRLVFALLSKGQIYKGAVKS

SEQ ID NO: 289637 - protein, 452 aa, unidentified
MDQGNNGLSRGDRNRNARLAALRVVLPRDHAILGIDLAQSRQAAVLADHDSRVLARWRPRCSPWKLGELLDRALRKALAAGFAGITVACEPTGHRWMVIAQLAAGRGMAMVCVQPLVVARAREAEDYTRGKSDDRDAVLIARLAAQLHCYLPEQAGQAWARLRHLGARRSRLIDSSTMCLQQLRDLLEVAWPAVLPAAAKPLEPATWLACLQVALERGDGDLGAVHAMGRDAFTAAARAGLGDFGARRVCRRIAAAVYAALADGAGVAAQRPGALERAFSVLGDWKMVRGELAGVNARMLQALDVLGVLEVAGSIPGVSALQVAAILAETGDPSRFATARAMVKHAGLAPCENSSGNHAGEAAISRRGRPALRLAAWRAVWGALRHNPIYAARHQALTGRAQDPLTGQQARAAIAAALIRQIHAIITRRIPWDADIAAGRRRPSQEATAQAA

SEQ ID NO: 289638 - protein, 446 aa, unidentified
MANKKRKRSKFSTINPNAAGIDVGSQIHVVAVPPDRDDEPVRTFKSFTGDLHLLAEWLLLCEIETVAMESTGIYWMPLYEILISRGIEVVVSNARDVKNVPGRKTDVNDAQWLRQLHEFGLLRGSFHPTANFSSLRSYIRQRERLLDYSASHIQHMQKALMLMNLQLHHVVSDITGKTGMKIIHAILSGEHDPEVLAGMRDVRCKSSVETIAAALEGNYTSEHLFALGQVVSLYEAYQAHVADCDKQLEKVLNGLRMPDPPSESLPKARTRTKQPNQPDFNVREVLYAITGVDLTQIHGIGPYVALKLIGECGTDMSRWKTAKHFTSWLCLAPGNKISGGKLLSSHTRRSKNRVTALLRLAAVNVGKTDSALGAFYRRLSARVGKAKAVTATARKLSILFYNTLRYGRDYCDPGAAHYEIQHKARTIKHLTRRAKQMGYTLEPAIT

SEQ ID NO: 289639 - protein, 448 aa, unidentified
MAKKVSYRAVPIERLTSALLAAMLVGASKLIVAIDVAKLKMMAGFGSEDGSVVRLVRFESPMQTREFVELVVATGQALRVPVEALMEPTGTYGDGLRALLVSRGVSVFMQSPKRVHDAREVFDGVPSLHDAKSCVVMAQLHRQGVSRAHSPLSEDRVRLRALVRRREVFEKPLQMHLSELEGLLGRHWPELLIDMDVWRRKTPLELLVAYPCPAEVALHREEAREVMRRASRNTIKHDEIERVLDSASRSIGTSASDEEREVIRAVAREALHVRGSIATIDKLIEKTAEEHEATRGIAKVVGRVTAVVLVAYLGPLSEYASPATLEKACGLNLKIKSSGNVVGRPSITKRGSSEARAWLYLAAVRLVKNDPLIAAWYRTRGGYRGDRKLTALIAVTRKLARALWHVARGATFDSTKLVDARALDVTPRTPLAPLASSPTSHVAPAPMG

SEQ ID NO: 289640 - protein, 355 aa, unidentified
MTSSKYIGMDVHKESMSIAVRNAAGKIVMESVIETKANMILEFIDGLRGDVHVTLEEGTWSAWLYDLLKPHVTELVVCDPRRNALLKEGNQNDRVDARKLAELLQNNQLRPVYHGDHGLRTLKELVRSYLTISKDLSRVMTRVKAIYRSWGIPCSGTQVYSARHRAEWLGKIREPGVRRRAEHSYQQLDALRLLRLEVRKDLLAESKKHQVWKRLGQIPCVGPIRAAVLLGIVQTAHRFRTNRQLWTYSGLGIEVHSSADHQVVKGQLQRKKKPIEIRGLNKNCNHHLKNLFKGAAASASTHPGPFQEFYAALVAKGMRPEMARLTLARKIATIVLIIWKKGVCFDANHLKPQTA

SEQ ID NO: 289641 - protein, 395 aa, unidentified
MAKQVMERPMKRNDLSQSLVVFEQHSTLVAVIEMGLKSWLVAGLVPGLVRQPLKRQAADEKLLVKQLYRWRDEAIKADSTIKRIAVAFEAGRDGFWLARWLRAHGIEAHVIHPNSVPVPREHRRAKSDRLDTALLMRAFLGWLRGEAKHCSMVAIPSLAEEDARRPNREHEHLVGERTSIINRMKAALVRLGVRGFNVKLRKAAEQLEKLRTAVGEALPPNTLAELRRDMARLKLVHEQIAAIEKERLARLRRAPRQDAHPMVLLLARVMGIGVETADMLVHEALTRPLRDGRAVGRYAGLTGAPDESGQRRREKGLAKAGNARVRRGMIQLAWRWLMFQKGSALAKWFTARTAHAPREVRKTMVVALARKLLIALWRYVTTGEVPAGARLRPAV

SEQ ID NO: 289642 - protein, 413 aa, unidentified
MDILHRRCAGLDVHKKVVVATILVSDEPGQLLKETRSFETMTAGLLALSDWLTTYGITHVAMESTGEYWKPIYNILEENFEVWLVNAQHIKAVPGRKTDVKDSEWIAELLRYGLLKASFVPPKGQRELRELTRFRTTFIKERATLINRLQKALESANIKLASVVTNIEGVSGRAILEALIEGQASPAAMADLAKGRLRAKREALEQSLVGRIQDHHRFILQELLCQIDSLDETIERFATKIEAYCRPFEDAIERLDTIPGVARETAEVIVSEIGVDMSRFPTANHLASWAGVAPANHESAGKRLSGRTTKGNQALVTALTQAAWAASHTKNTYLSAQYRRLASRRGRKKAIVAVAHSILIIAYHLIHKQETYHDLGSNYFDRRNSEATAKRLVRRLEQLGYAIHLEQPMPIAA

SEQ ID NO: 289643 - protein, 428 aa, unidentified
MNDEEIIRHEKYCQLRKEIRGSEDHIIVGIDVAKDKHHAFMGTATGKTLLKRLIFENNMDGYSRLLARTEAIRVQNGLSRIVFGLEPTGNYHKPLATHLIRCDHNVVLVSGVAVKRNRELLDGRWDKHDTKCAANIADLISQGKCLFYEYPLPDINELRNLLSLRKRLKKEDHSLRMRIRNNLLAKYFPELDRFYGQCETENLAIVRWCLEPGKIAGMEFNKFFQIVTTRERGIAQKQRLRKIHSLSSESVGCPMGQASEFEAQVLVDKLKQVRQVIKKTEDLIKDVSLGLPEYSWMLTIPGFGPYVSSIVLATIGDPFRFNNRKQVLKMSGYDLNANRSGKTSLSAVPVISKKGSSALRYALYQAALVASTRNSYFINYYTNLLRGREREQGIKTKMRVKLAAKMLIIAWTLMKKKEPFNPNYLNNK

SEQ ID NO: 289644 - protein, 421 aa, unidentified
MTSILSNTQPTTWVGIDIAKRHNDVLVERPGHRRRRFRVANRLDDYQRFSEFLTDLPERPVIGFEATGNYHRTLAFFLAKKGFSLRLVSSVAAARTREALYNSWDKNDPKDAQVIIHMLKTGVTQYYHDPLIHEINELQELSKTHFQISLHKVRIQHSILTHYLPLYFPEAEKYMTNSRAQWFTHLIERYPCRAAVTKFSQEEFIDDAWSFVGRKVNKTAFLEDFYGTATQTIGLPVSEDSEAIRMFRIVLREHQRLCVVRADIEKEAESFLGDNLDYIRLKTLPGIGPILSLTILAEGGDLRRFAHHRQFLKYCGFDLASQQSGQFRGRSKLSKRGNRRLRYAFWMAATIAIRMRENSFRDKYARYTQSDPTNADLKRKALTAVAAKMARVAHGMIKNETNYRPFHERAVPGGAIPSKGR

SEQ ID NO: 289645 - protein, 392 aa, unidentified
MVISVGIDVSKDKHDCFIVSSEGEVLADVFTIPNTIEGFHCLLQRIRDCTAPQDKIKVGLEATGHYSYNLLGFLLDNGLATYVLNPLRTNLYRKSLSLRKTKTDRVDARTIASMLLSDAGLKPYTDTAYHNEELKSLTRYRFDKVKERAKLKSSIARLVCILFPELEKLVPSLHIASVYALLEEFPGAKQIAAAHLTRLKALLVTASKGRYNRDMAFEIRDAARNSIGSRMPAKSLELQHTIRLIRELDDEIEEIEEQIHSIMDELHSPITTIPGLGFRMAAMILAEVGDFTRFDSPDKLLAYAGMSPSTYQSGQLKNCYPHMEKRGSRYLRYALYNAAKYVCQWDPTFSAYLAKKRAEGKHYNVAISHAVKKLVRLIFAMEKSGTPYHLTV

SEQ ID NO: 289646 - protein, 322 aa, unidentified
MSQPNPLCVGIDVSKASLDIAVNRSVESFTASNDINGFDTIVSVLKQHTVSLVLMEATGGLESAVACSLQAEGFDVVVINPRQARDFARAMGYLAKTDRIDAKVLAQMADVINRHPKRERFIRALPDAERQVLSAMVVRRRQLITMLVAERNRLHPAHPQSRKSINIIISALEAELARIDENMNKHIQTYFKALADRLSAIKGVGAMTAATLLAEVPELGKLSRREISALVGVAPVNRDSGTLRGRRTLFGGRAGVRTALYMATLVATRFNPVIKTFYNRLLAAGKPKKVALVACMRKLLTILNAMIRKDEEWNDSYHQITP

SEQ ID NO: 289647 - protein, 343 aa, unidentified
MKYYAGIDLHTRKSVVCVIDEKERKLVMETAPNELPCILSLLEEVPRRPTVAIEATLNWYWLVDGLQEAGYKVKLAHTMGLYMITGAKVKTDRRDAFSLARLLRLDAIPEAYIYPKEVRPIRDVLRRRNRLVRLRAEAYVAIKRKFQQYGLPYCDKAIQRADEKELLSWFTHPAIRASLEMELERIRLYSRELKTVEKYILSTVENQPIFEHLRTIPGVGKILALTIYYEVGEIARFPSARQFCSYARVVPGMAQSGNVVRRGTGSKQGNPHLKWAFNQAAAISVRHYGYVRNFRQKHLARRRSKARRLISLSIVAHKLAIAAYHVLRDDVPFDKELMFGKAS

SEQ ID NO: 289648 - protein, 355 aa, unidentified
MQHCTTIGIDLGDKKHAVVGLDKDANVILRRWIPNKSEDLEAFFLQNRESTIGMETGTHCRWISFLARKCGCNVYVGNAHKLRSIFGNTHKNDMRDAEEIANLLHGNKRHFHPVVLRDGVHQDLVQLVKMRETVMEQRTKSINSVRGMAKANGVRIGECDADAFQKNLAILLNTLPQNLMKLFSPQLELLRVLNETIKEYDRLIERHRNEHFREECELLESIPGIGPINSTAFVAFVGDVGRFRHARDVGPYFGLTAGRDQSSDKDEPKKITKEGSKFVRHLLVNAANNIMRSNTMNSELKEFGMRVWGNRGKIAKRKAKVALARKLAVTMAAILRTGKPYHDDVIEAAKQVKAK

SEQ ID NO: 289649 - protein, 377 aa, unidentified
MGTTRQALINDTSVVLMLYMALELSASKWKVALADGQRAASQHTLEAGDVGGLLKLIEKAKKRCGLQGRLKVKSCYEAGRDGFWLHRWLLEQGIENVVVDSSSIEVNRRARRAKSDGLDAVKLYEMLVRHVGGDKRMWRVVRVPSVQQEDERRVHRELERLKRERTAHVNRMRSLAVLHNVRLQRVGGRGWSERLEQLKGQLPGALWAEIERESVREKLVCEQIVAVEQERKEQLQAMLEQGGPLVALLKLRAIGLQTAWVLVRELFGWRHFNNRRELAACVGLNPSPYDSGASQREQGISKAGNRRVRALVVEIGWYWLRYQPHSALSEWFNRRFGAGGKRMRRIGIVALARRLLIALWRYVEHGIVPAGAQLKKA

SEQ ID NO: 289650 - protein, 342 aa, unidentified
MRTFVSFVGIDIASATFMACIGTTPWKITVKPVKFENNEDGFVSFLDWLKEYNLKVESTVVCMEATGVYSEGLAYFLHASGYIVAVEPPLNIQRKFPLNASKTDELDCQYIAEYAYRYQDKLSFWKPRAEILEQVKVLLTTRQHFSTQLIGHKNALHAINRKKVSSELAKCSHQNMIEQIAKTIKEIDKEIRRLIDSDPTFGQTLLLLMTVPGIGLQLATHLLILMQETLDPRVLASYIGISPIKHQSGTSIHSAPTSRHFGPPVLRKLLYLAACSVRTHKKQFQQYFFRKVAEGKHRKLVLNNIQNKILKIACAVVRSQQPYIANYVSVNPIAFQKALTNS

SEQ ID NO: 289651 - protein, 299 aa, unidentified
MKHVSTIGLDLAKHVFQVHGADIEGSPLFDRKLRRGEVLRFFEKLPRCLVGMEACGGAHYWAREMANLGHDVRLIPPAYVKPFVKRGKTDAADAAAISEAVIRKTMRFVPIKTAEQQADAMVLKTRPLLVQQRTQSVNPLRAHLAGLGIIAAGGLPNVAALMAVVRESEDTRLPAAARFALTAVADQIDALADQIDELEHAIVTEAKRDEDMRRLMTIPGIGAITAATIKTLVPDPSGFKSARHFAAWVGLTPRLHSSGGKERLGGSPKWVIPNSVFSWSSARQPFCGSLGAMIGHDPG

SEQ ID NO: 289652 - protein, 349 aa, unidentified
MSNPTRWVGIDLHRRRSQVAIIDDDGELTLSKRIPTGRETITQLLGDPDGTHVALEATYGWEWLAELLEDAGFDVHLAHPLRTRAIAAARVKTDAVDAKTLAHLLRTGLLPEAYIAPPELRDLRDLVRHRATLVHLRTSIKNRVHALLARQGILPEYSDLFGTAGRAYLAGLALPDGPRRRLDSLITLISDFDREITNTTSEIDQRAKADERVKLLCQIRGIGPYIAMLIIAEIGEVKRFPTAKHLCQWAGLTPTVRSSDGKARLGHISRQGSTILRWALCEAAQHTPTGGGPLRAQYERIAKRRGSKIARVAIARQILTLSYYGLRDGEIRCLAHQPNDGNEQLADAA

SEQ ID NO: 289653 - protein, 369 aa, unidentified
MAKSITFIGLDVHKDTIAVALAEAGLRGEVREHGKIPNAAAALKALAMKLASAGRELRFCYEAGPCGYGIQRQLAGMRHDCTVVAPSLIPRKPGERIKTDRRDAINLAKLHRAGELTPVWVPDQAHEAIRDLVRARQAAVRTLRQARQQLSGFLLRHGYHYHRPAWTQLHRRWLASLRFEQAVHHIVLEDCIAAVEAATARRDRLEAHIEAALPEWALAPVVQALQALRGVGLVAAATLLAELGDITRFTNPRQLMAYLGLVPSEHSSGRTRRQGGITKAGNGAARRMLIEAAWSYRFPARISREQLLRQERLAKPIRDIAWKAQERLCRRYRKLARAGKLATVITAAIARELAGFIWAIARQAQSTAS

SEQ ID NO: 289654 - protein, 374 aa, unidentified
MFIVGIDVAKRSHEVTVITSEGQVVQKAFSIRNNCMGYNLMMEKLRKPTNVKSQIVFAMESTAHYWLALYTRLRKDGYKAIVLNPIQTSAMREMSIRKTKTDSKDSFLIAELIRFGRYAQSNVAQDKLLALKELCRNRYYLVDMASDLKRKAIALIDRIFPEYETQFETIFCKSSIAVLKKYPTPKKLAHANLSKLTEILLDSSNGRFGEWKAQELKSLARDSFGVEDCEGIYSMLLLTMLDEIQSLTEKADELEKRISSLLKEFDSTITSVPGIDPILGACVLSEIGDVTRFRSADKLAAYIGVDPSVNQSGEYISGHAHMSKRGSPYLRRAVWMASIVAVQRDPMFRAYYDKKAALYSFGEYPISALKHFVK

SEQ ID NO: 289655 - protein, 423 aa, unidentified
MAGVMIGIDPHKGSHTAFVIDGREKPLGQLRVRASCEQAEALLGWAGRWRQRTWAIEGARGLGQLLAQQLLAAGERVLDVPPKLTARVRLLESGQINKTDENDARAVAIAALRARQLPQLTVEDQTIVMRVWARRYHDLGPATTQAVCRLHTVLCELVPGGVRKQLRTSQAIAVVDSITAESPVAQAKLELAHDLVADLQRLDAQRREVKRRVSRAVAAAPTSITEVYGVGPIVAACVLGYVRDIRRFPSRDRFASYNGTAPIEVSSGDRKIYRLSRRGNRQLNHAIHIAAVSQISHRGSEGHAYYQRKRAKGMTGKCALRALKRKISDTLYERMLHDIRQRKDPGGHSGNDAVSSAAGSHPDGPALRTSHSRATANSKTATTNQRPLTSPPAPDKRRTSRSGTGVKLQPRPRPRRGRGQERA

SEQ ID NO: 289656 - protein, 355 aa, unidentified
MDSTKYIGMDVHQATISIAVRDASGKLIIESLIETRAATILEFLQGLKGTLWVTFEEGTSAAWLYDLLKPRVAKVIVCDPRKNALLKMGNKNDRVDARKLSHLLHAELLTPVYHGESGVRTLRELSRSYLTVTKDLTRVMNRLKALYRSWAIPCVGEKVYSPRHRNTWLEQLSEAGVRRRAEQLYQQLDLLVQIRRDARRELLRESRKHPAHELLRVIPQLGPIRVALLIALLQTPHRFRTKRQLWAYCGLALQTRSSGEYRFAGGQLQHSKKLPALRGLNSNHNHDLKNLFKSAATHVSTSTDPLGDFYQSLLAKGMKPAMARLTLARKMAAIVLAIWKKGERFDPGELKRQAA

SEQ ID NO: 289657 - protein, 343 aa, unidentified
MEHFGGLDVSVKETSVCIVDGTGGIVREVKVASEPEALLPVLTNPDYHFKRIGLEAGPLSQWLYSALAEVGLPVICVETRHMRAVLKAQINKTDRNDARGMAQMMRVGLYRPVHVKTLRSQKLRMLLTHRQLLQSKAIAIENELRGTLRNFGLKVGMVGAAKFEVRINELVANLPDLAVLVEPLLVVRRALREQIGVLHHRLLAIVRDDEVCRRLMTVPGVGPVVALTYRATVDVPARFRKSKSVGAVFGLTCSRDQSGERDRPGAISRCGDEMMRVMLYQAAQVMLTRTNRWSWLKAWAMKIARNRGKKKAIVALARRLAVIMHRIWVDGTEFRWTREIAAG

SEQ ID NO: 289658 - protein, 412 aa, unidentified
MKDLLEISCGLDVHKEKIVACILTGPLGKPTRSEIREFSTLIPDMIALRNWIVSKNCHHVAMESTGIYWMPIYEILEDAFYGDITLLVVNARHMKNVPGKKTDMRDSEWISTLLRAGLLNGSFIPEKKIREFRDLNRYRKSVIRDITSQKNRIEKFLQSSGFRLSSFISDIFGASGRNIILHLIEHGQIDKTALDSCLKTKTRNRIDEILMSVNGTLSEHQKAFLRILMTHYDSLKKHLAEIETSLEENMAPFALQVEQLNSIYGISTTASCAIIAEIGIDMKPFKTAEHICSWAGLCPGNNESAGKRKSTSVTKGNPYIKSMLCEIAWVIAGKRNTYLSAWYWRIKQKKGAKKAIVALARKLLVIIYTMLKQGTLFDESCFETRRKHCEQKQLSRYIRELEKHGYHVEAQS

SEQ ID NO: 289659 - protein, 371 aa, unidentified
MRHKNAGGQIMNNTNSEMYLGMDVSEKSIELFALSADNKTESKGKIVNNPAKIKAFLAGLKNTSRLTVALETGTHSPWLSKMMEEHGCKVLVGHARKLRAIWGDDHKCDQRDAEMLARIARMDPKLLHPIKHVSQEVRAEQAVIKARDVLVKTSTMLINYLRGTLRSFGISTSEIPTTSMHSKLMPLIPKDLRPALKGIVKQLKEVRTEIKEYDKKLTELCKKHKETKILQQLNGVGPVTAITFALIIADPRRFSSAGRVGSYLGLTPKRDQSGEVDKQLGITKSGNGMLRKHLVKSANYIMGPFGVDSELRRYGERIAAKGGKIARRKAKVAVARKLAVTMWRLWINEAEYDPFFKEHQRQKKKAARVAA

SEQ ID NO: 289660 - protein, 348 aa, unidentified
MAKKQPALYGGLDLHSDNVFCALLDEARNVVFEKRLPNDINTLFQALEPYQKRIVKIAVESTYNWYWLVDGLQDKGYDVRLANPAKIKSNIGLKHANDKTDARYLAQLLALDILPEGYIYPRETRGVRDLMRKRGQMVQDRTQEAQRLTGLCARQTGQNLGARKILAADLPELFHHHAPSIRMAEIAKEHIQFIDRQITVLEKQILAELPDKDDYQLLMSVPGIGDVLARWILLETGPITRFKSAGKYASYCRAVPSEHTSNGKKKDEGEGKCGNAHLAWAFVEAANFAQRYNTPINAWFQRKVARKNNLRVVAVKALANKLAKACYFILRTGEPFDLARLLGGTRAN

SEQ ID NO: 289661 - protein, 313 aa, unidentified
MSQNNPSILHAGLDIAKASLELHLASQSHPLTNDPKGHARMCQLLRAHPDVQIICEATGSYERAPVRALHQAGILLSVVEAGRVRHFARARGRRAKTDPIDARVLAEYGAAMRPAATPAPTIQQERLEALDTRRRQLIETLVAERNRGAHYTEPLCCRQSRSLLQALEKQVAQCEEAIAELIAADEKLQAKADRLDAIPGVGFTTAAVMLADLPELGTLSDEAVAALAGVAPYNQDSGDTAGMRHIAGGRSVVRCALYMAALSAVKHDAILKAFYLKLRAAGKKPKVALVACMRKLVVLMNRLLKNPQFELAK

SEQ ID NO: 289662 - protein, 388 aa, unidentified
MGQVIIGMDPHKRSATIEVMAGDETVLGGGRYATDLAGYRTMLAYAKRFPQRTWAIEGCRGIGRHIANRLLADGEQVVDVPPKLSARARVFATGQGRKTDATDAHSVALVGTRMSGLRSVIDDEQLTVLRVLVDRRRSLGEDHTRMVSQLHRLLLELIPGGAKKDLSAAQAKALLAKVRPRDVAGKTRRRVAAELIADLERIYARKKAANKELNELLKATGTTLTNLHGVGPSGAARLLVEVGDITRFPSKAHFASWNGTAPIDASSGDQVRHRLSRKGNRQINRVLHIMATVQLRNPAEGRAYYDRKKAAGKTSMEAMRCLKRRLSDVVYRQLLADALRPCTTGPGGHSGTTLQSSVADSHPDIDTSDQSLPGPAKPKPRTALLALS

SEQ ID NO: 289663 - protein, 415 aa, unidentified
MDIYCGIDWAEGHHDIAIMDSAGELLAKRRITDDAAGYRDLLELLAEHGDTPQHPVPVAIETSQGLLVAALRAGTRSIYAVNPLSAARYRDRHGVSKKKSDPGDALVLANILRTDAHAHRPLPADTEQVRAITVLARAQQDAVWARQQTANQLRSVLRQFYPALLQAGAVWQNGLTRPEIRELLRIAPTPGTAARLSTARIETALRRAGRSRGIAAQAQRIKTILRGDHARQPQAVEDAMGQQAAGLLLILDAACQSVDQLSTAVEEAFLTHPDAQILLSFPGIGNQLGARLLAEIGDDRQRFADARALKAYAGSAPITRASGKKKFVGRRFVKNDRLSTVGYMWALSALTGSPGARAHYQRRRAAGDWHAAAQRNLFNRLLGQLHHCLTTGTRFDETTAFTPPAPISQLDFLNT

SEQ ID NO: 289664 - protein, 340 aa, unidentified
MDEYDGRQFVGMDLHRRRSVIVRMTPEGERIGATVRIENDPAGLAELVASWGESPEVVLEATYGWYWAADVLAEAGANVHLAHPLGVKGFAYRRVKNDEFDAHDLADLLRMGRLPEAWIAPPQVRGLRELVRHRSKMVALRSGLKAQVHAVLAKQGVRVPMSDLFGVDGTNLLDGLALDPPFHTRVVSLRYLIDAFDGEIDTVTKDLRAQLKKHPGYQAIQAIPGVGPVLAAVFVAEIGDVTRFPTPQTLCSWAGMTPRHRESDTKIHRGRITKQGNHLVRWAAVEAVQKLYGGGIGAARARLAKTRGKNIAKVAAARKLLTLVYYGLRDGHIRCLARPA

SEQ ID NO: 289665 - protein, 341 aa, unidentified
MPSVNPNSCTGFEPAPSKEGSWRMAQTRTVVGIDVSKGTLAAAIRSAGVAGSFANSPKGRRDLLKWLTDHAVRKAVMEATGGYEISCRKVLAKAGLEVVIVDPKRVRHFAKSAGQLAKNDPIDAQMIAWFGEVFDDLTGKPQDERREQLEQLVTAHQALTRLQGQIENWGEHEQPSLVQKAHQAVLKAITSQLDKLDDAIAAQIDDTPQFAERAEIIQSVPGLGEVSTAGIIAFLPELGRVDRQAAAALLGVAPFDADSGEHHGRRYIQGGRRKLRNLLYMPIVGAATRSNPVLKACYLRHLARGKQPKVALMACLRKLIGILNTMLARGEKWDPTKHALA

SEQ ID NO: 289666 - protein, 462 aa, unidentified
MSSKKKPTSKPRRSAPKRVDWKALEVVHLDAAGIDVGGSEHWVAVSPDRDPEPVRCFGCFTADLREMGRWLVQKGVRSVAMQSTGVYWMPVFEVLEQQGLEVYLVNAQHTKNVPGRKSDVQECQWLLKLHAFGLLNNSFQPSDEIRIARTLWRQRSNLVAEASSVIQRMQKVLTEMNVQLSNVLSDLSGMSGMKIIGAILEGERDPWVLAALVEPEVKATPENIAKSLEGNWREELLFVLRQHVELYRIYQEKIVDCDLQLRKHLKSLGSKVDPRMQPIGPRPKGKKNSRNAPSFDLRTELYRITGIDWSQINGIDVLTAQTVIAEAGADLGAFPSEKQFVSWLGLCPTNEQSGGQILNRRTRKVVNRASVAFRNAAVTLLRSQSYLGAQYRRLRTRLGAPKAITAMARKLACLFYRLIKHGQQYVDKGAEYYEARYREQQIRSLAKRAQKLGLQLVIPKTA

SEQ ID NO: 289667 - protein, 337 aa, unidentified
MNYSGIDLHSNNSVVSVIDETDRVVAEKRLPNDLAKILAFLAPWRAEMAGVVVESTFNWYWLVDGLQTASYVVHLANTTAIKKYDGLKHSGDETDARYLAHLLRLGILPVGTILPVKLRALRDLARKRMQLVRSCTSHILAVENITARQYGTQITSNQVKRLDERAVDQMGLPDNVALAVRTNVAVITTLREQIAIVERRLQKEVARHPDYDLLTTVPGIGQTLATVIMLETGTIDRFASAGNFASYARCVDSQRMSNGKKKGEGNTRNGNPYLCWAFIEAANFAMHFSSEARRFYERKKARTNSVLARKALAHKLARACFHMLKERKPFDVTRCFA

SEQ ID NO: 289668 - protein, 340 aa, unidentified
MEVDVLGIDLAKRVFQLHGATRTGVVVHRSKVSRPSFLESIRRLSPKLVVMEACSSAHYWARVLQRQGTDVRLISPQYVAPFVKTNKNDRNDAEAIVEAASRPAMRFVAIKTIEQQDLQALHRLRQLLVHQRTAIINQVRGVLAERGIVVAQTPAAFHRAMPDVLASQDEELSQFCRGLLVDLLEHLKSVEEKIDSCDARVKAFMSNSQACKRISAIDGVGPLTATAIVAAVGDASEFKNGRHLAAWLGLVPRQYSSGGKSKLYGISKRGDKYLRTLLIHGARAVLRYVAGKTDAQSKWLQQLIERRGYNRAAVAVANKNARVIQALLSSDREYVRPATA

SEQ ID NO: 289669 - protein, 390 aa, unidentified
MRFYNQPHQFYCGVDLHARTMYLCILDHAGAIVFHDNLPAEAHAFLQAIAPYREGLVVACECLFCWYWLADLCQAHGIPFVLGHALYMKAIHGGKTKDDHIDSEKIARLLRGGTLPYGYAYPKGQRETRDVLRRRMYLVHKRAEIVAHTVNTNSQYNLPVLGKKLIYARNRAELDVPSRFIDPSVRLSMDVNMRLLDTLDELIGEVELHLTRTVKVEAPHSYYLLQSIPGVGKILALVLLYEIHDVRRFANEGDFLSYARLIRPKKTSAGKITGMGGAKIGNAQLKWAFSEAACLLARESDQAKRFLARKTNKHGKAKALGILAARLGRAVYHMLRQGRPFDPRRFWNGAATPAPNEGLGTHRAKAQAKRAKAKKKTSRPSEAPRCVLEA

SEQ ID NO: 289670 - protein, 323 aa, unidentified
MTASTHAPAEVHVGIDVSKARLDIHIDPTGQSLSVDNTPAGIRSLLKTLEPLTVKLVLIEATGRYERRLAADLLDAAIPVTVVNPRQARDFAKSLGELAKTDKIDAKVLAAFAKLDHHRLAEKMPQNLALLDQRVTRRRQVVQMLATEKTRLGQLDDKLAIRTVKKVMRVLDQQREDLDRDIATLIESDDDWRNKARILDSAPGVGPDTANQLVVDLPELGKLNRQEIAALVGVAPMNCDSGSMRGQRHIRGGRADVRTTLYMAAYNAMRCNPAIRAFAERLKKAGKPFKVVATACMRKLLIILNVMVKTNQHWNPDLFLKTA

SEQ ID NO: 289671 - protein, 449 aa, unidentified
MRKPQEIEDEEYEQVLQRVAAADVAKKAGMVCTRVPHDTRPGRRRTRVGEVPATTAAILELGAYLAGERIEKVTLEATSDYVRPFFYLLESAGLDVQLVSARDVKNVPGRPKTDKLDAVWQAKCTERGMLRPSFVPPPEIRHLRDYTRLRADLTRDRTRHWQRLEKLLEDALIKVSSVASSLGTVSVRDMLEALIAGERDPQVLAGLARTRMRAKHDALAEALNGRFDDHHAELARMLLDQTGQLDAQIGHLTARIGKLIAAIPAAWGVNADGTTGPGAGLGENAPVLPAVIRLDEVTGIGQHAAQVIIAEAGLDMTIFPTAGHLVSWAKLTPRTIQSGAKNRTGPAGKGNPYLKGILGEAAAAAARTSTFPGERHRRTVKRRGKPKALVAVARSILVNVWHLLANPTARYQDLGAGYYASRIDTDRKTRSHIRQLEALGYTVTLAPAA

SEQ ID NO: 289672 - protein, 402 aa, unidentified
MAGITAGIDWASEAHEVCVSEEGEALERFSVAHDERGIAGLARRLTKLGVDRVAIERPDGILVERLLAAGLEVLAIHPNQVKAARARFAVAHGKSDRFDAYVLAELARTDAHRFRVLVPDTEETKALKTLTRAREDLVGVRVELANQLRAQLQAFWPGALIFPMLDRPISLAFVKRYPGPADAKGLGPTRMAAFLARERYSGGTDPAELVARMRSAPQGTAGPAEQQARRGVVLGLVSALEPIVAEIAALDAQIRERLAAHPDAAIFAPLFRDRRTAICPATLIAELGDCRERYPTEAAMAADAGMSPVALESGKLRVATFRRACDKRLRLAVATLADSTRHWHPWAKEVYRRARARGQDHPHAIRTLGRAWIRVLWRCWQDGVPYDATLHGNSHRLQPARG

SEQ ID NO: 289673 - protein, 332 aa, unidentified
MSSHEIVGIDVAARKLVVIGERLALTEYENTAAGRSKLAKALSQSPRPVRVVLEATGIYFLDLACELAAAGIAVMVVNPKATHHFAEAILQRRKNDPVDAAMLREFGRRMDFVPWQPPRHELFAFRALTREAQALSKAVAAAKNRLHAITATQLAPDTLIRALERQIAQNQALVDELVAAALAETKTNRELARLVARTDSAPGFAVKPAPGSEQGAAVLVVGELAVLPPMTARQWVAQAGLDVREECSGTSLARRPRLSKRGNKRLREALFYPALTAARCCPLAGAFVERLVAAGKTRLQAIVALMRKLLHGLHAMWRNDEDFDAEKLFAPA

SEQ ID NO: 289674 - protein, 412 aa, unidentified
MEVLFARCCGLDVHKSSITACVLIAQAGKPLKHIRRFGSTTRELRELVAWLREFGVEHVAMESTGVYWKPVWNVLEGHFQIVLANAQHIKAVPGRKTDTKDCQWIAELLQHGLLRASYIPTVLIRDLRDLTRARTSLSQEHSRIASRIQKVLEDANIKLASVASNTLGKSGRAMLAAMIEGEESSERLADLALGHLRAKIPQLQIALEGQVRDHHRFLLQSLLRQLQFLEAEIALLDVRLDQIGREHLDLADALDRWITVPGVDRVAAWSFIAEMGTDVTQFPTAAHLASWAGVCPGSNESAGKRLSSKTRKGSPWLRRMACQSAWAAARTKNTYLSAQFRRLAARRGRKCAIIAVAHSILVIGYHLQQKRCTYADLGSSYFDRLHADGLKRYLVKRLESLGHSVILQPRTA

SEQ ID NO: 289675 - protein, 356 aa, unidentified
MSSNIKYIGLDVHKEAISIAVLNGAGKLVMESIIETKAVTLLQFLQGLRGELHVTLEEGTWAAWLYDVVKPHVQEIVVCNPRRNALLKEGSKSDKVDARKLAELLRAGMLRPVYHGENGLRTLRELARSYQTISKDLRRVMNRLKAIYRGWGILCAGTQVYAPRYREEWLNKIRQAGVRRRAELFYQQLDALQALRRSVRPEFLAESRKHKAAKLLRQIPCIGPIRAALLLALMQTPHRFRSKRQIWNYSGLAVETHDSAQYRYVDGQLQRSKKPQQLRGLNQNHNHEMKEIFKSTATSASRGSGPFRDFYATLLAKGMKPEMARLTLARKIAAITLTLWKKGGRFDAEHLKPQAA

SEQ ID NO: 289676 - protein, 343 aa, unidentified
MSEITVIGLDLAKRVFQVHGADREGRPVLRKRLQRGQVLNFFANLSPCMIGLEACAGSHYWGRELQALGHEVRLIPPQYVKPYVKTNKNDATDAEAICEALTRPTMRFTALKSVEQQSVLLLHRTRELLVRQRTMLINALRGHCGEFGIIAAQGLSRAGELIKLVDDPADNRLPDLARQVLQCLTSQIRSIQGEIASIEKKLLAWHTSCAASRRLAEIPGVSLITATAVVASVGNANQFRSARQFAAWLGLVPQQRSSGGKERLGRISKRGDGYIRRLLVHGARAHLSWSRRKKQIRSAWLTGLLVRRPTNVVLLAMANKTARIAWAMLSRGERYQERVAAAA

SEQ ID NO: 289677 - protein, 480 aa, unidentified
MTAACDPSNSPKKKPRKRSRKSKASRSLPVDTPPMPAELKQVNLNAAGIDLGATVHFVCVPQGRDPQPVRSFGAFTADLEAIADWLSQCGVTTVAMEATGVYWIPLFELLERRGFEVTLVEPSRLKHVPGRKSDVLDCQWIQQLHTFGLLCGSFRPEDAICVLRTFVRQRETLVRSASRCVQHMQKALTQMNLKLQHVLSDITGVTGMAILSAILAGERDPRRLAKLRNEKCHNDEATIALALQGNWREDHLFALKQAVDAYEFYLRQLAEVDEKIEEHLKTFEDKSQGKSLPPQTSKKKRASAPGFDARNLLYRMTGMDLTTVDGLQASTVLMVVAETGLDMSRWPTEKHFASWLTLCPGVNKTGGRSQSKNGRTRRSSNRAAAALRVASATLLRAECALGAFARRMRARLGAPKAITATAHKLAIIIYNMLKYGKAYVDRGGDYYEQQYRATMVKNLRRRATQLGLELLEAPAEPTAV

SEQ ID NO: 289678 - protein, 345 aa, unidentified
MEPMYYIGLDVHKRKISYCMKDSGGKVYSEGSLSATRLDLDVWMKTLPQPWSAAMEATMFTGWIYDHLKPHAAALKVAHPLMLRAIAAAKKKNDRIDANKICDCLRCDFLPECYMAPTAIRERRRTLRYRNLLVRQMVQMKIKISSLLMEAGVSYNKQRLHKAGYFRELLATNPDIDEGLRSLLRLCRETVVRLQKTESALVRSLESDSLLMDRVERLMTIPAVGPITALTWALEVGDVQRFSSIKKAISYCGLCGAEKSSGNTVQRTPLSKQRNKHLQTTLIEAAKMAPRNSPELAMLYDKEKQKGNANRATLAVARKLVAYLVAVDRRQKEFLTVERENRAAA

SEQ ID NO: 289679 - protein, 411 aa, unidentified
MRRVIGMDIHRTFAEVVFWEDGRLRWHGRVDMTRSGLEGFGRGLTKDDEVVVEATGNAMAVVRVLGPYVARVIVANPLQVKAIAHARIKTDKIDAGVLASLRAAEFLPEVWVPDAETERRRRLVARRNQVVRHRTRVKNEIHAILAAHLVPPCPHAELFNRPGRAWLAGQILPDDERAAIDRHLRELDRLGEDLAVLDRDIAVAVVDDPNVKRLLTIAGMNVTVAAGLVAAVGDIGRFSSPQKLVSYFGLNPRVRQSGLGLAQHGRISKIGRAHARALLVEAAWAAAKAPGPLHAFFVRIRARRGHQVAAVATARKMAVLVWHLLSKSTDYLWARPALVAHKLRALELQAGRPMQKGNRRGPAFAYNVKALRNQEMAIAEQAERAYEHFVGPWRPKPAKRRTGAATAAGSS

SEQ ID NO: 289680 - protein, 269 aa, unidentified
MSGTGKLLGTLSIPVCTEGYQRLLAWAMSYGELRRAGVEGTGTYGAGLTRILCKHGVEVLEINRPDRAARRFQGKSDPTDAESAARAVLSGKATAIPKAQSGAAESMRVVLVARRSAVKARTQAINQIKALLICAPQALRDRLWRNKPAECISGCLRLHERESHPLHSLSTTLRLLARRWLLLNREVTALDAMLERLTKQHAKRLRSRFGVGPQTAATLLAVSGDNPERLRNEAALAALCGVSPLSASSGKTIRHRLNRGGDRSANNAL

SEQ ID NO: 289681 - protein, 336 aa, unidentified
MFQLGIDVSKKTLDLCLLREGVKGRVKTRKLQNDINAVSAVIAWLSKQHCKPEDVHIIMEATGVYHESLAYGLHKAGGRISLANPHRAREFARGMGMLTKNDRVDAYMLACYGVLKAPEPWLPPPEEVRHLSALLRRRDALVADSTREKNRLEKYLATDTPSVIAESVEAMIGQLNAEIKRLDRLIRSHLNQHPELKKDFDLLTSIKSVGYQLGLNMLVILRSHDFATAEQVAAFLGVVPVEKYSGTSVRGCPKLSKIGPPEIRAKLYLASLCGLRFNPLMKAMYERLCLRGKGKMCAIGALMRKLVHWCYGVLKTQKPFDVGYLPSYARSACKAA

SEQ ID NO: 289682 - protein, 347 aa, unidentified
MTDVITTVGAIGIDLGDRDAYYVCLSEGGENVEEGRVAMTRVAFERTFGSFEPTRIAIEAGAQSRWVAQLLEEMGHEVIVANPRQVSLISANVSKNDPNDAELLARLARVDPSLLSPLEHRGDAEQRVLLAIRARAQLVKSRTALMHSVRGMVKCFGLRLPQAHSEDFVERVRQAVPAELLSQLEGLFRIVGELTKEILKYDELVEEIACKQYPAVQRLREVPGVGTLTALTFVTTLGDPGRFAKSRDAGAFLGLRPRQRQSGGQNPQLSITKAGDIYLRSLLVQSAHCVLRQHAPDTALKRWGLKLCERGGANAKKRAIVAVARKLAVLLHKLWVSGESFRPFPAR

SEQ ID NO: 289683 - protein, 340 aa, unidentified
MSELTTIGLDLAKHVFQVHGVDVEGTTVLRKQLRRGQVLGFFSRLPRCVVGLEACATAHYWARELRALGHEVRLMPAQYVKAYVKRNKNDAADAQAISEAVVRPTMRFVPAKTAEEQAALLLHRGRERLVRQRTGLVNALRGHLAEFGVIAPQGLRNVGKLIAIVRDESDARLPGLARSVLAVLAAQIEQLEAAVAALEKQLMAWHKSNAVSQRLATVPGIGPIIATAIAATVTEPNGFRSGREFAAWLGLVPRQHTTGGKTRLGGISKRGNRYLRRLLINGASANLLRSKATNADPWVIGLRRRRPSMVVAVALANKTARIAWAVMHRKENYQHMAIAA

SEQ ID NO: 289684 - protein, 414 aa, unidentified
MSHPLLVGVDPHRRTNTVCMMDREGEEACDRFTVQNNHPGTAAFVREVAQRAVEGDFDAIHIATEATGWYWWHFFQTLDQDPLLNQWPLTLYPFNPRLTASYKKTFVDLDHEDAIDAFVVADRLRIGRDLPAPFHYEDLYLPVRMLTRYRFHLVHQLAREKAYCLAVLYFKYSEYSRNDKKPFSHLFGATSRAVIQEFASIEDVVALPFEELVEFIDCKGKRRFPDPADNARKLLRVAHDSYPLPQAMHQPINLILSLSLRHITTLEGLKKRIDTAIAEGMQSIHHSLDTIPGFGPVFSGGIVTEIGDIARFDYNQAKVAKYAGLKWRKTQSAEFQAEETRLTRTGNRYLRYYLCEAANQVRRRAPEYAAYYDRKFHEVRKHQHKRAIVLTARKLVRLVVRLLTTNEPYRPRRL

SEQ ID NO: 289685 - protein, 357 aa, unidentified
MNKSKQLDFKGQDIFIGLDTHLKNWMVSIMVNESPFKTFSQDPRPETLRNYLAKNFPNANYHSAYEASFCGFKIHRDLLNLGIKNIVVNPADIPTTDKERKQKEDSRDSRKIAKQLSQKDLTAIYVPEIEIEGDRSFIRYRKTLTKEAARTKHRIKSQLYYFGIEIPAKFSEKSYWSKNFTSWLQEIDLPTESARMTLNGHLEMAEMLRKKQLSTNKEIKKLSEKKIYKENYNLLLSVPGIGCLTAMIILTEIGDITRFKNLDKLCSFIGLVPMTNSTGENEKTGDITVRKNKILRKALVESSWIAIRNDPALILAYQKLIKRMEPQKAIIRIAKKLVNRILYVLKNKKTYVQAIVK

SEQ ID NO: 289686 - protein, 318 aa, unidentified
MNTKTNQSVNVGVDTGKFQLDIYIRPLDIYFTVSNDEKGIKEAIKKIQQHSPGRIVIEATGRLEMPFIVACANANLPFVVANPIHIKRFAGAIGQRAKTDKLDAQLIAHYGEAIQPKLSQLKPETMQAMSDLVARRNQLLVMQTMEKNRLQILPKELAMTIKPILTVFKNQITKIENKIVALIESCPDYQAKNCILQSMKGIGKIASASIISNLPELGYMTNKQASALVGVAPMNRESGRYKGLRKIQGGRHQVRTVLYMAMMSAIQSNPVFKETYQRLVAAGKPKKVAIIACIRKMVVILNSMLRDGVMWEAPKAAN

SEQ ID NO: 289687 - protein, 402 aa, unidentified
MNCVGIDISKGKSMIAVMRPFGEVVVSPFEVRHTANELSELAGLLKNLDGETRVVMESTGNYHAPVAWLLHGAGFYVSVVNAMLVHDYGNNSLRRGKTDKKDAVKLANYGLDHWLTLPRYAPEEDTRLMLKTCYRQYQQYSKVQTMLKNNLISLLDTAFPDANRLFTSPPRADGSEKWVDFVATFWHCECVCGLSKKAFTAKYQKWYRKHGYNFSQDKALDIYASACGRFGVMPKTNTAKLLVEQAISQLQTTSAALAALKQEMQSLAASLPEYPVVMEMFGVGPTLGPQLIAEIGDVRRFHSKKALVAFAGIDAPPYQSGQIDVRSRSISKRGSASLRRTLFLVMGVLLQCAPMDEPVYQFMNKKRSEGKPYRVYMMASANKFLRIYYASVKAYLDSLEHD

SEQ ID NO: 289688 - protein, 350 aa, unidentified
MLIGVDYHPSFQTIAFFMEETGECGEQELNHSDGQAEKFYRDLKQRGICVRVGMEATGYSRWFERLLAELGFEVWMGDPAAIKAKRVKKQKYDREDARLLLRLMRENNFPQIWVPGPENRDLRQLLWHRHRLVQMRTRIMNQLQALAMNEGYRWKKKLFSEQGRAQLEKLALAPWASRRRQELLELLDRMNPTIEELTAAVEREARKRPEALRLMTHPGVGPLTALAYVLIIGTPMRFQRGKQIGTYVGMIPCEESSAGKQRLGHISKQGSSLLRFLLVEAAQAAARTQPDWRRRYMHLAMRRHRSIAKVAMGRRLAVRLYWMWRNGCEYSQSVEFGSYAGQLGTGHGVK

SEQ ID NO: 289689 - protein, 346 aa, unidentified
MEHYAGIDVSLELSSVCVVDALGKIVKEAKVSSEPEALVSFFEALGFAVKRIGLEAGPLSQWLHAGLKRAGFDAVLLETRHVKAALSAMTVKTDRKDARGLAQLIRMGWFRAVHAKSIGSQEVRALLVARKQLLGRLIDVELSIRGILRGFGLKVGPVTRKGFEARIRELVTGQTTLERIATAMLSARAALKTEYERLHKVVLSIVREDTVCRRLMTVPGVGPLVAVTYKSAMDDPNRIMKSKAVGALFGLTPKKYQSGEKDVTGGITRAGDEMVRTVLYEAANVLLARITRFSKLKRWGMDVAKRRGSKRAKVALARKIAVILHRMWVDGTTYRWTDAQLTAEQV

SEQ ID NO: 289690 - protein, 352 aa, unidentified
MIIIGVDYHPEFQQIALLDQDTGELQEKRLSHPGEAEKFYRALAVSQKVRVGMEASGHARWFERLLGELQFELWIGDAAAIQSQRGRKQKTDRQDAEHILKLMLKDDFPRIWVPSGENRDLRQLLWHRHRMVQARTRIMNQLQAVAINEGLRCKKSLWRTGRQQLALLRLAPWASRRRHDLLELLDRLNPTIAELSQAIEQEAAKCAEARRLMTHPGVGALTALAFVLIIGDTERFQCGKQVASYLGLVPLEKSSGNRRRLGHITKQGNSLLRFLLVEAAQVTVQSLPEWRSQYFHLLMRRGRKTAKVAMARRLGVDLYWMWREQRDYQSKSSVRTQDSPEQAMVCNRTPRN

SEQ ID NO: 289691 - protein, 343 aa, unidentified
MQIASIGIDLGKTTFHLVALGPAGQVLVRRKFSQKQLLTYTANLTSSLMGLEACSGAHFLGRALRAQGHDVRLIPAQFVKPFVKSNKNDFLDAEAIAEAVARQNMRFVPIKTDDQLDLQAIHRVRDRLIACRTSVINQLRAFLLERGMTFAKSPAKLKLAMPEILENADSNLTPRMRNLVADLWTEWKSLDQQIRASDLEVEQIATSDPACQRLRSIPGIGPLIATAIVAAIGNGAAFRKGREFAAFVGLVPRQYSTGGKARLMGISKRGNSYLRKLLIHGARAAVVRMKRERAPFGGWLNGLEQRAPRNVVVTATANKLARIAWAVLSSGDPYRPLTIATPA

SEQ ID NO: 289692 - protein, 357 aa, unidentified
MKILGCDLPAKQQTIAMVDRETGEFTEKTLSHEGNEVREFYAALEGPVVVGIEATGAMQWFLELLEELGIVCRVGHPAKIRAAETRKQKHDRRDARLMLELLIEDRFPEIWMPSIEERDLRTLLRDRHQWVKIRTRVQNTLQAMALNHALRRGRGLWTATGQKALQALSLPSYTSQRRDELLRLYGQLQRRIQELDGQVEKQVQQRPQALRLLTHPGVGPVTALATEVFLGDPSRFANGKNVASYIGMIPCEQTSGKRQRLGKLTKEGNSLLRYLWTEATIHAVRKDPELKRFYRRKLIQKGMGKARIAAAHKLGIRLWIMLRDQIDYKEFCRRGQQRQCGEAHAGMPNYNSGPALQ

SEQ ID NO: 289693 - protein, 350 aa, unidentified
MMIIGCDLHTRYQQIAMLDTETGEEVERRLEHESGEARAFYSALQGPVRVGIEATGHTHWFEAMLAELGHELWMGDAAKIRASVIRKQKTDARDAEHLLNLLRQDRFPQIWRPSPAERDLRQLVWHRQKLVWMRGAVKNQLHALAMGEGVCRKKKLFTAKGRKELEGLALGPWASYRRQELLRMFDELAAATAQLDLAVEQAAKNQPLAVRLMTHPGVGPVTSLAFVLIIGPVERFDRSKQVVSYLGLNPQEHSSGGKQRLGAISKQGNPMMRSLLVEAGHTAARLDPALKRMYQRLKFRRGASVAKVAVARKLAVRMYWMLRSTADYAQLVRMQGSPWATLVENSSSLG

SEQ ID NO: 289694 - protein, 394 aa, unidentified
MKLIGIDIGKNKHFFCVMDQQTGEIISQPVSFSNDKEGFDFLIQKINSYPKDSVLIGMEDTGHYHFALLKYLLNLQYTVALINPKTTDFNRKMQGGITKNDKLDTINICDVLDTPERKKQYRITKVNSFDLYEQKQLTRHHHNLKEEENVYKNRLQKCIDIVFPEFNKLFNSKYGTVYMNILKTFGSAENIANTDIRTIRKCFEIEGRGNRISLTPERLKECARSSIGISSSAEVIQIKHLTAQIELIEEQLTEIDKKIEEFSIQNNSPILSIPGISHFSGTSILAELGDISNYSKPSQIIKFAGVAPLHYESSQFNAQHTSITKKGSKYLRKTLYQIILPVIKHNPVFNKYYQLKISQGKGHRCAQGHCVRKLLRIIYHLLKTNQQFDPQLLR

SEQ ID NO: 289695 - protein, 514 aa, unidentified
MVSRRVQCGRITLWRVLVCRTARGRDWFQLSACVLFGDAVGTVFPLGRLVLPWTAGHRWAGKFSEIPMLFVMKPLPVLDPQAAAIDVGSESLHVSVAGDTPKVFGTFTVELEALREWFKGQGVRTVAMEATGVYWLYLYEVLEAAGLEVVVVNGRHVQNVPGRKTDMSDCQWLATLHAHGLLRGGFVPPADIRRLQDYQRLRADHIIGAAGQVQKIQQALERMNVKFHDVISDLTGVSGLKVVRAILRGEREPVRLLALCDGQIQRKKSAAVKESLRGCWKDEQLFALRQALELWETFQQKIADCDRELERLLHQLAGPPPSQGGPGGGEPRLAPVKDAGKNAPAIERCQQLLARICGGRDATQIPGLSVYLVLQLISEVGTDMTRWPTEKHFTSWLGLAGGRKQSGKRKGSIKAHRNRAGRMFCAAARALARSMDKALGGFYRRLRGRIGGLAANVALARKLAQLFYRLLRYGMEYVEKGLKAYEVKVWETEARLLRKLAKNQGFILMPATPK

SEQ ID NO: 289696 - protein, 404 aa, unidentified
MKGPIVSIDVSKGKSDYQAFKDLNVKYTGSRSIKHNKEGFDEKVNLVREMEKKLETEVCVVYEATGVYHRVLKKVLEDNNIKQFIINPLLSAKTRKNDSLRSPKTDKLDPKSIAKTYYSHSLHNSHKQETIYHELRELSRYYEDILVHIRKDKVAFRAQLDIVFPGYDTLYDDLYGPVALAIIEKYPHPEMLQKKKINTVSKVIQSKTCHRQAVSDTMADKAIEYSKTIYSGCDKDDIEVLILQRFIKKLNEDMAEAERTIGEMIKLAQELPDFNIIKSIPGIGDNLAARIIAELGDMTRFKKKNELVAFAGLDPRISESGQNDGDHMHITKKGNKRLRCLLYLAVTCSIRLKRDDNSIKDFYIKKKQQSNPMCSKAAKTACASKLVRIIYSMCKTGELYQYNK

SEQ ID NO: 289697 - protein, 350 aa, unidentified
MEYIAFDSHKRYTFASVAEHTGAILSEGRIAHERGAFVQFLSAWKPGTLVALETIGNWYWIVDEIEAAGMVPQLVHARRAKMMLASVNKTDKLDCHGLNRLQRTGTLPTVWIPPAELRDLRDLPRTRMVLSKERTRLKNRIHATLAKYGITIDGASDAFGKRGQEELQMSLSLLPPHSRFSIERLLEMLELVQRQIDLFELRMKETFATNRQLEILQTLPGVGHILSVVILLEAGDIGRFPSASRFAAYSGTTPRVCSSGGKTRYGQLRPDVNRYLKWAFIEAANVICLTHRLRPFRHVSRLYLRIRQRKGHQKAVGAVARHLAEATYWILNKEEEYQEPRRKTVSSTKG

SEQ ID NO: 289698 - protein, 447 aa, unidentified
MRQKKPSKKGSVKLPKHLQHLNQHAAGIDVGSRSHFVAVPEGADEKPVQEFSTFTDDLERLAKWLRSCGVTAVAMESTGIYWIPVFELLEHHGFEVRLVNARHVKNVPGRKSDVLDCQWLQQLHTYGLLRGAFRPTDQICTLRAYVRQRATLVRSSASHIQRMQKALAQMNVQLHNVVTDITGVTGMGIIKAIIAGERNPKVLAGLRDKRCKNTEETIARSLHGNYRAEHLFSLQQAVELYEFYLQKISDCDQQILAQLKSFDATDGGDTGSKPPRSIEEALQQMSGADLSSINGINTNTALKIIAEIGTDMSRWKTVKHFTSWLGLCPGSKISGGKILSSATKPVANRAAAALRMAALTLFNSKSALGAYLRRQRSRLGAPKAITATAHKLARLVYSMLKHGTAFVDAGQEQYEERYRSRVVQNLKRRAQEMGFTLVQIQETPQTV

SEQ ID NO: 289699 - protein, 336 aa, unidentified
MEFNFFIGIDVSKDTLDICLLGAENSETVNHQQVSNNDSGIAAMLRWLEEHNGFSIENSLFCLEHTGMYNYPLLQFFSKQGASVWVENPIQIKKSLGLQRGKNDKVDAIRIAQYAFRLRDQAKLWRPAREIIDRLKYLTALRERLVETRKRLLTPVEELFTIGNDAMAKVLEKAMRKTINALDKDLEAIETHMKDVIDKDDDLKNLYELVTSVVGIGFVTAVNLIVCTNEFKLFSSHRQFACYSGIAPFEYRSGSSIRGRTKVSHMANKKMKRYLHMASLTGIKLDEGLKSYYNRKVEEGKNKMSVLNAIRNKLVARVFAVVNRGFAYQKNYLVLS

SEQ ID NO: 289700 - protein, 378 aa, unidentified
MKAARFTADEIERVAYLTSKGYLPVAVDVASRVFQVCYYDLGAKHIRNYQLSRVKFFEFIDDTQTPRKLIGIEACGSCNYLCRYIEEHNHKCHILPAQKVKAFLHLDKTDRIDALGILKALITPSMQHIPARSQENQYLLNLITVREQLNKQFVQTVNAAHAFLYESGVVAGTVSVKSANKVTEALKALGNTETEKEHSEDDCSYSHLNCISESLLSNIESLQTKIKEINTHLLSYASNNEICSNLQTVPGIGKLSAVALYAAMGDPERFSSSRAFAAFIGVAPVTTGTGGKTTVLGIRKSGIQSIKKMLYMCAMVYLSQAMKNGTESSWLKLRLNQNRSKKIIICAIMNRLARIAYAIAKSGQPFDETKCNMIKKLR

SEQ ID NO: 289701 - protein, 460 aa, unidentified
MNPKRSKSRNGGKMPMVHPNAAAIDVGATMHMAAVRADRAPEPVRSFGTFTADLHRLVDWFTECGVETVVMESTSVYWIPIFELLDARGFTVFLVNARDAKHVPGRKTDVSDAQWLQRLHSFGLLRASFRPKGQIAELRAYVRQRERLLEYAASHIQHMQKALTEMNLQLHHVVADITGATGLRIIRAILAGERDPEALACLRHYSCHSSAETIAKALTGSYRAEHLFALEQALALYDAYHEKASACDARIEAVLKDLIVHRGHGHGSAPRASRRRNRTNQANALAFDVREALFALLGKDITTIGGLGPYLSLKLIAECGDDLSSWPSAKHFTSWLGLAPSNKVSGGKMLSSRTRRSGGRAAALLRLAAVTVGRTDTALGAFYRRLSARIGKAKAVTATARKIAVLFYNAVRYGMDYVDPGASSYETRYRTRVINNLHRRAKAFGFVLQPLEPKVGAAVS

SEQ ID NO: 289702 - protein, 343 aa, unidentified
MKITTVGIDLAKNVFQVHGVDERGKAVLNKQLKRDQVARFFANLAPCLIGMEACGSAHHWARKLSSFGHTVKLISPQFVKPYVKTNKNDCADAEAICEAVSRPNMRFVPIKTPEQQGILALHRARQSFVKARTAQANQIRGLLAEFGIAIPQGISHIAKRLPTILDDAENGLPGPFRLLLQRLRENLKEMDRQAGELEREIQVWHRHNETSRKLAAIPGIGPITASALAASVGDAKSFNNGRQMAAWLGLVPRQYSTGGKPRMLGISKRGDTYLRTLLIHGARAVIRVCEHKTKTDSWLKDLLARRNKNVAAVALANKNARIAWALLAHETDYRSDYRRALAQ

SEQ ID NO: 289703 - protein, 370 aa, unidentified
MTTAAAPHSSLFMALELSKRNWKLAFSNGEKIRQVNIPAGDYAGVQQAVALAKTKLGLPTAAPVRSVYEAGRDGFWIHRRLVELGVANLVVDAASIEVDRRARRAKTDRLDAEKLVRMLMRYHGGETTVWRVVRVPSVEAEDARRLHRELERLKKERTAHRARLLSLITLHGVAGKLSRRWLKCPVPQWPGVNVPAGVAAELERERQRLELVAAQIVELEKQQAELLAKPQTATQQVAAKLARVRAVGPVSAWLLAHEFFGWRQLTTRRQVGALAGLTGTPYDSGQSRRDQGISKAGNKRVRWLMIELAWAWLRLQPDSALTKWFWERFGHGNARQRRVGIVALARKLLVALWQYVERGEAPAGAVLKAA

SEQ ID NO: 289704 - protein, 416 aa, unidentified
MNAAGIDVSSRKSTVSVLRPFGEVVRLPFDIVHSAEGFASLIRQLKSIEGETRIVMEHTGRYYEPVAQILHEAGFYVSTANPLLIREYGGNSLRRVKTDKADAMKIARYALDNWSELRDYTPMDTIRYDLKTLNRQFQLASKQKTAASNNLIALLEQSFPGVRKCFDSPVRKDGTQKWVDFVYTFWHADCVRKNSLNAFTERYRKWCKRHGYFFKQSNAAEVYELARSVITLVPKGPVAKVLVQQAASQLTSISRSVETYRAEMNRLASMLPEYPVVMGLYGVGESFGPQLMAEIGDVRRFDRKQALVAFAGIDPMPNQSGEKNVRSNKSSKRGSPYLRKTLFSIMMCLLQSAPADEPVFQFLDRKRSEGKPYYVYMTAGANKFLRRYYAKVRDYLATLDNFPPVDMDSTGLNHLN

SEQ ID NO: 289705 - protein, 339 aa, unidentified
MNSMAVGVDVAKQVFQVHYVDRETGGIVNKAIKRAKFLEFFANRAACLIGMEACGGAHHWARQLTQMGHEVRLMPAEFVKAFNIRNKNDAADARAIWLAVQQPGKPVAVKTEMQQAMVALHRMREQLVKFRTMQVNGLRGLLTEYGEVMSKGRAKLDKEIPAVLGRIAERLPAALIDTLREQWNGLAKLDEQIAEIERRMREWKKEDKAVKAISEIPGVGLLTATAAVAMMGDPKAFSSGREFAAWAGLVPKQTGSGGKVNLHGISKRGDMYLRTLLIHGARSVLTHAKEPSEWIEQMKKRRPPNVVIVALANKMARTIWAVLAHDRPYQKGYVSVKPA

SEQ ID NO: 289706 - protein, 358 aa, unidentified
MKQYRTTTRTAGMDLGDRYSEVCVVDGAGEVIERTRLQTTEKGLRHYFEGRVSMRAVIEVGTHSPWVSRLLEELGHEVLVANPRKVRLIYGNERKSDHLDSESLARLGRLDPVLLSPIRHRGSEAQADLALVRTRAVLVEARTKLINHVRGTVKSSGHRLGSCSSASFGRRFEEVPEGLRTGLEPVFRVLAKITETIREYERWIDDRFEQYSEASAMVTAPGVGSLTALAFVTTLESPTRFARSRQVGAYVGLVQRRNQSGASDPQGHITKAGDPYLRKLLVGSAQYILGPFGPDSALKRWGLALAARGGKSAKKRAVVAVARKLAVLLHQLWMTGECYEPFPEPPRRRVGVEAKART

SEQ ID NO: 289707 - protein, 352 aa, unidentified
MAALAELVDHVIGVDPDRDRVTAAVVSVTTQGELASATFPATRRGYGQALRWAKTLTVDERRAWAIESTGSYGAGLAATLAEKGEFVIEFDHPATRASKDGAKSDSLDAVRAARETLGRKTWATPRSRGLREGLRTLIVARDSAKLARVAAINVLKALIVTAPVDLREDLRGHTFGQLVDRCMRLRPDTATDPEHAATKLSLRSTATRIKQLTTECRDLELAMLPLVREICPALLDESGIGTLVAAQILISWSHAGRCRDEAAFARLGGVAPLEATSGQNQTRHRLSRGGDRQLNRALHTAILARAKVHPETRAYLARRVRDGKTKREAMRCLKRYYARHLFRLLESTPAPS

SEQ ID NO: 289708 - protein, 353 aa, unidentified
MMVIGVDPHKQSHTAVAADELGRKKAQRTVRARREGHRELIAWAREIVPAGRRWAVEDVRHVAGGLIRELLAAGEQVVFVPPKLMAGERRGGRERGKSDPIDALAIARLALREDADLPAACLDEQVLEVRRLSDYRDDLVAERTRVVNRLRWMVHDLAPELAPAPRSLGSGRARAKLEAGLRALPAGAGRAVALSQLARITALSAEITGLEQPLAPLVTVLVPELLATRGVAVITAAKIVGETGDIRRFRSPAAYARHNGTAPVPASSGTGPDGPQRLNRGGNRQLNAALHRIALVQARCHPRAAALLERRGQDKHETRKASLRVLKRHLSDVLYRALNADAWRLDKPAPHAA

SEQ ID NO: 289709 - protein, 415 aa, unidentified
MKRTQNTRGYERYFAIDTHREYHLVGGQNEDQEWVVNPRRVRIEKFPEWAQKNFRAGDIVILETTTNVWDTYDIVAPLAGRVLVANAAAVGEIAGARVKTDTKDIERLLKLLFGGIVPEVWVPPVQVRELRAFISYRNRLVKMATMIRNRLQSLLHKHSLVLPEEGILNQAWWDAQASISALEKMQIRQELGLLDEIKKLQSAVNEELEKQSTGELWGKQALQLMQLPGVGVIVAMTVLSAVGDISRFEDAKQLVGYAGLGAGVHDSGKTHKEKHITKKGRKELRWIMVEAAWRAVRMSPYWKEQYEKHLRRVRKPNQAIVVIARKLLVAIWHVLTKEETDIHASEDDLAYKMLLLSWSLNDNVRMGLNYKQFAKYALMKLGVEKDITRFVRKDVPRRLSPREEVLARMVELGIA

SEQ ID NO: 289710 - protein, 337 aa, unidentified
MKVFYLGVDVSKKKLDLCLRSNGKDILYDVIPNDLSSIKSWLTRTFEKFFLSEDSLVVCAEHTGQYTYPLVCATKSIGVYLCLEDAAKIKYCHGIPRGKNDKIDACRIAMYAERYNDCLQPYTASELIIQKLKNLSTERSMLVADRAKYQSQLKDQVDYMEHSIYIAKCNRVEGIINTFTDYIAQIDLEIKELINQAPVIAHQMDLLMSVDGVGERVALKMIMETDAFTSFTDPRKFCCHAGVVPFVYVSGSSQRSKNRVSNRADKSIKHLLHMAALSVSQVKNSPLKKYYDRKVEEGKNKMSVLNAVRAKLVTIMFAVIRTDAFFREIIKIRLRNP

SEQ ID NO: 289711 - protein, 373 aa, unidentified
MKIIGCDFHPSFQQIAMFDSETGEITELRLSHANAEATKFYESLTGPAVVGVEASGNMRWFQRLLARLGHTLLIGDATKMRAGNPRKQKTDKRDARYILDTLLEKRFPSIWVPSMEEVDLRQLLKHRHTLVQMRTRVKNQLQHIAINEGFQKKRKLWTVEGLGFLRNLALGPWTGRRRDDLLQLLEQLHGQIQEMNQAAEKEAAKQPLVQLLMTHPGVGPILGLATVLTLGTVQRFERSKNATSYVGLIPSEDSSGERRRLGGISKQGNSFMRFLLVQAGMVAARHEPELGRFYQRLVHKKHHGVAKVAVARKLLVRLYWMLRTNTPYPEVVVRTQGSSSHSVAKKAKTERLSGRPASRKKGKQNKQPGKNQE

SEQ ID NO: 289712 - protein, 346 aa, unidentified
MHSVGIDLHRKRSHIAVIDEEGEQLLSRRIINDPQTFLALLEGVGECRVALEATYGWEWLADVLQDAGYELHLAHPMRTKAIASARVKTDAVDARTLAHLLRADLLPEAYIAPRELRDLRDLLRHRVALTRMRSALKNRVSAVLAKNGIERPYSDLFGPAGLRFLAELELREGPRRRLDSTLALIGDFTREIDATSREIDTRAHDDPYVPVLCQIRGVGRYIAMLVIAEVGDIARFATARRLCSWAGLTPTVRSSDGKARLGHISGQGSPPLRWALVEAAQHAASGGGPLRDSYEQIAKRRGKQIAKVAIARRILTLCFYGLRDGEIRCLAPRATARAVRTPAVSA

SEQ ID NO: 289713 - protein, 354 aa, unidentified
MPGKPDSKIAVIGIDIGKNSFHLVGQNDRGALVLRQKWSRGQVEARLANLPPCLIGMEACVGAHHLSRKLKALGHDARLMPAKYVRPYSKGQKNDFKDAEAIAEAVQRPTMKFVATKTADQLDLQALHRVRERLVSQRTGIVNQIRAFLLERGIAVRQGLRFLRIELPRILAAPPEVLSPRMVHTIEDLAGDWRWLDERIERLSEEVEALARKDAGCERLMSVPGIGPIISTATVAAIGTGDGFSKGRDFAAWLGLVPKQISTGDRTILGKISKRGNRYLRVLFVQAARVVLVWPQSWERHGLKPWIEAARKRLHHNVLAIALANKLARIAWAVLARGRNFEARRTGDAVAQPA

SEQ ID NO: 289714 - protein, 350 aa, unidentified
MRMIGCDYHPGFQQIALVDTETGELQERRLEHPEEAEKFYRELAAQGMKARVGMEASGHARWFERLLAELQFELWIGDAAEIRTRRVRKQKTDRQDAQLILKLMLKDDFPQIWVPSWENRDLRQLLWHRHRMVQARTRIMNQLQAVALNEGLRCKKRLWREAGREQLEAFPLAPWASRRRSDLLELLDRLSPTIAELTQTIEQEAEKCPAAQRLRTHPGVGSLTALAFVLIIGSAERFQCGKQIASYLGLVPSEDSSGDRRRLGHISKQGNALLRFLLVEAAQVTVRSLPEWRSKYFHLAMRRGRKIAKVAMARKLAIQLFWMMRKEQDYEQVEGFGPHAGQPENRRGVQ

SEQ ID NO: 289715 - protein, 352 aa, unidentified
MIIIGVDFHPEFQQIAWVDTDSGEFQEKRLAHREEAENFYRALAGHKVRLGMEASGHARWFERLVAELQFELWIGDAAEIRTRRVRKQKTDRQDAQLILRLLVEDRFPKIWVPSWENRDLRQLLWHRHRMVQARTRIMNQLQAVALNEGLRCKKRLWREHGRQQLESFRLAPWASRRRRDLLELLDRLNPTIAELSQAIEQEVEKCPEAQRLRTHPGVGALTALAFVLIIGEADRFQCGKQVASYLGLVPLEDSSGNRRRLGHITKQGSSMMRFLLVEAAQVTVRSVPEWRSKYLHLMMRRGRKIAKVAMARKLAVRLYWMMRQGWDYQQWSKFGSHAGQPGHRDGVRSNTE

SEQ ID NO: 289716 - protein, 373 aa, unidentified
MPKYSTAFGMDVHLRSTTVCALDADTGEAVTRRFPGNPWGEIAGWMDRFPGPSLAAYESGYLGFAPQRELAGLGVECVVAAVSKIPRSAADSASKNDRNDAARMAKAILAHDISPVWIPSPEVEGIRDLAGAYDGATARLATAKQRLLAFLARRGFVYGGTTPAGNPRKYWTYDFLRWLDKVRPEDDGGVRALAALRNEVEAAAEARADLLSEYRAAVDASPIAAEVAALQSIKGCAFALAAAFSAEVGDFTRFRSGRQVTAYFGLAPSQRSSGDSVRLGGISGAGNALVRKLAVEGSWCYAAARHQPKLMPRDTGVPLEIRMHGRKGSERLLRRREEMLARGVPAAKANAATAAELVRWLWALGMMCREGAE

SEQ ID NO: 289717 - protein, 416 aa, unidentified
MPSQPSDFAAVIGLDWADRKHDICLLETGQEIPEYFVLEHDPVAIDAWATKLRRRFDGRPIAVCVELARGPIVSALLEYDFFVIFPINPAMLAKYRRAFSPSRAKDDPKDAFLALDLFRHHFDRLAPLRRERPAMRALQRLVQARRTLVDDRCRLTCALKEYFPQVLRWFRDKHTDVFVDFVTRWPTLDAAKRAHRDTLVEFFHAHNVRYGKTTEHRVGAIKAARALTSDPAVIAPNQLMAESLLAQISALSKAVSRFDTEIAARAAELPDYKLFATLPGAGAALAPRLLAAFGENRDRFPDAAAVQKCTGIAPVVERSGNKSWTHWRFIASGFLRQTFVEWAGETVPHSFWAKAFYESRRAKGVSHQAILRALAFKWIRILWRCWHDRQPYDEARYLMALQKRHSPILALAVQSP

SEQ ID NO: 289718 - protein, 568 aa, unidentified
MLPRPSANPQAPPPIGVGIDTSRYGHYAVFLADDLQPADAELPFAESGPGYARLRQRLERLAQKHTPCAFAVRVDAAGQYADNLLAFLHELAQRGPWPLTVSCGDPQRNKSYRAAIFGSQKSDPVEARAAARYALTERPRSDPPLSLAWRTLRQAASRLQAVVRQRTRLINQLHHLVAVTFPELGLLTRDLSAGWVLELLHRYPTARRLAAAGDADLDAIAYLPLARHAPLLQQAKSSVASLYGPLAEELLRDQVRQLRDAGARQKRLEKLLVEAYHALPQDNHLATIPGIGDVTAAILTAFILDIDRFATPGHLVAYFGALPMEVSSGVDRQGQPRGPRRYVMSRRGNDLVRRYLWLAALSATRCNPAVRALVARVSAKHPQQKAVALGHAMRKLLHLAWALWKTGKPFDPAHYPWQAPAGSDNPLSLEEEAAGRKPDAPAGSAVTATSPAIVGDGPTRGEGLVVDFGHLKRQLPLERVLDQLGLLGRLRGMGAQRRGACPLHRGDGRGRTLSVNLATNVFHCFDKACGKKGDIIDLWSSLHGLSLREAALDLVRTFHLEPTAAGTE

SEQ ID NO: 289719 - protein, 406 aa, unidentified
MNRVKKTAVKKIHVKTARFAGIQFRPWHSNTPRVTNSIKRCPQDTPTLNAAMKYYTSTTEFNCGIDLHARQMYVCVMDRQGKKLVHTNVKDNDFAYFLKLIKPYQHSLTVCCECMFGWYWLADACQAAGLTFVLAHALYVRAIHGGKNKNDRVDSEKLTHLLRSNLIPPAYVYPTQMRPLRALLRQRIFYVWRRSELLARIHCHQLAHNRIPVKQSRWDRDPWEEELLKAEVDPLRQLALSNDLAMIRHFDRQIYEVEKALQRQTKQVAAREYALLQTVPGIGEHLGLTILYEIGDIERFPTVKDFLSYSRLVKGTVASAGKIKGLRGAKLGNPYLRWAFGEAAVIAKRDHFRIRPLAQRLEAQMEGNKFKANTVLAIKLARCVYFMLKNQTVFDPDRLVAALARN

SEQ ID NO: 289720 - protein, 370 aa, unidentified
MKKHSTTPKSPKQTSACKGGPITIGLDLGDKTSRYCVLGANGEVMSEGSVATTRKAMAEKFAKMRRCRVAMEVGTHSPWLNRWLSSLGFEVIVANARQVQLISASSRKNDRLDARLLARLARVDPQLLRPIRHRSETAQADLMRIRVRAALVEARTRLVNAARGFAKAMGERLPACDTDSMGVERMESLPEGLRDTLKPLLEQVESLTEKIKESDAKIEQIARTQYPETELLRQVSGVGTLIALTFVLTLEDRERFRKSRDVGCYVGLRPKQSESGQSQPQLRISKEGDVYLRTLLVQAAHCILSRRGPDTDLKRWGLKLASRGGKNAKKRAVVAVARKLAVLLHRLWVCGEVYEPLRNSQASGSSKKAA

SEQ ID NO: 289721 - protein, 350 aa, unidentified
MDTTVAPLASIGVDIGKEVFHLVGFGTDGKIAFRRKIKRLALIETFKKLPPCVVGMEACLSAHFVSRALRKLGHEPRIIPAIYVKPFVKGQKNDYNDAEAIAEAALRPNLRTVREKSQEQLDLQACHRVRSRLVSRRTATINQIRAFLIEQGIAVRTGVAALRNSLFDILKNREDEISPRMSELIVGLYEDWLWLDERIETITKEIEDISQREGNCLRLMSVPGVGPLISTAVVAAIGTGEAFDRGRDFGAWLGLVPRQYSTGGRSILGGISKRGSRYLRTLFIQAAKVLLMRPQNWPKFSFGPWLANAAPRMHRNKLAAALANKLARIAWSVLSTGKAFDTHKLEIEAV

SEQ ID NO: 289722 - protein, 350 aa, unidentified
MPRKFDTAVVTIGIDPGKNTLHLVGLDARGEIVLREKVARTKIVSRLANVPPCLIGIEAGMGTHYVTRELLALDHDVRQVPPVYAKPFWQTHKNDFRDAHAVAEAVQRPTTRCVPPKTDEQLDLQALHRVRYRLVGQRTAIINQIRCFLLEHGITVRQRLHWLRHALPDILAQRIDVLSPRMVRILEDLAQDWRRLDDRIEAVTDEIDALSKNTEPCRHLMTIPGIGPIISSAVVAAIGNGTAFACGRDFAAWLGLVPKQISTGDRTILGRITKRGNRYLRMLFLQAARVVLLRPKNWMKHGFGPWLAAAAQRLHHNVLATALANKLARIAWSVLVQQREYEARLSVAAI

SEQ ID NO: 289723 - protein, 355 aa, unidentified
MKYYTSTTEFNCGIDLHARQMYVCVMDRQGKKLVHTNVKDNDFAYFLKLIEPYKHSLTVCCECMFGWYWLADACQGAGLNFVLAHALYVRAIHGGKNKNDRIDSEKLTHLLRSNLIPPAYVYPAQQRPLRALLRQRIFYVWRRAQLLARIHCHQLAHNRIPAKQSRWTRDEWEEQLLKAEIHPLRQLALSNDLAMIRHFDHQIFEVEKELYRQTKQVAGREYALLQTAPGIGENLGLTILYEIGDIHRFPTVKDFLSYCRLVKGTVASAGKIKGLRGAKLGNPYLRWAFGEAAIIAKRDHFRIRPLAQQLEARMQGNKFKANTVVAIKLARAVYFMLKNQTVFDPDRLVSALSRN

SEQ ID NO: 289724 - protein, 439 aa, unidentified
MPNPSLPVLDPTAAAIDVGSEQLHVSIAGGPPKVFGTTTGELHSLRDYLLAQGVRSVAMEATGIYWLCPYEVLEKAGLQVVVVNGKYVKNLPGRKTDLSDCQWQATLHAHGLLKPGFVPPEHIRRLQDYLRLRADHIVMAGSHEQHMQKALERMNLKIHDVISDLTGVSGLKMVQAIVAGERNPVALLALCDPQIQKNKAGRLRAALEGSWKAEHLFALRQAYELWQFYQQKIVECDQAIEAVLRELAGPEDPKNPAPPPIKRGGVNAPQIAGLHGMLWRLCGAKDPTQLPGIADYVLLQLLSEVGTDLEKNWKTEKHFTAWLGLAPGSRNSGKRRASQRRSRNRAGRLFCVVARSVGRSVDKALGGFYRRLKGRKGGLVANLALARKMAELFWRLMVHGISYVEQGLKKYEEKVAHTEQRLLQKLARKYNLVLQPKVP

SEQ ID NO: 289725 - protein, 341 aa, unidentified
MKYRLISIDLAKNVFQIAVFDRQNRPVSNCQVRRNRLLDTLRQYAPTTVVMEACYSSNYWGRAIEKLGHTVKLVPARMVKAMLVGNKNDANDAIAIAEASQRPKIHFVAVKTIEQQDIQSLQRIRSQFVKQRTATVNQLRGLLAEYGVVTEPSSACLIGAIPTILEDPNNELSHVTRSFVLKLWEHYKQLSEEIDALTQQLISCARKHNDYELLSSIPGVGPLVASGIIGSINSVGEFKNGRQLSAWLGLTPSQYSSGDKNYLGKITKRGNRDLRKLLIQGARAVINWCERKSDPLSLWLQTLKPKMHVCKLVVALANKLARIIWAVLVKRAPYNPHLACA

SEQ ID NO: 289726 - protein, 390 aa, unidentified
MQALHPRPDEHAAVRTDLKAIFVSLELSRSTWVITSLSPGGGEKMSKHAVPSGDIPALLARLSQLKEKARARTGQVFPIIVIQEAGLDGFWIHRVLQQEGIESYVVDPASIATSRRRRRAKTDKIDGEALVRALLAYKRGEPRVCAMVQAPTPHEEDRRRISRERETLTAERVQHVNRIKGLLFAQGISDYEPLHRNRRERLAELITGDGRPLPECLKAQISRELDRLELLIEQIKAVEAERDAVLAQAQASPGVPAPAAQLLALRGIGPEAAATLWSEGLFRTFNNRKQVAAYAGLAPTPWQSGSVHRDQGVSKAGNPRLRTIMIQIAWLWLRNQPQSALALWYRARIKRRGGRLGKTMIVALARRLLVALWKYATAGVLIEGAILKPA

SEQ ID NO: 289727 - protein, 484 aa, unidentified
MKAANRSRVPQTAAKRSRAATGPTRPAKALPILHPHAAGIDVGATEHFVCVPADAVGANESAVRSFGAFSGELDQLVEWLLTCKVTTVAMESTGVYWIPLFQKLEAAGLEVVLVNARHLKQVPGRKTDLKDCQWIQRLHSYGLLNGSFRPEDIICRLRTFMRHRANLIDACSQQVLHMQRALDQMNVHLHHVISDLDGETGLRIVDAILAGQRDSKALAQLRDPRVRKSTVAEMEAALEGDWRAEHLWVLQQAREAYRFFHNQIAALDQQVEALLPQIVTAPPALPESERPQNPQAAPDARRPRKKQQRKGNAPAIDFTAELTRICGVDLTHVVGFNLLSVLILISEIGVDMSPWRNAKAFCSWLGLCPGNKISGGKVLSTRTARVSNRAATLLRTLATAVGRSDTWLGSFHRRMKSRLGPAAANTATAHKLACLIYHLLKYREAYIEVDRLLYEERLQRYRVAKLKKLAVELGFDLVETKQAA

SEQ ID NO: 289728 - protein, 347 aa, unidentified
MNITTIGFDLAKNVFQVHGVNEHSKAVLRKTLKRAEVMSFFAKLQPCLIGMEACGSAHFWARKLGELGHMVKLMAPQFVKPYVKTNKNDARDAEAICEAVARPNMRFVPLKTVEQQGLLALHRARQGFVAARTGQANQIRGLLAEFGIVIPKGIGNLERRMPEILEDAENGLRATSRELFNRLFGHFRVLDRQVSELELQIKAWHLESTESLRLEAIPGIGPITASALVASIGDARTFKNGRQLAAWLGLVPRQDSSGGKERLLRISKRGDTYLRTLLIHGARSVLLRLKCHAEQAEGWLARLARRRNPNIAAVALANKNARIVWALLAHERDYQAGYVSARSEAAA

SEQ ID NO: 289729 - protein, 331 aa, unidentified
MDNSLYFVGADIALKKFDAAIRLDGNRYKHKVFANTPEGFTAFHAWLQGFGSHFHILMEATNVYHEDLADYLLVQGLTVSVINPRCMPNFAKSTNMRSKTDKVDARLLADYAYCNAARLRKYAPLATNYRTLKRLMRQLTHLKKIIAKEQVRIQMMMDALCVEISQEIIAGTKALAKELEKKIKELVKEDKVLSRNAQLLQSIPAVGWMSAMYLLSHLGDGSRFRNSKAAATYMGLTPIVKQSGDSLHIVSGISKMGPRDIRDVLYAPAMSYAFGPWKERVYAPFVQRLTANGKAPKEVIVALMRKLVSIAQAVLQHQRPFDSAILVGKAA

SEQ ID NO: 289730 - protein, 431 aa, unidentified
MLGGNQEKLMSQNQPEIQYAAFVSIDWADQKHVWSLQEANSSTREHGEVGHMPEAIEAWIAQMSQRFAGRPIAVAVEQSRGALVFMLSKYEQLHIFPVPPAMTANLRKAFYSSGAKTDPADTDLLQDVLQMHREKLRRLSPDTEATRLIQNLVAERRKLVDEKTAQSNRLEAHLKIYFPQIPQWFGDVDSPLVCALLERWSTLEALQKARPDTLRSFFRKHHCRKEELIESRIKAIGEAMPALKDRAVVEAQLAVVKVLVQVIQVLHQGIEDFNRQIQEAAEAHPDFFIFESLPGAGAVMAPRLLAAFGSQRERYRNAAEVQTSSGIAPVTESSGKSSWIHFRFACSKFVRQSFHEWAALSITQSQWARAYYELQCRRGKRHHAAVRALAFKWIRIIFRCWKERVAYDEKVYLAALAQHNSPLLAATKIAL

SEQ ID NO: 289731 - protein, 343 aa, unidentified
MDYFAGLDVSVKDTSVCIVDDTGKIAREVKVASEPAALLAVLTGSSYRFKRIGLEAGPLSQWLFSALAEAGLPVICVETRHMRAVLKARINKTDRNDARGIAQMIRVGLYRPVHVKTLRSQKLRMLLTHRKLLQAKVIAVENDLRATLRNFGLKVGVVGTVKFEARIKELVGNFPDLAALVEPLLVVRRVLREQIAILHRRVVAVVRDDEVCRRLMTVPGVGPVVALTYRATVDVPARFRKSKSVGAVFGLTPARDQSGERDHPGAISRCGDEMMRTTLYEAAQVMLLRSAKWSWLKAWAMKIAKHRGTKKAIVALARRLAVIMHRIWTDGTEFRWTREAAAA

SEQ ID NO: 289732 - protein, 392 aa, unidentified
MQKLNDLSRSLIPLEPDGTLIAVVEMSLSSWLVAGIVPGVERQPLKKLAVDESALLKLLHRWREEAEKAGQRIKRITVAFEAGRDGFWLARWLTARNVEAYVIHSSSVAVSREHRRAKTDRLDTELLKRSFLGWLRGERDHCKIVAIPTIKDEDAKRPSRERESLVGEQNRIINRMKATLIRLGIRGFNPKLKKAAERLEGLRTPEGEPIPPNTLAELHRDMVRRRLVNDQIRQIEDDRLERLEQTLEDGPHAMVRLLARVIGVGIETADMLVQEVLSRSIRDRRAVARYAGLTGAPDESGRKRREKGLARSGNARVRRGMIQLAWRFLMFQKDSALAQWFRARTENARGTRKTMIVALARKLLIALWRLVREGVVPEGIVLRPGTMKDGGR

SEQ ID NO: 289733 - protein, 416 aa, unidentified
MEVLYPRCAGLDVHKDTVVACVRVAGEGKAQTEVHTFDTTTPGLLALADWLGERSCTHVAMEATGVYWKPVWHVLSDGDLTLILANAAHVKNVPGRKTDVADATWLADLLAHGLIRPSFVPEPETQAMRALLRTRKQLVREQAGHIQRIQKTLEDANLKLASVLTNIMGLSGRAILDALINGQTDPDHLLTLVDRRVKTPPEKLRAALQGRLTDRHRFLLRLHLRQIDALAGAMAEIDQEVDHDLDPFRDAVRLLSSIPGVSELTAQVIVSEIGIDMSRFPTAGHLISWAGLCPRNDESAGKRRSNRLRKGAPWLKTTLVQCAWAGARKKASYLNAQFQRLRYRRGPKKAICAVAASILTAAYHMLRDGTFYRDLGPDHFQTAPPQAQAQRLASKIAKLGFICTITEDQTVESVSV

SEQ ID NO: 289734 - protein, 341 aa, unidentified
MNIKRIGIDLAKQVFQIHGVDGQEKVVLRKQLRRAQLLDYFKKLPPCLIGMEACGSAHYWARELQKLGHTVKLMAPQFVKPYVKSNKNDANDAEAICEAVARPTMRFVAIKSIAQQDIQAVHRIRSELVQQRTAKVNQIRGLLAEYGTVAGRRIDVLEHALPLILEDAENGLTADFRVLLEGLQQDLATLNGRVDDLDKTIKSLATSNTDAKRLQQIPGIGPIIATALICAIGDGKQFKRGRDMAAWLGLTPRQHSSGGKDRLLGISKHGDAYLRTLLIHGARSVLKVASQKDDPRSRWLQNLCSRRNKNIAAVALANKNARIAWALLSKKTDFLPEGEPV

SEQ ID NO: 289735 - protein, 430 aa, unidentified
MSYRIAGIDVHKKMLAVVVSDVEVDGEFRFDRRMFGSNPEQLRSLAAWLLEQEVEETVMESTAQYWRPVWEALERYWKPLREKREGARRKSGTLHLAQAQSNRGPRGRKKDFRDAERLVKRLVARELTLSFVPDAEQRLWRTVTRRKYQLTRDRVRLQNQLESLLEEAHIKLSSLVSDLLGASARRMLKALAEGETNPAALAALADQNLRATPEQLCDALGACTDLKPVYRRLLKMVLEQLQFLEQQIGQLDKEMASLLSQHQDAVERLAEVPGLGVDSAQQIIAEVGPTAATFPSAKCLSSWVGACPGDEESAGVNYSHRSPKGNRHMRRVLNQCANAAARTKGSIFEIVYRRSVPRLGHNQTIGAIAHRQCRLIWLILHQAVRYEERGPAVTKQSKQRRTARMIRQLRSLGYRIEPPIPQSSAQRQGQ

SEQ ID NO: 289736 - protein, 409 aa, unidentified
MDVVIPRCCGIDVHQKTLTACIRIQGPTGAVTREVRTFATMVRDLQALRVWLHDAGVTHAAIESTGVLWKPVWHVLEGHIELLLVNPRDVKRVPGRKTDVQDAEWLAQLLQCGLLRASFVPPQAIRDLRDLTRHRASLEQQRTAIANRIHKLLEDANVKLSAVASDILGVSGRAMLRALAAGETDPTTIADLARRRLRQKLPALREALAGHLTAHHRFLLGRLLQQLAFLETEVATFDQQIAEATRPFEDLIRRLDTIPGVNRRTAENLVAEIGPNMAVFPDAAHLVSWAAICPGHDESAGRQRRGTIRKGNRWLRRTLGQAAWAARHKKNSYPAAQFRRLAARRGRKRAIIAVAHSLLVAAFYIIRDGGTYRDLGANHFDRLAPEQLTRYLVKRLERLGHKVSLDVAA

SEQ ID NO: 289737 - protein, 340 aa, unidentified
MQQVTTVGLDIAKNLFQVHGADAQGRPVLKRRLAREKVLEFFANLPACLVGLEACAAAHYWARELAKLGHEVRLMPPQYVRPYVKTNKHDAADAEACCEAVRRPGMRFVPVKGEDQQALLMLHRVREQLLKQRTATINALRAQLAEFGIVAAQRRTGLRELLAVVADPEDRRLPPLARELLQILADHLHALEERTAALDRRLIGMVRDDTACARLAGVPGIGPVIATALVAAVGDAKTFTSGRHLAAWLGLVPRQHSSGGKERLLGISKRGDGYLRRQLMHGARALVAVAKGREGGLWAWIGGLLARRPYNVVVAAVANKLARIAWALLSREEDYCATAA

SEQ ID NO: 289738 - protein, 326 aa, unidentified
MGRHSATPHRKEGSKMNNRCIGIDVSKNTLDVHVQADGANLKVGNDEEGVRKLLATIQPMEPELIALEATGGYEERLAETLVSAGLPVAVVNPARVRDFAKATGQLAKTDEIDARVIALFGSMLQPPKTEEIDETTREIKALNVRRGQLVAMRTAEKNRTEHARDAVLESIQAVVAALNLQIDEVEAGIRELVRSSSELKEKIEIMASFPGIAEKTAAAIAALLPEIGALDRKQIASLTGTAPVNRDSGQFRGKRMTGGGRKRVRTLCFMPTLAAIRFNPVIRSHYEALLSRGKEKMVAVVACMRKMFVILNAMVAKKQSWKPDFA

SEQ ID NO: 289739 - protein, 366 aa, unidentified
MLQEAELSGQADSENNLGGSSETMYYIGLDVHKKTISYCVKNAAGQVLSEGKIGSTRRELDAWVRTLPEPRMMAMEATIFTGWIYDHLLPHAEKVKVAHPLMLRAIAAAKRKNDKIDASKIADCLRCDFLPESYMIPTEMRDRRRFLRYRNLVLRQSVQMKNRISGMLMETGVSYEKLRLHRKGYFDQLMKSNEEVSDSIRPLLKLCREQIDRSILLDRTLLKTLERDPLLSGRLERLRTIPGVGPLTALTWVLEIGDVSRFRSIKQAISYCGLCGEEVRSADKVMRTPISKQRNKHIQSMLVEAARLAPRYSPELAVLYDRERQRGDGNRATLAVARKLVAHMVAVERRQSSFLPAGEFRQTAAA

SEQ ID NO: 289740 - protein, 348 aa, unidentified
MGNPTRWVGIDLHRRRSQIAIVDQDGELMLSRRIINNPESFCELLGETEGTHVALEAAYGWEWLADLLQREGYDVHLAHPLRTRAIAAARVKTDAVDARTLAHLLRTGLLPHAYIAPPELRDLRELLRHRQALTGLRTAVKNRVHGLLARQGIVGEHTDLFGKAGREFLASLELPDGPRRRLDSLIALIGDFDRELADTTAEIDRRAKRDERVDVLCQIRGIGRYTAMLIIAEVGDVTRFPTAAHLCSWAGLTPTVRSSDRTTRLGHISRQGSPALRAALVEAAQMIPTGGGPLRATFERIAKRRGRKIAKVAIARQILTLCYYGLRDGEIRCLATDRVRGEELEPAA

SEQ ID NO: 289741 - protein, 334 aa, unidentified
MTSIAHTRQVNVTGTICGVDVASKSLEARIGQHGAAGSFPNNAEGIAELGAFCRSHQAELVAMEATGGYEQQAFALLSEQGLGVAILNPRAVRQFAESMGSLEKTDRIDAGMIAWYAEVKKSRPVCLAPQSQQHLRALVTRLRQLTEIRTAQLNQQRLVIDRSVQASFTKLLTFVGRQIRDLEQRIAQRIEQDPLWRELNQTFRTIKGVADRTVARLMAEMPEIGTLSNKTISKLAGVAPIARDSGKHQGKRIVRGGRPAVREILFIVASVVGRYEPDFIAFQQRLRAAGKPPKVVRIALAHKLLVRLNAKAREVRQHSAALQPASSALLLEKI

SEQ ID NO: 289742 - protein, 438 aa, unidentified
MQRVLISVQNFTLVSVPKDRASESVRRFGCYTADLYALADWLALCGVKTVAMESTGVYWIALFQILETKGFEVKLVNAHHVKTLPGRKTDILDCQWLQQLHSYGLLSGSFRPEDQICVLRSYIRHRDSLIKSACVHIQRMQKALTQMNVQLHKVVSDITGTTGMAIIRAIVEGERDPQILAAKKHHRAKRSEAEIAAALNGDYRSEHVFVLQQELQLYDVYQTQIAACDRQIQECLSQFSDKVNLNEFPLPQPKHIRHKPQGNEPAFDLRTHLYRISGVDFTAIDGLGILTVQTIISEVGLDPSRFPTVKHFTSWLGLCPCNRITGGKVKSSQTRLVVNPATNAFRMAAQTAGKSNSALGAFYRRLRSRLGTPKAITATAHKLARIFYRLWTTGGNYQDLGMDYYEQRYQERVINNLQKKALALGFELVPQPQANTVS

SEQ ID NO: 289743 - protein, 353 aa, unidentified
MEYVGIDWAYRRAAWCAMTEAGAISREGFVPADEDGLARLVLELGSDVQACLEMMSGAVWVRDRLVAAGWRVEVANARKVKAVAPLACKTDKVDARVLAELCRRDLVPALWLPSLDERALRERLKRRLHLVRLRTSAKNRVFGLLTQWGLRLSIDRLTEPDAIELLEARGVPAVWRRSIAEALAVIDLLDRRIAPLDRELIPLARNDRRVELLTTIPGIGPLLGLTIASEIGDVARFPNPRKLIGYASLAPRVHQSGQSSRGGDLSKAGSRTLRWSAVEAAQSAWRETNPWHDLYVRVKQRNANKSNPAKAAVARKVLIASWHVLSRDEPFKPNRPTSGTDPVPASSPGFLAA

SEQ ID NO: 289744 - protein, 438 aa, unidentified
MRVMYERVAGLDVHKKTVVACRMRVTGEKRIEWEKRTFGTMMVDLLGLHDWLSEWEVEQVALESTADYWKPVFNILEDGFAVILVNAKHVQKVPGRKTDASDAEWLAELMLHGLLKASFIPAKPQRELRELTRYRTTMVRERVRIVNRVEKLLESTNIKLSSVVTDVVGVSAKAMLTELAAGATDPQALAELAKGRLRNKIKELEAALVGTISPNQRFILAGQLSHIDFLDEQIEAFNEQISQHLQQMAPSAVKADADGDDGSSGQAPTETLSWSEAVELLDTIPGVDQRTAEIILAEIGLDMSQFPTEDDLASWAGFAPGNHQSGGKRYSGHTTKGNRSIGAAINQAAWAASRTKDTWLKARYHRLAARRGKKRAIVAIGRSILVSIWHMLSKQQPYQDLGADFYDQRRKESKVTYLTKQLLRLGFAVQLDPLPAAA

SEQ ID NO: 289745 - protein, 322 aa, unidentified
MEQEQKPPVIEFEQVVLKGCGIDVHEKNIVVTVDGEGIKKETRTFETFTSSLIECRSWLKQIGITHAGMESTGVYWKPVFNILEENFEIILVNARHLKSVPGRKTDKIDSQWICKLLLSGLLKASYVPEEKVRQLRDLSRYSTKLTQQLAAEKNRVQKILEDANIKLSSVVSDTSGAVATKLIDGLIGGRKDLEKLIEETYHKKLKAGKTDLLKALTGRVTEHHRFMLRQIKSHMEFLEKEIAIIDGQMDELLKEDEKALELLSTIPGVDKKAATKIIAETGTDMNVFASEKHLAKWVGICPGNNESGGKKKVHELHLATNI

SEQ ID NO: 289746 - protein, 377 aa, unidentified
MKRVKFVGLDVHAETIAVAIAEQDGEIRSLGVIANREESVRKLVRKLGTLEELRFCYEAGPTGYVLYWQLTRMGAKCEVLAPTLVPVKPGDRVKTDRRDALKLARNYRAGELTAVWVPDAAHEALRDVVRAREAAKKDQLRARHRLSKFLLRHGRRPPMGVKVWTIKYLEWVKREVHFEQLAQEATLLDYLHEVEHAAARIARLDGAIEEAVKVAPPKMRAVIAALQALRGVAHVSAVTVVAELGELSRFARAKQLMGYGGIVASEDSSGERTRRGSITKTGNAHLRRVVVEAAWAYRHRPAVGATLRKRQEQVSEEVKEIAWKAQQRLHGRYRKLLAKGKNKGVVVTAIGRELLGFIWAIGIKVETAQKESLQRAA

SEQ ID NO: 289747 - protein, 351 aa, unidentified
METRVTALPKLFIGIDIHKRSWKIHCSTDLFAGKSFTMPPEPEKLYPYVQKHFPDYQVTTAYEAGCCGYSAHRSFESFGWKSLVVNPADIHRKGKERHTKTDRIDAQLISRELKDGRLEGIIVPGKEREELRSLFRRRNELVKDLRRIKCMIKMQLLYFGIKVPPEFDNDHWSHAFRNWVDSQQFNYPTARETMASKMRTFRFIDKELRDVSSQLRAYCRKHFKEDYYLLRSIPGIGGIVAVGIIAELGDLRRFSSLKHLAGYVGLVPGIYQSGATSRSMGMSPRCHGLIRSYYVEAAWQAIRTDPVIQAYYRKHLGKDVKKIIVKVAHKLLSRTLAVIKTKTPYEVGVVA

SEQ ID NO: 289748 - protein, 331 aa, unidentified
MSSLPVYVGLDYHDASVQVCVMQHSGIILGNRSCSNRAEEIVAYVEQFGPAVRTGIEACTGSADLAEELVRHGWSVDLAHPGYVSRMRQSPDKHDWGDARLLADLERVGYLPRVWLAPQETRELRRLVRYRQNLVDERRNARQRIRALLREHRVRREGNPWTRAWLAWAAHAELGEQSRWIMDQLLGNVQRLNQDIRAVEKRLDTITEKDPLVQALLEQSGIGPVTAWTLRAEIGRFDRFRTGKQLSRFCGLTPRNASSGARQADAGLIQAGNPQLRAVLIEAAHRLQRCDERWNAFASRLLRAGKPKCVVTAAVGNRWIRWLFHQMQTAA

SEQ ID NO: 289749 - protein, 348 aa, unidentified
MSSVADRYDHVVGVDTHARTHTYAVLNAGTGRHLDAATFPTTANGLSRALAWIRRRAQGRVLIAIEGASSYGSNLRRALIAAGLDVCDVRPPKRSARAGRGKSDEIDAIAAARTALASEVERLTTPRSDGLRSALRVLLVARQAMDSRRTAERNALTALLRSFDLGIDVRKPLTDTQVREVSGWRQRAADDAATATIRQEARRLALSVQALTAHLAENQAALAGHVQELAPGLQQLLGVGAVTGAILVTAYSHQGRVRSEAAFAALAGASPLEASSGNTTRHRLNRHGDRQLNRALDVIARVRLSCDPPTREYLARRLAEGKSKREIRRSLKRYIARQLFRHLSAAMA

SEQ ID NO: 289750 - protein, 346 aa, unidentified
MEHYAGIDVSLELSSVCVVDTQGKIVKEAKIASEPDALISFFEALGFAVKRIGLEAGPLSQWLHAGLKRAGLEAVLLETRHVKAALSAMTVKTDRKDARGLAQLIRMGWFRPVHAKSMGSQEVRALLVGRKQLLGRLIDVELSIRGILRGFGLKVGPVTRKGFEGRIRELVTGQATLERIAGSMLSARATLKTEYEKLHKAILAIVSEDAICRKLMTVPSVGPLVAITYKSAMDDPNRITKSKAAGALFGLTPKKYQSGEKDVTGGITRAGDEMVRTALYEAANVLLARITRFSKLKRWGMDVAKRRGAKRAKVALARKIAVILNRMWIDGTTYRWTEVQPIAALA

SEQ ID NO: 289751 - protein, 421 aa, unidentified
MKALSQYDPKPVIQTALAHPADVLSIGIDIAKDTHIARVMRGTGEQLKGRLAFSSKPDSLADCITWLRALKRTYRAKHMFIGMEPTGLYWLPVYNALVDALPTFGVWQVAPQAVAYSRRMQTSNFSKTDDRDAFLIADLIRQGKCCRPIQHTVVSRHLKEQLRMLQHAEDALIIWRRQLLTILQRVMPEVLDGVKEAQADSIFKFLNELPMADIPEAQWVSERLKRGRSRAKLTAWYRRATAATSSIPDPDQWHKTWQLAWNGWASARTQTIYSKKLIDSSVASHPITPLLLSVPGVNILTIAAFFAGTGDLSQFTYARQVEKAFGFDLHRWQSGKMDAPPRITKHGYAPARKMFYMAALSASRSPVFKDWYQRRLARRNDQKKLPVVIALASKLVRICFKIAVTGVPFNESLAITAITHE

SEQ ID NO: 289752 - protein, 330 aa, unidentified
MNYSHFVGLDVGKKSFDACLVSLDKELSHHTFPNTPGGIEELLHRVKQHGVEVETALFCAENMGSHVIDLCLSSYQFHFPLALGCPLTIKRSIGLQRGKNDRIGARRIARYACLHYRKLRLYQLPDKDLVRLRNWMVIRDNLVKQKVSSRKLLELPRETSGLADLVTAMTFLEKQLSLVKEKISYVEQEMEKIISSNIALLTNYQLLTSIKGIGPINAIVLLCVTGNFHRFSDPRKFACYCGVAPFEHSSGTSIRGKTKTSNLANREVKVYLTRAAITAISWDPQIKAYYKRKTGEGKHKASVINAVRAKIIARCFAVIKRKTPFVTLRA

SEQ ID NO: 289753 - protein, 385 aa, unidentified
MGEAVRPTTRNGDKHMKTTDKYVGLDVHKDTTVIAVADGGREGEVRLYGSISSDLKAIEKVLRKLVGEGVQLHVVYEAGPTGFLLCRRLEQLEIDCIVVAPSKTPQPKGPRQKTDRRDAIQLARLHRAGELSAIHVPDEVDESIRDLTRARADAVHDLTRAKQRLKSFLLRQGYRYPGSANWNDAHQRTLRKLTLPLPALRSVLEEQILAVEQATQRVSRLDELLAVQVPQWRHYPAVQAVMCLRGFQLIAATVIVAELGDVRRFAHPRQLMGFLGLVPRENTTGDTRRLGAITKAGNSQARWCLIESIQKALLPPKVSARLSQRQEGQPALYRELGWKIQVRLHKRGWHLLHRGVMKAKINVALARELAGFLWDLLRQVPAPGS

SEQ ID NO: 289754 - protein, 412 aa, unidentified
MLKIVYRVCCGMDVHKSFVVACIASTNEYGVTTYKSKRFSTFTKDLRRCADWLSENNCKDVCMESTGKYWIPIYNILEHTCNIVLAHPKYVKAIRGKKTDKRDAKWIADIFKHDLVSGSFIPPADIRQLRDLVRYHWKLTNFNVGEKNRAQNCLTVSNIKLDDVFSDVFGKAASAITTRLLESNEPFDVKPYLTKNIKKPIEQIQAAVDGEMCAEQAEKLRIIRSHMDSLELCKLNLESLILSTAEKYIPQLNLVMTAPGIQSFAAIGIISEIGVDMSVFPTSKHLCSWAGLTPQNNESAGKKKTTRISRAGAYIKPLLVQCALCAIRTKQFPEVRNRYLALKKRRGHKKAIIAIARMLLTAIYNILKWNEVYNSELYRKADRPPAHREVSVEEAVFILQRQGYLVTAPAVT

SEQ ID NO: 289755 - protein, 335 aa, unidentified
MNPVRIHIGVDVGKDSLDICYPDGTKEKARNIKSCRTKLIKKALKLGAIISFEATGPYEEPLAEECLARGVRAVRLDAWGTRKHAESQGRIEKTDAIDCEMIRDYAMSLKDDKLHFIKPRSQAHKALKRAVSTRKNLMKARAIIYNQYENLPDAGMRKCLDQTLARLDREIARIEGECDAAIASDDRMRELASRFQTVKGVGPCLTRVVLAYCPDIGEFTDGGIAKMCGDAPIDCESCTIKKKAKPKRGRTDLRKAMYMAAVSASRSNHILRPIYQRLVAKGKPRKVALTAIARRIAILLNNIAKHPDFIPARDPKDVARAALPKRGRGRPRKAE

SEQ ID NO: 289756 - protein, 318 aa, unidentified
MLPEEGQVDKPIVGIDVSKAWLDIAVGGTGSVERIANEPAAVAAWLERVGPAVVAFEPTGGYERTLRRALRDAGILFVRVHANDVIAFRKSRGIRAKTDRIDAGLIAAFAADELTRRGLRPAILGDEVLRELAARRRQLVDALQAERCRLDLASAPGVRHSLVVVIEALARSLDALESAIADHVAAIPELAQLASLLQSVRGIGPVTAITLLADLPELGHLNAKEIAALVGLAPQTRQSGKTRYREHTGHGRPAVRRALFNAARAAIRHASPMKSFYDRLVGQNQRPGKVALVAVMRKLLVTANAIARERQPWRLNHA

SEQ ID NO: 289757 - protein, 333 aa, unidentified
MNTVGIDVGSKELVVVVMVNGKARKAKSFDNTPLGHQSIIQNLTKLKGETRICVEATGVYHFDLAVALSRTESLEVMVINPKAAHNFAKVLMNRSKTDAIDAENLAIYSERMPFEPWKRPIDECISLRAVSRRIVALSKQKTQTKNQLHSLESTIETPQLVIEQTNELIEVLDRQIQTLRDSALELIQQHDELKQAYVLVTSIKGIAHASAVQILSELLILPGDMSAKQWVAYAGLDPRAFESGSSVSKKPRISKAGNKYIRQALYMPALVASRFEPNIKGYYHHLIDDNGLKKVQAVCAVMRKLLHAIHGMLRTNKEFDGARFYTLPINENS

SEQ ID NO: 289758 - protein, 355 aa, unidentified
MDSVKYIGMDVHQEAIWIAVLNSSGKLVMECVIETKAITILDFLKGLRGSLHVTLEEGTWAAWLYDLIKPHVTELVVCNPRRNALLKEGSKSDRIDARKLAELLRSNMVRSVYHGEQGVRKLKELARSYLAISKDLGRVMSRVKAIYRSWGIPCGGKQVYAPRYRSEWLGKIQEAGVRRRAEFYYQQLDALRPLRQQVRQELLAEAKKHSAWKWLRAIPFIGPIRAAVLMALIQTPHRFRTKRQLWSYSGFGIETHSSAEQRFINGELRRAKKPVSIRGLNRNHNHDLKNLFKGAATVAAAKAGPFQEYYDALVAKGIRPEMARLTLARKIAAITLIVWKKGVRFDAKHLKPQTA

SEQ ID NO: 289759 - protein, 391 aa, unidentified
MIYIGIDVAKDKHDCFITNSDSKVLFKAFTIFNNLDGFNDLYQKIESVMDDVTKVKVGLEATGHYSYNLLGYLIDKGLPTYVINPLHTNLYRKSLSLRQTKTDKVDARTIASMLMSDMNLKSYSDTSYHNEELKSLTRYRFDKVKERAKLKTSVSRLVCILFPELEKLVPTLHMASVYALLSEFPSAKHVATAHLTRLTNLLSKSSKGRYGKDTAITFRDSARASIGSNMPAKSLELKHPIKLIQELDSEIDEIENEIKIIMDEINSPILSIPGINYRMGAMIIAEIGDFNRFDSPDKILAYAGFSPSTYQSGQLDGAYAHMEKRGSRYLRYALYNATKYVCHWDPTFAAYLAKKRAEGKHYNVAVSHAVKKLVRVIYHLEKTKQQYIKAA

SEQ ID NO: 289760 - protein, 419 aa, unidentified
MSFKIIKNNCCGLDVHKTWIFACIGITDSNNRTEYKQARFSSFTKGLNELCDWLAKYNCNDVCMESTGKYWIPVFNILEQRSLWVTLSHPKYTKPMKGNKTDRKDAKWICDLYMCGMVKPSFIPPADIRELRDLVRYRFKLTCMITGEKNRAQNCLTVSNLKLDDVFSDVFGKSSRSITEQILQHPGEKFDVSPFVDSRCKTPIEEIQAAVDGNISKEQDVKLRQCLDHIDELQKHISEVEQEILRLSDKYEAALNLIRTVPGFDKNPMTAIQVLSEIGGDMPVFLTAKHLVSWAGCCPRNDKSDRKIKSTRISCTGSYFKPVLVQIANALIKSKKHPEFTTRYRRIKARRGHKKAIIAICRMILTAIWHILTDLKPYTPEGFLESRPVNKEKVLTISQALNLIKQRGYIIKDDVGPVT

SEQ ID NO: 289761 - protein, 352 aa, unidentified
MQHFIGCDVHTRNQVVAWIDEETGEIRTGRLDHEGCEVRKFYEKFEAGTVVGIEATFPAHWFERLMGELGHELWVGDAAGIRASVVRLQKTDYFDAEHLLDLLRTGRFARIWIPSLEERDLRQLLVHRLKLVRMRTQVKNQLWALGTSQGICRKGKLWTVKGRAELENLVLLPWASRRRKELLESLDRLDEQVRELDRAVEAAGRLRPEVELLRTHPGVGMVVGLAFALTIGPVERFATSRCLVSYLGLNPREHSSGGRQRLGAISKQGNSMLRWLLVEAAQTAARFDPQLGRFYQRLKKRKVSAVAKVAVARRLAVRLFWMLRTRNNYAQLVRMSGSPSSHVVSPQAEPTD

SEQ ID NO: 289762 - protein, 349 aa, unidentified
MNVTHYIGFDVHKKHINFCSKTANGELHQEGRLIAQRSVLRDWASQQREPWQGAMEATLFSGWIYDTLKPYAARLDMAHPAMLKAITVAKKKSDRIDARTIADLVRCNLLPTCYVATPEIRELRRLLRYRNLVIRESVRMQNKIAGLLMESGTPFIKDKLHGRKYFARLLESLEEVPDSVKDLLRLSRGAFETFQASQKRLVQQLLAHPELKKRVERLASIRGVGEITALTWALEIGDPFRFSSSAKAMSYCGLTTALKSSADKQQRGPISKQRNPWLQTALIEAAKLAPRWNPQLAALHARELERGHRNRATLAVARKLAAYLLAVDKQGQPFQQRTTSPIVPAQEAG

SEQ ID NO: 289763 - protein, 341 aa, unidentified
MMKKQTGSFLGIDVSKLWFDISLMQVLNFQKQQMITERFNNTINGLALLKKWLKVQKVTFDNDTLLVIENTGIYHRLLWKFFSENNIPIHIGNAAHIKKSFGIARGKNDKIDSQRLCSYAYKNEDELKATPALNPVFISLKDLITSRTRLKTQLGANKVYLKELKNINDKATQKMMENIYKMAINGLQKSITEIEKQITFVIKSDSSINANYTFLLSVPAIGPVTATYILCCTNNFANKITGKQLSCYAGVVPFSDRSGTSLKGRNKVHKMANKELKSLLHMCALSSLKNHKEFKEYYDRKITEGKHPNSVLNAICNKILLRAVAVVNNQKYYVENYKKAA

SEQ ID NO: 289764 - protein, 425 aa, unidentified
MDFIQNQKINQVTEKTLVVGIDIAKRKHFACFVDDRGRVLQKSFSVLQSNDGFQHFYHRILTAMKEHEKTEVIVGIEPTGHYWLNLAYFLEERGIPLAMANPMHVKRSKELDDNLPTKHDRKDALVIARLIKDGRFSYPRILKDIEAELRVGSTFRSKLTEELGAVKNMMIRWLDRYFPEFTQVFPSFGKMAMAVLECTPIPSDLHQKHPDEVLSLYRKVEGLKSPQRPKAIRLIEVAANSIGVTEGREMARIEIATLVRRYNQLEQEIESITQQLVELVQTSVEYEWLSTVQGLGDTTIVDLLAEIGSFSHYEDPRQIIKLAGLTLRENSSGQHKGQKHISKRGRRKLRALLFRVMMPMVRHNEAFRKLHEYYTNRKVNPLRKKQSIVVLCGKLLKVLHGISTKHKAFDAQRMMKDIPSLAEAM

SEQ ID NO: 289765 - protein, 400 aa, unidentified
MCTKKTITACLRFASARARAEEVRTFGTTTRELLRLADWLTAAGCTHVAMESTGVYWRPVYHILEASFEVLLVNAQHVKAVPGRKTDVKDCQWLAQLLEHGLLRGSFVPPAPLRELRELTRYRRQLVQEHAREANRVQKVLETANIKLGDVATDVLGVSGRAMLQALIAGERDPERLADLARGALRQKAEALREALVGRFTLHHAFMLQGLLDHIEFLDQQIARFDERIEEQTRPFGPAIERLDTIPGVGRRSAEQILAELGDDMRRFPTAAQAASWSGICPGNHESAGKRRNGRTRKGNAWLRSTLVESARAAVRNRGCYLSAQYHALARRRGDKKAIVAVGHSILVAAWHILRDGVEYRDLGPDHFDRLNRERLVQYHTRRLAELGLTVQLPGAQATA

SEQ ID NO: 289766 - protein, 267 aa, unidentified
MSTVYVGLDLGSSNFHQVAVNDAGVSQINREFTTGEANLRKAFSDLHGQIQVHLEAGELAPWAAAVIAPLVTRVVCSHPKDNAWIAKDTDKSDRVDAFKLAELLRLNRFKEVHYAPDQARREFKTLVQHYDELTAQQARLKTKLKARLRMQGVIVSGERLFSATGRKPVLAEVKSRDLRTAIRQLYAVLDQSVAAQTEARLLMLRAAQAFPEIRIFRTAPGIGPIGACRFSAYIHTPSRFSSTRKLWKYCRLSVSHRSSNGKPLRRP

SEQ ID NO: 289767 - protein, 356 aa, unidentified
MENLSSTTTKRVCGLDLGDKVSRLYLCTPMGEVELQANAKTTEPGLGKFFHGVEPMRIALETGTHSPWVSRLLSGWGHEVIVANPYKVRLIGNSRRKNDRVDALTLADLASVRPRLLSPIEHISAEAQADRGVLRGRDALVRARAGLISSARGLVKAMGARLPSSSAEAFAKKAAAAVPAALVPTIMPMLEVISQLTVQIRGFDRQIAELIDKRYAQAKKLMQIKGVGPITSLAYVLAVGDPKRFARSRVVGAYFGLVPAQRSSGDSNPQLRISKQGDPFVRRLLVQCAHYILGPYGDDCDLKRYGQRIVTTGGGKNVKKRATVAVARKLAVLLHRLLVSGQTYEPLRQGPLQAAA

SEQ ID NO: 289768 - protein, 422 aa, unidentified
MDGEINKSCGLDIHKRFVIATILSRSGEKQQHRFARDDDGILDLKNLVTSEKCDVVACESCDVVACESTSDFWVPIYEALIDHLPVIVGNARDMKAFTHKKTDKIDSEVIAKLALNKMVQPSRVFPKKHREFRSYVRLRLTLVRKRTDIKNEAHAILSSEMLHLGDVLTDIFGKNGRAILAGISSGKNIDQIIESLSPNVRKKSVQIREILDREISQSAAIRLQICLNLIKHLDEEIEVLEREIFNYAYQKHKREMEILMSVPGIGELGAATLIAEIGDFRDFPTGDKLASWLGIVPNVYQSADKYHNGRITKRGSKVARWILTQIAQAAARKKNSRLKEFFNRKKKTIGYAKAIIALARKIATIIWHLITNDEMYEDETGYQKGEVKKRKIVEADIFSVDERITIISGIIAIMGKKEGEST

SEQ ID NO: 289769 - protein, 367 aa, unidentified
MEKSSKVFVGMDVHKESIDVTLAEEGGEVRRLGQIGGDRGSLLKMVRKQQSKGGERVFVYEAGPCGFWIHRELAALGERCMVVSPALVPKRAGDHVKTDRRDSARLASLARAGELEAIHVPDIRDEAIRDLVRGRDDAVIAQRRVRQQLKALLLRNDIRYVGKTSWTGAHRRWLSELKLPQPAQRIVFEEYVDAITVATARIERLTLAIQTETLTWRFAPVVAGLQAMRGIQFVHAVTLIAELGDLTRFGSARQLMGYLGLVPRESSSGEQRRQGSITKAGNGYARRALIEAAWAYRYPARVTRIIATRQTGLPKTACDIAWRAQLRLAAKYRRLSARHLHHNKIVVALARELSGFVWAIGQSVKPH

SEQ ID NO: 289770 - protein, 425 aa, unidentified
MKFNRNETTNQRIERITVQHVVVGIDIAKDMHAAQMTDFRGRSLTPRHLSFPNTLEGFEKLLRWVKEAQSKHRLTSLLIGLEPTGHYWFNLANWLLQQGIEVVLVNPVTTHRNKENRDNSPSKNDPKDALVIADVVSRGYYTDYVTQEATFERLKTLMSDREYWVKQSISLGNRIVRWIDLYFPEFRQVFPDWTVLRSLASLHACPLPCDLKRLSVDEVIKLWRKQGMKRASGVSGRAKAGALLAAAARSIGDTRATEEARQDLYRLIQTYKQVTVMLGEIEEALGRILQEIPLAEQLRSIPGLGTMTLAAILASAGDLRLYAHGRQLLRRAGLNLAECTSGKFKGQIKLSKRGDSMLRKHFYWGMLNLVRQNPDFKRWHTHNQERGMKKQASLFKLIGKLARILIGMVQRGESYQSASAAPVAA

SEQ ID NO: 289771 - protein, 407 aa, unidentified
MPGLLRELEGDRVVVAVDPGKVAHRVWLADRERGLIGEPVTVANSRTGIEQLAGLVDGVDPVFAVEATGSLHRALAGELERRWPGSLRLFAPSETQAARAQIGARRFKTDDRDCAALVWLARQGAGRPAVASPVEAMLAAVAHRRQLVLALTPLRQRLHDQLNALAPGLSAPGSQGRALLLDTPTGRAVLACAVDFEGRAPTTRSLQARAGGRLTNATAAFWAKRWKDCLAAPADAHLRALRLARDVDRFAALREDIAFVDEQLARLLADSAGQVLTSLPGVKVVRAAAFAAHSLPIERFPTPEHLYSATGLAPSSYESASIRKRAAISRTGLPEHRDALMGIAWGLGQHAPAFGVRRRELNQRGLTGIPARVALARHACRLCWRLLHSQQPYDDRRYDRARRDRGR

SEQ ID NO: 289772 - protein, 391 aa, unidentified
MIYVGIDVAKDKHDCFITNSDGEVLFKAFSIANNRNGFNDLYQKIESVMEDVTKVKVGLEATGHYSYNLLGYLIDKGLPTYVINPLHTNLYRKSLSLRQTKTDKVDARTIASMLMSDVNLKSYSDTSYHNEELKSLTRYRFDKVKQRAKLKSSVSRLVCILFPELEKLVPTLHMASVYTMLSEFPDAKQVANAHLTRLTNLLSESSKGRYGKETAITFRNAARTSIGSNMPAKSLELKHTIKLIQELSSEIDEIENEIKLIMDEITSPILSIPGINYRMGAMIIAEIGDFNRFNSPDKILAYAGFSPSTYQSGQLDGAYSHMEKRGSRYLRYALYNAAKYVCNWDPTFAEYLAKKRAEGKHYNVAISHAVKKLVRVIYHLEKTNQQYIKAV

SEQ ID NO: 289773 - protein, 347 aa, unidentified
MRFYTKPHKFYCGIDLHARSMYVCILNQDGDIVVHRNIKTKPDALLQIMVPYREDIVVAVECIFTWYWLADLCAQEGIPFVLGHALYMKAIHGGKAKNDKIDAHKIAVLLRGGMLPQAYVYPAEMRATRDLLRRRMSLMRQRAALLTHVQQTNSQDNLPEIGKKIAYKANREGVAERFPDPAVQKSIAVDLALLGYYDRLLTELELCIVNTAKEHNAQVFYRLRSIPGVGKILALVLLYEIHDIQRFPRVQEFVSYCRLVKCAKESAGKRYGTSGTKIGNAYLKWAFSEAAVLFLRNHPAGQKYLARIEKKHGKGKALTILAHKLARAVYYMLKRDTAFNLDKFLNT

SEQ ID NO: 289774 - protein, 374 aa, unidentified
MDDHSVAYVALDTSKLRNAVAIAEAGRDGEIRYLGEIDNAPAATAKLARRLAKKHAALTFAYEAGPTGYGLYRQIKSLGHDCIVVAPSLIPQKPGDRVKTNRRDALSLVRQLRAGDLTAVWVPDPHHEAVRDLTRARGAAVREQRAKRQQVSALLLRLGLHYPGKTTWGKAHMAWLAGQKLAHLEQRIALEEMLHAVRQAGDRIARLEQAIRTAVPDWSLAPSVTALMALRGVEFIAATTLLAEIGDLTRFRSPRELMAWLGMVPSEHSTGERIRRGPITKSGNRRARSILVECAWSYRHPPRVGRDKLARLEAAPPAVRDIAWKAQARLTARYRALRRAGKLDVVAITAVARELAAFIWAVGLAVGSGRTPEV

SEQ ID NO: 289775 - protein, 334 aa, unidentified
MNYNFFIGIDVSKKTLDFAVFKGKELLFKWVGENDEPGIKKFWVQLKLQQGFCINEAMFCMEHTGIYNQHLLSFLYSKKASVCVEAAVHIKLSSGLQRGKSDQIDAIRIAQYACKNCMELRLWQPKRQVIQQLKHLSGLRNRVINARRQLTVALNETTGFDRNAACECKKLCKASLKALDQDIKRIELKMEQVIASDAELKKIFSIVTSVVGIGKVTATEMIITTNEFKDITDPAKFACYSGVAPFEHSSGSSIKGKPRVSHKANKNMKSLLHMAALVAINYNTDMKAYYLRKVEEKKNKMLVINAVRNKLIWRIFACVKNNRPYQKNYQLSLV

SEQ ID NO: 289776 - protein, 335 aa, unidentified
MNYRLFAGIDVSKLKIDVVFFLAENPDKQFHECFENSDEGCSKMVYWINQISGLLISDMFFCAEDTGLYTLPVCTFFDEQGGNLWIENALRLKRSLGLKRGKSDRADAAEIANYGFLHRRKAILFKLPSKTISKLKHLLSCRKQLVKQQAALKNATGELEVFDKESADFTLDIRKSLITEYDSKINMLEEKLLACVKEDEILEKQYNLVKTVHGIGAQTAMFIVVLTQGFTLFENPRKFACYCGLAPFGNTSGTSLKGKPQVSHLANKRIKTLLTMCALNTIKKDNEFKRYYDRKIKEGKHHSSVLNVLRNKLISRAFAAVLKDRPYEKEVNLAA

SEQ ID NO: 289777 - protein, 310 aa, unidentified
MEHTTCVGIDVAKDHLDVHIRPTDEAFRVPYDDAGLATLLARLRTLPAPIIVFEASGGYEVALAVALAAAALPVAIVNPRQIRAYGRAIGQLAKTDRLDARLIAAFAEAVRPLARAVPDEQARALGELMARRRQLVDMLAAEQNRRRLLQDRRLQRHLAAHIAWLEEALRRLDHDLTTQVRATPAWREAEDLLRSVPGIGPVTACTLIADLPELGHLDRRRIAALAGLAPFARESGGWRGHRMITGGRPHIRQVLYMATLSAIKCNPVIRAFHQRLAAGRPGKVAVIAAMRNLLTILNAMLRDRRPWQPA

SEQ ID NO: 289778 - protein, 445 aa, unidentified
MSERTIAREAPGIRATHDSATMHATQRKHMNTWHQLTHYAGFDWARDHHDLVIVDPQGQIVAEFRIPHTLAGWQDFRQKVSAYPALGIVIETNQGAAIDQLLQIDLTVYPIHPVAAQRYRERKAPSGNKIDRLDAWSMADALRLDGRQWKALQPLDPLTQQLRLLCRDEISLIEQPTALINQLQQALSEYCPAALEAFEDWTRPSTWKFVIEFPTPQILLKRKRSRWEKFLHKHKLWRPDTAEKPLETFARAQAFCGSPAVTAAKSLLAVSLARLLGLLQGQLDEYRTQIEKLFEQHPDSGLFGSLPGAARFLAPRLLGEITADPERFDEPQALQCLAGTSPVSYQSGQIHKVQVRHQCHKLLRHVVHLWADCARHAAPWAQTYYQKKRQEGMSHACALRCLGQRLLKILWKIIQTRSPYNADVHTKNQLAHGSWVLQLMSPKPA

SEQ ID NO: 289779 - protein, 456 aa, unidentified
MKIPQSTIRLLTGRLVKILLYREVSIIKSNTQNAKIEAITEKTLVLGIDVGSEMHYARAFDYRVIEYSKKPFKFSNTEAGFATFKEWVLDLKERHEKDKVVPGMEPTGHYWFNLGKFLQDNEMKPVLVNPHHVKKSKELDDNNPTKNDRKDPKVIAGLVREGRYMIPYLPEGVYADLRTASNIRFQLQAELTRIQNRISRWFNIYFPEYKTVYGKPDAKSGMLILKAAPLPEDILTLGIDGVNQIWRDAKLRAVGKARAKTLIEAAEHSVGSKEGAVSARMEIRMLLEDYESRNTRLQEVMVLIEELVRKIPMAEKLLEIKGVGIRTVSGFLAEVGDISRFNNPKELQKLAGLALVENSSGKHKGETTISRRGRKRLRYLLFEVAMSLVSKNQEFRELHNYYTTRRLNPLKKMQSLMAIAAKLIRVFYAMLTKGVDYDPKKMVSDIKRPAVYLQAA

SEQ ID NO: 289780 - protein, 456 aa, unidentified
MISLEKVVLVRTPECDKDREWEIGVKNVLPTDKIMSKRRKKVCGIDVHKRFLVASILDDQGNCETRRYDQDLDEFISLRNWITDSHCESVAMESTAEYWRPVYGILNPTINVTVGNAYHMKGIPGKKTDTLDSQWIAELELNNLITPSRVFTGELYELRNLTRTRNKLVNNATVYKNKIIHQLDVCSIRLCTVLTDVFSKTGYAILKGIVENKTQEEITKTLPAKTRKNASLFFEQIPSHIPDSAIFLIDTLLKVYDNLQIEIDRIEERMKFYLRGHERQLKIMMSVPGIGFIISSNLLAEIGDINDFPTSDKLAKWAGITPSVYQSANTNHTGPITKQGSKFLRWALIEAAHSAVKRPGKLNDYFNSLLPSKGYKKAIVAVARKILRIVWHLLINDEMYVDSIPRVKNIRIPKLPEKIEKIGISKILQLLSRGADLIVQEEGKEIMRITDSSQLT

SEQ ID NO: 289781 - protein, 355 aa, unidentified
MDTTKYIGMDVHTEAISVAVRNSAGKVVMESILETKANTILEFIEGLRGNVQVTFEEGTWAAWLYDLLKPHVTTVVVCNPRKNALLKDGNKGDKIDARKLAELLRLNNLKPVYHGEHGIRTLKELSRSYLTITKDLGRVMNRLKALYRSWSIPCAGQQVYAPRHRSEWLSKITEAGVRRRAEYYYQQLDALQALRHDVRRDLLAESRKQTATKLLRQIPCIGPIRAALLIALIQTPHRFRTKRQLWNYSGLGIETHDSAQYRFVGGELQRSKRPQQLRGLNENHNHDLKNIFKSAATMATISPGPFHDFYEGLLVKGRKPTMARLTLARKIAAITLIVWKKGDSFDAKHLKPQAA

SEQ ID NO: 289782 - protein, 353 aa, unidentified
MIIGCDYHPSFQQIACVDTETGELKEQRLGHREGAEEFYRALAARGEQVRVGMEASGHARWFERLLGELQFELWMGDATEIGRKRGRKQKTDRQDAQHILGLLLKDDFPPIWVPSWENRDLRQLLWHRHRMVQARTRMMNQLQAVALNEGLLWKKRLWRERGRQQLEAIPLAPWASRRRHDLLELLDRLNPTITQLSQAIEQEAEKHPAAQRLMTHPGVGALTALAFVLIIGDAKRFQCGKQVASYLGLVPLEDSSGNRRRLGHITKQGSSILRFLLVEAAQATVRSLPEWRSKYLHLMMRRGRKTAKVAMARKLAVRLYWMMRQGWDYQQWSKFGSHAGQLGTGDGVQSNIE

SEQ ID NO: 289783 - protein, 438 aa, unidentified
MSNKVIFNLDELFISVGIDVGADFSWMSIALPNQQFVGKPYKILHNSIDSLTTAVSKIKEAEELYSLESRIFLESTGIYHYPLFCYLRDKGFNCSVINPIITKNSTNINIRKVHNDRFDSKKAALVGLKPDLKVSLMPSDLALNCRNLCREYYDLMDNRSAYVNKLQGELRMAFPQYLGIFSKVTINTSLTLLETYTSPSAFLEADKQEIIDIIKSTARFGLTYAQNKYNAIIQAATDANQFGYIIDSNIKRIRLYISFIRKYDEEINNILESLHELVDANEDSDFVKQIHLIETFKGAGFLSAVSIMGEIGDFSAFSKPKQLFAYFGLDPAVKQSGKFEGTKVQMSKRGSAIARRVIHTLTLQSISISRNREAKNPVLREYYLKKCDSKPKLVAMGAVSHKVCNMIFAILRDNKPFKIIAPQEHIKQYNSAKCDIAA

SEQ ID NO: 289784 - protein, 346 aa, unidentified
MKPNSQMKLDRYFRQCVGIDVSKDKFTACLFMYDMASDVGCCTESVDFPNSKTGFNQMVKWSRKEAQKGFLLTYLMEPTGSYYEPLAYHLHKIGLTLYVVLPNKARSFCEYEGIKTKTDAMDARCLALLGCKNQRLRPWQPPKAIYRELRQLTRLRASLTKMQTQIMNHIEAIDHMESVTLEVCKSYKKLLSTIQKQLEQNEQAIAAKVAQDKELEARIKRIATAKGIRTGTVTCIVAETQGFYLINNRKQLTSFAGLDVVARQSGKDDPKHKISKKGNAYIRAALYMPALSAAYCNRQMTHTYMKICDKHPDSKMIGVTAIMRKMLLLIYSLWKSGEEYDETRDS

SEQ ID NO: 289785 - protein, 482 aa, unidentified
MKKSSIYPNRSQELLSLFEGAGNPSKLMCVPIDYAKKDHLVMFCNGNGEVLRKPFSVSNSVDGVKYLLNQVSRSCGHRNIQREHVFFGGEDVNSYAENFANTIRSNGWLVANVNAHDAKKQRENLQASTDRLDLMGIATMLLNRRANCRPAQSGVYRNLRTIVRHRRKLVKMKTEVRNRIHTLIDRLFPGFLNERKSGILPFSNSSLYLMEERFSAPQIRRRQRSALIRNLEKRGTKKAEQVAAKLQEYASQVLTTPDEYTATLQVSLASHVTHYRCLFDSAQQLVNEMAQLLAQTQGAFLTSIKGIGIVLASGVAAEIGDPLVQRSTDQVASYAGIVPKVKQSGGSQGPSITSHVSKRSNHILKDFVVQSAFHIGRYGPKDLKDDYSRREAAGQHADFGIARRFVRMAMCMMRTSQIYLPPDMRSTHIKPERRADYYLAMWPYLRDKWSKAGTLNVAFAMDKPLGQWRYIVQEVYGKKLKM

SEQ ID NO: 289786 - protein, 354 aa, unidentified
MSQNPNAGIAIVGIDIGKNSFHIVGLDQRGAIVLRQKWSRGQVEARFANMPPCLVGMEACVGAHHLSRKLKEFGHDARLMPAKYVRPYSKGQKNDFRDAEAIAEAVQRPTMKFVATKTADQLDLQALHRVRERLVSQRTGIINQIRAFLLERGVAVRQGQRFLRAELPRILATPPNVLSPRMVRIIENLAGDWRRLDERVQNLSDEIEAVARQDAGCERLMSVPGIGSIISSAMVAAIGTGDGFSKGRDFAAWLGLVPRQMSTGDRTILGKISKRGNRYLRVLFVQAAWVVLIKPKSWERHGLKSWIGAAKKRLHPNVLAIALANKLARIAWGVLARGRNFEARTNTNATVQAA

SEQ ID NO: 289787 - protein, 387 aa, unidentified
MPQPNDLSRSLAALDQDSTLVAVIEISQSSWLVGGIVPGVNRQPLKKLAADETALLQLLSRWRGEATKAGRTISRIAVAYEAGRDGFWLARWLRGRGIEAHVIHPTSVAVSREHRPAKTDRLDTELLKRAFLGWLRGEQRHCSMAMIPTLEEEDAKRPNRERENLVSERTRFVNRMKSALARLGIRGFKPHLRKAPERLDTLRTAEGMALPPNTLAELRRDMARLRFVMDQIREIEAARLARLEQHPEQANHAMVRLLARVVGVGIETADMLVHEILSRHLRDRKAVARYAGLTGSPDESGARRREKGLSRAGNARVRRGMIQLAWRFLMFQKDSALAQWYRRQTTDGRGATRKTMIVALARKLLVALWQLVTTGEVPEGVVLRRAA

SEQ ID NO: 289788 - protein, 367 aa, unidentified
MEKSSTAYVGMDVHKESVDIAIADGREARLFGRAGGDAAAVERAVRKLRSVHRDVMFVYEAGPCGFWLYRRLAAQGLRCMVVSPSMTPRRAGDRVKTDRRDALMLARLARAGELAPIYVPDAKDEAIRDLVRAREDAVCMQRQARQRLQALLLRNEIRYVGRSAWTQAHRRWIAHLKLPDPAQQIAFEEYVTAVEEGTRRLERLEGSISAQLAHWRWRPVIEALQALRGVSSIHAVRIVAELGDLSRFESPRKLMGYLGLTPSEDSSGGRRRQGGITKAGNSSARRAFIEAAWAYAHPARVSWVIARRHTGLAKSVTDLAWKAQLRLCARFRRLAARRLPRNKVVVAIARELSGFVWAIARQVKPLA

SEQ ID NO: 289789 - protein, 400 aa, unidentified
MRVVGMDIHRSFAQVATFEDGRVTQEGRVELVRERLLKFARSLKTDDEVVIEATGNSAAVERLLRPYVRRVVVANSRLVKAIAWARVKTDKVDAAILAKLHAGGLLPEVWVADDTTVARRRHIAERMGVLAQLVRTKGRIQAILHANLIPKYEGHVFGPGGRRWLAALPLADDERTLLARHLDELERVSVQLAELDKSLAQQSLDDPRARRLMTIPGVSSVVASTILASIGDIGRFPTPEKLSSYFGLTPRIRQSGDHPARHGRITKQGNSDARRMLVEAAWSAKTAPGPLRAFFARVQNKRGAPAAAVATARKLAVLMWHVLSTDQDYAYARPAFTAMKLRKVALKAGAPRAYGKAGPGRDYWIKEIREREASYVESAERAYERMVAAWQATPPKLVEK

SEQ ID NO: 289790 - protein, 333 aa, unidentified
MKKLIHFVGIDVSKETFDLALIKDNDMSQITQKIFLNNVMGFKELHSWLKQQKVDYPESLFCIEYTGYYSRLLSKFIIAKKGNLWMEMSLKIIRSLGIQRGKNDKIDARRIALFAHRNQQDYKPCIPKRPIIEKLKTLLMLRQKLINSKLSITIPVNELKRIDKPAGKEALAITSITLKALDKNLMTVEQQIDQLIASDEDLTEKQKLVTSVPGIGKITFCFLTYFTNEFQNYSEAKQLACYCGVVPFEYTSGKSVRGKPRVHHMANKFMKKLLHTAALCAVTYYPEFKAYYERKIAENKNRMLILNNVRNKLIIRIAAVIKNNYPYKAIHAA

SEQ ID NO: 289791 - protein, 325 aa, unidentified
METIVERPAALDVHKAQVTACVRVPAAEGDGREQHMAEFATTVRGLLTLRDWLAAHRVEQVTMEATGVFWKPVWAILEDDFPLLLVNARHVKQVPGRKTDVSDAAWLCQLAEAGLLRASFVPPKPIRALRNLTRYRKAQIQERSREANRLHKALEDTGIKLDCVATDILGVSGRAMLEALIAGTTDPDVLADLAKGRLRTKLPALKEALEGRFDRLHTTWVGAILAHIDFLDEQIDRLSEAIEEHISPFAPAVELLRTIPGIQRRGAECIIGEIGTDMSVFPSPKHLASFAGQCPGNDQSAGRRRSGAGLSARSLRPSDRSLTGK

SEQ ID NO: 289792 - protein, 353 aa, unidentified
MDRYIGIDAHGQSCTLGVVGPSGKRLKSLVVETSGRALVEAVRSVCGQRHICIEEGTQSAWLYELLSPFAEEVVVAVPPERRGSKDDVRDAWKRAEELRVGGIETRVYKAPVYLAALRNAVRAYVFTIRDVVRAKNRLKSVFLSRGVCMDGGVYDPDRRGKWLRKLPVAHRELAERLARQLDELVPLRDDAEEWLLKESKSHPIIRKLNTAPGMGAIRSAIVVSVVADPHRFRTSRQFWSYCGLAVVTHSSADWTKDRHGRLVRAENTCTRGLTRKRNGSLKAVFKGAATTVIAQLPEHPLNLNYQRMLTAGIKPNLAKLTLARQIAAIVLSMWKHGEAYDPERQKRAVTDQA

SEQ ID NO: 289793 - protein, 400 aa, unidentified
MRCIGMDVHRTFAQIAIVEDGICRDEGRIGVTPEALREWAAELDLGDEVVLEATTNSDAIAMLLTPLVARVVVSNPRKTRAIAEAKVKTDKVDARILAQLLAADFLPPVWLPDDRIRMLRRLVHRRTHLVRQRTRLKNQVHAILARNLAPTCPHSDLFGGVGRRWLAQQVLPDDEQRSVDALLRQLEFHGTELHEVERDIAIEAIDDPVVARLMTVPGIDVAVAISILAAVGDFSRFDDPNRLVSYLGLNPRVSQSGNSRAKHGRITKAGRSQARGMLVEAAFAASRSPGPLRAFYKRIKSRRGLQVAIVATARKLTVLCWHLVTKDEDYAFARPGLSARKRRNLELAAGHSTQIAKRGAAYDYNDPEFRRREREFVEQQERAYEVMVAHWQPNKPAPNS

SEQ ID NO: 289794 - protein, 436 aa, unidentified
MPHSKISKIHPNAAGIDIGSEKIFIGIEDKEAKSFSTFTADYLRSIEYLKENKITTVAMEATGVYWIALYDLLEQSGIEVYLVDGRQTRNVPGRKSDVADCQWIQQLHSYGLLHRCFIPDDITRQLRTYTRLREDHLSLSSQHILHMQKALDLMNIKLHNVISEIHGVSGMRILKAIISGNHNPKELLLLCEESILKNKQDLVLSSLQGNFRKEYIFMLKQAVEAYEFYQSKMLECDKQIEVLLQKINDGKTVPPNIKKPKQIRHNAPKIENLHQELMKLTGGKDPSQIIGLTDKNLLLQIGETGVDLSRWKTEKHFTSWLCLCPTKHESGKSNKRRKKKGNTKAGQIFREAAFSVANSSHSALGGFYRRIKAKKGHKVAIKATARKIAVLYYNAMTKGIQYVEDGLILYQQKFKEQQIKRLHKQAKHFGLQLIPT

SEQ ID NO: 289795 - protein, 324 aa, unidentified
MMYVGLDVHKRVCHGTVMDEEGRVLKRERFSNDPVSLRSFMKDIGEAKVVMESGYCWQPIYDRLEEAGYDVRLAHPLKVKAIAEAKIKTDEIDSETLAHLLRADLLPESYVPPKEIRDLRELVKRRAFLVGMRTRLKNRIHAELAKRDIDPGSPLFTKRGRALLACLGIDAVSQLLPVMEVLEQQIGEISGTLKRAAMEDGRARILTTIPGVGYYTALLLVAEIGDVNRFPDAERLCSYAGLVPSVRRSGGCTVYGHITKEGSRWMRWALTEAVHSHLRYDTELSRFHKRLALRKPGQVATTATARKMLKAIYCMLKAGESFQP

SEQ ID NO: 289796 - protein, 421 aa, unidentified
MESNHDPLFVGIDWATEAHQICIVNDRGEVMSERTVPHSGSAVAEFIEWLLRLCGGDLTRIRIGIEVPGGALVEMLIEHALAVYAINPKQLDRFRDRFFPAGSKDDRRDAYVIATSLRTDLRCFHLIQTDNPTILRLRDLSRLDEELRLSFNRHCCQFREQIQRYYPQMLELCASTDEPWIWSLFELAPTPEQALKLTKGRIEKLLKQHRIRRIDAEGTFQILRHRGFQLVPGTVEAASEHALLLLSHLRLFHSQRVEVGKRLEAIFEQMSACQDSEEKGRQHRDVELILSLPGVGRVVAATMLAEASQALRERDYHALRAYSGIAPVTRRSGKKCVISMRQGCNERLRNAMYHWSRVSVQHDPVSRQPYARLRSAGHQHGRALRGVSDRLLAVLIAMLRSGRVYDPTLRHAHTGKTIHSE

SEQ ID NO: 289797 - protein, 412 aa, unidentified
MEVLHRHCAGLDVHKDTVVACVRHMVDGTGKREVRTFKTTTKDLMALSEWLSAEDCTHVAMEATGIYWKPVWHILADGEFTLVLANAAHVKNVPGRKTDVNDATWLADLMAHGLIRGSFVPDEPTQEMRNFLRTRKQFVRERSSHVQRIQKTLEDANIKLDSVITDIMGLSGRRMIEALIAGETDPFALAVLAHRRIRASQAELEAALRGRVTDHHRFMLRLLLQHIDAIDAAIGQIDQEVDAHVEPFRTAIEILSSIPGISDLSAGVIVAEIGIDMNRFPTEGHLISWAGLCPRNDESAGKRRSTRMRKGAPWLKTTLIQCAWAAARTKGSYLQAQFQRLRARRGAKKAIGAVAASVLTAAYHMLKNGTLYEDLGAHHFDSRAKGKQVLRLVSRIQNLGFAVQITPIGAAA

SEQ ID NO: 289798 - protein, 337 aa, unidentified
MIVIGVDVHKQSLTAVAVDEAGRALAEVTVASAPELRAWSASLAPERLWALEDCRQLTRALERTLVAAGEALVRVPPKLMAPQRRAGRTRGKSDPIDALAVARAALREPRLDHPRPGEQRLRELKLLVDHRDDLIDERRRAQQRLCWHLHELDPEWAVPLGALDRGVWLDRLGRRLARLEPTAQVRIARELVGRCRNLTRTILDLDRELEIAAAQTAPALLALPGCGAISASKLLGEIGPIERFESDAQLARHAGVAPLEASSGKHRRHRLDRGGNRQLNCALHRIAVTQARVYPPARAYLERKQAEGKSRREAIRCLKRQLARTVFNTLKASATLT

SEQ ID NO: 289799 - protein, 411 aa, unidentified
MQVLHPRCGGIDIGKDVLLAAVRLQEDAMVKRLCRTFHTKHTDLIKLRDWLGSLGITHVVMEATGSYWRSIWNVLEGHFELTLANPAQVKNLPGRKSDVNDATWLSDLHAHGLIRGSFVPAGETTALRELTRTRKQLGREVARHTLRIQKLLDVAGLKITGPISEILGVSGRRILKALIRGEKDPNRLVDLVDPHVKASRQELIEALQGELTAQQRRLLKMHLQLVESLETAIQEVDSDIAKAVRPFRGLLTRIEEMPGFSDISAPALIGEIGVDMSCFPSDAHIVSWARLCPRLDESAGKVKSRRTLKSAAWVKTLLVQAAWCAVRKKDSYFRAQFFRLRARRGPQKAIVAVAASMLTTVYHMIREGTPFRDLGFNHQNHTDASNDRIVRRSVARLKQLGYQVTLTKEVA

SEQ ID NO: 289800 - protein, 421 aa, unidentified
MRGLRAKSMRMVKEGTLIATVDIGVTSNTGYCTTLDGISTKSFRFDNTREGFEKFWRMTVASKIRFGCDEVLVGYESTGPYAEPLVHYLAKKQVKIVQVNPLHTKKMKEVNDNSPLKTDDKDPRVIADVIRLGRALTIVVPEGDAASLRRLNNARERHVGEQTALLNQLQQLVYLIFPEFKTVLKNMKCKTAQHILKRYTTPERIGTLSKEALGEEMRKRSMGKFGIKEAGSLIGLARETVGIKEGLSGIFMDIRHLLLQLEAEVLFILEIEGEMRATLERIPCSAKLLSIKGLGTVSVAGLIGEVGDFSKFSTQSEITKLAGLDLYEISSGKRKGQRRISKRGRSLLRKILFYAAIQMIRKNGIMYEYYARLTGRGMERMRALIAVSRKLLRIIHAIVRDNRDYVGQYQAPPRRVIKMAA

SEQ ID NO: 289801 - protein, 391 aa, unidentified
MICVGIDIAKDKHDCCILDSDGTVRADCFTIPNNMDGFKQLLQTIRNCTKKSDKIKVGLEATGHYSYNILGFLLDNGLPTYVINPLHTNLYRKSLSLRKTKTDRVDARTIATMLLSDVDLKSYTDIAYHNEELKSLTRYRFEKVRERAKLKQSVSRLVTILFPELEKLVPSLHGASVYALLSEYPGAKQISEVHLTKLTNLLVTASKGHYGKEKATLIRETARASIGSVMPAKSLELKHTIKLIQELASEINEIEDSIQKIIDELNPPILSIPGMGVNSAAVILAEIGDFSNFSSPDKILAYAGCSPSTYQSGKLTNCYAHMEKRGSRYLRYALYNATKYVCHWNPVFAEYLAKKRAEGKHYNVALSHSMKKLVRLIYALQKSGKTYLAAA

SEQ ID NO: 289802 - protein, 344 aa, unidentified
MDNHTQYLGFAGVDLAKKVMQIHFVTEDGEITDKSAKRAEFLDFFRNRGKCLIGMEACGSSQDWARKLEAMGHEVHLLPPKAVKPFVSGQKNDHNDAIGIYKAMFNGVRRVPVKSTEIRDLQTLRRIRSQVTKDKVKEINHVRGLLAEYGIVMGKSLNAFNKDISSALGILTERGDVSPLVAEELQTTVEAIKAKIERQKKLDQEIEQLARGCKNYENFLKTPGVGPFTAAMLCVLLCDPSIFANGRQFAAYIGLAPRSRGSGGKNYVTGIPSKFNCDSESRAVLVECAQAIARCKNKSLWVEEILRRKPKKVALIAIANKLARQVWAMANKGESFKQMAVLTA

SEQ ID NO: 289803 - protein, 341 aa, unidentified
MEQATTIGLDIAKHVFQLHGADGAGHVLFRKRITRAKLLSFLAAQTRCVVAMEACAGAHYWAREIAKLGHHVRLIAPAYVKPFIKRQKNDAADAEAICEAAQRPSMRFVPVKTEEQQANGIVFRARDLLVRQRTQCVNALRGHLMEYGYIFPKGITHVETLVALVEDLQSSLPDSVRIILKLLIDTFTALEAQIATLDAEINQRSKSDPTARRLMTIPGVGPIASTAITALVPAAEGFPAGRHFAAWLGLTPLQKSTGGKQKLGAVSKRGERTIRRLLIIGASAVVQQANRRGAPKGSWLAQMLARKPKMLVTVALANKMARIIWALLVKGGTYRTPAAAA

SEQ ID NO: 289804 - protein, 416 aa, unidentified
MDAIVERCAGLDVHLDTVVACVLYGKLDIKPKKEVKTFSTTTKGLLELLDFINQKECTHVAMESTGIYWKPVWNILESGAFDLIVENAKKIKNVPGRKTDVKDAEWIASLLRCGLIEKSFVPPERIRDLRDLTRLRKELLGEVNRNKNRIHKVLQDANIKISSVLSDVFGETGKSILNQIIGNQCITEEFIYSLYEGRGKSKLKSTPMEMYEALNGKIRGHHVILLGMHNSNIVFLEKQINELEKEIDILLQKERDSLELLETIPGISKISASSIIAEIGTSMDVFKTEKHISSWAGLCPKNNESAGKKKRSGIKSGNNWLRSMLCECAWSATKKKDSRFKNKYWSMVPRMGRKKALIAIANMMLRLIYHLLKTKSTYKELEIQYFIDKDKRREDRIIKELKSKGYLVEKDSLQMA

SEQ ID NO: 289805 - protein, 375 aa, unidentified
MSKDTLYVGLDTDKKHIAVALAEALPGGAVRSWGQIANEASSVARLVKRLQAGGRRLEVCYEAGPCGYGLHRLLNGKPGVRCQVVAPSLTPRRSGDRVKTNRRDALTLARLLRAEELTAVWVPDATHEAMRDLVRARGAGVADLVRCRQRLAGFLLRQDIRYVGKPWTRKHRAWLGQLVATLALPAHRLMLGEALQALDEATARRDRLTDHIAELMPGWSLAWLVEALQALRGFALINAATLAAEIGDPRRFAKPSQLMAYLGLVPSEYSTSDRVRHGGLTKTGNGRTRKALIEAAWTYSRPARAPRDTARHAPAVAAIATKACHRLSRRYRRLTAGGKRPIVAVAAIARELSGFAWAIAQVAGPAAMPERSSRR

SEQ ID NO: 289806 - protein, 341 aa, unidentified
MKCSVISIDLAKNIFQICGLDENRNVLFNKKVKRSALLHELRQHEPTQVAMEACYSSNPWGRRIKMLGHKVSLLPAFAVKPFVIGNKNDRNDALAIAEAFFRPTIRKIEVKSLEAQDIQSLQRVRERMIKIRTGDANQLRGLLAEYGVVVPRTRVALMNEIPIILECNEMELTATARKIIRRLYQNLQNQDEQLDAIQQELDSLVKDKKEYKRLMTIPGVGPVLASAIMGSVTDANTFKNGRQFAAWTGITPSQHASGDKNRMGKITKRGNSTLRRLFIMGARAVMNWCTKKDTSLHRWARQLKSRMHGCKAVVALANKLARITWSVMAYKQDFDINKACA

SEQ ID NO: 289807 - protein, 350 aa, unidentified
MDRMTQAARDGIVVGVDTHRDVHVAVALDPVGGRLGVCSVPTTRAGYAELERWAAGLGTVRAFGIEGTGSYGAGLARHLRAAGHEVREVDRPDRSTRRRLGKSDPLDAEAAARSVLAGTATTRPKTADGIVEALRLLVLTKRSADKARTAAMTQLRAVIVTAPAMLRETLDDLGPAALLDRCAALRPGDPVDPTSATRHALRALARRIRALDAELADVVGLIDRLTLRRAPALRARFGVGPDTAAALLIAAGDDPHRLRSEAAFAALCGASPVPASSGLRTRHRLNRGGDRQANCALYRIVLTRLSHHAPTRAYMARRTAEGLSKREIIRCLKRYVAREVFAVLEAPVAG

SEQ ID NO: 289808 - protein, 408 aa, unidentified
MEVVVVVGAGLDVHKKKIVACCIDGRSSPPTVITCTFGTFRDEIERMRDWLIKRECTHVAMESTGVYWMPVYQVLEGVLEITLGNPRHMANVPGRKTDVSDAHWIAKLLRHGLIQPNFVPPRPIRDLRQASRYRRKLMQTRTACLLRVEKLLQCATIKLSSVASDVFGVSGRLMLAGLAGGVTDPRELSELAKGKLRGKRGALMRAFRGSFTREDASLLRVELKVIADLEAQIERLETLIEQKLDPFEEVIALLDTIPGVNRTLAIDLVAEVGTDMTAWKTDRQFAAWSGTCPGNRESAGIRKKAKTREGNPYVKTILIQAAVSASQNIGSHLAFRFNRLAARRGPRRAFVAIAREIAVAIYHMISKQVPYTPPRNADPELTRQQRSRHLIRELTKLGYEVNCKLLNT

SEQ ID NO: 289809 - protein, 346 aa, unidentified
MDYHPSDQYIAFVDTETGEYGERQLKHSDREAEKFYRELAARGVSVRVGMEATGYSRWFERLLAELGIEVWIGDAAEIKTKRVRKQKTDREDARLMLRLMRENNFPRIWVPSPENRDLRQLLWHRHRLVQMRTRIMNQLQALAMNEGQRRKKKLWSEQGRAQLEKLPLATWASRRRKDLLELLDRMNPTVEELTRAIDQEVKKWPEVLRLMTHPGVGPLTALAFVLIIGTPKRFKCGKQIGSYVGLIPSEDSSAGHQRLGHITKQGSSLLRFLLGEAAQAAARWDSDWRRRYVHLAMRRQRNIAKVAMARRLAVRMYWMWRNGWEYAEWVKFGSHAGQLEIRHGVN

SEQ ID NO: 289810 - protein, 386 aa, unidentified
MIEAVIERCAGIDVGKKFLVVCVMAGPLDDEPKTEIRKFGTIVAELKLLRDWLISEGCSHAVMESTGPYWKPVFNILEDSVEVVLANAYDVQNRRGHKTDPNDSRWLAHLLRHGMIRASFIPDRAVRELRDLTRRRKQLVGEKAREHNRIQKILEDANIKLGDVLSDVLGLSGRLMINALLEGVMPAEEIAQLAQRKAKQKIPDLIAALRGNRLTDHHRFLLRHALRHLDFLEVEIEALNGEIRIRLSAEQFRKPHALLQTIPGIKADSSAAILAEVGPNMEQFPSDAHLASWAGLCPANHESAGVRKAAGTNRGNQWLRSVLTQCAWAASNQKNSTLRSFYCRLSPRCGRKRSLVALGHRLLRIIYYVLLRSQPFQEPYVRPIPS

SEQ ID NO: 289811 - protein, 344 aa, unidentified
MNSIKVIGIDLAKSVFQVCVWMNDGSIAFNRKVSRAKLLDTIRQFPAGSIIAMEACATSHYWGRTFQSMGFLIRLIPTQHVKAFTHHQKNDANDALAICETALRPGIHFVAIKTVEQQDIKALRSARQLMVEQRTALANQARSLAAEQGVEIPVGIHILQQRLPDIIEDAEQLISPVLRQLLFSLLENIHSLNEQILSAEHSLAALCQQQPKYKVLMTIPGIGPLIAAAFLSEVNAGQFTNGRQLSAWCGLVPRQHSSGGKSSLSSMTKNGNRDLRTLIIHGARSVVHWAHKRDDALGIWLKRLTERRGKMKATVALANKMTRIVWRLLTEPTSFNIDRAFAMN

SEQ ID NO: 289812 - protein, 345 aa, unidentified
MVILGADLHKRWHTVVAVSETGRKLGEKTIPATPDGHLELRRWVAQFPERRWALEDCRHLSRRLEADLLRSGEAVVRVPPKLMAGVRRSVREPGKSDPIDAFAVARAALREPDLPVATLDGPERELRLLVDHREDLVAERTRHMQRLRWHLLDLGIEEPGPRSLDRAAVLADLESRLAGRSEPAARLARDLVTRVRDLTAVIRPLEREIEALVAALAPTLLALPGCGSLTAAKIVGEAAGISRFRSKEAFARHNGSAPVPVWSGNVTRFRLSRGGNRQINLALHRIAITQMRIDERGRAYLEHRRSAGDTKTEAIRALRRRISDEVFRRLRADEAARVTPLAAAA

SEQ ID NO: 289813 - protein, 399 aa, unidentified
MRKIIGIDVSKSTAKLSVAIDAKTVYEGDITLDMIGFTSLKAIIDSYGGAEVVFEATGVYSRRLERYLLDESITYHILNPLVAKKRLDDGSRTRKNDVRDARGLAITEFAKHPKPFKPSFYDPVYRELMDISRYYDQQTEDLKRTKNRIHRLIQLSFPGIEEELDLRKPSALHTLTLFSHPAELTGLSFENIKTQILDMHLKGVGAVRSSNLARALWRSRARSYPAVSGNSFVVQAVKHETQKALKLLSEREETVQAMVSLAERTPEYVILLSIPNIAENTAVRLVAELGDIRRFKTRAKLNSFIGLDLQEMQSGNYTAQRKITKHGNAHTRKLLYWTVINMIGSGAQPSHIRDFYAKRQATAPGRKPLLVACMDRLLKTIHYLVNTNQLYSYELACSR

SEQ ID NO: 289814 - protein, 321 aa, unidentified
METVEFVQVVSRGCGLDVHKKTVVATIDGEGLKRETREFGTFTNSLTELKDWLLENGVTHVAMESTGVYWKPVYNVLEPSGIMVWIVNARHVKNVPGHKTDKKDSAWICKLLLAGLLKPSYIPPKEQRELRDLTRYRRQLIQDIASNKNRIIRILEDCNVKISSVLSNTSGVTATKLIEKICDGKSITMEDIDAVYHKKIEATKEELWEACNGIISDHHIYMLQTIRENNRHIERLINELNQQIKKVLSPYDNALERLREIPGLSRKTVEDLIAEIGLDMNVFPTEHHLASWVGVSPGNNESAGKKKVDELRMETSKPNLH

SEQ ID NO: 289815 - protein, 375 aa, unidentified
MTSSMPASTERRKVIVGVDTHKHVHVAVVIDVWGIRLEDRSFSADSGGYRQLIGWAGELGPIEAFGIEGTGSYGAGLTSAIRRAGHKVIEVNRGDRRARRANGKSDTLDAELAARSVLAGQSTAVPKTGDGAVEMMRQLKIARDTAVKARTSAIISLKQIIVNAPAELRESLAGLADKALIDRCAGFRPGSLDSTTASAKHTLRALARRWLFLNDEIHDHDRHLDQLTVDTSPTLRDGFGVGADTAAEMLIIFGDNPERIRSEAAFAKLCGACPIPASSGMTTGRHRLYRGGHRQANAALYRSAIVRMRFHQPTIDYVARRTAQGMPKREIIRCIKRFLAREIYQRVMIDHRARTAISPSKLSAPSIPPALAEAV

SEQ ID NO: 289816 - protein, 410 aa, unidentified
MSYTIAGIDVHKSVLMVVVADVSEAELHFERRRFGATTSELVALAAWLRQRAVQEAVMESTAQYWKPVWLALEPDLALHLAQAQSNRAPGGRKSDFRDAERLLRRLVTEELFLSYVPDPEQRIWRTLTRSKLQLVRERVRLQSQVEALLEEGRIRLSSLIGDLFGMSGQRILHALADGEADPQRLAGLGDRRLHASREELADALNGTLGTAHRAILKLFLQRVELLDQQIVTLNQLAADRLRVHQDAVERLAAVPGPGVDSAQQILAEVGPTAQAFPTADQLCSWVGVCPGSNESAEHNRSGRRAKGNRYLRRILCQAAQAAVKSDGSYLQSLFRRLLPRLGYVKAIWAIAHRLSRIVWKIPHQGAACIEYGQLGTPEVRKRRARKMVLALKRLGYTVQISPAPTAPAAG

SEQ ID NO: 289817 - protein, 301 aa, unidentified
MVIVGIDVGKATLDVAVDGAVKVTRFANTGPGIGKLVRHLLAVDASCIVVEATGGYEEPLLDACCDAGLWVSRINPRQARDFARATGELAKTDAIDARLLATMARMFHDRLRRYTAPAAWQRELRDWLRRRGQVVTLVQMQKQQSAMAPSVVRQLMARTLTALKRELAAIDRAIQTLLATHATPALRSAKGMGPMFQASSLALLPELGTLTRQQIAKLVGVAPMNRDSGQSQGKRRIRGGRAPMRVALYMATLSAVRWDPLMRAHYRQLRERGKVAKVALVACMRKLLTIVNARRRGRIQL

SEQ ID NO: 289818 - protein, 465 aa, unidentified
MSKAKKRASKKPGKKNKKKDVLEGLPPLNLNAAGIDVGNAEHTVAVPPGRDPQPVRTFGSFTADVHRMGRWLKACGVDTVVMQATGVYWVGLYQILEMYGLEVKVVNARYTKTLPGRKTDVQECQWLQKLHTFGLLNNSFLPDEQTRVLRTYLRQRENLVAAAGTCMQHIQKALTEMNVQLANVISDLSGVTGMAILRALVGGERNPQRLAELKNGRIQASRKEIARSLEGNWREELLFVVEQSLQMYDTYHQKIVACDGRIEAHLKSMGAKVDVVAQPIPEPRRVKWPRKHQPQYDLRGELYRVTGVDLTQTDGLDVGTVQTVISEVGVDMSPWKTEHHFSSWLGLSPDNRISGGKVLKRGTRKVVNRAATALRLAAWSLLRSQSALGANFRRLRARLGAPKAITAMAHKLARLIYRMLKYGKEYVDKGMAYYEEKYRQQQLKWLTKQAAALNLQLVPATAVVP

SEQ ID NO: 289819 - protein, 333 aa, unidentified
MNEQSVGIDVSKSKLDVCVLKGEKAKTKVFRNSRTGHAELSEWLRQRELLVGTPVVLEATGPYSEAVAIALSDTGWAVSVVNPARIAGFAKSELTRNKTDKADARLIAKFGQRADLDIWVAPSLATRQLRALVDRLQALIDMRQQEKNRLEALDHGTPTNVRRMVDEHIEWLNNQIKKVQSEIDDHINGNPELRLDAELIESIPGIGRRAAAQFLAYIGDVRRFHNAKALAAFIGVTPRQKQSGSSLNARSRLSKAGHASARKALFMPGMVAKRYNPVVVAMAKRLEARGLTAKAIVGASMRRLVHLIYGVLKSGQPFDAKIALSKLEFQEGI

SEQ ID NO: 289820 - protein, 419 aa, unidentified
MRWVGLDVHRDFCEVAIVEGGRVHSAGRVETTPEALALLGESLGPAAEVVLEATANALPIARLLRPHVARVVLCEPSAVHESGAAKTDKIDARALAKLLASGFASEVWAPDEETAALRRLLSRRRQLVKQRTREKNQVHAVLMRNLEPRPPMSDLFGPKGRAWLAERPLPESEREMIAGCLRHLDFLDDELAALDRSLARRELGSEEMLRLLQLPGVSAVTAATLMAAIGDISRFPTPRHLVGYLGLNPRVRQSGTGPAKHGRISKHGPGHVRAVLVEAAWVASRSAGPLRAFWQRIAARRGANIATIAVARKLVVLAWQLLTKREDYAFKRPAALAEKIRTLELTAGAERRQGRRQGARVRVSAQRRKRDKQLAEQAERAYRRLTADWQASGPKAGAGATPGRASSRPSKRQAARQAR

SEQ ID NO: 289821 - protein, 518 aa, unidentified
MSSKGRRRRRSTRRPDVLQRKPRGVISPRVQAVGPEHFGIVCVDCAKARSKWMLADYYGKVLIPPTVVAHTGTELEAVVQRICEAQAEYALQDMVVSIERTGRYHHPIRRAFLSAGYDARIIHPFTVRQFRLPADPGTKTDDTDLAANHRATVAGFALSEALNEPVWQQLQLLIRHRRDQVRKASTLCCQIKEHLQEAMPGYAALFSDFWKNKIAMKLALHFGSSQAIVQAGLAGLALAMHQQGLRFQQRTLQGILGWAAHAAPGDPGAPWHIRIATALEEDRASKGQLIQCLERQIAQCLATTPYVLLLSIPGINVVCAGDFAGEAGPIRNYPTARGITGRAGLYPSRYQSDAVDRPDGAIVKCSNRSLRFAILQAADCLVNSNHHFGSLAKGWRDQGADPRMVRVRVGCRFARIAFQLVAGRKVFRHPAMRDRSYILDKLLRFHMEHGTPGDQVQADLQAARRWLAPADQRDEAVPLQQQLDKRKRGRSAQPLGQILSVVLAELRAGTVQSEPSGM

SEQ ID NO: 289822 - protein, 423 aa, unidentified
MEIVYPICCGVDVHKSFFVATLITTEGLVPRYQKRRFSTFNNQILAFKQWLLDNNCRDVCMESTGKYYVPVYNLLEDSIRVTVANPKWVRAVKGNKDDVKDSKWIGNLFRIGLVPGSFIPDKDTRILREFTRYRFKLVSCKSSEKNRYQNVFTVCNVALDAVVSDMFGKSASSITDYIISSGTFDSNHCVSLLQRSLKKKADEVVASIDGFQMTPAQKLRARAVRDHYDFLADHIQALDNAIDGLTAPLEGAITLLSSIPGVDRRSAITILSEIGTDMALFGSSKRLCCWGGLTPGNNESAGKKKSVRITRAGVYLKPALVQIAHAAVKDKKTPYYAIKYNQISKRRGKKRAIIAIARMILTAIYHMLSTGEVWNPCDLHQVDMPPELREKELQKSIRRAAKLLVAQGVVDADAVMSLFADSA

SEQ ID NO: 289823 - protein, 332 aa, unidentified
MYYIGMDLHKQDLVMAVEDEHGPVGRVRRIACRDTGAIRAAVGRWRPFRAVVEASASYRWLYDLLEPQGEVVLAHPLRLRAITAARAKTDKLDAALLARLLRANLIPTAYVPPARYQRLRDLTRTRARLSCNATLAKNQMHALLARANVHPPLRTLFGPRGRRWLAGLDLGLSGNLVRDELLRRLEHYGREIATLDAHLEAVASEFPQAEALEVLHGIGRYSALLVVAEIGEPERFRNARQVGAYAGLTARVHQSGKTEHRGNISKQGSRWLRWILVQAAIKLVRRDERLANFYQRVRRRAGRNVARVAVARKLAGICWVRLRRWQREQAAA

SEQ ID NO: 289824 - protein, 321 aa, unidentified
MAAYVGIDVAKAELVVAARPADARWAVANDERGIRTLVERRAGDAPALVVLEATGGYELAAVAALAAAGLPVVAANPRQVRDFAKATGQLAKTDRVDAGVLALFAERVRPAVRPLPGEEAGALGALLARRRQLLEMLTAERNRLGQALGRGRATRPVKQSLRAHIAFLERELRTADTGLGDAVRSSPAWREKDELYRSAPGVGPVLARTLLAELPELGRLTRREIAKLVGVAPLSRDSGTLRGRRFVHGGRAPVRAVLYMAALVATKHNPAIRAFYARLLAAGKPKKLALVACMRKLLTILNAMARTNTRWRAPDDAPATA

SEQ ID NO: 289825 - protein, 340 aa, unidentified
MHATMIGLDIAKTVFQVYGEDSEARAVLRKRLSGMALAGLFAKLPPTVVGIEACGTAHHWARTLTAMGHTVRLIPAAYVRPFVKRNKTDARDAEAICEAMQRPSMRQVPVKTVEQQAGRGLETARDLLVRQHTQLMNSVRGLLAELGIVAAQGRRGFAVLCIRIEAGDPAIHPVLLPALQTMLEQWHGAGRAITELEARLVARAKADATMRRLMTVPGIGPLSAHAIVAAIGDGRQFSAARDFAAWVGLTPRQHESGNRRHSGRISRQGDQGVRRLLTLGASAVMRQARAKSQRATAWQRGIPARRPVKVAVVAQAAKTARIAWAMLRSSHSYRAAGAAA

SEQ ID NO: 289826 - protein, 387 aa, unidentified
MPQPNDLSRSLVALDQNSTIIAVIEMSQSSWLVGGVLPGIERQPCKKLEPSPERLLAVLHRWRDEAVRAGRTITRIAVAFEAGRDGFWLARWLEARGVEAHVIHPSSVAVSREHRRAKTDRLDTELLKRGFLGWLRGERGHCCMARVPTIAEEDAKRPNRERESLVGERTRIVNRIKATLARLGIRNFKPTLRKAAERLATVHTPEGMPLPPNAVAELQRDMARLGFVVRQIREIEDARRKRLEQQPETGPHAMVRLLARIVGVGVETADMLVHEVLSRPMRDRRAVARYAGLTGAPDESGARRREQGLARAGNVRVRRGMIQLAWRFLLFQKESALALWYRARTADSRLGTRKTMIVALARKLVIALWRFVTTGETLEGVILRPAG

SEQ ID NO: 289827 - protein, 355 aa, unidentified
MSQEKYIGMDVHQATISVAVMDAGGKLIMECLLETKAATMVEFIQGLHGTLALTFEEGTSAAWLHDLLKPHVSRLVVCDPRKNALLKDGSKSDRIDARKLAELLRTNQVKPVYHGEHGVRTLKEVGRSYLTLTQDVTRVMNRIKALYRSWAIPCSGTTVYAPRHRAEWLAKIVEPGVRMRAQRLYQQLDGLQPVRLEARLELLRESHQHPAVKLLRQIPSIGPIRAALLVALLQTPHRFRTKRQLWAYSGFAVETHDSGEYRYVKGKLQRNRERITVRGLSDNYNRDLKNLFKGAAISASTRPGPLHDFYEALIAKGMRPTMARLTLARKMIAITLTIWKKGVSFDPQQLHRQAA

SEQ ID NO: 289828 - protein, 437 aa, unidentified
MGKALEIVHPNAAGIDIGSRGFFVDAGEDEIRVFTTYTEGCHALRDYLLIRKIKTVALESTGVYWVILHAVLEEAGIEVYLVNGREAKNVPGRKSDVKDCQWLRQLHSYGLLRKSFIPDDSIGSLRNYMRLRQDHIRATSTQILLMQKALTLMNIRLTETINDITGASGLQIITAILDGERNVEKLTAMCHTSILKAKKDMVMKALEGTYSDDHLFALEQAHRTWKHYNKLIDECDKRIEKLLKKMAVGKKEIEIKNKRKPIRYHAPKIKDLHKPLLKLTEGKDPTTIAGITDYSFLQLISEVGTELTQWKTEKHFVSWLKLCPQRNSSGKMMRKVNVKHHNKASWMFRNIAQGLLNSKHLAIGVFGRRVRAKRGSAVAIKAVARKIACYFYRVMTKGDAFVERGIELYQEQLMEQKRKYLQRQARNLNLELVPISI

SEQ ID NO: 289829 - protein, 412 aa, unidentified
MLYLGIDIGKRAHEAALLDDAGATVWRHRITASRAGFAALEARLADVDRAALTVALEATGVYWLTLHAWLTEHGVTRVVVLNPLQTRAFRNANLRGSKTDRIDAVAIALLVRFMGAALSHHVPPDDRQAAARDVSRLRTEMIELRARQLVRLGAVLDRTFPEFRTAFPKVGSTSALAVLARWATPAALGAVPADELAGVLARASRGSLGAAKAAELQALAAASVGVRDPLDAAALAVRTFVAHAEHLGEQIAALGARLGELLAPDAATEALLRSCPGVGVDTARTWLAEAPPIARFRGKDGADELVALIGIDAQLKQSGASAGRVRMSKRGNRYLRRSLMLAAETAARTDPQCRAILAKHHAKGKHYRVGVSHVARKLVHILYAVLTHERPYTLPAAYATVPDPAAEVLVET

SEQ ID NO: 289830 - protein, 352 aa, unidentified
MKELSKERVIRFVGIDLAKRSFHLYAVDGEGREVLSRKLTRARLSTVVAQLPACTIAMEACGSAHHWARLFRTFGHEVRLIAPQFVKPYVKSNKNDAADAEAICEAAQRPSMRFVAVKTVEQQDIQAIHRMRSLAVQQRTAQINQIRGLLLEYGIEVAQGRAALQRRLPEILEDADNGLSARFRAELCGLAEELRHLNERVAHYDEQLEQIAQGDAQARALMTIPGVAAKGATALLAAVGEDPRLWKNGRGLAAWLGLVPRQHSTGGRDRLLGISKRGDVYLRNLLIHGARAVLRCAERKEDRTSRWVTALKERRHTNIAVVAMANKIARIAYAVMTTGKPYDPTIDTLAKA

SEQ ID NO: 289831 - protein, 343 aa, unidentified
MSNDTRIAVDVAKAVFEIAISDREGRVSRRERPKRHQFLPFLAQQPPATVVMEACGSAHYWAREIQKLGHQVVLLPPHHVRPYIRRNKTDRTDAKGILEASRNDDIRPVPVKTVNQQVLTSLHRLRAGWMLERTARLNTLRGLLRELGVFIPVGSREVVPAVWAVIEDADSNLPDALRTIFAEACREIREIEARVRLAEQQLASIAGQLPAVEHLQTIPGVGLLTSTALVGFIGDIQRFPSGRHFASYLGLTPREYSSGLKRNLGRISKRGDGYLRTLLIHGARSVLVHARKQQPDRLREWANQLAKTHVHNKAAVAVANKLARIVWAVWKHERPFALMARAA

SEQ ID NO: 289832 - protein, 461 aa, unidentified
MIRRLIGVDLGIASAHTVRVLAEDGREVCRRRCEPTVDSLARVEAAALAGTPAGTVLEVVMEPTGPAWLPVAVFFTARGHLVFRVSSAKAADLRRFLSRHAKSNGIDADTLARLPLVDPAGLHPLELPGAEAAALDRRVRVTDRLTVLAARHKTRIKDLTRQLLPCSPLTGELGVADLAVLERWADPRALLAAGPARLTALIVKASHGKLGAERAQQWRAAATAAVELYADHPAIAFTDLAAEVGTEVRLLRATQAELAGHAQERETAYRYTDLGGLARSLPGVAEVGGPVLVAGMGRPGRFGSGAAFKSYTGLAPRASETGNTDRKGQPMSKAGSSLLRTTLIRAADNARRQDPQLARIYYTQMVERGAEHLKAVCVVAGALAERAWTVMNRQMPYVICDIDGTPVTPEQAKRIIARDFTVPDEVRRRRRSSKTPGRKPAQQPTTSSKGGRPLSKPHTAA

SEQ ID NO: 289833 - protein, 403 aa, unidentified
MIFVGDDWAEDHHDVYLMDEAGTRLASRRLPEGMAGIRGLHELIAAHCEDPAQVVVGIETDRGLWVTALVAAGYGVWAINPMAAARYRDRHHVSGAKSDSSDAKLLADLVRTDRHNHRQVAGDSPDADAVKVLARAHQSLIWARTRHANMLRSALREYYPAALEAFDSLTDRDALAVLGRAPTPAHGAQLSVSKIGAALKAAGRQRNIDTRAREIQAALRTEHLAAPEAVAAAFGATTTAAVHVIAELNDQIAELETALAAHFETHPDADIYRSLPGLGVVLGARVLGEFGDDPNRYTTAKSRKNYAGTSPLTIASGKKRAVLARHVRNRRLYDAIDQWAFCALTNSPGARAFYDAHRTAGDTHHQALRALGNRLVGILHGCLRHHTHYDENKAWAHRATAAA

SEQ ID NO: 289834 - protein, 431 aa, unidentified
MSPFSSIHAVRVPRLCQRAVKAMQVMHPRCAALDLGKDVLAAAVRVQDEDGVKQECRTYRTTSRWLGELCAWLHGHGVTHVVMEATGSYWKSVWHALEGQFELTLANPAQVKNLPGRKSDVNDATWMADLLAHGLIRGSFVPATEIGALRELTRTRKQFVREVARHTLRIQKILDVANLKLTGTISEVLGVTGRAILKALIAGETDPERLANLAHPRVKVSRERLVESLHGRLTEQQRRLLKLHLKQIVTLEASIEQLDRDIAKAVSPFRRVVERLKTAPGLSDIVVPAMLGEIGLDMTRFRTHRHLVSWARLSPRLDESAGKVHSTRTLKGAVWIKTIMVQAAWCAIRVKDSYPRAQFLRIRSRRGTKKAIVAVAASLLTAVYYMLRDGSAYRDLGSGHFDKHDRTKVARRFVARLTQLGYHVQISEAAA

SEQ ID NO: 289835 - protein, 458 aa, unidentified
MKGKRASSTARSVMTIVHPNAGAIDVGATMHMAAIGPDRSSEPVLSFGTFTSDLHRLADWFAAFGINTVVMESTGVYWIPIFEVLEERGIEVFLVNARDAKHVPGRKTDVSDAQWLQRLHCYGLLRASFRPKAEIAELRAYLRQRERLLDYAASHIQHMQKALTEMNLQLHHVVSDITGATGMRIIRAILAGERSSIALASLRDTRCHATAETIQNALTGHYRPEHLFALEQALAIYDGYQEKVSACDMRIETALKELACRRGHKGAPATLPRRRIIRQANGPAFDVRAALYAIIGKDLTQIHGLGPYLALKLIAECGDDLSAWPSAKHFTSWLCLAPSNKISGGRVLSSRTRLSGNRVAALLRLAAVTVGRTESALGAFYRRLAARIGKAKAVTATARKIAVLFYNAMRHGMDYIDPGASYYETRYRERVISNLHRRAKAFGFVLQVDASASERAVS

SEQ ID NO: 289836 - protein, 360 aa, unidentified
MSTIADDDARVIAGVDTHKEFHVVVVLDELGRKLDTASFPTTGRGYRDLTGWLTSFGEVLAVGVEGTASWGAGLCRHLRARGLNVIEVNQPDRHRRRRRGKSDRIDAEMAARAVLAGDATALPKAGDGPVEAVRQLRLARSGAMKARTAAANQLHSVCDTAPDELRAQLRGLTTRRKMRLAARLRPGDPLTPTGGAKRALVTIARRWLALDAEITELDHAIKHVLDAIAAPLLARHGVGYETAGALLCAAGDNPERLRTEASFAALCGTAPVPVSTGNSHRRRLNRAGDRRANSALWTIVMVRLRSRHAPTIAYLERRIAEGHSKRDAIRCLKRFAARELYNDIQAITRTNSRPALEIAA

SEQ ID NO: 289837 - protein, 366 aa, unidentified
MKKGSTAAAKQSSNFSQPKLTIGLDLGDRASWYCVLDEGGELRLEDKLSTTAKAMRDVFGRMPHSRVALETGVHSPWVSRLLSELGHEVIVAHARNVRLIGESRRKDDRLDAQTLARLARIDPRLLCPVKHRSAKAQADLTLIRARAGLVRARTALVNTARGLAKSYGERLRGCNVRNMNPEKAEGLSPELQTALQPLLAGIESLSERIREYNQRIEALAEQSYPEVALLKQVKGVGTLIALTFLLTLEDPQCFRKSRDVGCYLGLQPGRRNSGQREPQMHISKEGDPYLRTLLVQGAQHILGPFGPDCDLRRWGLKLAERGGKNGKKRAIIATARKLAVLLHRLWVSGEVYEPFHNSKLMMVTAA

SEQ ID NO: 289838 - protein, 312 aa, unidentified
MLADELDYVLGVDTHRDEHVVAVVTAPAGAVVAGKTARANARGYRELLRLAARHAPGRRVWAIEGTGSYGVGLARYLAERGETVLEVSRTPRTERRLRGKDDTLDAARTARAALAADTLALPRAGERREALRLLLVARRSAVDVRREALSQLRAVIVTAPEPLRQELRELPTGKLLDRCSRLRRSNSTADALATRLVLRSLARRIQAATVEANELERELLTHLRTLAPALLDEPGVGPIVAAQLIVAWSHPGRLRSEACFARLAGVAPVPASSGQTQRHRLSRGGDRQLNRALHTIVLHRRPRPGDSACAER

SEQ ID NO: 289839 - protein, 417 aa, unidentified
MNDKFLWFVGLDWAHEEHRICLLDGEGKQVAERDVSHDGASLSGLCDWLLERTGAQPGEIAVAIETPRGPVVEVLLERGFAVFAINPKQLDRFRDRFSVAGAKDDSRDALVLGHSLRTDPHAFRRLAVDDPLVIELREWSRIYDELKGEQNRLTNRVRAQLWRYYPQASELAEDIAAEWFLDLWQQVPTPAQAARVSEKAIARILKNHRIRRFDAAHVLRILRTPPLAVAAGTVEAATAHIGTIVARLRLINQQIREAERRLDELCDAIAAAAERAPGQICEQRDVAILRSCPGLGRINIATLLAEASEPLRARDYHALRVLSGVAPVTRRSGKSCIVIRRHACNDRLHQALYHWARVAIQHDPTSRRQYAALRQRGHSHARALRSVGDRLLSVLCTLLQRQVLFDPNYKTSQLAAA

SEQ ID NO: 289840 - protein, 343 aa, unidentified
MYFIGLDVHKKTISFCVKDAAGRVHQEGKIGSTRRELDGWIQTMPRPRTIAMEATIFTGWIYDYLLPHAEKIKVAHPLMLRAIAAAKKKNDRIDAGKIADCLRCDFLPECHMASTEIRDRRRTLRYRSLVVKQMVQMKNRVSGLLMETGVSYNKQRLHKVGYFAELMTTNEDMHESIRPLLKLSRDMISRSQKLDYTLISSLERDPLLKERLRRLRTVPGVGPITALTWALEIGDYTRFSSIKQAISYCGLCGDENSSADKVMRMPISKQRNKHIQRVLIEAAKLATRESPELAMIRARELERGNPNRATLAVARKMVTYMLAVERRQQDFVPAEQFSRTAAA

SEQ ID NO: 289841 - protein, 358 aa, unidentified
MNRKSGMSAGQVIGTVGGQQVVGLDIAKSVFQLHTVDMSSGEIVNQQLKRAKVLTHFSNKAPCVIGIEACGGAHYWARQLSAQGHSVRLIHAKAVRPFVGGNKTDAADARAIWLAIQQPGTKFVGMKTLEQQATLVLHRQRELLMKMKTMQSNALRGLLYEFGATFARGKNALVGEIEAALEALTGDIPQYVADSLREQVQRIKDLVKDIKAVEARLAQRLRDDEDMQRVAQIPGVGLLTATAAIATMGQASAFKSGREFCAWLGLVPRQSGTGGKVKLLEISKRGDTYLRTLLIHGARSVLTHAKEPGPWLEQLKLRRPANVVIVAQAAKMARAIWAVTAKQEDYQRGYRSVKPQVA

SEQ ID NO: 289842 - protein, 449 aa, unidentified
MKILSLDLGKFNTMCCFFDTKTRKHSFLNAPTERNYLNTLFKNHKIDLVVMEACGPSGWINDLASSHGLKTLVCSTNEDAWKWSNVKRKTDKDDALKLSRMAAMNELKAVHMPSETHREFRSLVKYRKTLDCRINKMKCTIRAWFVNHGIEIDTGEKAWHSGRERINSFRKPLVDCEPHELWKGELDLELTQFDALTVQLESVVKKLEALGKADPRIQRIRTIPGVGPRTAEILVACIDDPHRFNNGREVSAYFGLVPRQYQSGETDRNGRITKRGNPLARTILVECAWASLRYNEWAKGVYDRICGKQKTRKKKAAVALARKIAVLAWAMLRDEKDWAPTHMIQVTESFGKMKRELKQSLQSMKPKENSDQRKSRLRREAREAKAVADRPKKSVRTATAKRSRSKTTVVPNAAPPSNPTKRTTPKSTARTNLKPKPKPRRAGKLVSAV

SEQ ID NO: 289843 - protein, 328 aa, unidentified
MCTLGIDVSKNKIDLCLLTAGPGGKKKHKVLTNEPAVARKVVDWLNAQKCVPESVTVVLEATGIYHENLAYGLHEAGVSVCMANPCRVREFAHGMDILNKNDAVDAFVLACYGELKSPAVWVPPSPEVRKLRALLRQRDALREDVQRTVNRLEKANSTSTPQEVIRSLERTKSWLNEELARIEKLITDHTDNDPGLKADLDLLKSIKGVKDQVGREMLALLKDGMFKSASQVAAYLGLTPVEKTSGSTVRGRPHMSKTGPSGVRAKLYVAALTASRWNKQAKAIYERLVAKGKAKKAALGAVMRKLVHLCFGVLKTRLPWDENYVATA

SEQ ID NO: 289844 - protein, 327 aa, unidentified
MNDRQVVYVGIDVSKDSLSVDAGALFKGDVPNTPAGIRSLVRKIRKRAGDGGVPHFCFESTGPYSESLFIECCGAGAAASVLNPVKVRRYAEAMSESAKTDPIDARVIRLFAEAKKPEPTPPPSASEISLRKLVLARDALTKCVVQLSGTLEGASGGDAGSVLKSTVVQLRRKIKKLDRLIAEALKGDARLAGLADALTGIAGVGVLSAAKIVALVPELGTLGRRRSAAIAGLAPFTRDSGRYKGKTFISGGRAEVRRALFMPATVAIKHNPVLKAAYQNLRKSGKAYKVAITAIMRRLFAHMDAVAAKWLRETAAAASSAALTALP

SEQ ID NO: 289845 - protein, 441 aa, unidentified
MDSTASHSDFQELKAKLEVHKTAGVVGIDVAKSKHFGVVLDPVGQTIQSPFSFSNDKAGFNGLLDRVKDLGQRHLISHWVFGFEASGGYEKPLAAYLVDNKQDVVQVNSVAVKRHREMMTGSVDKNDAKDAVSIAYLIRQGFVEYYHLRGLEEEDLAGLVLINEHLKARRTQLKLKIKQNVLKYTFPELETFCKNIESRFAMELLTQYPTPHDIVKAGKLEFKKAMVPQLRGRQLVYYLDEVYALAETSVGLKLDRWTTKALELRTYVAELRLVEQQRQSIAKRLEHLLETNEDYALLHTVPGIGPETGSAILAEIGTVSRFGSERHLLSYAGLDLVSYQSGQYQSPARISKRGRPLLRKAAYQAVNVAVISSRQNALKRKYHQILAQHGNTKDTRQKAKVKLCSKLLRVVYAVLSKREPYQEGCREMTGATNAAVEGSSS

SEQ ID NO: 289846 - protein, 388 aa, unidentified
MRPTDKTRNQYLPRGQGDRAALYVSLELSRSTWLVTSLSPNSDKMSKHTIAAGDAFKLLALLTRLRGRAEQFVGGSLSIAVIQEAGLDGFWVHRSLEANDIESHVVDPASIAVSRRRRRAKTDGIDGESLLRTLLAWKRGEPRVCEMVVPSTPEQEDSRRLSRERAILLRERVQHVNRIKGLLAGQGITDYDPLHKDRRTRFNGLTTGDGRPLPGRLKAELLRELARIELLLSQIADLEAERNAAIKPDVEGRPSPITLLTQLKAIGPQIGAVLYHEGLYRNFTNRRDVAAYAGLVPTPWRSGSIDREQGISKAGNPRLRHIMIELAWLWLRHQPGSALSGWFRARVGNERGRIRRITIVALARKLLIALWRYVTQGEVPEGAVLKAA

SEQ ID NO: 289847 - protein, 324 aa, unidentified
MNLPILGIDIAKLKFNVCLINMSSKLKHKVFANTADGFQQLAAWLTKQRAPRVHACMEATGAYGEALALHLHTAGHMVSVVNPAAIKAFAGSRLSRTKTDRVDAELIARFGVAQQPPAWTPPAPEVRQLQALVRRLEALTEMRTMESNRLAAIITIDAVKSSVEEHIAYLDQQIKQTETLIRTHINNHPRLKQQSELLDSIPGIGATTAATLLAEITDITQYESARQVAAFAGLVPRERQSGSSVRGRTRLSKIGNARLRKALYFPAITALRCSAFFQSWAEGLRQRGKCKMSVIAAAMRKLIHLAYGVLKTGKPFDPEWGKIA

SEQ ID NO: 289848 - protein, 341 aa, unidentified
MEQATTIGLDIAKHVFQAHGADAAGHVLFRKRLTRAKLLGFFASHPPCFVAMEACAGSHYWGREIGKLGHTVRLIPPAYVKPFVKRQKNDAADAEAICEAAQRPSMRFVPVKDEEQQANGVVFRARDLLVHQRTQCVNALRGHLSEYGYVFPQGITHAPALIAHVEDPSASLPDSARAILKILIDTFTALEAQIRELDVEINRRSKADPVARRLMTIPGVGPITATAITALVPAAESFRTGRDFAAWLGLTPLQKSTGGEQKLGAISKKGERTIRRLLILGASAVIRQACIRGAPAGSWLAQMLSRKPKMLVTVALANKMARVVWALLVKGGVYGTPATAA

SEQ ID NO: 289849 - protein, 351 aa, unidentified
MDEIKYAGIDLHQSTCLIAVHDQHGKPVTESIVETGAETLRGFFRGLSGVIHVAFEVGTQSAWLYEVLKSQVSSITVCDVRAHKRRGSKSDRIDAHKLARWLRLGELKAVYQGDRNMRKLRDLAHGYLAAVSDSIRVMNRIKALYRSWSIACAGRDVYYKRNREEWLSKFPILESRMRAALYYAQLDLLKEQRKEIKKAFLKEARRYPVQKILRGIPGFGPIRSAFAIAVIGTPHRFRTERQLWSYSGLSVVIHSSSDHEIIAGRIIRKQHRHNTRGLTRNYNRILKMIFKGAAKEAIRKDPVKTLYRIKVAKGIRPEMATLSIARRLAAITLVLWKRGEKFSTAKMISSN

SEQ ID NO: 289850 - protein, 413 aa, unidentified
MEWSRRLLFFVGNDWAEKHHDVELQNESGKVLARAKLPEGVAGITKLHAMIGQHLGDEDEAEVIVGIETERGPWVQALVSAGYQVYPVNPLQVARFRERLGVSGAKSDTGDAHVLADMVRTFREQLRPIAGDSIEAQAIKVVTRAHKTLIWERTRHLLRLRHTLREFFPAALAAFDDLTAVDALELLAAAPDPASAAALSLDTIEAALKRARRRGRVAKAQAIAETLRAEYLGQPQAVAAAYAATVRAQVAILTVLNQQITTMGEQVDAHFSKHPDAKVYLSQPGLGAVLGARVLAEFGDAKQRYPDAKARRNYAGTSPVTRQSGKKKVVLARHVHNDRLLDALGLQAFAALTSSPGARAYYDQIRGRGAGHRAALRQLGNRLVGILHGCLKTGTLYNEAKAWPNPQDQQAAA

SEQ ID NO: 289851 - protein, 312 aa, unidentified
MSTATVWVGLDIAKAHIDVHVRPTGAAWRVANDDAGHATLVSSLAACQPTLIVLEATGGYETGIATAVALAGLPIAVVNPRQVRDFARATGRLAKTDTLDAAVLAGFAEAVQPTPRPLDDAATADLTALVQRRRQLVEMLVAEKNRMETARPAVRRNLQQHIRWLERRITDQETDIAARIRTSPVWRERDDLVRSVPGIGPTTASLLITGLPELGQLRRRQLAALVGVAPLNRDSGQWRGVRTIWGGRADVRAGLYMATLSAIRVNPAIRTFYRRLRAAGKPSKVAIVAAMHKLLTILNAIVAHRKPWAATA

SEQ ID NO: 289852 - protein, 419 aa, unidentified
MENTKTEKLKTVNAKMMIVAIDIGKTIHYGYFRGPDGQDIKPFPFYNFQKSFKDFWARVLHFKQQKLIEEVVVGFESTGPYAEPLLNFLAKKSVRLVQVNPMHTKRLKEMTGNSPNKTDSKDPRVIADVISLGHALTVIIPEGAAAELRRLTQARERACKSRTAMINQLHHLVFVVFPEFTQVMKKITSKSALYLLKNYPFPGNVIDLGLELFQNVLRKVSRGKFKQTLAKTLFEAAESSIGIGEGKESLLLEIKYLVSGIERESEFIDQVEKQMSHYLKQIPYSQSILSIKGIGEVTVAGLIGEVGDFRQFKTIREIMKLAGLDLYEISSGKHKGQRHISKRGRAHLRKLLFFVAINTIRTNGIMHDKYLTMVNRGVPKVKAIVAISRKLLRIIFSLACNHTTYMENYDQLNIVKLAA

SEQ ID NO: 289853 - protein, 400 aa, unidentified
MRTVFGIDVSKASSEVAILVNGERVHGYTMPNDIIGFSRLLEDLKTVSNPEIVFEATGVYSRRLQAFLEEYSYDYTRLNPLEAKKQLDGLRVRKTDKIDAEKLASSQFVLNRKPTYVQEEVYQNLHDLSRFYQNLTEDIVRTKNRLHKVLQVAFPEIENLLSTPTGEQYWNLVSIFPTKHWVLELSEAELKEAIRNSTSKRISENRVGNLTEKLVGLAKQSYSGISKTSPMVEEVKYDAQELIKLTNRREQVLQQLIALAEPLPEYEILLSIPGIAETTATSIIGELGDIRRFKSANQINAFIGIDLKHYESGDFLGQEHITKRGNPYARKILYKCIHNIASASHTNPCHIADFYEKRKRQSQITSTKPHTIASIHRLIRTMYYLIMHNKLYDYTLAQSH

SEQ ID NO: 289854 - protein, 326 aa, unidentified
MEHELHYIGIDTAKEKLDVDVLRPDGRHRTKKFANTTKGHDELVSWLKGHKIDHAHICIEATGTYMEPVAECLYDAGYIVSVINPALGKAFAQSEGLRNKTDTVDARMLAEFCRQKRPAAWEAPHPLERALRALVVRHQALTDMHTQELNRTETAREVQRPSIDAHLLWLEAELKRLEKQIKDLTDDDPDMKHRRKLLESIPGIGEKTSAVLLAYIGLKDRFAHARQFAAFAGLTPRRYESGSSVRGASRMSKAGHVSLRRALYMPAMVATSKTEWERAFRDRLAANGKKGKVILGAMMRKLAQVAYGVLKSGVPFDASRHNPVAA

SEQ ID NO: 289855 - protein, 423 aa, unidentified
MNDLNDGQYTAFIGIDWADTKHDICLQAADSNHREFDCIPHQVDDIEKWALALRQRFDGPIAIALELSKGPIVYALQKYDFLVLFPINPSTLAKYREAFTPSRAKDDPTDAELALDLLRCHPDRFQPLMPQSVELRALATLVEQRRELVNDRVRITNRLRNTLKQYYPQVLEWFDRINTPLFCDFIARWPTLEQVKRARKSTLKRFFHQHRMNFPQVLESRCQAIKAARPLTLDTAVVTPHRLHALVLAEQLRVTLQAIRRFDDEIAQLAPQHPDYQLFSTLPGAGPSLAPRLLVAFGENRQRFSKAADLQQYSGVAPVTEHSGRKHWVHWRWQCPNSLRQTFVEWAAQTVNKSFWAGVYYRQQKAKGCSHQAAVRALAFKWIRILYRCWQDRTPYDELTYLEALRRRGSPLLDQLGTMAETT

SEQ ID NO: 289856 - protein, 367 aa, unidentified
MKKVSTTASQQSRNISQQRLTIGLDLGDRNSCYCVLDEAGRIQLEQRVRTSAKALQEVFGAMPRSRVALEIGTHSPWISRLLSALGHEVIVANARKVRLIGESRKKDDRLDAQTLARLARIDPQLLCPVKHRSAQAQADLMMIRARASLVRVRTGLVNAARGLAKSYGERLLGCNVRNMNPEKAEGLSPELQRALEPLLSAIEELSERICEYNDRIEALAQTSYPQVELLKQIKGVGTLIALTFLLTMEDPHRFRKSRDVGCYLGLQPGRRQSGKSDPQMHITKEGDPYLRTLLVQGAQHILGPFGIDCDLRRWGLKLAERGGRNGKKRAIVATARKLAVLLHHLWVSGEVYEPLHNSSPMTIAAAA

SEQ ID NO: 289857 - protein, 427 aa, unidentified
MDYTQNCKIEQVKESTLVIGIDVGSETHYARAFDWRGRELTKKVFCFSSDIEGFSAFYEWAGQISNRTAKTDIMIGCEPTGHYWYTLEAFLKKNGLRLVFVNPASVKRVKELDDNSPKKTDRKDPKVIAKLVIDGRFIEPYVPEGIYADLREVVSSRDRILKELNCCSNRIQRWLSIYFPEYKKVYKKFDAESGMRVLEEAPLPCDIIALGCDKIVQIWRRYKLRAVGMKRAQTLVEAAHNSVGKHGGNGARVELKMLLEDYRVKSLQLEKVTQSMQSLLMQVPHIEKLLAVKGVGVVTAAGFVSEVGDIGRFDSPKQIQKLAGFEIVENSSGKHSGKKTISKRGRRKLRKILFQVVLPLIRSNTEFRNVYDYYTTRVKNPLKGRQAIIAVACKLIRIFYAMLSKGVDYNPSKLLSDIRRPQDYIAA

SEQ ID NO: 289858 - protein, 368 aa, unidentified
MGKYIMVGCDLHDASMLLKVAVDRQESEKLYFDNDLEGRQRMIAELERRKKAAKADRIYFAYEASGLGFMLHDELTEAGIMCFVLAPSGMERSVKQRRNKTDDKDGERILKELRGHLLGGNALPAIWVPDSETRDDRLVVRARLDVGQKRTGVKTQIRSLLKLHDVPRVSRTPGGRTKAYRVWLQHLSDSERALPWGARIALTTLLAQLAALDQELARLDEAVRLMAELPRYAEAVKALTALNGVGILMAMVFLTEMGDLSRFPNREAVGAYLGLAPSADESGEQEDHKGHITRHGSGRVRYMLCQITWVRKRLDPATKERYERIAARNPKHKKIAVVAMMRQLAVVLWHIGLEAQRRAGVFAKTGAA

SEQ ID NO: 289859 - protein, 408 aa, unidentified
MDVMVERGCGLDVHQAMVVACLLTGPPGRRPRKEIRSFRTLTAALREMRDWLRENGCTHVAMESTGIYWQPIYAVLDGGFELVVGNAHHIKNVPGRKTDVKDSEWIANLLRHGLIRSSFVPAKPVRELRDLLRYRRKLVDACAAERNRLLKLLETANIKLSSVASDVFGVSGMAMLRALIAGTETPAEIAGLARGRLRRKLAELELALEGCIEDHHRYLLGMQLRRIEAAEHDIEELDARITAKLEPYDEQHQRLMQIPGVDWFVAAVIVAELGVDMTVFPSAAHAAAWAGLCPGNYESAGKRSGGKVRKGNRHLKTALVTAAVAASRKTGGYLKDKYFRLRARRGPLRAAVAVGRKILIAAYHMLATGTVFKDLGADHLDKAYRQRTIRTLVRRLNHLGYKVALIPA

SEQ ID NO: 289860 - protein, 341 aa, unidentified
MKKSLYCGIDLHSSNAVYVITDSSDKVLLKRRLPNDLSTILATLDPFRKQLTTVAVESTYNWYWLVDGLMEAGYPVKLANPAAIDQYDGIKQADDLTDAAFLAHLARLDILPTGYIYPKEERPVRDLLRRRTLLVRQRTAIKLSLQNMFMRQAALNLNWRAIRRLSVKERSDVLGDKDYLLFVSKEQLELIEQLNAHITQFEKKVLERTELKTEYEYLLTIPGVGVILGLTIMLETGEIDRFANVGNYTSYCRCVRANKISNGKSKGKNNGKNGNPHLAWAFVEAVHHAIRACPQAKQFYTRKKSKRNGALASKALAAKWSKAAYYVMKRQEAFDLKRVFG

SEQ ID NO: 289861 - protein, 327 aa, unidentified
MNTIGIDVDSVNLVCRIRRDGKVQAEAIFANDPPGHRKLIRWATRRGQQAQICMEATGVYSLPLALALHDAADIEVMVVNPKAIKHFATARSQRGKTDSLDATTILGFLEAMPFRAWRPPSQNILEIQHICRRIVQLNTELTRERNRHKAANRLGAWARVVANDTAVNLRHIQRRIDQLEKTVLKLIECVPELSEKLELLISTTGIARKTGPRILAELLMLPGDMTAPQWVAHAGLDPRPYESGTSTNKPRRVTKAGNRYLREALYFPALVASRRDPNVKAFYQALLDRGKKPLQAIVAIMRKLLLAIWGMFKNNQTWNGEKFYRMA

SEQ ID NO: 289862 - protein, 348 aa, unidentified
MKEDIMQVVRIGLDLAKYVFEVHGVDKHGKVIVRKRLRRDAVARFFANLPACLVGMEASNGAHYWARMFTELGHQVRLISPQFVTPYVKSNKNDRNDAEAICEAVGRPSMRFVPQKSTDQLAVQAVHRIRRRLVADRVRLVNQIRGLLSEHGIVIARDIAQLRRGLAVIVGNINDGLSEMVRALMRELQAELAEVDARITAYDRRIREIFRASEQCQRLGKIEGIGPVTATALIAAVGDRSCFKNGRQFAAWLGLVPKQRSSGGRTRLFGISKRGDRYLRTLMIHGARAALSRAGGKQDPRSLWLGKMRQRRHPNVAAVALANKNARIVWAMLTGDTAYEPALSVKAA

SEQ ID NO: 289863 - protein, 334 aa, unidentified
MQNVALIGIDLGKHSFHIHCQDKSGKALLRKKFTRTKLMQFLATYPSSVVVMEACAGAHFMARRISDIGHEAKLISPQFVRPFVKSNKNDFVDAEAICEAASRPSMRFVQPKTEVQQAMRALHRVRESLIRDKVKTTNQIHGFLLEFGISLPIGEAVIKRLSLILAEHEIPEYLSRLLMKLHSHYLYLVEQITTLESELNQSIKADDTAQRIMTIPGVGPITASLLSSQLGDGKQFSCSRDFAASTGLVPRQYSTGGKPTLLGISKRGDKNLRRLLVQCARSFMMRLEHQQGRLAEWVHKQLANKHSNIVACALANKLARIAWAITVNQKEYQI

SEQ ID NO: 289864 - protein, 412 aa, unidentified
MEVLVERCAGLDIGKADLKACVRVPGPRGGRRQQIKTFATTTGALLQLRQWLAEQQVRVVGMEATGDYWKPVYYLLEDAFDVQLLNAAHMHNVPGRKTDVSDSAWIARLVEHGLVRASFVPPPPIRRLRDLTRYRAALVGERTREKQRMEKLLEDAGIKLSVFVSDIFGVSGQTMLRALIDGERDPRVLAGYAQGRMRPKIPALVEALTGSFGEHHAFLCRTMLDRVAGLDATINAVTAQIETEIAPFQAIVDRLDTIPGVNQRVAQVIVAEVGADMTRFPTAGHLASWAGMCPGNNESAGRHFSGRTRKGDRWLRAALGEAAAAGSGARDTYCQAQYRRLAARRGKKRALVAVGHSLLVAAWYIINDGVVYQDLGPLHFLTRVNPARQTWRLVTQLQQLGYRVELNPVASG

SEQ ID NO: 289865 - protein, 342 aa, unidentified
MSEITTVGLDLAKNVFQAHGADASGRAVLRKKLRRDQVLDFFGRLAPCVVAMEACGGAHFWGREIGKLGHEVRLIPPAYVKPFVKRQKNDAADAEAICEAALRPTMRFVPVKSEETQGAAMVFRIRELLVRQRTQAINALRGHLGEFGQVVPQGAANAARLVAIVEDPDSGLPADAIATLKVLVTALTHLEAEIGKLDAEIVRRAKANEMARRLMTVPGIGPLIATALAVLAPPPETFRKARDFAAWLGLTPRQHSTGGKQRLGATTKMGERSLRRLLIIGANSVIIKRHVHTAARPGTWLGGMLTRKPPMLVRVALANKMARIVWALMARGGVYQSPATAA

SEQ ID NO: 289866 - protein, 352 aa, unidentified
MNKDNTNYVGIDIGDKTSLIRVINNDGEFLRETRIPTTRVSLANEFKEKTPMNIALEVGGHSRWMSQDLMNYGHAVTVANPGKVRLVYQNPRKSDRLDAKYLAKLLRFEPELLAPIKHRGNESQKHLAIIRSRDSLVKARTGLTNRVRGIVKSFGSRLPSCNADAFARKTREHIPEDLVPAIAPLLDSIQKITDEIKKFDKEIERLSKEEYSETLKLRQIKGVGPITALAFVLTIEDPRRFHKSREIGPYLGLVPRRNQSGDEDPEGHITKTGDKYLRRMLINCAHYILGPFGSESKLRSWGLRLVARGGKGASQKAAVAVARKLAVLMHKLWISGDDYYPFYPKLKENVAE

SEQ ID NO: 289867 - protein, 421 aa, unidentified
MQVLYERCAAVDVGKDVIAVAVRQPGDGPDGRQTVRRTFKTFYGVLREAAGWLDSLGVTHVAMEATGIYSMPVYHALIEHGHFAQVLVCNAGHVKNVPGRKTDLADAEWLVHLLECGLLRGSFIPPAEIKAARDVIRYRTKIVQSRTSEVQRLGNVLQDAGIKIDSLASSITTKTGRAMIEALIDGERRPGVLADLAKGKMRSKIPDLELALEGRFDDHHALMCRLHLDHIGLLDEMIAKLDAQIEAMMAPFHAERDLLTTIPGIGALAAAAVISEIGASPAEFFPDAAHLASWAGICPGNHESAGKRRSGQRRHGNQQLQPVLVESAWAAVRHQGYLRSLYHRHVMKWGGYRSPTAKKKAIIVVAHAMTVIIWHVLAGGVPYNELGADFFTRRLDPNKETRRLIARLEALGHQVTLQPAA

SEQ ID NO: 289868 - protein, 340 aa, unidentified
MGEVTTIGLDLAKHVFQVHGVDAEGATVLRKQLRRNQVLAFFSRLPRCLVGLEACATAHYWARELRALGHEVRLMPAQYVKAYVKRNKNDPADAAAICEAVARPTMRFVAVKTAEQQAAVLLHRGRERLVRQRTALVNALRGHLAEYGVIAPQGLRNVGKLIAIVRDEGDARLPDLARAVLEVLAGQIEQLEAAVAALEKQLMAWHKSNPVSQRLASIPGIGPIIATAIAATVVEPTAFRNGREFAAWLGLVPRQNSTGGKTRLGGISKRGNRYLRRLLINGASANLLRSKATNADPWVIGMRRRRPSLVVAVALANKTARIAWAVMHRQENYQRMAAAA

SEQ ID NO: 289869 - protein, 343 aa, unidentified
MEVAIGIDTHKRSLAAASVDALGRVLVVREFANDPKGHRSLVRWVREQGQPRRVGIEGSLHYGAAAAGQLLAAGEDVREVSPSLTHVERRRRSRGKSDPIDAVAIARVVAADEALPSARRAALLSDLKLLVDHRDQLVRARTQIANRVHADLVVIRPGYEQTVPNLRARRHVVKARSLVSRDRSVRAELVRRRLREILRLEVEIAKADRDIADKIREADTTLTQIPGVGPFIAAKILGEVGEISRIRSKASFASLSGTAPLIASSGQTHRHRLNRRGNRQLNWALHYIALVQARTSQEAKAYLARQREAGKSHKEGMRCLKRHLSNVVYRHLLIDARRLEQAA

SEQ ID NO: 289870 - protein, 362 aa, unidentified
MRIIGCDLHARQQAVAMLDTETGEVVSMTLKHEGNNVREFYSSLPRPVRVGIEATGSMQWFVNLMEELGIECLVGHPAEIRAAEPRKQKHDRRDADLILKLLVENRFPAIWLPSKELQDLRSLLRHRHQWVRMRTRIQNALQSIALANGLRRGTALWSRDGQNRIASLPLTPHTAYRRSELQAMYAKFEAEIEKLNQRVEEQACGRVGARLLMTHPGVGPVTALATEVFLGDPARFADSKALASYVGMIPREYSSGERQRLGGLSKQGNPLLRFLWGEAGAHAVRKDPELKRFYRRKLNQKGFGKASVAVARKLGIRLWIMLRDQIEYNEFCRRGQKQQKSSEACAGMPETPNGANSHRTID

SEQ ID NO: 289871 - protein, 393 aa, unidentified
METIYIGVDFHARQQTICYLKIETGELVTRELKHPDKEGVRAFYAEFKEHVIVGLEASGYSPWFEQMLEELGCEVWVGHATEIRRRARWRQKNDRRDAELILDLMLHDEFPRLHRPTPQSREVLRMLRYRQKLIKMRTMGKNSLQALALQSGLSKRSQLFTKTGQQQLRALRMSPVMEWQREQWLQLLEPINDRLLETMHWLKQQSLDDERIRRLRTHPGIGLLTSLCLVHTLWPVSRFRNQRKVVAYAGLEPMERSSAERKHFLGISKAGSRVLRYLLVEAAHTAVKKDDDLKRFYQHLAQRRGRPKAKTAAARKLLIRSYIMLRDEIDYAEFRQRAVAARLARLRHGPPVSAALIGQPASTEGQEQTPSAISSRRSEDCGKRAPRIVPDLK

SEQ ID NO: 289872 - protein, 442 aa, unidentified
MGTQSTSAALTETRGGTAPAGNRLYVGIDVGRRHHVVAAISQERMQNGTWERAGVHRIPSSGRGYRELIGWLESFGLGPAEFRIGCEPTGGWGAETVVAWLQRHDYQVQWLQSWAIHERRQLAIGKQTKTDALDARLIARLLYERDFHGQRKGFLNRAPRSTDALRLLVRNRLRLVEQRTRYRLQLTSIEDVLFPELKDFFKSSITGSAARHLLAAFATPAEVAGAPASEIYTVLVRQGRATTHASRIAELQMLAAESAGLIDGIDPILHAQDWLLLQLTKVDEQIDYVEEAILNALEAWPAGQRAVLASFPCMGVMRQAVLLATIGDVDGFRNDGQLRKLLGWYPEARESGTSLSKHRLGSRGNRLGRREIWFWALQLIAPMHPPTPFRTYYQRLRGRGMPGYVAIGHLAGKLISVLFFCLRSGRPYDPDRHARALGHGDA

SEQ ID NO: 289873 - protein, 366 aa, unidentified
MLIHVPNHVPVLAMDVHKSTISTGVLEPDSTSPLVDKISTDDESVRRLIARFPEPGRVWACYEAGPTGYELARVLRSAGMHCEVIAPSLIPSRPGDRVKTDARDARHLALLFRAGQLTSVRVPTVAEEAVRDLCRARADMVIDRTRARHRLGKFLLRHGRVWREGTNWTLKHQVWIRAQRFEDPALTATFGHYQATLTAREAAVDAIDADLTQWFARAPFADPVARLAAYRGITELGALTLAAEVCDWHRFPTAAMFMGFCGLVPSEHSSGQRTQRGGITHAGNTHVRTQLVESAWAYKSRPAAGAVLTKRHEGLDPAVVARAWAAQLRLCGKFRRLDERKTNRKTVVTAIARELAGFVWAEMTAA

SEQ ID NO: 289874 - protein, 311 aa, unidentified
MATSSKVYVGIDVSKDKLDIAVLGERPEKQVDNTREGIEQLVEWMQEIEPDLIVVEATGGYQRAVVDALFHAGLCVAVVNPARVRQFARACGLLAKTDKLDAQLLAVFGQRMQPKRYEGKSEAEKQLSALLVRRKQLEEMLKAEQNRLRTIAPSLRGSVERSIAFLKEEKKRLEEQIEQFMKEQKAWQEQREILGSAPGVGKVTTATLLADLPELGKMDRKKIAALVGVAPMNYDSGRKRGYRKTKGGRTDVRSVLYMSTLVATRYNPVIQAQYQQLLKRGKLKKVALTACMRKFLTILNAMVRDQQPFRM

SEQ ID NO: 289875 - protein, 345 aa, unidentified
MTEAYDGRQVVGMDLHRRRSVLVRMSMDGRKLETVRITSSPAALRAVLARCGKNPLVVLEATYGWYWAADVLAAAGAEVRLAHPLGVKAFSYRRVKNDERDAADLADLARMGRLPEAWIAPPEVRALREVVRYRHKLVGQRTSCKDQVHAVLAKLGVEVTHSDIFGRGGGLWLDELVLPAPYAAKVASLRALIGVLDGEIARLGQQAADQLAAGRGYQAVRELDGIGPVLAAVIVAEIGDVTRFRRPGQLCSWAGLTPRHHESDTKVIRGHCSKQGSRLLRWALTEAIQHQPEGARPRQARDGIIARRGNQARNIAKTAAARVLLTQVFYALRDGHARSAGHPAA

SEQ ID NO: 289876 - protein, 412 aa, unidentified
MEVLYPRCGGLDVHQATVVACVRRPGQGRRRTSEVRTFGTTTAELLGLAQWLTEQGVTHVAMESTGVLWKPVFNLLEGRCEVILVNPQHFKAVPGRKTDVRDCEWLAQLLEHGLLRASFIPPQPIRELRDLTRYRKLLIEERATEANRVRKLLESANIKLGLVATDILGASGRAMLGALRRGERDGAVLAELARGTLRQKRAQLAAALTGRFTAHHAALLGDLLDHIDFLDARIAGLSQRIAAAIAPYAGHVTHLQTIPGVDREAAETIVAEIGVDMSRFPSAGHLASWTGICPGNNESAGKRKTGKTRKGNRWLKPLLVECGWGAGRSRRTYLGAQYARLGHRRGKKKAAVATGHSILVAAYHILRTGGAYRDLGPDHFDRLASDRLTRHYLHRLQQLGHRVTLSAAVSVA

SEQ ID NO: 289877 - protein, 323 aa, unidentified
MMSSPIKYTMIGVDVAKLTLDIAIEDNKVLTIDNNEEGFKKLLKIIPDIDQACFVMEATGGYERKPVSFLQSKNIAVAVINAKRVRDYANAMGAYAKNDRIDAQMIRHYAQVAFAKGRLKLRESRTEVAQQLEDLLRRRHQLVGQRAVEKQHLETTINKESVRSITRMIKQLDKEIERIEDRIKAYIEDDDNLAKNKEQLMQVQGVGEVTALTLVTQLPELGNLSNKEIVALVGLAPYCQDSGKKTGRRVIFGGRELIRSTLYMATMSAIRFNKPIREFYQRLLGNGKLKKVALIACMRKLLTILNSMAKTGSEWNPDFAKTV

SEQ ID NO: 289878 - protein, 345 aa, unidentified
MYYCGIDVAMKSSYLYITDSAGRIKGKGELPTTAEDFRRALGRFVRGGVTVAIEAGPQTAWIHDLLVEMGAEVNVVNPNKVRLIAESRRKTDKIDAKVLCELLRLDGLPHPVHVPDKETRSLRGLLVARRQLVSARTKVCNVVRGMLRQEGVSLPSRFLTSLAAWDRLLEMEFTHSHLRPVVEAYSEAFKTLTRSIQTLDKQLAQRERADDRAARLQTMPKVGRIASLTFLAAVDQVERFGSSRKLVGYSGLAPTVRSSGERTEYGSISREGRRELRGVWVQIAQLVAMDTGKATAPLRKWFSKVAFHRGKKTAIVALARKLLTIAYQLLKQQTVYDVRRLRRAA

SEQ ID NO: 289879 - protein, 406 aa, unidentified
MISVGIDVSKGKSTVCVLKPGGEVLETPFEMLHTMEGILSLVNLIRSYPEEVRVVLEDTGHYHWPVVTLLVENGIFVCSVNALRMKKYCAQSIRKAKTDRIDSVHIASYGLTYWSELVPVKPAEDTYKELKLLARQYYQTVSMLIKAKVNLNNLLDQVMPGIVDLMNDSASNHKLTDFVARYWHYGHILEMGEKRFTADYCKWAKKQGYRVYERLASEILAIAQNGIPVLPNSPVTKIVVTEAVRVLHQIEITRDTILAQMQELAKSLPEYSVVKSFPCVGDTLAPRIIAEIGDVRRFKNKHSLIAYAGIDAPPYQSGSFNATERHISKRGNSYLRKTGYEIMQSLIMHQPENDPVYDFILKKRSDGKCGKEAMIAGLNKFLRIYYGKVSELYDDINEQLIFGSSI

SEQ ID NO: 289880 - protein, 382 aa, unidentified
MTQAASRRKHSVGIERLYVAFELGWTSWKLGFCTRVDDKAWVATIDARDIGALKKTIVKARVRFGASPMCPIVSCYEAGRDGFWLDRLLKQMGVTNVVVDSASIQVSRRARRVKTDRLDAEALLKMLVRHVSGEPKVWHVVHVPTPEQEDARHLQREIRTLTKEQTRIVNRARGLLASQGVAVKMGRRGLIGSLESLRIWDGSPLPPGLKLRVEQELSRHTVVHDQLLALEAERNRGIREGATSTAVISRRLMELKAIGPATAETLTREVFFRDFKNRRQLGSYSGLTPSPYQSGEMSHDSGISHAGNRHFRGISVDLAWDWLRYQPQSALARWYQRRFGSGGPRMRKIGIVALARKLLIALWRYAQTGILPEGARRKALAV

SEQ ID NO: 289881 - protein, 371 aa, unidentified
MKQQSKSSNITVGLDLGDRRHRFCALDERGEVVEEGSICNERDSLRKLAGRYHGALGVMEAGAHSPWISRFLEALGWRVVVSNPRKVRAIYQHERKSDQRDALMLARIGRMDLALLYPVRHGTAEAQQDLLRIKLRDSLVRARVAVINSVRFTLKSLGYTVRNPSSARFHKVAMEEVPESVREMITPSVQALAELTARIKMLELEINTLAQMKYPQSAQLQQIPGVGPITALYFVLKIEDPNRFAHVRDVGAYAGLCPRRDQSGESDPQLRISKRGDAYLRRLLVSAAHYILGPFGPQSALRAYGLMLAADGTAQAKKRATVAVARKLAVLLLSLWKSQQPYQPFPGARLNGQQEDRRSGTIALHRMEATD

SEQ ID NO: 289882 - protein, 411 aa, unidentified
MNAVGIDVSKGKSTVAILRPMGEVVQAPTEVTHDAASLEQLAYQILALGENTRVLMEATGRYHEPVAQELHEHGIFVSVLNPLAIYGYNPNGTVRKVKSDSYDSLKIAKFVLDHWVDLREYTPMDTIRQQLKIYSRQYNLYMKSSVALQSNLISLSDNVFPCVNEMFKSPDRADGHTKWVDFFTTFWHCDCISLVSEKAFTERYRKWCKRMGYNFSAAKAADVYTDSLGHITTLPKNNNTKLLIQTAAKELTAMNEMIAVVRSEMVRLAKGLPEYETVHAMYGVGEVTAAQLMAEIGDVRHFPRRSSLVGFAGVDPEVDQSGKKNSKSTPSTKRGSPHLRKTLFQIMTIYLQKMPADEAVYQFLDKKRAEGKPYYVYMTAGANKFLRIYYARVKECMAKLETSVEAYTEAT

SEQ ID NO: 289883 - protein, 430 aa, unidentified
MKSNTQNAKIEAITEKTLVLGIDVGSETHYARAFDYRGVEYSKKPFKFSNTEAGFVTFKAWVLDIKEKHGKDKVIPGMEPTGHYWFNLGKFLQDNEMKPVLVNPHHVKKSKELDDNNPTKNDRKDPKVIAGLVREGRYMIPYLPEGVYADLRTASNIRFQLQAELTRIQNRISRWFNIYFPEYKTVYGKPDAKSGILILKEAPLPEDILTLGIDGVNQIWRDAKLRAVGKARAKTLIEAAEHSVGSKEGAVSARMEIRMLLEDYESRNIRLQEVMGLIEGLVNQIPMAEKLLEIKGVGIKTVSGFLAEVGDIRRFNDPKELQKLAGLALVENSSGKHKGKTTISRRGRKRLRYLLFEVAMSLVAKNPEFRELHNYYTTRRLNPLKKMQSLMAIAAKLLRVFYAILTKGVGYDPKKMVNDIRRPAAYAQAA

SEQ ID NO: 289884 - protein, 332 aa, unidentified
MMAQNGVVVVGIDVAKDKVDACIRSVSQRQTFPSTAEGRRALIRWLRKHKAGKAAMEASGGYERDWAKALREAGLEVLVVDPKRVRSFAKSAGRLAKNDPIDAEMIAWFAETFVEAKSQAHDAAREKLVQIVNARQSLLDMQTSLQNRGEHSTLEVVQKMQERLLKKIASEVAKLEVAIAAQVKATPHFVELAEIIESVPGLGKATSAGLIAAMPELGQASDNVAAALLGVAPYDDDSGQRRGNRHIKGGRRKIRNLFYMACLGAATQHNPVLKAFYDRLVAKGKEKKVALTACMRKLICILNTMIARRQKWDVTRHKASDPARPLPSACPA

SEQ ID NO: 289885 - protein, 304 aa, unidentified
MFGIGIDVSGENLDVAVHDQAFRQFKNSKRGWNSLIRWLQQWPAKQVVLEASGGYEQKALDALHEAGLPMVRINPGRGRSFASATGKQAKTDRIDAMVLAHMADALKLTRYVPPAAWQRRLGELCQRRRHLVQMRVSEHQRMRAFSEPSLISMLNQHLREIQKSIKQLDATIAALLAEQEGWRDFAKLKGAGPVLMATLACELPELGKLSGKAISALVGVAPMNRESGTWKGRRSISGGRAVVREALYMAALTAKRYEPRLKEFFESLVKQGKPGKVALVAVMRKMLVILNARKRDAEAQMASA

SEQ ID NO: 289886 - protein, 340 aa, unidentified
MQYYIWIDVSKKTLDIYHSQSNQYVSINNTEKDIKSFLKWIDKEQFVIFYEATWVYSSKLIKCLNNWWFIHSQIHPNTIHFISLGMSDRNKTDKIDSYKIAQIWAVLLQNYNQNWLKCKLTVSNSNTINKLNSLMSEIYSMKKHIKILKQNIDKLKNNVFASKDTISFYEKQIQVFASQIESINKQIKLIIKEEWLEYKLENLMSIPSVWETVAIELLIFFLSLSSKWFNKQDRSKLKAYVWIDPCDKQSGSSMKSVKISKKWNKKIRSSLYIISMTWFRLSNTDKYKDSSIAQFFNRSKNKFGDERNKSTITAVSKKILLIAWWIFWNDKPFDYQHHLV

SEQ ID NO: 289887 - protein, 426 aa, unidentified
MKSNTQNAKIAAITEKTLIIGIDVGSETHFARAFSWRGYEFSRKPLEFSNSEEGFETFRTWIEELKEKKGMDKVIPGMEPTGHYWFNLGKFLQDNGMPPVHVNPHHVKKSKELDDNNPSKNDRKDPKVIAGLVKDGRYFRPYIPDGVYAEIRVLSGLQVMAQSEITRLKNRIARWFSIYFPNYKDVYGNVGAVSGLMVLKEAPLPEDIVKLGADGVNRIWRDAKLRGVGLKRAKTLITAAEHSIGNREAQEAARIELRILLADYEMYTAREAELMELIEAKITEVPYVDKLLEIKGVGLKTVIGFVAEVGDIKRFDDPKQLQKLAGYAIVKSESGKHKGESHISYRGRKRLRYVLYEAAVSVVSHSSEFKSIHQYYTTREKNPLKKMQSMIAVACKLIRVFYLILQTGATYDAAKLMGDIRRPVAA

SEQ ID NO: 289888 - protein, 433 aa, unidentified
MLKINYMSTLFVGIDVSSKSNVVFAMDFDENKYISSLFGNNQPGADKLAGMIAECMQHHKNLDTILIVLEATSVYSVHISNFLATSEILMPYKPYVFCVNPKATANYRKSYIGLEKTDPTDAFLIADFGRVGRTKKLKPWRGGQFIALKRLTRHRMHLSECITREKTYMVSNLYLKFSELQLLEGDDKPFSNIYGSTSSSVLTDFLSPQEIIDMPEEDLLSFLAEKSRNRISDISKTSELLRKAARDSYRLDKCMYEPLNISLASSFNCIHAYQKEIKLIEQAIEKCINGMNPNALTILQSIPGIGPVWASGILSEIGDITAFHSSDALAKYAGLYWPKGDSGDFTSEDNKMSKAGNPYLRYYLGEAANSVRKHSTEYADYYARKYAEANKHQHKRALALTSRKFVRLVFGLLVKNQLYTGEKLDTEYNIESN

SEQ ID NO: 289889 - protein, 320 aa, unidentified
MKGTLGIDLSKKDFESQVITATGQRQEEHFENNPTGYEQLQAWLLKHGVSQVHACMEATNIYWEELAEYLVEQGHQVSVVNPAQIKGFAQSQLKRNKTDKQDSQVIADFCAQTKPGLWQPPSPTQRQLRAWERHRDSLIKTRTQQLNRLDSCRDELVQRSLQTLVATLDDQIAHLEAQIKELVEQSPQLQAAYLLLVSIKGVGPTTALKLLAEFYDLAAYTSARAAAADAGLTPAHHESGTSVRKRPRMSKIGKGTVRAALYWPAITAMRYNPLVKALADRLRAKGKAPKVIIGAAMRKLLHIAYGVLKNQTPFDPAYAH

SEQ ID NO: 289890 - protein, 368 aa, unidentified
MKKNTSKKQRTGKGNRQQQEKEAFAFYIGMDLGDKHADMCVMNPAGELHQQFRLRMKAPELQAYFVAIGRSRVAVEAGGQSQWVADLIQRCGHQVYVSNTRKVAYIYESDDKDDPGDAYKLAELVHFKPRLLHPIQHRSQAVQADLSWIRAREALVESRTQLINTIRGISKAFGERLAKCSVESFTAKLAAEIPAAIRGPVAPLLETIDHLNEQIHYYDQMEEQIARERYPKYRLLEQVNGVGVHTALSFMLTIGDAERFQKSRMVGCYLGMRPRKKDSGERKPQLGITKAGDEYLRKTLVNCAHYILGRYGKDSDLRRFGQRICERGGKNAKKRAAIAVARKLSVLLHRLWVTGEAYEPLRNSKKVA

SEQ ID NO: 289891 - protein, 325 aa, unidentified
MMNVDLIYVGIDVSKTSLDVCVGVAGNVSTLSNDSAGHDALCKMLLPLKVGLVVLEATGGYEFACASALQAAGLPVAIINPRQARDFAKAMGKLAKTDRIDAQGLAHLAQVWAARPDAAKLVKPLPNEQQQKLAALVGRRRQLVEMRVMENNHLGTAHRSTHKSIKSVIKSLGTQLRHIESELESHLKQYHADLSALLSDVKGIGAVTVATLVGELPELGTLNRRQISALAGVAPYNHDSGRLKGQRSISGGRATLRTALYMATLVATRYNAPIKAFYQRLVDAGKPKKVALVAAMRKLLTILNAMVRDGKPWDESIHIKGAKMA

SEQ ID NO: 289892 - protein, 415 aa, unidentified
MKNYNELTHFAGLDWAKDHHDANIMDRHGQVVARFRFAHTGPGWQQWREKIREYPALGVAIETSQGAAVEQLLASGVTVYPVHPKAAKAYRQRQAPSGTKDDELDAWSLGDALRMDGAHWRALSPQDAVVEELRLLCRDEAELIGQRTALVNQLQAALHEYYPAALEAFEDWTAPSAWAFVAAFPTPQRLVQATVHRRRVFLHTHKLWRPGTAERRLEIFARADQFCGGGAVTRAKSRLAVALCRSLAALQLQLDEYRLAIETLFAEHPDHDVFGSLPGVGVTLGPRLLSGVGTDREQYPDVQGLQCVAGTAPVSFNSGQIKRAKIRWHCDRFLRHTVHLWAGCSLKRCAWAAAYYAAKRKDGMSHACALRCLAQRWLKILWKMWQTHTPYDPEYHARNQQRHGSWVLQLNPKTT

SEQ ID NO: 289893 - protein, 419 aa, unidentified
MDALNTSAFTAFIGIDWADAKHDVCIQGADSDDSEFAVIPHQVEKIDEWAQALRRRFGSPMAVAVELSKGPIVYALQKHDCFVIFPVNPSTLAKYREAFQPSRAKDDPTDAELAVDLIMRHPERFKPLQPQSTEMRTLATLVEQRRRLVDDKIRITNRLRVALKQYYPQTLAWFDHIDTPLFCDFLTRWPTLLQAKRARKNTLKTFFHGHNMRFEQVLEQRLVAIKKASPLTLDEAVIVPYRLQALVFVEQLRVMLNAIKRFDTEIESVAKQHTDYALFSVLPGAGSTLAPRLLVAFGEQRERYKNAADVQKYSGVAPVTERSGKKHWVHWRWQCPTFLRQTFVEWAAQTINKSFWAGEYYQQQRAKGNTHQAAVRALAFKWIRILYRCWQTRTPYDEVTYLKALERRGSSLLTVRKIT

SEQ ID NO: 289894 - protein, 338 aa, unidentified
MEILKQNVGIDVAKDSFVATFTILLKNLIVKNKATKEFKNNSNGFENLYQWCEKLQEDNLEVNYTMEATGIYYESLAYYLYEKDVTVHVLLPNKAKKFAESLNVKSKTDKIDSKVLGQMGVERNLEKWVLSSKIYRHLRSLHREKQQIVKERTAIKNQLHAEEYSGDPVKTILRRMKNRIKYLNKQIESIEKELEDLVSKDDYISERVKKITKTPGLGFRTVIAVIAETNGFANITSIKQLSSYAGYDVRIRESGKWKGKSKISKKGNSHIREIMYMPSLSSIQYAETYKNFYKRLNEKKQNGLISGTAVQRKLLGLIYTLWKNNTEYIENYEMKKVS

SEQ ID NO: 289895 - protein, 368 aa, unidentified
MEKHSDVFVGLDVAKARHAVAVAEDGREGEVRYIGEIGADVESVRRLVAKLEKRHGRLHFCYEAGPTGYGLYRQLTTLGHRCTVVAPSLIPRKPGDRVKTNRRDALQLARLLRAGELTAVWVPDDAHEAMRDLVRARQVAVEDTRRKRQAISSMMLRQGRTYPGKKTWGARHVQWLQAQRFDQLAQHLVLQELLLAVSHADERRERIEAAIAELLPQWSLAPVVEALQALRGINLVTAVTVMAEVGDLRRFESPRQLMGYLGLVPGERSTGESVHRLGITKAGNGRVRQALVESAWCYRHPPRTGRAKYYVHERVPPAVRDISAKAQTRLCGRYRALSQRGKKLTVAVTAIARELAGFIWAIGREVQA

SEQ ID NO: 289896 - protein, 351 aa, unidentified
MTTMTSTRPLVTGGVDTHRDEHVAAALDRVGGLLGTASFPTSTAGYAALLAWLRTYGEVSSVGVEGTGSYGAGLARHLTSNKLVVLAISRPNRQVRRRYGKSDVVDAIAAGQAVLSGEATGTPKTHDGPVEALRALKSLHRSANKARTQAINQIRATLVTAPDELRARLRDLSRRDLLATCAAFRIGADDDSLAGIIRLTLRELASRVAFLDAQIKSTLVWLKRITDELGPDLVAMHGVGPDTASTLLLTAGDNPDRLRSERSFASLTGSCPVPATSGLIQKRYRLNRGGDRQANAALWRIAMVRLSTDPATREYVARRQTEGKTKIEAMRCLKRYIARGVYNALPKTALC

SEQ ID NO: 289897 - protein, 341 aa, unidentified
MQITTVGLDIAKNVFQVHGIDTEERVVVRKQLRRGQVIRFFEGLSPCLVGLEACATSHYWARELTKLGHEVRLMLAKDVKAYVKRNKNDAADAEAICEAVRRPTMRFVQVKSAEQQAQLMQHRARDLLMSQRTQLINAMRSHLAELGIIAPQGREGVKELLAIVANDATSHLPNDARASLLVLAAQLQALQTTIGAIEKRIVVQHRADKQSKRLQTIPGIGPIGASAIAATVTNPKIFRSGRDFAAWIGLVPRQMSTGGKLKLGPISKQGDRYLRRLLVVGAVSTLRRAKQNPQKFPWITRLLARRPFKVVAVALANKMARIAWALLISDKTCRSAWFAAA

SEQ ID NO: 289898 - protein, 316 aa, unidentified
MESVAAATGIDVSSEKLDVSVGGARPFTVPNTAQGCQELCARLPREGAVHLEASGGCERLVARTLRSAGFTVHVHDPLKARRLAQARGKKAKTDAVDAKELALGGGLLPRPQAKTKAREDLSDLSRTVSALQETIGEYKRRLRRPELDEDARKGLQEVVRLLQEQALALEKTFAERVRRSEEAERYRLALSVPGVGPKTARVLVCELPEDLPERTPAQICGFAGLAPLDDQSGKRTGRSRIGRGNRRLKAGLYMPAVCAVRSQPWARELYDRLRAKGRAHQQAMVAVMRRVLLRVVAVLKRKEPWQTEPPEKAEKP

SEQ ID NO: 289899 - protein, 343 aa, unidentified
MNYIGVDCHISSLDFAVVNEKGTITQKAKVNTGVKEFIEFVKKIPKPRKIFIEEGELASWLLETSLEFGETLIITDPKINKWIGKAEKKDDTIDAEKLAQLARGKYIKEIYHPIHDRRRFKDLIFAYHDTIKSQTRIKNKIKARFRREGIRCSGATVYSNKYRKQWREKLPGNKIIHLIVNELWAQLDRTRLAKETIRRNIRIQSKRFPEIKRFMKVPGIGLVHASAISAIIETPHRFSNKKKLWMYAGIGLAERRSGEKVYSRKLTREFNRLLKNTVKQAAESAIYAKDNQFRRQYLRLTIEKGIPSHKAKLTVARSLLAALYGMWKKGEAYDPSIENKRSK

SEQ ID NO: 289900 - protein, 424 aa, unidentified
MGKTIPICCGVDVHKKFLVATILTGDYLIPQCKQKHFGTSFRNLLAFKQWLLDNNCKDVCMESTGKYWVPVWNILEGVVNVVIANPKWVSAVKGNKDDKKDSKWIGNLFRMGLVPSSYIPGKNIRILREFTRYRSKLVAMRASEKNRYQNAFTVCNLTLDAVVSDMFGKSAMAIENYLLDTDAVDPEICVSFLQRSLKKKSAEIIEAVEGFNMTQEQKERVRIIQGHFADIDKRISQIDEIIGRLTAEYEGTISLLCTIPGIDRRLAITIISEIGTDMSEFGSSRRLCSWAGLVPGNNQSAGKKKSVKITRAGVYLKPALVEAAHAAVKASEKSPYFRIKFEKIMKRRGKKRAIIAIARMILTAIFAMVSTGEVFNPSDLQRFDMPEELQKKRTIAEAKDAVKLLVSLGVVPEGSISLEALLAS

SEQ ID NO: 289901 - protein, 434 aa, unidentified
MTADSVAVRATKGKVVKPFNEITHYAGFDWARDHHDVVLVDRQGQIVADFRIEHSLAGWQQFRDKIKDYPALGVAIETSQGAAVDQLLQLDCSVYPVNPLSAKSYRERKAPSGNKTDHLDGWSLAEALRTDGHSWKALRPLDPLTQQLQLLCRDEISLIEQRTALVNQLQQALVEYYPAAIQAFEDWTLPACWDFILQFPTPEKLAAAGRRRWEKFLHTQKLWRPETAAKRLGIFQNARQFCGSAAVTSAKSLLALSLAHLLNALQLQLDQYRQRIEALFAQHPDHDLFGSLPGAGKTLGPRLLGEIGGNPQRFEDTETLQCLAGTAPVSFQSGQIHRVRIRHQCNKVLRHTVHLWSQCCVRVCPWAETYYKQKRAEGKSHACALRCLGQRLLKILWKMVQTRKPYDADLHARHQKLHGSWVLTLMKPAASAGE

SEQ ID NO: 289902 - protein, 356 aa, unidentified
MTIVAHAHPFVIGVDAHARNHAVAVLACPTGEVVDEAQFPATVAGLQRAVSWVARCTGGDLDVLWVIEGVGTYGARLARVANDTGYAVAEAGRMNARANRGVGKSDPLDARRIAQSVLAVDETMLRRPRADDGVRAAVRVLVASRDHLSAERTSAVNALTALIRVADLRIDARRPLTAAQITAMAGWRARDEDLATAVARQEAVRLAKRVIAADREIAANTKQLTDLLNVSPARVLLDKPGIGPVTAAVTLAAWSHPGRVRSEAAFASLAGVNPIPASSGNTVRHRINRGGDRRLNRALHMATVTRIRMDPRTRAYVEKRTAEGRTPREIRRCLKRYLARQIYRQLNAAETAPNPT

SEQ ID NO: 289903 - protein, 414 aa, unidentified
MSYILFVGIDVSSKNNVICCLPEGDSTKPLSRFTVANDEPGVFALQERIVALMQKHHLTQIRFGLEATGPFSSHLARYLHSVLSFVPYDHSVYMFNPSLIKAFKKMHFLDAPKNDRVDAWFIAAKLRSGHLPRAFTWSETLAALQRLTRTRYHIVQTLTRETNFLLTNLFLKFSSYSSGPFGKKTSATSLAVIQEFASVEDIVNMSIEDLIAFVIESGKNRFDHPQEVAQALQKAARSSYRLPKAMADAVNLAMASNIRIIRSLQEQANSLKKAIEEHLATIPQTLTSVPGIATIFAAGLISEIGDIQRFPNQMSLAKYAGLAWTENQSGDFKGVESRLIKSGNRYLKYYFTEAAKSVQVHDTVFAQYYSLKKAEPAKYAEKRALALTARKLVRLVDYLLRSNRLYEPREVIRH

SEQ ID NO: 289904 - protein, 340 aa, unidentified
MRALYAGSDLHGNNNLIGILDEQGRRIFKKRLPNDPQLVQDVFKPYKEEIVGIVVESTYNWYWMVDALMEEGYRVHLANPAAIQQYSGLKHADDQHDAFWLAEMLRLGILPEGYIYPREERPVRDLLRKRGQLVRLRTALILSLQNILSRNLGVSVRVNDVKGVREDRISGLLGGSEDLALAGRVSKETIDFLTHQIHQIERVVEKRVRLKEAYRYLLTLPGVGKILSLTIMLETGPISRFATVGDYASYCRKVPSQWTSNGKKKGCGNSKNGNKYLAWAYSEASDFARRDYPEPRAYYQRKMQKTNAAVAHSALSHKLARAAYYVMRDQVPFQPEKLFG

SEQ ID NO: 289905 - protein, 291 aa, unidentified
MTLTDGFDAITDELRKYPVVLVLIEATGGLEAAVACLFQAEGFDVAVVNPRQARDFARTMGYLAKTDRIDARVLAQMAEVINRHPGRERFIRAMLDAELQVLAAMVVRRRQLTAMLIAERNRLYPVHPQSGKSINIIIKALEDELARIDEDMNNHIRNHFKELAARLSSIKGVGTMTVAALLAEVSDLGSLSRRAISALVGVAPINRDSGTMRGRRTIFGGRGGVRTALYIAALVATRFNPVIKAFYTRLLAAGKAKKVALVACMRKLLTILNTMLRKNEEWDESYHHVSL

SEQ ID NO: 289906 - protein, 423 aa, unidentified
MQGVEDNEEIIERVAAIDVGKAEVVVCIRIPDPARPGRRQQEIVHSSTLTPRLLVLADRLVELGVTRVVMEATSDYWKPVFYLLESRGLDPWLVNARDVKHLPGRPKTDRLDAVWLAKVAERQMLRPSFVPPGPIRLLRDLTRYRAGLVKVRTAEKNRVEKLLEDAQIKLSSVVSDIFGVSGREMLAALLAGERRPTVLAQLARTRMRPKIPLLEEAFVGQFTEHHAFLLRLMLARIDEAGADIAALEDRIRQLVAPFATVVTRLDEIPGVGATAAWTVIAEIGLDMSRFPTPAHLSSWARFAPGVNQSAGKTKGRGATGHGNRYLGQALGEAAVAAAHTHTFLGDRFRRLARRRGGPRATVAVGRSILVIIWHLLSQPDARYHDLGPDYTRRRADPNRATRNHVQHLEALGYTVTLTPVALA

SEQ ID NO: 289907 - protein, 341 aa, unidentified
MEQATTIGLDIAKYVFQVHGADSAGHVLFRKRITRGKLLGFLAAQAPCVVAMEACAGAHYWAREIAKLGHHVRLIAPAYVKPFIRRQKNDAADAEAICEAAQRPSMRFVPVKTQEQQANGIVFRARDLLVRQRTQCVNALRGHLMEYGYVFPKGITHVETLAAVVEDLQSSLPDRVRVILQLLVDTFTALEAQITALDAEINQRSKSDPTARRLMTIPGVGPITSTAITALVPAAEGFPAGRDFAAWLGLTPLQKSTGGKQKLGAVSKRGERTIRRLLIIGASAVVQQASRRGAPKGSWLAQMLARKPKMLVTVALANKMARIIWALLVKGGTYRTPTAAA

SEQ ID NO: 289908 - protein, 336 aa, unidentified
MSHYCGIDLHSNNHVLVVIDEEDKRLYEKRLGNDLSQTLKALSPCRESLHGIAVESTFNWYWLVDGPQEHGYDLQLVNTAAVKQYDGLKYIDDHHDAFHLAHLMRLGILPTGYIYPKEQRAIRDLLRPRLSLVRTASAQLISVQSQLWRSTGIRIQSGELRKLEFAPPLLDDYTLQAVQAGLAVYQVIQREIDALEQTAHQAVKLTDAFKILQTITGIGKILGLTIMLETGTIDRFAGAGNFASYCRCVDSKRTSNGKKKGEGNAKAGNKYLSWAFSEAAHFAVRFEPLAQRFYERKKAKTNGIIAIRAVARKLARASWMMLKHQVPYDARRMFPG

SEQ ID NO: 289909 - protein, 372 aa, unidentified
MTDYDAYIGLDVHKDSISVAVADAGRSAEVRLIGTIANEPEALSKLVRKLGSRHRRIEFVYEAGPCGYNVYRQIEALGFDCRVVAPSHTPVRPGNRQKNDTRDAVMLARLLRAGELTFVWVPDTVHEAMRDLVRARSVASHDARKARTLIQLFLLKHDLRYSAKSWTSRHRTWLRNRQFHHPAQQIAFQSYLNRLEQAEARKKELEEQIALISQTWSLGRTVVNLQAFKGVGLVIAATLVAEVGIFSRFDSPRKLMSYLGLVPGEHSSGRSIRPRGITKTGNSALRALLFEAAWSYRGQAKIGNWMHKRRPDVPQAINDIAWKAQVRLNARYRKLVGSGKKSTVAITAIARELVGFLWDVARRSEGGTLPTA

SEQ ID NO: 289910 - protein, 342 aa, unidentified
MTAIGIDTHKATLAACAVDELGRPVGEASFANDPAGHLAFIAWARSIAPEVTIGVEGSSSYGAPLARSAQSAGLAVREVPPHLSRVERLRTRRPGKSDPGDALAIARVTARESNLPPIRLPDRTTELRLLLEAREDLVAESNRARNRLHAHLLTLAPGYGGTVANLVAARHRATAGRLLRGVGGVQAELARGLLLRLARLEREVKALTSRIEILVAGHPLLGLPGVGPITAARLIAEVGDVRRFRSADALAALAGVAPIPASSGQVQRMRLNRGGNRQLNRALYVITVIQARFHPPAKAYVTRRMEVDGKSWREAIRALKRLLVRPVFRLLVEGAALQLAAA

SEQ ID NO: 289911 - protein, 416 aa, unidentified
MNYVGIDIAKNFHIVTIIDENEVKVFKKAFRVENDIAGYTGFIEKLEAISSDKTNFIIGIEATGIYGENLLEFLKLKAYNVKLLNPFQTSRYREQTTMKKVKNDNIDSLMIALFLKDGKYSEGYVTDDEYQSLRTLYRNRTTIQNDMKDLKKRILTNLAVTFPEFEYIVNPFTNIGLALLDKYPTAEHYKHSSVDRIVKVFRHIKGNNFTSEKAKQILEASKQSIFSGKAKDARAIAIKSSIRLLQIYLQEIEILEEEIFSLLEKQNISTQQFEEDMKADYKTTTLIHNLKSIPGVAEKTIAAIISECGDLTRFPNTAKFIGYLGLFPTENSSGNSKVIGHLSKRGSSIAKHALYMSAVGCLLHNPELKTLYDTKKSQGKSKKESLIAVSRKLATIIYAIFKYNTPYNPNRVFSKS

SEQ ID NO: 289912 - protein, 312 aa, unidentified
MERIFVGIDIAKDQVDVHVHPTDERFQLSRDDAGLAGLVARLQPLGPRLVVLEATGGYEIPVAAVLASAGVPVAVVNPRQIRDYARATGQLAKTDALDARLMALFAEAVQPEVRPLPTPEAQALGDLVTRRRQLVDMLGAERNRHQQARDLRLQRRIATHIRWLTKALAEIEADLATRIRSSPIWRERDNLLHSVPGVGDITAYTLIADLPELGHLDRRKIAALVGIAPFNRESGHWRGRRMIAGGRPAVRSVLYMATLTAVRFNPAIAHFYQRLTAAGRPKKVALTAAMRKLLTILNAMLRDQRPWQPESA

SEQ ID NO: 289913 - protein, 382 aa, unidentified
MIRERDAVTGPASRTAVAACKKKGKSSPFPYQIQKEGCGMRLIVGLDVSLEKTAICVVDEHRKIVREAQAASEPEALLCWIREQDGSIAAVGLEAGPLSQWLYRGMTEAGLDVVLMETRQVKGALKAMPIKTDRRDAEGIARLLHLGWFRPVHCKSVSAQEVRAVLGARKAVQQGFIALEMSLRGLLRNFGLKVGTISRGRFEYRIRELAAGNLMLEAATEPMLRARASLRKELAGLERSVRQLAQDDPVCRRLMSMPGVGAVVALTYRSAVDDPARFTSSKKVGPWVGLTPSRNQSGERDVSGGITKAGDVNLRRALCQAATVMMNRGRSSWLRTWAAQVARRRGAKRAMVALARRISVILHRMWVDDTNFRSDIPVPHAA

SEQ ID NO: 289914 - protein, 325 aa, unidentified
MEKIIIGIDVSKLTLDICIQETGVNRFDNIPNTEKAIKVFFKQFDKKQDILIGMENKGRFNAMLYSVLIHFSFTVYVINPLHLKRSMGLVRGKNDKIDSERIVQFLSKNYMDLQQWKPNSKVIEKIKLLNAERKHRVKIRAGLLAQTQDDQFLKPTMDKAVLRLNTKLIDILTKQINEIEDRIYQLICEDEQLYDHYKRIQSIPGVGKVLAFNMLIKTDGFTTINTPRQMACYAGVAPFDFQSGTSIKRRPKVSTMADKELKKLLHLAAMSAIRLENDLAIYYHRKVEQGKNKMAVLNAVRNKIIHRIYALIKNQTIYKNNLVLS

SEQ ID NO: 289915 - protein, 341 aa, unidentified
MSIVGGLDIHRSQITFDYLDTQTGEVRCGQVRPADREHLRGWLARFAGRDGDLAMEGCTGWRYVAEEVAAAGLRPHVADPAELAALRGRRRHAKTDRADARFAREQLQAGRLPECWIPPPHILECRALLEAYHDLRAEHTAWLQRIQAVLFHQGAPHPGSLTAAGGQDRLAEAAAGLSAAGQAQVANALAMTAACEQRLETTRRQVAEAARHLTGARALQERIYGAGPATALALACWLGGAGRFSSARKAVRFAGLDVTVYSSAGKRAPGHLSRQGPAVLRWCAYEAGKTHAHTAAPDHAYYAAVKDRIDGKRAALSEARKIIRRAAHILAELGDDALAPC

SEQ ID NO: 289916 - protein, 414 aa, unidentified
MEGGVRPDWMACDMITINIHHEVGAALAVSGNMYQSTPSVIKLGVDVHQGSYTVVAQEDHATLQPAQRFAPAAFVPWVARMVARGHRVFVVYEACGFGFGLQRALVAVGAECYVVAPCRLDERGQRVKTDDRDATALCQRLSRFVDGNRKELAIIRVPTEEEERLRAEHRQRETIVRARTRLAAQGRALVVNHSGESHRTAPIPARWWRAAGWKALAGTLPAWLRERLEMLRPVLAILDTQIAALTGTLEDAAPEGLPAGQGKMTSVILTREVCDWHRFNNRRQVSSYTGLCPGEYSSGGKRVTGSVTKHGNPRLRAALVELGWRMVRFQPGYPPVAKRIHILGKGAKATGAARKKAIVAVARQLAVDLWRLNTGRCTAAQLGLRVTGGEPTQAPEEVVDSGGTVPPPAPEAAP

SEQ ID NO: 289917 - protein, 439 aa, unidentified
MAELHVLDQRAAFVDVGSEQMHVSIAGGAPVVFGTVTTQLHALRDWLLAQQVHSVAMEATGVYWLPLYGVLEAAGLEVVMVNGRQTKNLPGRKTDMADCQWGATLHAHGLLRPGFVPPAHIRRLQDYVRLRNDHIMEAGACVQQMQKALERMNVKLHDVISDLSGVSGLAVVRAILDGQHDPEKLLALCNTQIQRTKGERVKESLRGTWAEEHLFALGHALQTFEHYQRQIADCDRQIQELLPEPPDQQPPGQAHQDKARKRPGGNAPRIPGLRKILAHMCDGRDVTVLPAHTEYTALQIISEVGTDLTKWCTEKHFTAWMGLAPGTRQSGKRRGNVKRSRNRVGRLFCVMARSLARSRDIALGGFYRRMAARRGGLVANIALARKLATLFWRVMVKGVDYVEHGLAIYQAKVRETKQRALRRLAKELGHELVPVAMPS

SEQ ID NO: 289918 - protein, 382 aa, unidentified
MQPINTVNPTIYLAIELSASTWLIAARLPGSEKPHLHRIEGGDTAALFALISSLRARVARRLDAAIGVVCCFEAGRDGFWLHRLLTAHGIANYVLEPTSILINRRARRAKTDRLDAIGMLRVLAAYLRGDRQSCSMVRVPTPEDEDAKRIHRERENLVQEKLRIENRIEALLFTQGIRKRPSLRSWERDLAVLRTGDGREMPRHLRAELDRLRRRLVTILELIREVEAERDEVVTTNPEHQTSRKIVALCRIRGLGESFAGVLTREVFYRSFDNRRQIASYVGITPMPYQSGSMDRDRRISRAGNPRARTTMIQLAWLWLRYQPGSELAEWFRKRVGTLAGRTRRIAIVAMARKLLIALWRYVETGVLPAGAEIRPESVAAA

SEQ ID NO: 289919 - protein, 348 aa, unidentified
MAHFVGLDVSVKETSVCVVDAAGTVILEQKVTTEPADIITLLTSLGVSFCRIGIEAGPLSQWLVNALTAADLPVICVETRHMKALLTAQQINKTDRNDARGIAQMMRVGLFKPVHVKTLVAQEQRMLLTSRKLLQRKLLDLESDLRGTLRNFGLKIGAVSGSRYEARVRELVAGFPRLAAIAEPLLNVRRVMRQQFAVLHKMLLDTVRDDPVCRRLMTAPGVGAVVALTYRATVDQPQRFVHSRAVGAHVGLTPKRYQSGEVDYDGRVSKCGDALLRTMLYEAAHSLLIQSRKWSWLKAWGLRVAQRRGIRRAIVAVARRLAVVLHRMWVDGSEFRWSKDSAAAPAAA

SEQ ID NO: 289920 - protein, 383 aa, unidentified
MKKTQETLKREDTTKEAIMYTAFELSDKKWKLAFSNGSKVRNISTDARDLNELQVQIFKAKKRFGLNEDTRVMSCYEAGREGFWLHRYLLSLGTENLVVDSASIEVNRRKRRAKTDRIDAGKLLGMLMRYHGGEKKVWSVVRVPSEEAEDGKNLGRELEVLKKERTMHSNRIKGLLIQQGIVIKRLNVKRFLSELEGCRTWDGKKLPIDFKARMVREHQRLKAVDEQMRVVKKERKKRVESGDKTCYRQVAQLMKLRGIGPENSWDFVMEFFSWRDFRNRKEVGALAGLTPTPYDSGGSLREQGISKAGSRRIRTFAVESAWCWLRFQPQSKLSKWFNKRFAQGGKRMRRIGIVAVARKLLIELWRYLKYGTVPEGACLMKGI

SEQ ID NO: 289921 - protein, 347 aa, unidentified
MRYVGLDVGKARCRAALMNQKGDIEGEFFFENNSRGISNLVSALTSEDKVVMESTGNLWLNIYDALEHRNISVVLANPLKTRAIASAKVKTDKVDARILAHLLRSDLVAESYVPPGNVREMRALVRHRLSLVKMRTMVKNKAHAISDWYGYRCEYSDMFGKAGMEWLRTLEFGELDRLMLENHLSLIESINAQIRRVDEAIRKKASQDEDVRLLLSLTGIDVYTALLLRSEVGPIARFPDYRKLVSWAGLAPSVHQSGNVEYYGAITKRGSSMLRWAMVEAARTAVQHDERLGAFYERVRARRGDQKAAVAVACKMLKIVWFMLTRRETYGNANGRLYGEKLKKIGV

SEQ ID NO: 289922 - protein, 370 aa, unidentified
MLDTTTFVGLDVHARSIKAVSLDVMTGEVRCATFGYDAGAVAEWVRSVDPKARCVYESGVTGFDLQKRLSGLGVDCVVGAVSKMIKPSADRRRKNDRNDAEFLARMLSVGNVVEVWVPDDECEAARDLTRALEDARDDLSRAKQRLSKFLLRHGLAFDERTPTGRRKGNWTRAHWSWIESIRFAEGADNDVLAYYVDAVRRAAEEKARLEGLVEAEARKPRWRRRVDSLRCLKGVDTATAADLVFEAGEFSRFGNARSFAAWVGLTPSEHSSGESDRRGAITKAGNKHLRKALVEAAWHYLTCSGRPKDLAKGQAPDRVARRHAAKGVRRLVERREALLARGVHNNKANVATARELACWVWAVGLMAEEA

SEQ ID NO: 289923 - protein, 312 aa, unidentified
MDAIVVGIDVSKERLDVAMRPTGETFVVSRDAEGLDALIAKLTPLAPVAVAVEATGGYETVVAASLAAAGLAIVVVNPAQVRSFAQALGKRAKTDPLDAGVIAHFVEATRPQIRPLPDEETRLLADLVARRRQIVAMIVAERQRQKRLTNRRLQKSIARLLAALQKELSSLERDIDETVRGSPAWREKEDLLASVPGVGKTIARTLIAELPELGTLDRRKVAALVGLAPWTRQSGKWKGKSCIGGGRADVRSALFLGAMVAARRNPDLKAFRDRLVAAGKPKLVALVATARKLLTILNAILRDQKPWRQQTA

SEQ ID NO: 289924 - protein, 354 aa, unidentified
MSQATTSPLPVTIGLDLGSRTSQFAICSPSGDWLGEGKVATTSTGIRGLLERHAGARLVMEASTPSRWIRDIGVELGSEVIVANPRSIPVITASVRKSDRNDARLLAQLGQLRPDLLDPVVLRDACHQEVRSLLFARQQLVEQRTALINFVRAQARMLGEELPSASTRAFVAKCAKLLPASLFKMLEPLVQILEALGQAIRVYDERIEQLCQKDFAQTAVLQQIHGVGPLTALCFVATIGDPARFAKSRQVGPYLGLVPRNDQSCGHDPDLPITRCGDTYMRTLLVSVATRILGPFGQDSDLRSFGLRIAAKGGKRSMARARIAVARKLAVLMHRLLLTGEVYRPLSQPQAAVA

SEQ ID NO: 289925 - protein, 312 aa, unidentified
MYHIEEEVVYMGVDIAKAYLDAAIGNEKRRFANDALGHRELIKWVKQFSAPVQVICESSGGYERALVQALARAGVKISLVQANRVRQFARAAGILAKTDRIDAKLLSAFGEAMQPGTISASQLEQEHLRELESQRRHLTHLLVMEQNRAARMSDLCVCKINRRLISQIKKQIEQLELLIQEQIKASPELCTKAEKLTAISGVGARTAALLLAQMPELGQLNRREVAALVGVAPFNRDSGRMRGKRAIYGGRRAVRHGLYMAAPGAPRHKTILRGFYLRLRAGGKPAKVALTATMRKLLIVLNSSVKPDLKYA

SEQ ID NO: 289926 - protein, 382 aa, unidentified
MDLMYDCCAGLDVHKKTVVACIRRVGPDGAVSSQVRTFATVTAELLALADWLEQQGVRQAALESTGVSWKPVFNILEGRVPVMLVNAQRLKTVPGRKTDVKDAEWIAQLLQYGLLSPSFIPPPAIRELRELTRQRTELVRDRAAVVNRIHKVLEDANIKLASVASDILGVSGRAMLGAIVAGCEDPEDLAELAKRSLRGKIPELKRALQGRITDHHRFLLKALWDQIDALEGLIGRFAVRIEEAMAPFAEEALRLRGLPGVGKQAVEGIVAEIGTDMTVFPTAGHLSSWAGVCPGNDQSAGQQRNGKTTKGSQWLRSTLVQAAWAASHTKETVFSACYQRWVKRLGRKKALVAVAHKLLVVVYHMLKQRSEYREQWAPPKVA

SEQ ID NO: 289927 - protein, 446 aa, unidentified
MKKSSRMSVIHPHAAGVDIGAEFHVVAVPPDADAAPVRTFQRFTGDLHRMSGWLKTCHITTIAMESTGFYWLPAFEIPEAAGFNVILVNARDAKNVPGRKTDVNDAQWLQKLHSFGLLRASFRPEHDISVLRSYLRQRERLTEYRAAHIQHMQKALMQMNVQLHHAVSDITGVTGLSIVRAIVSGERDPSVLIQYRDVRCKKTPEVLQQALTGNWQPEHLFALEQSVAFFDFYQEKIRECDDQIETSLLQLSTGTEEPEGVLPSARHRTKQPNQLSFDVRPLLWKITGADLTQIHGFGPYLALKFVAECGTDMNRWPDASHFTSWLCLSPGNKISGGKVLSSKTRRSSSRIAAALRLAATTIGRSDTALGAFYRRLSSRIGKAKAVTATARKLAILFYNALKYSQKYVDPGADYYEERYRNRVLDGLKRRAKSLGYSLQQDPELCV

SEQ ID NO: 289928 - protein, 347 aa, unidentified
MNSVGIDLHRNRSHITVIDEQGELSLSRRIVNDRATFLELLAGLEGESRIAVEATYGWEWLAELLEDAGYEIHLAHPLRTRAIAAARVKTDAVDARTLAHLLRADLLPEAYVAPRELRDLRELLRHRIALTSMRSALKNRVHAILAKHGITRQHSDLFGTGGRRFLDELQLREAPRRRLDSLLALIDDFDREIAHTTSEIEQRAKADDRVDVLTQIRGVGRYTAMLIIAEIGEIERFPDARHLCAWAGLTPTVRSSDGKARLGHISRQGSPALRWALVEAAQKCTTGGGPLRESFERIAKRRGRKIAKVAVARQILTLSYYGLRDGEIRCLARRSRASAKEKLAVTP

SEQ ID NO: 289929 - protein, 358 aa, unidentified
MNEDRRTTTQEAVVGGVDTHKDAHVAAVLGSTGALLGTSEFPATLAGHADLLRWMVSFGDVSCVGVEGTGNYGAGLTRFLLAEGARVVEIVRPDRRARRFNGKSDTLDAENAARAVLAGDRTSAPKHRDGAVESLRALRVARTSATKARRAALQLLRNTIVSAPDGLRESVSGLTRTVLVRTCAAWRPNREVAHEPTTATRIALRSLARRILHLEEEIADLDGLVASLVARINPRLTEASCVGTEIAAQLLVTAGENPERMRSEAAFAMLCGVAPLPASSGKTRRYRLNRGGDRAANCALHMAAISRLRVDPRTRDYAARRAAEGLSKKEILRCLKRYLARELYKLLLPLPPDAPRMA

SEQ ID NO: 289930 - protein, 395 aa, unidentified
MLYLGLDIGKRTHVASLMDSEGKILFKGFSFQNSTEGAESLLQRLASFCPSTDECLIAMEATGHYWLALYAFLDQKDYIVHVINPIQTDGWRKGTEIRKRKNDTIDSVLIADLIRYGSFHSHPKIDENYFALRQLCRYRTYLVGTASDFKRKIIALLDQVFPEYEALFSSTGIFGKASQTILSTFTVPEELNKISAETLTQVIQEASRKRLGKHKVEALKQAAAQSFGIRFAQDAFIFQLRSMLDQLAYIEFQIKQTEEEINHHMQLIDSMITTIPGIGIVIGATILGEIGDIQRFSNPKKLVAYAGIDASVTQSGEYEATHNVMSKRGSPYLRKALFQAALVASRCDPTFRAFYDKKRAEGKHHFTAIGAVARKLCYVIHAILTKNEPCIIQQS

SEQ ID NO: 289931 - protein, 318 aa, unidentified
MLADQLDYVVGVDPHRDTHALAIVDVRTGGVGFEASVEASSIGYARALELARGHAPGRRSFAIEGAGSFGAGLSRFLSGEGERVLEVGRLRRERRSGGKNDALDAIRAARSILAESRAAEPRAGGEREALRALMAAREGAVKARRAALCQLRALLITTPESLRSELRPLSRARRVRQLTAEERELAAEIETLARALAPLLFNLACFGLLTAAQLVISWSHRGRIRNEAAFARLAGCAPIPASSGQTIRYRLDRGGDRRLNRALHMILVTRRRSHPATIAYIERRVQEGKSSREASRCLKRYLARNLYRLLEHGAPLAT

SEQ ID NO: 289932 - protein, 345 aa, unidentified
MDYFAGLDVSVKETSVCIVDDTGKIVREVKVESEPEALLAVLKNPAYHFKRIGLEAGPLSQWLFSALAEAELPVICVETRHMHAVLKAQINKTDRNDARGIAQMMRVGLYRPVHVKTLRSQKLRMLLTHRQLLQSKAIAIENDLRGTLRNFGLKVGMVGKMKFEARITELVENRSDLAVLVEPMLIVRRVLREQIVILHRRLLAIVRDDEVCRRLMTVPGVGPVVSLTYRATVEVPARFQKSKSVGAVFGLTCAKYQSGEIDRSGRISRCGDEMMRAMLYEAAQSMLVHSKKWSWLKAWAMQIARRRGMKKAIVALARRLAVIMHRIWVDGTEFRWTRDQAAAPA

SEQ ID NO: 289933 - protein, 472 aa, unidentified
MRYIGLDLALTTAHKAVVLDEKGQAITSVISVKATATALEQLFQCARETAPEDEPLVVVMEPTGMAWFPVAVFCQRQGVQVYLVNSQQVADLRRYYRKHAKSDRIDARVLARLPMVSPEKLHALELISAAKLACQRGCKEQDRLIDLTTAIHNRLRAIDRFAWPGLEQVLPDNASTLTRWFREHWYDPSRVIALGASGLQQAWQESGPKSAEMPPSEEWAAELVQLAQEVLALYGSEAEFLDYAYLQAEVTREQALLAMLEEEHKRLQLKTVRRLYRQLHPSRNLESLYGVGQDGAAVYFSFIGNPERFPDHAAFRGWSGMIPRSSQSGASEAKGLHISQAGPDLVKKFSFMGAETARQWDPQIAAIYYDQIVRHGKHHTQALCACATHLLDRIWTILKEDRPYELRDVDGTPVTARQARQIIDLRYTVPKEVRQRNNQRTRRTRREQQAEKHHKRESRPSGVRGKSETSSG

SEQ ID NO: 289934 - protein, 359 aa, unidentified
MASIEVCPLAGRPQRLLEAMEMIVIGVDVHKQSVTAVAVDEAGRMLDEKTIQVGSDELLEWAAALGEESLWALEDCRRLTRWLERQLLLAGQALVRVPPKLMAPERRAGRGRGKSDPIDALAVARAALREPGLSRPRPDEEPFRELKLLVDHRDAIVDERRRVHQRLRWHLHQLDPTFEVPLRMLARASHLERVSRWLARQEQELQVRLARELVSSCRSLNRMIPSSTRSSSGGQLLWRRRYSTCPAADRSPPAKLLAEIGPIGRLTTDAQLARHSGVAPLEASSGRVQRHRLDRGGNRQLNSALYRIAITQARIHEPARAYLERKQSEGKSRREAIRCLTRMLARVVFNTLKASPALT

SEQ ID NO: 289935 - protein, 367 aa, unidentified
MAQKLTERRLAMNKRSKLNFSGQAIYLGLDVHKKSWSVSIFTKYGEYKTFSQPPEAEALIQYLQRHFPGAQYHSVYEAGYCGFWIHDQLRKRGIDNIVANPADIPTQDKERRNKRDRIDCRKLARGLRGGDIKGIYTPPRWRLEDRSLIRTRLSMGRKQARCKNQIKSMLLFYGVAIPEQREMGHWSRRFIRWIEEIRMERSSGDVALKLHVEELCHLREIIAKLNRSIVALARTQEYRTWISLLKTIPGISTLTAMIVLTELHEITRFRSLDQLCSYVGLIPDTRGSGEKEHVGGITQRHHFSLRWLLIEASWIAVRKDPAMMEAFNEYCKRMRKTKAIIKIARKLLNRIRYILKNQAEYVTGVIE

SEQ ID NO: 289936 - protein, 367 aa, unidentified
MKKVSTAAAKQSKNFSQPKLTIGLDLGDRNSWYCVVDEAGQIQLEQRVRTTAKALQEVFGTMPRSRIALEIGTHSPWISRMLSDLGHEVIVANSRKVRLIGESRKKDDRLDAQTLARLARIDPKLLYPVKHRSVQAQADLTLIRARAGLVRARTGLVNMARGLAKSYGERLRGCNVRNMNPEKAESLSPELQAALEPLLNAIESLSERIVEYNERIENLAQQSYPQVALLKQIKGVGTLIALTFLLTLEDPHRFGKSRDVGCYLGLQPGRRNSGGSEPQLHISKEGDPYLRTLLVQGAQHILGPFGVDCDLRRWGLKLAERGGRSGKKRAIVATARKLAVLLHHLWVSGEVYEPLHNSNQKAMPAAA

SEQ ID NO: 289937 - protein, 348 aa, unidentified
MTVTIVETRAITGGVDTHADAHVAAALDPIGGLLGVQEFPATAAGYAQLLDWLGAFGTVCLVGIEGTGSYGAGLARHVTTAGVRVVEVDRADRQDRRRAGKSDPLDAVSAARAAQSGRARGAPKGRDGTVEAIRVLMVAKRSARAERTQTINQARALILTGPEDLRARFAQHDTADLVAELAALRPRPGEVVGYATRVAVRELGRRAGFLDSQLERLDELIVPLVTARAPGLLALYGVGPDTAALLLVAAGDHPERLRSEAAWAHLCAVAPIPASSGKVTRHRLNPGGDRQANHALWRIVITRMSSHPPTRAYVARRTEEGLTKKEIIRCLKRYAARGIYPHLRAAAG

SEQ ID NO: 289938 - protein, 332 aa, unidentified
MNMHPQGGVANRDHRPNVGVDVCKQHLDVCLGTLELRVVNDATGWDVLIAKFKEDDVDLVVLEATGGYERGLVCALQGAGITVARLNPRQARDFAKSMGVLAKTDQVDARTLRDFGDVLARHKDRAKFITPMVDEQRQVLAELMTRRRQLVDMRVAENNHLEHAGKHSVRSIKSVLKTLDRQLQAIDHEVDDHLDRHFKDQRTLLDSVKGVGPVTILTLTAALPELGSLGRRQIAKLVGVAPLADDSGPRKGKRRIWGGRADVRAVVYMAALAAIKHNPAIKVFHSRLIAAGKPKKVAIVACMRKLLTILNAMLRDQSMWNAAKHLQSTKTA

SEQ ID NO: 289939 - protein, 427 aa, unidentified
MSYRIAGIDVHKRMIVVVVADVDVAGDYEFERRQYGSTPAQLRLLAAWLVEQGVEEVVMESTAQYWKPVWASLERYWKPICEKWEGTSPMSGSLHLAQAQSNRGARGRKNDFADAERLVRRLVAEELTLSFVPDAEQRLWRTVMRTRYQLRCNQVQLQNRLEALLEEAHLKLSSLVSDLLGLSGRRMLQAMAEGETDPAVVAARADCRLRATQEQLCDALGACRELHPVYRRLLKAALEEWERIEAQIAQLGQEMASLIGPQQEQVQRLAEVPGLGVDSGQQILAEVGASAATFPSGRALASWVGACPGEEETAGVNRNRRSPKGNRHLRRILNQAAHAAVKLKGSIFALLYRRYVVRLGHNQTIAVIAHRLCRLIWKILHEGVRYDERGPAVSQRAQQRRTARMIRQLRSLGYSVELLHAAAGVPA

SEQ ID NO: 289940 - protein, 413 aa, unidentified
MNPHQTLTHYAGFDWAKDHHDIIVIDLQGRIVADFRIDHTPAGWRLWKEKIAAWPQLGVAIETNFGAAVEQLLESGVSLYPVNPMNAKRYRERQCSSGNKTDRHDAWALADALRMDGHAWRTLGATDPILAELRILCRDEVALIEERTALINQLQQALLEYYPTALEAFDDWISPGAWAFVEAFPDAQSLEKAGKRKWEKFLHSHRLYRPQTYDKRITAFENAGQWKSNASLVAAKSLLAVARCKQLRVLQCQLDVYRQRIEALYASHPDSNLFGSLPGAGPKLGPRLLSEIGSDRALYEDPQGLQCMAGTAPVSYQSGQVHKVNIRRGCNKNLRHSMYLFADKSRAQSAWASKYYDALRERGKTHAQALRCLGQRWLKIIWKMWQTHTPYDAELHMKNQLAHGSWVLQLSPQ

SEQ ID NO: 289941 - protein, 363 aa, unidentified
MTEEKRRYVGIDLGKREYTMAIVGKNGKMSIHLGKTSEQGRQALYKKLEKTDKVALEAGNLAFKMAQEILQRVGCEVRVLNAAKLPFIWDAPTKTDKEDAMKLAHLIEERRDEKLPIVPLPSEKEMEMRKITSNKDRETRNRTRHINRLHSLFHNQGHTEIVKKDLATAERRKEAVKLLTGIDRQEADWLLQYLELHEQRIKELEDTIKGEAKINEDIQRLLNIAGIGPITAYAFVAHVGAGNRFSTGAQVSNFIGFVPKLDYSGTIQRNGHITKRGNGYLRGLLVQAAWSAVRSKKGGALRERFIYYTLCRAESKKKTVVAVARKLAELMYSVLRNKTEYEVRRWDGPKNKINLQAVLEKCA

SEQ ID NO: 289942 - protein, 375 aa, unidentified
MREKVRFLGLDVHAETIAVAIAEPEGEVRSLGTIPNREDSLRKMIKKLGPTDKLRVCYEAGPTGYVIYWQLAELGVKCEVIAPTLVPVKAGDRVKTDRRDAEKLARCYRAGDLTAVWVPDEGSEALRDLVRAREAAKQDQLRARHRLSKFLLRSGQRPPSGVRSWTRAYLIWVAQLRFTQMAQEATRLDYLHEVEHMRERVERLEQAITEAVKLASPALQQVINDLQALRGIADISAVTIAAELGQVSRFDSARKLMGYCGAVPSESSSGKRTRRGSITKTGNAHLRRIVVEAAWSYHRPPGIWYGLRKRQESISEEAKEIAWKAQHRLHKRYLRLAAAGKDKRKITTAVARELLGFIWAIGTRAETVVRQRIAA

SEQ ID NO: 289943 - protein, 378 aa, unidentified
MNTDKYVGLDVHKDTTVVAIAEGGREGECRIYGTISSDLHALEKVLRKLGGPVRQAQGVESEGARLRVVYEAGPTGYVIARRLQQLKVDCIVVAPSRTPQPKGQRQKTDRRDALMLARLHRAGELAGIHVPDAVDESVRDLTRARADAVHDLTRAKQRLKSFLLRQGYRYTGKANWSEAHQRYLRELVLPLPALKAVLEEYLLTITQRMQQVDRLDELIAAQVPQWRMYPAVQALMCLRGVKLNAATVLVAELGEIQRFAHPRHLMAFLGLVPREHTTGDSRKLGGITKTGNAHARWMLAEVVQHAFLPPKVSSHLALRQQGQPHAYRELSWRAQTRLHQRGRHLLGRGVMKPKVTIALARELCGFVWALLRQVPAPR

SEQ ID NO: 289944 - protein, 349 aa, unidentified
MRFYNGQHRHWCGIDLHAKTMYVCILDADGQVLVHKNLRATSAAFLEAVAPYREGLVVAVECVYLWYWLADLCAAEGIDFVLGHALYMKAIHGGKAKNDRIDALKIATLLRGGMLPRAYAYPAGMRATRDLLRRRLHLVRKRGQLLAHIQMTAQQYNLAPLGKRIAYPANREGVAEQFGDRAVRQSIAVDLAMLERYDEVLRDLERDLVRQAKQHDPQAFALLRSIPGVGKVLALTILYEVHDIERFDRVQEFASYARLVKCAKESAGKQHGTSGAKMGNVHLKWAFSEAAVLFVRHSAEGKRLLAKLEKRFGKGKALSILAHKLGRAVYFMLKRGKAFDLERFAATGN

SEQ ID NO: 289945 - protein, 347 aa, unidentified
MKTTINMLAIDLAKSSFQDCAVAADGAVLSNRVFSRTRLTALLAEHPACVVAMEACATSHHWGRVAQEHGHEARLVPAAYVKPFVKRQKNDRADAEAIAEAAMRPTMRFVAVKSAETQGRAVAFRTHQCMVRQRTQLINALRGHLAEFGLVAPKGPASLKLLENALGEQTSDLPSPVREMGRIYVEQIARLTEVIERLADEVDSASKTDEELRRLCTIPGIGPVTAGAVAAFAPDLDTFDSGRNFAAWLGLVPRQRSTGGKTRLGSVSKMGQTDIRRLLIVGASRRRRGSRATSVIRWVVRKGGSTNRWLAAIVARKPKMVAAVALANKMARMIWAMTTKKEDYRMA

SEQ ID NO: 289946 - protein, 369 aa, unidentified
MKNRLLYVGLDVHKNTTDVAIASGRSNGKVRSYGKITSTLDALNKLIKKLQDGDKELQFVYEAGPCGYQIYRHLNAKDIHCCVVAPSMIPRRSGDRIKTDRRDAINLVRLFRAGELTSIYVPTPEDEAIRDLVRCRDDMKRFERKARQRLLSFLLRHGHHYNGKKNWTKGFYSWLATVRFSYPAQQITLQEYIDVTNECSERIERITQQIQVHVEEWSRAPFVKAYQAMRGVSLIVSTTVAAEIGDMRRFQNPKQLMAYLGLIPSEHSSGKTVRRGPITKTGNSHVRRVLIEAAWTYKMQARISSILLKRQKGLPKSICDISWKAQTRLCARYRRLYARGKSRQTVVTAIARELSAFIWAIDRQVQLTL

SEQ ID NO: 289947 - protein, 345 aa, unidentified
MKKVVAGMDLHSNNVVIGIMDMDGKRVASRKVACDLSEVVKFLAPFKKRLEQVAVESTYNWYWLVDGLEALKYPVVLANPSGMEQYNGIKHADDTNDAFFVAELLRLKILPTGHIYDAQLRPVRDLLRRRLTLVHHRTALMLSFKSLYTRTTGQEMSLSQLKALEIKEAQQLYDHPANQLIAGMQIKQIEQLSQSIQKIEKGVLDSARELPFYAKLLSLPGVGKILGMTITMEVGEIKRFAGPGNFASYCRTVEAKRTSNQKKKGANNSKCGNRYLAWAFVEAANFAKRYDEQCRKWYDRKAAKTSNVIATKALACKLAKAAWYLMAEGTDYDPARMFGQPAKTK

SEQ ID NO: 289948 - protein, 353 aa, unidentified
MNETITYRIGFDVAKGVFQAHAVKVNEPGEPVAFTKRLKRAQVEGFFATLPRSLIGMEACGSAHYWARVARRYGHEVRLMPPAYVKPYVKRNKSDPLDAEAICEAVGRPTMRFVPIKSEADQATLMLHRMRASFVEKRTAATNQLRAAFAEFGIVAAAGDRGLSELLALVETEAEKFVHLPAALRLVLAELARQWRSCHEVVCRMDREIAVGVKKNARAMRLTFVPTIGPVGASAIDAMLPNPHVFQSGRHFAAFLGITPREDSSGKTVRRGPITKKGDTYLRRILVLGATAYLARVRRGQVKGVSPWVLRMAAHPKRKLAAVALANKTARIAWAMLAKGEDYRAPAAALEAA

SEQ ID NO: 289949 - protein, 341 aa, unidentified
MNSVTLGIDLGKRWFHVVGCDAAGKVVLREKLGRHQLLQLMAQHPPCLVGIETCCGSQYLARKFQGFGHDVKLLPAQYVKPFVKSQKNDFNDAQAIAEAVRLPTMRFVPLKSEEQMDVQALHRARERMLQQRLALTNQIRGLLLDRGIEIARGFYALRTVLPALLEKEDSGLTPMMRDLGRMLLDMWNRTESTIEQMNDRLKCLARESDLCRRLQTIPGVGVLLSTAIVSAVGNASTFRRARDLAAWVGLVPQQRTTGGKPRLLGITKRGNSYLRRLFVQGARALWVWKDKHPNDPIQHWLIQLAERRHAHIAVCALANKLVRITWAVMRSGAEFNLHHHT

SEQ ID NO: 289950 - protein, 341 aa, unidentified
MQQTKYFIGLDISADDFSASCITSPDNLVFSTQKFSNSIDGSNEFLALLSKHDIKQSEAIICMEATGVYSENISYFLASKGFTISIEAPHKIKNKTKDSPRKNDFIDALSIAEYTYRYFDKLPIWKPGNEIIEQIQVLLTTREHLSVQMIANVNALKTLKHKYYQTPLANQIYEQTISKLKEHIKQIDQEIKTLIDKDDSFKNNISLAKSVPGVGLLLAANLLVLTKGFTEQLDYKHIASYSGICPYEQISGTSLHKPPRSRMCGPAKIRKLLYLAALSVRTHNQNFKKYFLRKVAEGKNKRLVLNNIENKLLKIICAVINSGTAYTENFKSINPELLKTA

SEQ ID NO: 289951 - protein, 373 aa, unidentified
MFHFTTLFIGMDVHKESFSLCYYDMMANQFKHSTKVGPNVSYIVNYVNELRRLYGQDAEVLCGYEAGCLGFTLYHQLQAHGIPCIVMAPTTVMKEGSKRVKTDKKDAAQLAKALAFRSYRPVHVPTVEDEQVKEYIRMRTDHKVALKKIKQQILAFCLRHDFRYTEGSSNWTQKHVRWLHSLNPDGLYAEILTEYLLTYEKLVDQIERYDARIEQLGQSDSYQEKVSWLSCFIGVKTLTALSIVTEIGDFNRFATAQHFASYLGLTPNENSSGDKERRGAITKAGNSHVRRLLIEAAQSLAKGTIGYKSKELKRRQSGNRVEVIAYADKANERLRRRYRTLVLGKNKKQNVAKTAIARELSGFIWGMMTGRIA

SEQ ID NO: 289952 - protein, 346 aa, unidentified
MRFYTKQHKHHCGIDLHARSMYLCIMDQSGEILHRNMRANPEAFLKAVAPYREDLVVSVECMFTWYWLADLCRSEQITFVLGHALYMKAIHGGKAKNDRIDALKIATLLRGGMIPQAYVYPPEMRATRDLLRRRLHFRRKRSELLAHIQNTNSQYNLPEFEKQLTYASNRSGVVERFADPSVQKTIEVDLGLLAYYDQMLRELEYFILRTAKHHNHNTLYRLRTVPGIGKILSLVMLYEIHDINRFERPQELASYARLVRCARESAGKISGTGGRKIGNVHLKWAFSEAAVGFLRKNPEGKRYYARLERKHGKGKALTVLAHKLARAVYYIWKKDKVFDQEKFLAA

SEQ ID NO: 289953 - protein, 358 aa, unidentified
MNYVAIDLHKRYSVVSALNEQGQRMREARIDGNSAAGFAQYFKGLGGPSQVVIEATWNWGRIHDLLEEIEEVEEVVLAHPYKTRIIAEAQVKTDKLDARALAKLLRADLVARAHIPSLETRRRKDVLRQRLFWVRVRTMVRNRVHQLLDRQPRVDLPRVSDLFGGRGMAAMKKLPLPEPDATQLRQDLGLLEELGKRIKELEKMIEAENAGDAATQILSSLPGLGKILAAVVAAEIDHVERFAHPKKLLAYAGLVPTTHSSGGKTYNGPLMPMCNKWLRWAFVEAAWVAVGCSNYFGGLYRQHRARGKGANTAIVIVARRMAEIAWQMLHQQRPYEDRPLTHNTFPDRSDRALVEVTS

SEQ ID NO: 289954 - protein, 341 aa, unidentified
MEEKKAIWCGIDVSKNDMVAALDIDREQPVRKLPSRKFARTIDGLRDVLEWCAAHGADEAGLRVLMESTGNCSRELLQWFQNHFPHIPVSMGNPTHIKHFIDSEHLGNKTDSLDAKAIARMGTTQKPRATPLPPPEYLQLQNLVRARDTLKTKMRSLEVSGKAMLDVCSLPFQCFMNVVKVMEAELEKIEYAILDLIARMPELKAVVEIMCTMPGVSIISAATILSEMGPFSNEYSRDSFSAYTGLRPVQSLSGTSVNKSRLSKCGSPLLRKVIYMCSLHSVSKIPSLKSFHERLVAKGKKPLTARSACMRKMLLILRSMVLNQRDFQENYVSFEKKGKVI

SEQ ID NO: 289955 - protein, 340 aa, unidentified
MNKNTVIGIDLAKTSFAVIELGRGGDVKRRKTFRRDGLKRFLAKHEPATVALEACGSAHYWGRWLEEHGHKPVLLPPQHVKGYLRGQKNDYNDAQAIAEACLHGAIRSVAVKSIEQQDEQAFHAIRRSLKVESTRLVNQMRGLLAEYGFTVPKSVSAFRRRVPELLEDAENGLSARFRMLLNRQWSRLKALLDEQAWYDQQLQQQVKEDDTCCRLTGIPGVGPVVASAVKSWMGDGQQFRRGRDASAALGLVPKQYSTGGKQSLYGITKRGDAYLRSLVVHGARAVVRTAKNKQDALSRWALAVEARRGHNRAVVAVANKIIRMAWVVVARQEEYRPAES

SEQ ID NO: 289956 - protein, 337 aa, unidentified
MGRHIGIDLHRNCFTACTLTTNGRSYVRDWRLGDLDRFVKQLRPTDEVAVEVTGNTRLFCDAISDAISRVVVVNSSRFKLISQSVKKTDKNDAKTLAFYLSKGMLPEVRMKGKEHAQLASLTQTRDKLVKLRTVLKNKINNILSAHGIQLKKEALSSEKCLSEVLGMKFDPIVEIELSVLIEQIRSLNESIARLEKSIKDEGGKLPGHKNLKSIKGIGDVSAGILLSVIGDVKNFTDEGKLASYFGIVPRVNNSNETQHSGRITKRGAKLGRTTLVQCALIAKRYSSYLSRHYEKVKARRGTGKAIIALARKFLGVIYHTLSNNWVFEDFPNFVLAE

SEQ ID NO: 289957 - protein, 375 aa, unidentified
MKEKLRFLGMDVHAETIAAAIAEPDGELRSLGTIPNRMESIRKLIKKLGPVEKLRVCYEAGPTGYVLYWQLAELGVQCEVIAPSLVPVKAGDRVKTDRRDAEKLARSYRSGDLTAVWVPDEGSEALRDLVRAREAAKQDELRARHRLGKFLLRSGHRPPTGVRAWTHLHLIWVSQIRFTQMAQESTRLDYLHEVEHMRERVLRLEQAIAEAVKLASPALQEVIKDLQALRGIAHISAVTIAAELGQVSRFAGARELMGYCGAVPSENSSGKRTRRGGITKTGNAHLRRIVVEAAWSYQRPPAIWAGLRKRQQSASEEANEIAWKAQHRLHKRYARLAAKGKDKRKIVTAVGRELLGFIWAIGTKAEATVRQRIAA

SEQ ID NO: 289958 - protein, 356 aa, unidentified
MSRDTKYIGMDVHKEAIVIAVFNDSGKLMMESIVETQASSILQFIHGLRGELHVTWEEGTWADWLYDLLKPHVHEVLVCNPRRNALLKEGSKSDKVDARKLADLLRTGMLRPVYHGENGLRTLRELARSYQTISKDLNRVMNRLKALYRGWGIACSGTQVYAARYREEWLHKIPHAGVHRRAELLYQQLDGLQALRRTLRPELLAESRKHKAAKLLRQIPCIGPIRAARLLALMQTPHRFRSKRQLWTYSGLGIETRDSAQYRYVHGQLQRSKKPQQIRGLNQNHNHEMKEIFKGAATRASCGVGPLRDFYVALLDKGMRPEMARLTLARKIAAIALTLWKKEERFDAEQLKPQAA

SEQ ID NO: 289959 - protein, 362 aa, unidentified
MNKDLQRTEQNAPTPGNKKTIGIDLGDRWSRYCILGGDGQIVEEDRIPTSTGALERAFKKMPATRVVVEAGTHSPWVSRLLEKLGHEVVVANARKVRLIYESDSKNDRLDARMLARLRRVDVNLLAPIRHRGAETQADLAVIRGRDCLVAAPTQLINAVRGMVKSVGGRLPKSTTAAFAGKVSSLIPSELKVALEPLLSSIAALTEQIAKADEQIAQLAEAKYPETKLLRQVKGVGPLIALTYVLTVGDPHRFAKSRTVGSYLGLRPRQRESGSSAPQLGISKAGNNHLRWLLIQAAHYILGPLAPDSGLRRWGLGLAGKGGKSGKRKAVVAVARKLAVLLHRLWVRAEVYEPLYGIESEAA

SEQ ID NO: 289960 - protein, 425 aa, unidentified
MNYKQNEKINQVKESTLVVGIDIGSTTQYARAFDWRGIELGKVFPFSNSREGFESLKAWMQHLQDKYKKLDAIVGIEPTGHYWFDLGAYLEDEGILLVMVNPYAVKQTKELDDNSQSKNDRKDPKVIAKLVTEGRYSAPYTPDGVYADLRIMVANRKRLIREMTQIKNRFARWFAIYFPEYTDVFGDYEAQSSMLLLKKVCTPEAIVELGAEKINQIWRDAKLRAVGMKRATTLCETAKRSIGLKKGSSAARYEMKLLLEDYEYKKAQLDAVMEEIEKLCRKIPESEQMLAIKGIGVITVAGFLAEVGDVRRFESPRQIQKLAGLSLRENSSGKHKGQTSISKRGRSKLRAVLFNAAIPLIATNPEFKSLHEYYTTRANNPLKKKQSVIAISCKLIRVFYAILAKGVTYDAQKLISDIHRQPQVA

SEQ ID NO: 289961 - protein, 331 aa, unidentified
MNRQNFCYFIGIDISKKFFDVAIIENDRTASYVFENTKKGTNAFIRLLKNQKISLDNTLICMEHTGVYGKLIITKLVEKQAHFCVEMPIKITKSIGLHRGKNDRVDAKRIAFYASKNYRELELYKPIAEVLEKMKILLKIRKKLVNTRADINKYPNELERFSPEIGKLARKNLKRINKNLEDEIKRIEAEIKKLILSDDKLNKTVGLVASVTGIGQITALHLTVFTNFFTRYDNPKQLACYSGVVPFEYTSGSSIHRKSRIHPMANRTLKKHLHMSALAAINHDPDIRAYFLRKVEEGKNKMLIVNNVRNKLVHRVCAVIKRQQPYVKNIA

SEQ ID NO: 289962 - protein, 354 aa, unidentified
MHATTPDAIIVGVDTHKDTHVAVAVTGLGARLGAISTPATATGYRQLAQWAHAQGTVLAFGIEGTGSYGAGLSRALTAQGCRVIEVNRPNRQLRRQRGKSDTIDAEAAARAVLAGEATAPPKSGNGEVEMIRHLKIARDTALKARTQAMVTLKTLLVNAPQPLREQFIAITGPVTLIRALAALRPGPMTSTTASAKTVLRALARRWLALDAEIREHDGALETLVRRRAPALMTAPGISTGTIAEMLVVLGDNPERIRSEAAFAKLCGVCPVPASSGKTTRHRLNRGGNRRANAALYRVAITRMRCHLPTRIYVLRRTAEGKSPREIRRCLKRYIAREIFQHLCGQHGHPVVECP

SEQ ID NO: 289963 - protein, 330 aa, unidentified
MDSTILSSLHSFGVGIDVGKNEMVVCRRSSQSGLVAAPTISIPNTTTGIKKLVREFRKQSVSSDTPIVLESTGPYHWQAAHDLTEAGFLAKVINPLHTRHAIRNSIRKRKTDKIDAEHLAMLAYQNYGYPFQETREIAELKALVRHFWYLKHQHTGQMQHENYLRNYRGIKKFSTSEYVAKQIEALEPEILSRFKGNDLRYLDSIPGVTPILAATVLAELYPLNRFSKIEQIIAVSGLDPSVKQSGGKTAHFGKLSKRGSPLLRHALFCSIFGAFIREPWRTLYLNHKERGLHHIEVFCILSRKLLRIMWALLKKRREFDAKYLTVDKSV

SEQ ID NO: 289964 - protein, 291 aa, unidentified
MPRTTTVHAVTAIGIDMGKNTLHMIGLDARGAIVLREKVSRGRITSRLANLSPCLIGIEAGMATHYVARELTALGHDVKQVPPAYAKPFRQRHKNDFRDAHAVAEAVQRPTTRFVPAKTNEQLDLQALHRVRSRLVSERTAVINQIRGFLLERGIIVRQGLRFLRQALPDILAKRTDVLSPRMVRIVADLTSDWRQLDERIEVVTDEIETLAKSDGSCRRVMTVPGIGPIISSAMVAAIGSGTAFARGRDFSAWIGLVPKQMSTGDRTILGRITKRIVPMLVEIGAAGAVG

SEQ ID NO: 289965 - protein, 330 aa, unidentified
MKNVRDVIGIDVSKKTIDATAYQSEHHAVFTNDRAGYSKLLKWANHQVGSDSYFLCFENTGNYSLKLSVFLSESGVCYVEESPMRIKRSTGLTREKTDKLDSYMIARFGWIYREELQPSHMKPQIFQELGRILSLRDQLVRDRSGLKSTLKENKHLLSSPSTDVCCKILERSIKHIDKQIEALESQMKTLVKTDDTLRQNYELLRSVKGVGLILSCQLLYHTSNFIKFSTWRTFSSYCGIAPFEYSSGSSIRRRKQSHYIGDRKMKTLLSMAAVSAIQSDQELKKYYHRKLEEGKHKMIALNNVRNKILARSFAVIKRGTPFVNIAAVNY

SEQ ID NO: 289966 - protein, 370 aa, unidentified
MWLERGESTIDPNQECPSRFTVNEKGIVMTMIGIDPHKATHTAVAVDDDENVVDELTLEASSSQAERLTGWAEGFGNREWAVESANGLGYLIGQQLVACGETVFDVPPVLASRVRLLGSGKSQKNDPNDARSIAIAALRSDRLTTVQPDDHVVVLRLLVKRHRDMARLRNKHCSRLHALLLELEAGGIGVKISVTNASGLLDSITTGDEATRYRILIAREVVDDIARLDATLRASKKRVATAVAASGTSLTNIVGVGPIGAATIIGYTKDVTRFPTRGHYATYNATAPIEVSSAGNTRHRLNLRGNRILNHAIHIAAVTQLRHDTNGRIYYDKKIAEGKTPKEGIRALKRRISDAVYKSLIADTRRTATH

SEQ ID NO: 289967 - protein, 433 aa, unidentified
MKDAQDEPLFVQRVAGLDIAKAGVEVTIRVPSDTTPGRRQQETRTFAATRAGLLSLADWLRCWGVTKLGMEATGDYWKPVFFLLESRGFDCELYNAAQVKALPGRPKTDRADSIWLAKIVERGMIAASFVPPEPIRRLRTHTRYRRHLTQARTAEKQRVEKLLEDGHLKLSSVISNIHGVSGRDMLDAIAAGQRDPKALAQLARGTMRGKIRRLEEALECSFFTDEHAAVLAMMLAVIDHYSAQIEALTATIEALTEPWLHQIAQLDAVDGIGTICAQDIIAEIGTDMSVFPTASHLVSWAQWSPQVRQSAGRRKGSNATGRGNPYLSAALGEAAISAGRTQSFLGARYRRLTRRMPKKKALVATGNSMLVIIHALLSDPADSYRDLGADYYEQRMHARRQARNHIKSLERLGYKVTIQALSPDTGQPLTATS

SEQ ID NO: 289968 - protein, 371 aa, unidentified
MPRLPTDEFAAFVGLDWADTKHDVCLQAAGSKKRECSMLEHQPDTLTEWVSTLCTRFKGQPIAICLERNKGPIVSALRQYDFLVLFPVNPRTLARYREAFTPSHAQDDPSDAELQLELLLTHRARLTPLAPQSPEMRALAQLVAPRRRVVGDKVRLTNRLTSVLKNYVPHVRQWLHDKDTALFCDVLAPWPTLKAVQLARHSTLERFFRDHHVRYADVIDQRIRAIKSATPLTTDDGIIAPHALLVAFGEQRVRYASAEALQKYAGIAPVTERSGNKTWVHWRWQCPTFLRQTFVAWAAEATRHSFGTRAYYQQQRNKGASHQAAVRALAFQWMRILFRCWQDRTPYNETVYLNALERRGSPLLHHLAKAS

SEQ ID NO: 289969 - protein, 322 aa, unidentified
MSLTVLGIDIAKQKFDVALLADGKTKNKTCKNSTEGFEALKVWLEKQGVQKVHACMEATGNYGEDLAIYLHESGHKVSIINPARIKGFAQSELVRTKTDKLDAGVIARFCLAMKPETWIPPAPEIRSLRALVRRVDSLIDMRSQEKNRISTAHESVVVLIKEHIVYLDQEIEKIRKQIDDLIKRNPHLKQRKELLDSIPGLGKATIPHLLAELDDLDKFTHVREMVAFIGLAPRETISGSSIKGKPRLCKIGHARLRKALYMPALVSIQCNPVMITFYNRLKERGKNGKVIVCAIMRKLVHVIFGVLKSGKKYDPNYKPALT

SEQ ID NO: 289970 - protein, 445 aa, unidentified
MAVRKQGRGLEVAHPNAAGIDVGSASHFVAVPPDRDDEPVREFKAFTEDLEALAEWLSACAVDTVAMESTGVYWIPLFELLESRGFIVYLVNARHVQNVSGRESDVLDCQWLQQLMSYGLLSGAFRPKDEICVLRALSRQRDMLTQYQAKHIQHMQKALAQMNIQLGNVISDIAGETGQKIVRAIVAGERDPVKLAKLRHQRIRASEEQIIKSLKGNWRQEHLFALQQAVALYDAYGQAIAQCDQQLEELLRRLACHPAPAQPEKRRGRPRNAAKFDLRTALFRLCGVDLTRIDGIDTATALKVLAEVGPDLSRFKSAKHFASWLSLCPGTKISGGKVLSGASKRATNRLAQALRMAATSLHHSRSALGAYYRRLCGRLDKPKAIRATAHKLARLIYTLLTKGTEYVDQGQDYYEERYRQRVVHHLSRKATAMGFRLIPVEAISA

SEQ ID NO: 289971 - protein, 375 aa, unidentified
METIYIGVDFHSRQQTICYLKIETGELVISELKHRDKEQVRAFYQQFQGQAIIGLEASGYSPWFETMLGELGCEVWLGDATEIRRRARWRQKSDRRDAELIWDLMTHNEFPRLHQPALQSREILRMLRYRQKLIKMRTMSKNSLQAIAMQAGLAKGSRLFSTGGQQELQTAKMSAALQWQRDHWLKLMQPLNQQLLETMVWFKAQAKGDAVISRLRTHPGIGLLTSLCLLHTLQPVSRFRNQRKVVAYAGLDPMVRSSAERAIYLGISKAGSRLLRYLLVEAVHTSIRHDEDLKRFYQHVAERRGRPKAKVAAARKLLIRAYIMLRDEIDYAEFRRRAVAARLARRSQGPNVPEVLIGQPASTRNQKQLSRSKKK

SEQ ID NO: 289972 - protein, 351 aa, unidentified
MFPIHYIGFDVHKKTISYCVKAADGTILEEGKLLATRAALIEWASKRTVPWHGAMEATLFSGWIYDTLKPFAAKLQMGHPALMKFIGASKKKNDRLDARKIADLLRCSLLPECYVMAAELRELRRMLRYRNLVVGQAVQMKNKMSGLLMEVGAEYNKKQLHGEKYFWELLNRLDEVPESVKDLLRLSRGALEMFQGTQQQLLTRLERDPRLAERVERLKSIRGVGTVTALTWALEIGEPQRFRSISRAVSYCGLTSAQNESADKPKRGPISKQRNAHLQTMLVEAAKLAPRWNPQLAAVYQKEVQSGADHNQASLEVARKLVSYLLAVDKSGKPFQIRIPATEEQEVTAAA

SEQ ID NO: 289973 - protein, 465 aa, unidentified
MKRHRRRPSPKPRLSPAALERLHPHAAGIDCGSAEHFVAVPPDRDATPIRSFITFTGDLHRLADWLTACRVTHVAMEATGVYWIPVFEILDARGFQVILVNARHVKNLPGRKSDVSDCEWLRDLHILGLLRGSFRPADAIVALRGYLRHRATCIESTAALVQRMQKALIQMNVQLPLVVSDITGVTGLRILRDIVAGHRDPQQLAQHRDYRCRASEAEIVAALTGNYRAEHVFVLQQNLELFDIYQRQLTACDAAIEAHLTQLAATATPPAAPLPAPRRRQKPRDNEPRFDLRTPLHQLTGVDLSQIDGIGPYNALRLLSEIGTDMTRWPTEKHFTSWLTLAPHNKVSGGRLLSSRTQPSANRAAALLRLAAMNLGRTQTALGAFYRRVAFRIGKAKAVTATARKLAILIYRTLKEGLIYTDPGAEAYDTQHRTHVVRRLRQRAGNLGFGLIDLSTGAVVEGAVS

SEQ ID NO: 289974 - protein, 343 aa, unidentified
MDYFAGLDVSVKETSVCIVDGAGKIVREARVASEPEALLQVLTSTIYRFKRVGLEAGPLSQWLYSALAEAGLPVICVETRHMRAVLKAQINKTDRNDARGMAQMMRAGLYRPVHVKTLRSQKLRMLLTHRKLLQSKAIAIENDLRATLRNFGLKVGVVGTVKFEARIRELVENLPDMAVLIEPLLTVRRVLREQITVLHRRLLAIVRDDDVCRRLMTVPGVGPVVALTFRVTVDVPARFRHSKAVGAAFGLTPSKYQSGESDRSGGISRCGDEMMRAMLYEAAQILLMRSAKWSWLKAWAMKIARHRGLKKAIVALARRLAVIMHRIWVAGTEFRWTREVAAA

SEQ ID NO: 289975 - protein, 318 aa, unidentified
MTSQTCVYVGIDVSKGRLDVAIGEQGEFWNVANDEKGIAKLVERMEEIQPELVVLESTGGLELPVMTELYASQVRVALVNPGRVREFAKSIGLLAKTDKLDARLLARFAEVVKPPVTRLPDEQEQHLIALVTRRRQLIEMLVAEQNRLNTVRLSMRQNLEEHITWLRQALADLDQEIKQFIHQSPIWKDKGDLLQSVPGVGPVTACTLLAELPELGKLDRKKIAALVGVAPFNDDSGHRRGKRRVKGGRSSVRSVLYMAALSASKFNPVLSLFYKRLIQRGKEKKVALTACMRKLLTFLNAIIRDQLPWNPALKHFAS

SEQ ID NO: 289976 - protein, 412 aa, unidentified
MDLDVMITHGAGLDVHKKVIVVTVATPTVTETRSFGTLTPELLTLADWLRDCGVTHVAMEATGVYWKPVVNLLEAYPFQAVMVVNPQHIKGMPGRKTDVQDSQWIAGLLRIGALKASYIPPRPQRELRELVRYRTSLQQNRATESNRIQKVLEGANVKLGSVISDVLGVTGQRILAALADGVTDPAALADLADPRIRASRETLMTAVTGLVNAHQQLMLRVQLQHVAFLDHQVAALSEEIATRLANFDDALTRLQTIPGVERRTAEIIIAEVGPHMQRFPSAGHLVSWAGFSPGQDESAGKARSTRTRKGSKALRTALTQSGHAAGKTRTYLGAVYHRLAGRRGKQRAAMATGRHIRIAVYHILRTPGTVYQDLGAHYFDARDKQAVVRREIRRLEALGYRVSVEPTTPRAS

SEQ ID NO: 289977 - protein, 400 aa, unidentified
MMIIGCDFHPSWQQVSWLDTETGETGEQKLVQASGDAERFYRQVAAPALIGMEATGNCHWLVDLLAELGHELWVGDAAQIRASYVRQQKTDKRDAAHILKLLVEGRFPRIWMPSSEVRDLRQLLLHRYKLVIMRARVKNELQHLCLNKGVQRKHKLWSQAGQQILRELPLQPWAGRRRDDLLKLMAMLDQQIEPLDQAVKAEAQRDKMALLLQTQPGVGAITALAYVLTLGDVSRFPRGKQVASYLGLIPREHSSGGRQKLGAITKQGNRMLRMLLVEAAQIAVRYDPQFRREYLHRCHQKPKAVAKVAADRARFLAPSLLHSRPNICLLPKSGTEFDDCDECHKDPCGTSDTTTWLRARLRRTLLVWVLGTPAKRWTAACSLRGSIPLSSARPSNQIGT

SEQ ID NO: 289978 - protein, 347 aa, unidentified
MSEHTPTTMGIDISDQWSTVCVLDTDGEVMEESRFRSTRAGLGRYLEHRAPMRVVLEVGTHSPWMSRQIEELGHEVFVANPRQLRLIYQSDRKCDAVDAEALARLGRVDPKLLRPIRHRAADTQLARAQLRVRDMLVAARTRFILSVRGMAKSMGEVIPRASAESFHVGVPGAVSAPVWQVVEPLVEAVGGLTAKIKGCDAALEELSLTRYPETAALRQSSGVGPITALAFVTTIEDPHRFARNRSVGAYLGLCPRRDQSGASDPSLRITKAGDPYLRRLLVGCAHYILGPFGPDSDLRRWGLAYAGRGTNSKKRAVVAVARKLAVLLLSLWKTGETYEPTRHAAAA

SEQ ID NO: 289979 - protein, 347 aa, unidentified
MIGVDPHKASHTAVAVSVAEEQLGQLRVRASAAQAERLLEWAAAWPERTWAVEGAAGLGHLLAQQLLSAGERVLDVQPKLGARVRLLTAGNANKNDPNDARSVAVAALRSPGVREAAPDDHAAVLKMWSKRHRDLGRTRTQVVCRLHAVLCELVPGGVPKKIIAAHAVRLLASITPAGAVDAARCDLAAAFIEDLQRIDAHLRDTRKKLTAAVRASGTSLTGLFGVGPVIAATIIGDVGDVSRFRSRDHFASYNGTAPIEVSSGSRKIHRLSRRGNRRINHAIHMAAITQVRQPHSEGRAYYGKKLAEGKTHREALRSLKRHISDAVFTRLQADARRATVTRGPAAP

SEQ ID NO: 289980 - protein, 437 aa, unidentified
MIQAEIERCAGIDVGKKWLAVGVLVGPLDREPRAETRRYGTNVADLEQLRDWLQQQGITHVVMESTGSYWKPVFNILEETLTVYLANPQQVKPRKGHKTDNRDGHWLAHLLRHAMIQPSFIPPRPIRELRDLTRRRKKLIAAGSSEKNRIQKVLEDANVKLGNVLSDVFGVSGQRMREALLEGHAGPEEIARLAQRRARQKIPALVAALQKHRLSEHHRRMIRFRVEHMELLERQILRLDEEIATQIRQIGLARQWELLQSIPGVREDSAATILAETGADMQAFGDAAHISSWAGVCSGNNRSAGKNKSSPTNKGNPWLRGSLTECAQGAAKTKNCFLKEKFWRITAKHGGKRAAAVMAVAHNLLRLVFQVLSTGQPYQERSAGPLEPRQRERMIRHHIRRLGRLGIAVRGPEPAPRRPRRCTTITTKGIARLPASS

SEQ ID NO: 289981 - protein, 354 aa, unidentified
MIIIGADYHPAFQQIAFVDTETGELQERRLEHPEGAEKFYRELAAQGKRVRVGMEASGHARWFERLLAELNVELWIGDAAEIHRKRERKQKTDRQDAQHILRLLLKDDFPRIWVPSGENRDLRQLLWHRHRMVQARTRMMNQLQAVALNEGLRCKKKLFREAGRKQLQAFRLAPWASRRRQDLLELLDRLNPTIAELTQAIEQEVEKCPEAQRLLTHPGVGPLTALAFVLIIERADRFQCGKQIASYLGLVPLEDSSGNRRRLGHITKQGNSLLRFLLVEAGQVTVRSLPEWRSKYVHLTMRRGRKIAKVAMARKLAVRLYWMMRKGWDYEQLKKFGSYAGQPGNRHGVKSNTE

SEQ ID NO: 289982 - protein, 356 aa, unidentified
MSEKLNSEIAVIGIDIGKNSFHLVGQDRRGRIVLRQKWSRGQVEARLANLPPCLIGMEACVGAHHLSRKLKAFGHDARLMPAKYVRPYSKGEKNDYRDADAIAEAVQRPTMKFVATKSADQLDLQALHRVRERLVGQRTGIINQIRAFLLERSIAVRQGLHFLRAELPGILAKRTDVLSPRMLRVIEDLAGDWRRLDERIDALSDEIMTLARQDKGCERLMTVPGIGPIISSAMVAAIGSGDAFSKGRDFGAWLGLVPKQMSTGDRTILGSISKRGNRYLRMLFVQAAWVVLVKIKPEGWERYGLKSWIEAAKQRLHRNVLAIALANKLARIAWAVLHKGRAFECVKTNATAPRPA

SEQ ID NO: 289983 - protein, 367 aa, unidentified
MENHSIVWVGMDTDANKNQISLYRDWDREPAAEWEAGMDSQGIKKLIERLHREKAEIRCVYEAGPCGYELYRKLKKVGIHCDVIAPSLTPQRPGDRVKTNRRDARNLARLYRAGELTVIDVPDEKQEALRDLTRAREEVREDLTRRQHRLNRFLARQGCHYQDGDKWTQKHWAWIRKIHFDDMNAQTVLEESIRSVEQSQEQLKTFDSKIEENAPKPEYAKKVKRYQTLRGVSTVTSMTIVAEVWDMRRYGTAPQFMGSTGLVSSEYSTGDHERRGKITKAGNAHLRRVLVEAAWHYRHRASAGKTIKKRRQGQPQAVVSIAERADQRLNRKFRRMVDRYNKKPVIAAVAVARELAGFIWAIGQIQD

SEQ ID NO: 289984 - protein, 342 aa, unidentified
MLETMIGVDLAKSVFQVHGASMTGVVKFRKRLTRSQFRRFLAAEPRSVFVLEACGSAHYWAREMVKTGHQVKLIAPQYVRPFVRRQKNDAADAEAIVIAAQRPEMTFVGTKDEDQQASAVLFRSRERLIRQRTVAVNALRSILYEFGHVVPAGIRNLRRIEEILADENSDLPSLVRSEGLDIIAQIREQTVRIEAKTKTAKELASKDDVARRLQTMPGVGPLTALAVETFAPEMSTFKGGRNFAAWLGLVPRQFSSGGREKLGRISKAGQADIRRLLIVGAMSRLNWMGRKTVPEGSWLARMIAKKPRMLVAIALANKMARTIWAMLTKQEDYREPTTGLAT

SEQ ID NO: 289985 - protein, 414 aa, unidentified
MEIVHTHCAGLDVHKKTVVAAIIVPDGQGGLWKEVRSFDSMTSDLLALSDWLMACGVTHVAMESTGEYWKPVFNILENNFEVLLVNAQHIKAVPGRKTDVKDSEWIAELLRHGLLKASFVPPLGQRELRDLTRSRSTFVRTRATLVNRVHKVLEGANIKLCSVASDVMGVSGRAMLAAIVQGQSSPAEMAELARGRMREKRDLLTKALEGRVQAHHRFVLTELLTQIDSLDETIERFNEQIEVYCRPFEEAVALLDTIPGVGRETAEIIVSEIGTDMSRFPTADHLASWAGVAPGNNESAGKRRSGKTRQGNKVLGAGLNQAAHAAAGTKNTYLSAQYRRLAARRGKKKAIVALEHTILVIAYHLIQRKEPYRELGGNYFDNRRPEATANRLVKRLEQLGYAVSLQQAPALASP

SEQ ID NO: 289986 - protein, 349 aa, unidentified
MTLVGCDLHTRKQQVAVLHTDTGEVVEQELLHAGDAVEQFYRTLPRPVTVGIESTGYALWFHELMQHLGHTLLVGEAAKIRAMVVRKTKTDRRDAQHLLDLLKHDRFPAVWIPDPATRDLRALVTHRMRLVRMRTMVKNGLHAIAMNRRLTLGSSLWSQRGLAQLQGLALAPHTTQRRDESLQLLTWLTARIAALDDRVAAAAQADPGARLLLTHPGVGPLTALTTVLVLGPVSRFPDSKHVVSYTGLAPAVHASADTCRLGQITKQGSPLLRFVLGQAGLIAAHAEVDLTRHYRTLLRRRGRPKAIVAIARKLLVRLYIMLRDQIDYEEFRRRGRTPRRQEVPPPALA

SEQ ID NO: 289987 - protein, 366 aa, unidentified
MYKKAELNGDVDSENNQGGSSRDIMYYIGLDVHKKTISYCVKDASGQVHREGTIGANRNELDWWMKTLPQPWTVAMEATIFTGWIYDHLLPHAAQVKVAHPVMLRAIALAKKKNDRIDAGKIADCLRCDFLPECHMASTEIRDRRRSLRYRHLLVRQMVQMKNRVSGLLLETGVSHNKQRLHKVGYFRDLISKNEEVPESIRPLLRLSRETIVRCQKTEYALVSSLQRDPLLAERTRRLRTVPGVGPITALTWALEMGDVARFRSVKQAISYCGLCGDEKSSADKVLRTPLSKQRNKHIQSVLIEAAKLAPRHSPELALIHEREKQKGNANRATLAVARKMVAYLLAVDRRGKDFVPSEERSTAAA

SEQ ID NO: 289988 - protein, 347 aa, unidentified
MDQIIIGVDTHKSNHVGVAISRQGARLGTITIPTTRQGYRDLETWASKLGTIKAFGIEGTGSYGAGLSRDLLSMGHTVLDVMRPNRQLRYLHGKSDSLDAESAALSVLNGQATALAKTQAGASEMIRHLKIARDSAVKFRSQSMITLKTLIINAPAELRDTLDLIKGPITLIRHIAALRPGKITSPIASAKAAMRAIARRWLYLHEEIQAHGQELERIVSEKAPGLMRSHGISTMTAAEMLIIVGDNPERIKSEAALAKLCGVCPIPASSGKTNRMRLNRGGNRQANAALYIIAITRMRDHEATKNYVVKRTAQGKSKREITRCLKRYIVREIYRELCVPNGAKATP

SEQ ID NO: 289989 - protein, 373 aa, unidentified
MFESGLDIAPNSKWLPRFPESTQSRLFPLSMSSRAAREEPIREEIYRRCAGWDVHQESVEACVRRIEENGRWQQQTRPWGTMTRDLWAMADGMAAPGVTPVAMESTGVYGKPISNILESRFRVLRVKARHLKQVPGRKSDGRDSHGIAQRLQHGLLKGSFIPPRPQREWRDRTRLRVQLVEEKTRNVNRLPKELEDANLKLASVATEILGASGRAMLEALIEGRKNPRQLADLAQRPLRGKIPELEKALEGHLTDHHRFMLRLRWQPLAQQEERIAELDAKIEEQTRPWAGEIERRDAVPGVDRCVAAVVLAEVGAQMTPFASHQDLASWAGMCPGNEESAGKRRRRRLTPGNRWRKRTLVQAAGGASHSQNT

SEQ ID NO: 289990 - protein, 406 aa, unidentified
MIFVGNDWAQDHHDVWIMDRDGDKLASRRLPEGDGGLARLHELVAGFVDDPGEVIVGVEKDHGLWVTAMVAAGYRVYAINPKVASRYRDRHHVSGAKSDTADARMLADLVRTDRHQHPMIAEDSDLAKELQVLARAQQDLVWEQTRQLNKLRSALLEYYPAALPLLDDDQFMRRDMIAVLGKAPSPETGRKLSLSQLEAVLKRAGRQRYLHATAVKVQDVLRTPGHLQASPALVRAYTAKVTGIVALLATIADQLKELTAQVEESFEQHPDAEIYLSLPGMGRVLGARVLAEFGDDPERYRDAKSRKNYAGTSPITVASGHSSRVKARHIRNTHLIDPLDRLAMAALSRSVGAREYYDAKRAAGYGHHAALRALANRLVGILHGCLKHRTLYDENLAWGHRMTLAA

SEQ ID NO: 289991 - protein, 331 aa, unidentified
MKNKQIVGIDVSKSTMDAFIFKSNHLFQVANNPTGFVRLLQESIHVSSCSKDSLLFCFENTGCYSRALSVFLEDAGIEFYAVDALDLKRSMGLSRGKSDKKDAKAIAMYAWRRRDELVGSKLPGPVIDQLSALLSHREMLIKQRTALKNANKGHHNTYSENEFKFLKESQMRMIKQLSEEIKITESEILRIINLNAELKNSYDLLLSIKGIGKILSFYLITLTHNFTKFTDPRKFACYAGVAPFEYSSGTSVKGRTKVHPCANKQIKSLLNMAAMSSIQLQGEYQLYYLRRTAEGKNKMSTLNIIRNKLIFRAFSVVKRGTPYVDLHKFAA

SEQ ID NO: 289992 - protein, 449 aa, unidentified
MNNGNGVSRGDRNRNARLARLRKLVPVENAIVGIDLADKKQMVVVTDHDSKVLARRTFRCRAWDLGVALDWAAQRAAAKGFAGVTVSCEPTGHRWRVLGQLAADRAMPFVCVQPMQTSWARRSEDLTFDKTDDKDAILISRLTAQLRCYVPEPVDETWGRLRHLGARREQLIVEAVSQIQQMRDLLECVWPAALETAKQPFRSQTWAAAMTVVLDRDGGDLNRTRRLGAARFEQAVRREITKRGGQKPCLRIVRNIFAVLTDTAGVLAHRHGALERVQLLLEDWAHNQRKLTDTEARMVRVLDELELTELVTSITGLSAVGAAAILAETGDPTRFATARALVKHAGLAPREKLSGTFTGRTKLTGQGRPRLRVAAWRAVWGAQRTNPVYEARYRHLTTREHNKLKATQAQTVIAAAILRHLHAVITTGQAWDPQIATHGKRRDAAAMAA

SEQ ID NO: 289993 - protein, 342 aa, unidentified
MYPFYLGIDLHLKRTYAVLMDSAGKIIDERRIRNDEIEEYLAEVVPRNTYAVLEATRNWPFMYDLLSENLERVELAHPKELKAIATAVVKDDAIDSKTLANLARMNYLPIAYAAPKETRDLRTAMRHRDWLVRQRTQCKNRIHAVLAGYNLVSPVSDLFGTKGRQFLEGKFKDLQPGARRSVRDHLELIDHLDQQIQSLEKEVDLTEDQRAMVRLLKTIPGVGRLTAMIITAEIGDIQRFNSPKALCNWAGLTPKVRKSDRTVRHGRISKQGSSHLRAAMTRAASVASYTSKRWYQVHENLVPRCGKTAAKVAVARRLLTVAFFMLKRNESYQEEYGKKTNR

SEQ ID NO: 289994 - protein, 337 aa, unidentified
MKSYLFVGIDISKATLDVCVLSPSDIADIHHHSFCNNTKGFSQLMKWLKQKSEVIAVEDWRVCMENTGIYSMELNCFLHEKGIWQSMENALQIKRSMGVVRGKTDKADSKIIALYAYRFIDKLKPYVLPTATLLRLRALFSQRERLVGMHSQLLVASQSIKEYPKELVNDIQAQNEMLLENLAVQIKGIDKSIKECLQQDKDLQRKSKLIQSVPGIGQQTAAYLLIVSQGMKNFATARQFACYSGCAPFAHQSGVSIRGKTKVHFIANRKMKMLLHMAAMNAITFNDELKAYYQRKVAEGKNPMSVLNAVRFKLICRIFSVINRNEEYQKEYGKIAA

SEQ ID NO: 289995 - protein, 349 aa, unidentified
MSQNLNSAVAVIGIDIGKNSFHVVGQDDRGAIVLRQRWSRGQIEARLANMPPCLIGMEACVGAHHLSRRLKAFGHDARLMPAKYVRPYSKGQKNDFRDAEAIAEAVQRPTMKFVAIKTAEQLDLQALHRVRERLVSQRTGIINQIRAFLLERGVAVRQGLRFLRAELPGILTTPPDVLSARMVRVIGDLAEDWRRLDERIDHLSSEIAVLARQDAGCERLMSVPGIGPIISSAMVAAIGTGDAFAKGRDFAAWLGLVPKQISTGDRTILGKISKRGNRYLRVLFVQAAWVVLIKPMSWERHGLKSWIEAAKKRLHRNVLAIALANKLARIAWGVLAGSRTFEASKLQAA

SEQ ID NO: 289996 - protein, 325 aa, unidentified
MQSETNYTGVDISKLFFDVAILRNGEYHYYKFSNDVCGFAAFLKEINKDDQVVMEASGPYYLRLACYLIKEGIAVSVINPLVIRRFCQMRMSRAKTDKKDAKMIAEYGKTEQPGLWEAPQQQVIALQQMDALLANLTKEQTALSNQLKSFESSGMLTKQLAKVIHKELLHKQELIKKLTKTMQQIAETHYAAMLTNLESIPGMGKKTAMMLVVLSGGFTKFEDYRKLSSYVGLCPRIFESGTSVKGKSRICKMGMSKIRAMLYLCAWSAKRCNKSCRELYERLLAKGKAKRLALIAVANKLLKQAFAIATRQTKYTENYLNNICF

SEQ ID NO: 289997 - protein, 349 aa, unidentified
MPSLAERVDVVIGVDTHKNTHTAAAVAAATGGKLDELTIATDSDGYAALLTWAQSHPGDRVWSLEGAGGYGAGLARFLAAAGEVVLELDRPVRAARRNGAKSDPLDAVRAAREALSREHLAEPKTDGPRAQLAALMAARRSAVEAATLAQHQLHALVIAAPDALRALFRGQTTAVMLATAAKLRPHTGWDPTTVTTAQVLRRLARRSNDLTEEAAEHEKAITTLVKAWRPDLLELPGIGPIVAAQVLTAWSHQGRIRSEAAFAMLAGTAPIPASSGMLTRHRLNRSGDRQLNRALHVVALSRTRYDQRTRDYIERRRAEGKTDREIRRCLKRYISRQLYRQLEHGRLLA

SEQ ID NO: 289998 - protein, 356 aa, unidentified
MPTTADRAEAPSAIQPHLVAIFISLELSRSIWLVTSLSPGAGEKMSKHSVRAGDVAALLARFSELKQKTLARTGKSFPIVAVHEAGLDGFWLHRVLEREGIESHVVDPASIATSRRRRRPKTDRIDGEALLCALLAYKRGEPRVCAMVKAPTAEEEDRRRLCRERKVLIAERIEHINRIKGLLFSQGISGYEPLRRDRRQRLEELTTGDGRALPTHLKTQISRELDRLELLLDQIKLAEAERDALLAERQAAAPGPTGRMLLEFKGIGAEFAANLWLEALFRHFDNRRQLASYAGLAPTPWQSGSVDREQGVSKAGNPRLRATLVELAWLWLRHQPQSALALWFKERVNSTATTTA

SEQ ID NO: 289999 - protein, 321 aa, unidentified
MLIGIDVAKAELVVAARPTGERWAVANDERGIRTLVERLRAAAPRVELIVLEATGGYELLCVGALAAAGLPVVVANPRQVRDFAKATGQSAKTDRIDADVLALFAERVRPAVRALPDADAQELDALLGRRRQLLEMLQAERNRLGQVFGRGKPLVKKSLRAHIAFLERELRIADADLGAMIRESPAWRERDDLLQSVPGVGPVLSLTLLAELPELGRLSRREIAKLVGVAPLSRDSGTLRGRRFVQGGRASVRAVLYMGALVATKRNAAIRAFYRRLVAAGKPKKLALVACMRKLLTILNTMARTHQRWSADHATAAHNTA

SEQ ID NO: 290000 - protein, 350 aa, unidentified
MQYIAFDSHKKYTLASVERLSGGIVREARVVHTRGAIQQFLAQLEPGSPVAVEATSNWYWIVDEIEAAGMTPRLVHPRKAKLMMGMINKTDRLDVRGLNSLQRTGTLPTVWIPPAHLRDQRDLPRTRMILAQQRVRLKNRIHATLAKYALSAPDVTDLFGCAGRDALAELITQLPPHSQFATSTLLEQLDLVDEQIFQFETRMRQVFTESPPLACLMTLPGVGLILGLVILLEVGDVQRFPDAEHLAAYAGTTPRVDSSGGKVRFGRSRPDVNRYLKWAFGEAGNVVCLNRRHWPARHVTRLYDRVHHRKGHQKAIGAVARHLAEATYWMLRKNESYREPRWRPTASTKA

SEQ ID NO: 290001 - protein, 412 aa, unidentified
MEVMYARCAGLDVHKETVVACVRIVEGGEVSRSVRTFATTTASLIELGEWLEVNGCTHVAMEATGVYWKPVWQVLADSSFELVLANAAQVKNVPGRKTDVNDATWLSELLAHGLVRASFVPEPAIQELRGLLRTRKQLVREKASHVQRLQKTLEEANIKLETVLSDVMGRSGRAMIQALIDGETDPAKLAALAHWKVRASAATLREALHGRIKRHHRFLLRLHLQQVDALDAAIAEIDREADAGLACFRDAVKQLSTIPGVSELSAQVILSEIGTDMGRFASAAHLRSWAGLCPRNDESAGKRRSTRLRRGVPWLKAMLVQCAWAAARTKATYLHAQFVRLRGRRGPKKAICAVAASILTAAYHMLKDGTFYEDLGAVHFDRRRPETQARRLVKRLAELGFSVELKPVAAVS

SEQ ID NO: 290002 - protein, 320 aa, unidentified
MLDTASFSTTLAACQELLEWVRGYGEPAVAGVEGTGSWGAGLTRVLRGQGIAVIEVNRPDRSMRRQRGKTDTVDAEAAARAVLSGQATVTPKSHNGMVEAMRLYQLAKNSAVKARTQAINQLKGVLVNGDSLLREQLTGKTTHAQVMHCLTLTCDGLDPVRAASHRTLRTLAQRIRHLSSEVRELEKLLTAAVAETAPRLLDLFGVSHDSAATLLIAAGDNPDRLTGEASFAALCGVSPIERSSGKTQRRRLNRGGNRQANAALFRIALTRLRTDPRTRAYVQRRTTEGRTKREILRCLKRYLAREIFKIIIGIVGPPLA

SEQ ID NO: 290003 - protein, 398 aa, unidentified
MTESSDYESVQVFIGVDVGKDTHHAVAINRSGKRLFDKALPNDENKLRSLISDLKQHGQILLVVDQPATIGALPVAVARSEGVLVGYLPGLAMRRIADLHAGEAKTDARDAAIIAEAARTLPHALRTLKLADEQIAELSMLCGFDDDLAAQTTQASNRIRGLLTQIHPALERVLGPRLEHPAVLDLLQRYPSPEKLASLGEKKLAAQLCKLAPRLGKRLAADIAQALAEQTVVVPGTNAAAVVLPRLALQLITLRKQRDEVALEVEQRVLAHPLYPVLTSMPGVGVRTAARLLTEVACRAFASAAHLAAYSGLAPVTRRSGSSIRGEHPSRRGNKALKRALFLSAFAALRDPLSRAYYTRKMSQGKRHNQALIALARRRCDVLFAMMRDGTFYTPQGS

SEQ ID NO: 290004 - protein, 402 aa, unidentified
MTYDYVIGMDACKYFHHACVLDIDGTQVLSKRINQNEKSLRALFSTFSAHDHKVLVVVDQPNNIGRLTVAVAQDLGIDVRYLPGLAMRQLSRIHAGNAKTDIRDAYIIAHAAKNLPESLRSVDRAEEAFLQLKVLNGIDEDLARSYTRLINQIRSALVGCYPQFEQALRGQIIHRKWVLHLLARYGGPTKIKRLGKAKAAAFARRYKARNPEPVLDAIFAAISEQTVDIAGAHYAEMGVAMSAKDALLKLEHRKQIEQEVIELINDIPHTQILLSMPGIGPKTAGQILMAAGDMSDFPTAGHLASYAGLSPRTNQSGTSIMSNALNRAGNKKLKNALWQSSFASIRFHERSRQFYERKRREGKRHNAAVVALARRRLNVLYAMMSNHEHYRDPDQSQEVKAA

SEQ ID NO: 290005 - protein, 307 aa, unidentified
MTNELVGIDVAKTHLDVAIDGVSTVTRYCNDAAGRAAIVERLAEASLVVVEATGGYELALVRVLQAAGVAVAVVNPRRVRDFARAGGRLAKTDRIDALTIAQFARAMRPSQTPSIEDGHMALAELVTRRRQLIEMAVAEENRLEHVGAAIAAMIHEHVRQLKDQLAGIDVAIALAIDADEALKARGAILRSVPGVGAVTAAVLIAELPELGTIDDKKIAALVGVAPVAHDSGAMRGQRHIAGGRGSVRCALYMAALGAVRFDPTIRAFHRRLKESGKPPKVALVAAMRKLLILLNILVRRNQMWQPA

SEQ ID NO: 290006 - protein, 391 aa, unidentified
MIYVGIDVAKDKHDCFITNSDGEVLFKPFTITNNLDGFNELYQKIESVTEDATKVKVGLEATGHYSYNLLGYLLDKGFPTYVINPLHTNLYRKSLSLRQTKTDKVDARTIASMLMSDVNLKSYSDISYHNEELKSLTRYRFDKVKERAKLKSSVSRLVCILFPELEKLVPTLHMASVYSMLSEFPGAKHVASAHLTRLTNLLSEASKGRYSKDTAITFREAARASIGSNMPAKSLELKHTIKLIQELDSEIDEIENEIKVIMDEINSPILSIPGINYRMGAMIIAEIGDFSRFDSPDKILAYAGFSPSTYQSGQLDGAYAHMEKRGSRYLRYALYNAAKYVCHWDPTFAGYLAKKRAEGKHYNVAISHAVKKLVRVIYHLEKTKQQYIKVA

SEQ ID NO: 290007 - protein, 344 aa, unidentified
MKHYAGIDVSLESSSVCVVDAEGRIIREDKIVSEPEALIAWFASLGVELERIGLEAGPLSQWLHAAMAKAGLAVELLETRHVRTAFKTMPVKTDKKDARGIAQLMRLGWFRPVHCKSAPAQEVRVVLTARKLLQGKLHELEMSLRGILRGFGLKVGATTPRTYASRVKTLVEGHATLEAVTSALLKAREAFADELRGLERRIQAMARQDERVRRLMTTPGVGVLVALTFVAAVDDPERFRSSRAVAPHFGLTPRKYQSGETDYTGRISKIGDAGVRSMLYEAAHVILTHPVRGSDLKTWALAVAKRAGMRKAKVALARKLAVVLHRMLRDQTTFVAHRSALMAA

SEQ ID NO: 290008 - protein, 346 aa, unidentified
MSAFTIGVDIAKRVFQVHAIDHETGEVTSKKLTRGEFLAHFKKLPPSHIGMESCGSAHHWARELGALGHGVRMMNPMYVKPYVKRGKNDAVDAEAICEALTRPTMRFVPVKTIEQQSVLVVHRTRALLIRQRTMLVNALRGHLSEFGIVAPLGIERIPELIDRVLGREGDEFGITPLVRSIVVMYAEQIENIKEQIRKLERELRIWHRTSEASRRVASVPGVGTITATALVAAMPDPSAFQSGRAFAAWLGLTPKSSSSGGKERNGRITKAGDRHLRVLLVLGATSVLRRVRAGQPTPLYGWVKKLLDRKPPRLATVALANKMARIAWAVMARNVNYQPELAAAVG

SEQ ID NO: 290009 - protein, 405 aa, unidentified
MNKLTCITIDVSQGKSHIQGFIALDKPLGKPKIMRHTNQGYEHIINLKEIIESKTGTSPVVVFEYTGIYHKSLEKFLLNSGIHYHVVAPLRAAKARNNEIRNQKTDPRDCLSLAKMFYSDNLGKFYGENKFYSQLRKLNRYYETNMMHLIKVKVNFRETLAVIYPNYKDLFESVYSSDSLTFLKIYPHPSLLISQKRTEVNETLCDKWIHTEKWSLRKIDEIYHFIKETVPGCEIDDPEVIILLSYIEQIEYYLNQLDKTFKLMTSIAKNTPLFNLVHSLPGIQDNLTSRFIAELGDINRFDGYKSMIAYVGIDPVIRHSGDKDGLHLKISKKGNKRLRTILYLMVDSMRKSNREHNAVQYYYKKKTQQIRPLKPKAASIACASKLVRIIYYMHKTGSLYTYQRV

SEQ ID NO: 290010 - protein, 365 aa, unidentified
MPSVSHLGPTHLGLDVHKDTISVAILTPDRDGPDVDRIPHDEPSVRRLVGRFPDPHRLRACYEAGPTGYELARLLHSMGVRCEVIAPSLIPKAPGDKVKTDRRDCRRLARLHRAGELVAIRVPTVQEEAVRDLCRARADMVEDRTRARHRLSKFLLRHGRPWRGGNAWTLTHERWLLSQRFDQPALRATYGHYRATLDARDAALAAIEADLAGWYDRAPFADAVHRLAAYRGVTRLGALTLASEVCDWRRFPRAAAFCGFCGLVPSEYSSGTSTWRGHITKTGNAHLRAQLVESAWAYQHRPAVGVELRQRQQGLDPQVVARAWAAQLRLCGRFRRLAARKDSTNVVVTAIARELAGFLWAEMAA

SEQ ID NO: 290011 - protein, 338 aa, unidentified
MRLYGAIDLHSNNNVTVLIDEQDQVVYQKRLPNELALITQQLSGYRDRLQGIVVESTFNWYWLVDGLMEQGHKVHLANTAAIQQYEGLKYTDDHSDARWLAHILRLGVLPEGYIYPREERAVRDLLRKRSQMVRQRTTNLLSIQNLITRNTGSSINSNRIKTLDIETVDTLLPNSDLALAVKANLALMNCANEQIDILERTVIDRVKLRAEFSFLKTVPGIGQTLALTIMLETGEIRRFSTVGDFASYCRCVGSQKLSNGKKKGKGNTKNGNKYLSWAFVEAANFAIRYNARIKSFYQRKRAKSHGVLTIKAVAHKLCRACYYIMKNQVAFDVTKAFA

SEQ ID NO: 290012 - protein, 469 aa, unidentified
MVDMGSEGCFIFGTMILCLKLAHRTTRINGCVLERVWENVPTRVLATAHIRPGYNMTEQRNKVCGVDIHKKFLIATILSRDGTKMQKRFETDVDDLLNFKDWVIKENCDCVAIESTGVYWYPVHAVLENEVELILANAHQIKHTPGRKTDALDSEWIAEVALNNLIDPSRILPKEDRELRRLTRTRESLVKIRSQMKNQVHQGLESSSIKLSSVLSDSFGKSGRHILKGLIEGKSIDKIINEIPSKRVRKNGDQIQIAIRTGLDQLQVFLIQSHLDTIDNITQKLDEIDLEIKQRISRRKDDLQIAMSVPGIGFTAATTILAEIGDYRDFSTPDKLAAWCGLVPRVHQSADKLLTGSITKQGSKHIRWILVQVAQAAAKKKGSKLRKFFLRVKARKGHNVAVVALARKILCILYHLLMNQEMYQEDGVKKSRQSKISWPITTDTMSVQTMIKIIARAGYDVRKIDRGGG

SEQ ID NO: 290013 - protein, 387 aa, unidentified
MSQPNDLSRSLVALDQDSTIIAVVEMSQSSWLVGGVLPGIERQPRKKLEPSPERLLALLHRWRDESVRAGRTITRIAVAFEAGRDGFWLARWLEARGVEAHVIHPSSVAVSREHRRAKTDRLDTELLKRGFLGWLRGERGHCSMVRVPTIAEEDAKRPNRERECLVKERTRLVNRMKGTLARLGIRNFRPTLRNAAEHLAALSTPEGSPLPPNVAAELERDIARLRLVISQIKQLEEVRRQRLEEQPERGPHAMVRLLARVVGIGIETADMLVNEVLSRPLRDRRAVARYAGLTGAPDESGARRREQGLAKAGNARVRRGMIQLAWRFLRFQKNSALAQWYQARTADHRGATRKTMIVALARKLLIALWRFVTIGEPLDGVTLRPAS

SEQ ID NO: 290014 - protein, 342 aa, unidentified
MHVTSIGIDLGKTTFHLVTLGEQSKVLARKKVSRKQLLAYTANLPASLIGMEACSGAHFIAAAIRNQGHDVRLIPAQFVKPFLKSNKNDFLDAEAIAEAVARQNMRFVPIKTDEQLDLQAIHRVRDRLVQRRTAVINQIRGFLIERGIVFPKRPANLRSNMVALLEDAEANLSPRMRTLLEGVWQEWKHLEAHIAEADEEIERIASADASCQRLRQIPGVGPLASTATVAAIGNGAAFRKGRDFAAWLGLVPKQRSTGGKARLLGISKRGNEYLRRMFIHGARAVLYRVKYNTGGFGQWVHQLAARAPRNKVIVAIANKLARIAWAVLFSGEVYQHQPVSAA

SEQ ID NO: 290015 - protein, 348 aa, unidentified
MEHICRIGMDTSKHFFQLHGVNAAEEPVVRKKLRRKDMVAFFEKLAPTVVAIEACGGSHHWARLLSSFGHQVKLIAPQLVKPYVKRGKNDAADAEALCEAMSRPTMRFVPVKTAEQQAAVMLVGVRDRLIRNRTQLANSIRGYASEYGLTAAKGMAHLDPLLERIQADESLPVLARELFAGQAKEYEQLQAQIDEVDVKLKAWHHADECGRRLAQIPGVGPIGAALLMMKTPAPEMFRSGRQFAAWIGLTPKDHSTGGKVRLGVITRAGDEALRSVLVVGATALLRFVANGKSKSALSPWLGQLLKRKPAKLVAVALANKLARIAWKLMVTGQSYVRKSTPTTVAGAA

SEQ ID NO: 290016 - protein, 342 aa, unidentified
MQITTIGLDIAKNVFQVHGIDANEKVVVRKQLRRGKLMAFFEALSPCLIGIEACATAHHWARELTKLGHEVRLMPAKDVKAYVKRNKNDAADAAAICEAVRRPTMRFVRIKSPEQQGQLMQHRTRDLLMRQRTQVINALRAHLAELGIVAAKGDSGVKELLAIVADEEDTRLPIDARASVIVLAAQLGALQTLIGSIEKRIKMQHRANEASRRLETIPGIGVIGATAIAATVAAPTVFRSGRDFAAWIGLVPRQDSTGGKQKLGPISKQGDRYMRRILIVGAHSVLRRALENPEKYPWLTQLLARRPFKVVAVALANKMARVAWALLAHGGTYRAPELAEAA

SEQ ID NO: 290017 - protein, 348 aa, unidentified
MALPIVETRAITGGVDTHADVHVAAALDPVGGLLGVREFAASPAGYAGLLGWLGGFGTVCLVGIEGTGSYGAGLSRHVTTAGVRVVEAGRSDRQDRRRQGKSDPLDAVSAARAAQSGRARGAPKGRDGAVEAIRALMVARRSAASERTQTINQARALIVTGPDDLRARFTGHTVAALVAELASLRPRPGSTVGYATRIALRELGRRAEFPGAQLERLDELIVALVTAHAPGLLALYGVGPHTAALLLIAAGDHPERLRSEAAWAHMCAVAPIPASSGKTVRHRLNPGGNRQANHALWRIVFTRMSSHPATRAYVERRTGEGKSKAEIIRCLKRYVAREVYPHLRAAAA

SEQ ID NO: 290018 - protein, 341 aa, unidentified
MDIKVLGIDLGKNTCSVVGLDDGGRVLVRRRLRRSALVEFAGRFPGCVVAMEACCGAHHLGRQLAAQGHEIRLMSPEYVRPYVKAQKNDDRDAEAIAEASLRPTMRFVPVKSEVQSDLQSLHRARERLVTARTALINHLRALLLERGIITAQGRRKLEKALPGILSDEASGMSCRIRQLISDLREEWRVLDDRIASFDTELVSLARTDETARRLVSVPGIGAINATALVAAVGDGSTFARGRDMAAWLGLVPRQATTGGKPRLLGISKRGNRYLRKNLIHGARSVLPYLNRCDTPLGRWVTGLMARAHKNTVVVALANKLARIAWAVLVCGRSFDAAHIAA

SEQ ID NO: 290019 - protein, 342 aa, unidentified
MKITTIGLDLAKNVFHVVCFDERFKERSKRMLKRHQVLKYFANMPPCCVAMEACSSANYWARELIALGHEVKLIPAQHVKRFLPGNKNDYNDARATAEASTRDDIRTVAIKTTEEQDIQALHRIRSQCMRDRTALVNSVRGLLSEYGIIVGKGVSTIRRAIPELLEDADNGLSFFFRELLARRYDQLVELDEHIAFYSRKLEQLARQDDACQRLQTIPGFGPIVASAFRSVIGNGEQFAKGRDAAASLGLVPRQHSTGGRSVLLGISKRGDRYMRSLLVHGARSVVTHAVGKDDPLSCWINRIHERRGKNKAVVAMANKMARIGWAILRKNTSFQAQTLIPV

SEQ ID NO: 290020 - protein, 275 aa, unidentified
MEIVSVGIDLGKTTLHLVALGMAGKVLARKKFTQRQLLMYTANMQTSLIGLEACSGAHFLGRALRKQRHDVRLIAAQFVKPFVKSNKNDFVDAEAIAEAVERKNMRFVPIKTDDQLDLQAIHRVRGRLISRRTAVINQLRAFLLERGLVFAKTPAKLRAGLPDILENADLDLTTQMRNLVGLLWNEWKTVEVQIEGLSLELERISAADPGCTRIRQIPGIGPIVATAIVAAIGNGAAFRKGRDFAAWLGVVPRQYSTGGNAKWICRPSKITRSVW

SEQ ID NO: 290021 - protein, 404 aa, unidentified
MRSIALDVHRDFCEVAIKDGGEVRSVGRIKTSGEELELFARSLAPSDQVALEATGPALQIKRLIEPHVGRVVIANTRKLRAIAEARVKTDKVDARTLCELLAAGFLPEVFGPDEETRALRRRLARRAALVRQRTRAKNELHAALARNLRGKPPMSDVFGVRGREWLEALALPADERETVAGCLRQVDFLDREVGVVERELAKAALASAEIRRLMTVPGVNLVSAATFVATVGDIRRFQTPRKLVSYVGLDPRVRQSGEAPARHGHISKQGSPAARHMLCEAAWIVVRTPGPLRAFYARVRARRGAQIALVATARKLCVLFWHLLTDEEDYAFGRPSLTRHKLRRLELVAGDPSRRGRRSGSAASKREQRHERELSEKFELAYRRLVEDWQPKKSGAGATRGRAS

SEQ ID NO: 290022 - protein, 415 aa, unidentified
MKVVFPTCCGVDVHKTFLVATIITTPADSLQPNYQKKRFSTFNSDLNRFADWLLEHNCLDVCMESTGKYWVPVFNVLEKRGIRVVIANPKWVKAVKGNKDDTKDSKWIGDLFRLGLVPRSYIPCKPIRILREFTRYRYKLVSMKSSEKNRFQNAFTVCNVALDSVVSDMFGKSATAITDYLTSDESFDSEHCVSLLQRSLKKKAEQVLESIEGFSIASEQKARIKIIREHYDFLEKMIAKVDTCVSEMVEKHEGEINLLCTIPGIDRNSAITIISEIGTDMRQFGSSKRLCCWAGLTPGNNESAGKKKSVRISRAGVYLKPALVQVAHAAVKDKASPYYALKYERIAKRRGKKRAIIAIARMILTAVYSMFCTGEVWNPVDLYKVDMPEHLKEQQLAKAIKQATRFLEKQGLSVA

SEQ ID NO: 290023 - protein, 432 aa, unidentified
MEKIRTNAAGIDIGAKKVFVAIEGQEVRYFFTFTEDFEKLRDYLFEHKIETVAMEATGVYWNILYEILEESGIDVWLVDGRQTKQVPGRKTDVKDCQWIQQLHSYGLLNRCFVAEADIKELRAYQRLREDHIRSASMHINHMQKALTEMNIRLTEVLSQIHGVSGMAIIEAILKGERNKETLLKMCDSKIIKHKKEDILKSLNGRYTKHGLFALQQAFDSYMFYQHQIEQCDQMLSDVIERIGKGKPDQDPQGPRKPIRHNKPDINNLGISLLKIFDGKDATALSGITDYTWMQLLSETGTDLSRWPSEKEYTSWLGLAPGQHTSGKMKRTKRKNGHPKAGQIFRQIAQSLITSKHIALGAFGRRLRARKGSQIAIKAVARKLAILYWRIMVKGMAFVEEGIKKYEEQLLVQKHKSFERLAKDLNIQIAYNV

SEQ ID NO: 290024 - protein, 370 aa, unidentified
MKSIIYVGMDVHKASFTLSCFSVTTQETFATVKISPDAKAIKKYLDGVSLSRSEECEFVCGYEAGCLGYTLYHQLTAMNIRCVIMAPTTILRNSKRVKTDRIDAENLARCLAYGGYKSVYIPTAQDEAVRDYLRMRDDHKLMLKKIKQQINAFCLKHNKIYPGNKSKWTQAHVKWLNALEFDGYLQDAFNEYMITYRELADKVERLESQIEQLAELEEYRDKVKKLICIKGIKTHTALSLIVETGDFSRFQSAERYASYIGLVPGEHSSSEDQNRLGITKAGNRHMRMLLIEAAQCYSRGVPAKKSKNLKSRQKGASPEVIAYADKASIRLRRKYIRMELVNKKKANVAKTAVARELACFIWGMMTDNIA

SEQ ID NO: 290025 - protein, 457 aa, unidentified
MRQRGRRTKGIEEAHPFAGMHQVHEAAAGVDIGAEEIVVCVPGAGNTQIVKAFGNYTVDLQNLGRWLCEHQVQTVAMESTGVYWIPLFEELERQGLECLLISSRSLRRVSGRKSDIQDAQWIQTLHSYGLLEGSFRPPGELVTLRTLLRHRNQLVEHRSPHIQHMQKALLQMNVQLSQALSDVTGETGLRIIRAMVAGERDPGTLASYRDRNCKKSVEEIGKALTGTWREEHLFIIRQSLELYDFYTQKVEACDAEIDRMYALTRPDWGVEEVKPLPQKKRNSHSKNAPANQAQIRQHLQRISGVDLSVVDGFGVSLAQTVIMEVGTDMSKFPSEKHFCSWLGLAPKHEISGAKVLKNRTMKTKNRAGQAFRMAAQSVKRADCIFGSLYRRLKSRLDKAQATVATAHAIARVVYRMLKYKVEYEQVNVEAYEQKYKDQQIKYMRKKAAQFGFQLVPT

SEQ ID NO: 290026 - protein, 383 aa, unidentified
MTTAREGGATGRVYAALELSSSKWVVAVRCSGEEGTSLFQLAGGDLAGLLSLLGRKRAAAEQRGASRVEVCTCYEAGYDGFWLHRALQASGVRNVVLDSASIQINRRRKRVKTDRTDARGMLMVLLAFYRGEDQACSTVRVPTEEEEDRKRVIRSRESLLKERVRRVNRIRGLLHLQGVRHLRPNRANWEADLKALKTADGRAFPLQLLREIRREAVLLATVQRLLREIDEDVRAMSQANAKAVAQRRRNPIATRLAAIRGIGAQTAAVLATELFYRSFRNRREVASYVGLTPTPYASGGVSRDQGISKAGNRRARRDAIELAWLWLKHQPDTALSAWFRRRVAEGRGRVRRIAIAALARRIIVALWRYLEQGLIPQGAVMKA

SEQ ID NO: 290027 - protein, 343 aa, unidentified
MVHYVGLDVSLKQTSICVVNQAGSVVREDVVDSDPEAIAAFVRLKAPGAVRVGLETGPTSTWLWTELKRLGLPVICIDARHAKAVLKMQINKSDRNDAAGIARIMQTGWFKEVRVKDLDSHSVRALLSSRALLVKIKRDLENQIRGLLKNLGLVIGRAKFNVFATRAEELIADRPELVAAVRPLLEARKAIEQQVGDLDRKVLKLARYDVQVRRFMTAPGVGPITALCFKATIDDPTRFKRSRSVGAYVGLTTRRHASGEVDWSGRISKCGDAMLRTYLFEAANVLLTRVPKWSALKAWGIRLAKRNGLRKAKVAVARKLAVILHRMWIDGTEFSWSTKKAAA

SEQ ID NO: 290028 - protein, 340 aa, unidentified
MGDITTIGLDLAKNVFQLHAVDEAGNVVMRKRLRRGQVLAFFAGIPACLVGMEACATAHHWARELIALGHEARLMPPTYVKAYVKRNKHDVADAEAICEAVRRPSMRFVPVKAVQQQSALMMHRARDLLIRQRTMLVNALRGHLAEFGLIEAQGLHKVARLVAIVMDENDQRVPDIARQVLKVIVNQIEDTQTRIAGLETQVLAWHKSNPVSQRLATIPGIGPIIATAIAATVADPSMFRSGREFAAWLGLVPRQCSTGGKARLGGISKRGDSYLRRLLVNSAHTVLLCSKQAKTDPWLTSLLSRKPRLVAAVALANKTARVAWVIMSRQDTYRHAAATA

SEQ ID NO: 290029 - protein, 323 aa, unidentified
MQGKEPSQQSVTRRVYLGIDVSKARLDVYIHPLGRTFAVSNDADGLKRLKKAVADCDVALVVMEATGKFHRLAHRFLHDSGFKVAVVNPARSRKFADALGALAKTDAIDARVLAILGESLRPGAAPPAPESLESLQELTRGRDAAVESRTAVLNQIGASKTVPLIRELKRQLRALETAIANLDAEIRRRIDADPVMARRFQILTSIPGIGPGAAVALIAWLSEIGQLSSKEVAMIVGLAPVANDSGERRGTRSIRGGRANVRTALYMPANSAARHNPDMKVFYDRLIAKGKLAKVAITAVMRKMLVLANTLVSQDRLWEPNHA

SEQ ID NO: 290030 - protein, 465 aa, unidentified
MTKNIATRKKEQKEKVVSSGYLQQINLHAAGIDIGSKSHFVAVRTSPDEVSIKEFTSFTSDLHALAGWLKENGVRTVAMESTSVYWIPLYELLEEKGFEVKLVNARHVKNVTGRKTDVEDCQWLQQLHCFGLLQGSFRPHETILPLRAYSRQRTMLIKHMAIHIQHMQKALFQMNVQLTNVLSDITGYTGMQIIRAIVAGERDSKILAQMRDRRCSKSLGEIEKSLAGTWRSEHLFSLQQGLELYDFYQNQLLTCDEKIEQALQVLNNDDYSKPNDSAPQTRKPRSYKTKKGNALYFEVNTYLKSLTGCDLTKIPGVDGNTALKLLGEIGLDMKQWKSEKHFASWLGLSPENKISGGKQLSSKTKPTANRASQTLRMAASTLHRSQCALGAFLRRLKFRLGAPKAITATAHKLALIIYSMLKNGTKYVEMGLEYYEKQYNERLVNGMRKRAAQLGYSLVPLPENS

SEQ ID NO: 290031 - protein, 345 aa, unidentified
MELHTIGIDLGKTVFHLVGLNLRGEVVVRKRFSRIQLLRFTANVRVGLIGMEACGGAHFLGRALREQGHEVRLIPAQYVKPYVKTNKSDYIDAEAIAEAVTRPTMRFVPIKSDDQLDLQSLHRVRERWVMRRTAVINQIRGLLLERGITLRKGRCHVDATLPLILEDADAKLSGAVRMLLAQLKLDLDQLALRIDEADAVIQKTAHENEACRRLVAIPGIGPVTATALIAAIGNGGAFHKGREFAAWLGIVPREHSTGGQQKLLGISKRGNSYLRRLFVQCARAVLQQRTKQSAGLSAWLAQLTSRTHHNVAAVALANKLARIAWAVLAKNEQYRPPVLANTAAA

SEQ ID NO: 290032 - protein, 350 aa, unidentified
MTMVGGFDVHRKQITFDYVDDDGLVRVGEIRPATRTTLRHWLSEHCPTGDAEFALEGCTGWRYVVDELATAGVVAHLGDPAEIATLRGPKKRAKTDRADARLLRTLLLEGRFPESWIPPAHVVEVRTLGRLYCTLMDERRAWQQRIHAQVFHQGCPPIRALLTRAGREALAGAELSAAGRQYVDTALRRIDELSAEIDPLRTQLISFARRQPGCRALQRHYGVGWLCAVIIWAEIGDARRFSSSDQLVRFAGLDVTVYSSDAKRAPGHLSRQGSPELRWAAFEAAKSAARRGSPDHGYYHQLAAKHDGHNGKNPTLAVERKILRRCYHTLRELGDAALALPDIRPQEVAA

SEQ ID NO: 290033 - protein, 338 aa, unidentified
MKLYGGIDLHSNNSVIHLIDENERLVFKKRVTNDLGLILSLLQPYSATLEGLAIESTYNWYWLVDGLMESDFKVHLANTAAIQQYSGLKHGDDDSDANWLAKMLKLGILPEGYIYPKAERAQRDLLRKRFQLVQQRSLHLLSIQGLYSRHINVSLNNNKLKQLTEEQLVRDFADINVRLAVSSNMMNARCLAKQIMMIEASLKKQLKLKDDFIELTSIDGIGLILALTIMLETGDIKRFEKVGQFASYCRCVGGARYSNGKRKGATNSKNGNKYLAWAFIEAANFIIRFNGTAKKYYQRKLAKTNTIVAKKTVAHKLARACFYVLRDQVPFDVNKAFG

SEQ ID NO: 290034 - protein, 325 aa, unidentified
MKSQNLVCGVDVSKDTLDLYYNDESGKEHYLKVSNDTKGHDLLIGKLGITRTYLMESSGPYYLRLAFAIKRLHGDVRVENPIVVKRFIQMHMERNKSDKKDARWLYVYTKSRDTNEWAVPPKEQLYCTQLMGSIDLYSRQLVMITNQLHSLSQGPVQMKEVIKSLNKIKVHIEREIKKLEMQLHNLLQAWESEQLKNISTIPGLGKRAVALLIVYTDGFKRVQNHRQLIALAGLAPREHTSGSSVRGRKGICKMGNGHLRSVLYMCSLSAIKHNQACKDLYDRLKAKGKRSKAALIAVCNKLIKQAFAIATKGTTYQSNYKSSLT

SEQ ID NO: 290035 - protein, 441 aa, unidentified
MAMRKRDDDLVFPHAAGIDVGGSSHWVAVPRHATSDPVREFGAMTDDLGAMADWLLACGVDTVALESTGVYWIPVFEVLEQRGIKVFLVDARQMKYVPGRKSDVQDCQWLQRLMSQGYLRAAFRPTDEVCVVRAVARQRDVLLTEQASWVQRMQKALVQMNIQLTEVLSDVMGTSGQAIIRAIVAGERDPKVLARHRHSRVKASEQDIAKALTGNWRDEHLFVLRQALAMYDDIARHLCECDAKLQGLLSQLGSAQVDLGKTPRAGSKTRAEFDTRQILANWAGVDLTRINGLGLAAVLKILSEVGPDLSRFANVKHFCSWLGLCPGTKISGGKVLSSKTKRAGNRVRQALKMAAMSLSHSDSALGAFYRRLSGRMDKPRANTATAHKLARMVYFMLTRGEAYVDQGQQHYEEQQRQRSIAALKRRAAALGFAVMPTPVPA

SEQ ID NO: 290036 - protein, 348 aa, unidentified
MKNKSFVGIDISKNVIDVSIFREDTNIKMFPHEVFNNTRKGFGDMCSWLKKSRVVLSQALFGMEFTGCYSLDLEKFLTSKNYSFCMLSTRIVKHHPMGTIDKRDKNDSAKIADFLYRYDGTECAKPYKLPSKAMQQLKQLVNERKFLVEQRTNFMNRMQMFETKEDSAMYESYIKKLNHDIEKIDQEECELMSKEEDVFDTFQNLLTIPGIGFVNATNIIAITRNFTAFDTARQYARYVGVAPRSHTSGTSVKWRARPSAHCNGQVKADLSMAALRAVEYDVEMQMFYNRKLGGRKDSDTKRKALNAVKFKLIRRMFAIGKQKRKWEVLNTSDDRKNLHIEKSKASEL

SEQ ID NO: 290037 - protein, 368 aa, unidentified
MKKNNTCPKSSKRSKTRKQSITIGMDLGDKTSHYYVVDSAGEMLREGTVATTKKGMKQKFGPLPRCRIAIEVGTHSPWVSRLLSSLGHEVIVANARQVKLISSSSRKSDRLDAQTLARLARVDPELLRPIRHRSEKAQGDLMQVRVRAALVDTRTGLVNTARGLAKAMGERLPACDADQMGVEKMQGLPAVLVEALTPLLETVESLTKQIQASDQKLEQLAGREYPETELLRQVSGVGSLISLTFVLTLEDPNRFRKSRDVGCYVGLRPRRSDSGESQPQLGISKEGDVYLRKLLVQGAHCILSHRSPDTDLKRWGLKLAGKGNKNAKKRALVAVARKLAILLHHLWVSGEVYEPLRNSGPLERKAVA

SEQ ID NO: 290038 - protein, 343 aa, unidentified
MDYYAGIDVSLELSSVCILDGSGQIVREAKVASEPEALATYLSGLGLPLTRVGLEAGPLSQWLHAGLVQAGFEVVLLETRHVKAALSAMIVKTDRRDARGIAQLLRMGWFRPVHCKSPPAQEVRALLIARKQLQAKMRDVELSLRGLLRGFGLKIGEISKGQFATRVRMLSAGHAMLEKIAEAMLRAREALQTEFARLHRVMLSIARENEVCRRLMSVPGVGALIAVTFTSAVDDPERFSRSRAVGAHFGLTPKKYQSGETDITGAVSRVGDPMVRTALYEGAHILLTRAVRFSALKRWALEVAKRRGMRRAKVALARKLAVILHRIWIDGTTFRWGREGAAA

SEQ ID NO: 290039 - protein, 429 aa, unidentified
MSYRIAGIDVHKKMLAVVVSDVEIDNEYQFERRKFSSNPEQLRSLAAWLLEQEAEEVVMESTAQYWKPVWGVLERYWKPICEKREGARRKSGTLHLAQALSNHGPRGRKRDFPDAERLVKRLVARELTLSFVPDAEQRLWRTVTRKKYQLRCDRIRLQNQLESLLEEAHIKLSSLVSDLLGLSARRMLKAIGEGETNPATLAALADERLRATPEQLCDALGACTELNAVYRRLLKMALEELRLIDEQIGRLDQEMASLLSEHQDAVQRLAEVPGLGVDSAQQIIAEVGPTAATFPSEKCLSSWVGACPGDDESAGVNHTHRSPKGSRHMRRLLNQAANAAARTKGSIFEIVYRRSVPRLGHNQAIGAIAHRQCRLIWLILHQGVRYEERGPAVTKRSKQLRTWKMIRQLRSLGYRIEPPNPQPSQAQVQ

SEQ ID NO: 290040 - protein, 351 aa, unidentified
MVIIGIDAHTQTHTAGAVDEHGRPLGTLEVGASPRELERLVAWTHSFDGPRLIAIEGARGFGLPLSRRFLALDEEVVDIPTHLTADGRRSSRSRGKDDPSDAITIARIALREPGLPRLRESHLEADLKLLVDARDQIVAEGTRVRNRLHALLLALAPGYRTETGALSNRRGLLAAGRLTRQARATDPIRARIALGAIRRLRQIETEAGELEAEIRSLVEASESNRLLAVCGVGPIVAAKILGETHDIGRFPSAAAFAAHAGAAPLPASSGTVHRHRLNRGGNRQLNRALFTIAMVQARWDPQGIAYLARKRAEGKRPAEARRCLMRHLASVVYRAMVADAAARGARQVEAA

SEQ ID NO: 290041 - protein, 309 aa, unidentified
MEHFVGIDVAKDRLDVHLRPSGESFTVTRDGEGLVQLVDRLQRLAPRLVVMEATGGYETIVASAVATAHLPLAVVNPRQIRDFARATGKLAKTDAIDAAALAHFAEAIRPPARPIAEPEAQALGELVARRRQVIEMIVAERNRRRRATQRRVLQAIDRHLELLQTELSELDRDIDGAIRGSPAWQADADLLASVPGVGPATLRTLIAELPELGRLDRRKIAALVGVAPINRDSGTMRGRRSIAGGRPAVRTALFMAALVASRKNPVIAPYYAKLRAAGKTGKQALTACIRKLVVILNAILRDRKPWQPA

SEQ ID NO: 290042 - protein, 333 aa, unidentified
MCNYSFFIGIDVSKSVIDVSYYDEGSPVYFNLYANSKQGFEDLINDLTRKSETPSNEWFICFENTGSYSKALLHWLIDTGITCREESPLKISRSLGLRRGKDDKIDSRDICRYAYEKRDRLKASKLDKSVVVNLKSLLSRRELLVKHRTALNISLKEQKASMNKKLYSMLELENETLLKTYEKQIKNLEEKIQEEIASDAEVAKNNKLSQSVIGIGTITSAYIISVTNNFELFEDARKFACYCGVAPFPNSSGIRKGRTRVSHIANKKMKSLFSNCILAAISYDPEIQNYYKRKIKEGKKPGVVFNAIKNKLIQRVFAVIKRQSPYVKLLRYA

SEQ ID NO: 290043 - protein, 409 aa, unidentified
MQVVHEVCCGLDVHKKSVTACVLWGSGRRRQTRAFGTFTHELLELGDWLRACGVTHVAMESTGVYWKPVWNLLEGQFEVLLVNAQHIKAVPGRKTDQKDSEWIADLLQHGLLRASFVPPTPIRELRDLTRYRASLAQEINRIANRIQKVLEDANIKLASVATDTLGASGRAMLEAIVNGEQDSQRLAEMAQGKLRNKIPELQEALQGRVSRHHRFLLRELLDHHYFVESKMQRIEQEVAERLGPFQSEVARLCTIPGVDRVTAWGLLAEIGLSMKQFPDAQHLASWAGLCPGSHESAGKRKSGKIRKGSLWLRRCLCQGAWAVSTKKNNYLSALYRRLAARRGTKRATIAVAHNLLVIAYYILRDGTCYRDLGPDYFDRLNPEGLRRRLTKRLEGLGFKVTLEPLAQVA

SEQ ID NO: 290044 - protein, 596 aa, unidentified
MMKPQEIEDEEHEQVLDRVAAVDVAKASGMVCTRVPHPSRPGKRRTRVWTVDATTNAVLELAGHLVAEQIEKVTLEATSDYWRIWFYLLESAGLDVQLVNARDVKAAPGRPKTDKLDSVWQAKCTERGMLRPSFVPPKEIRQLRDYTRLRTDLTRERTRHYSRLEKLLEDALIKVSAVASSLTTVSARDMIEALIAGERDPKVLAGLARGRMRAKRAALIEALTGQFDDHHAELARVLLDQIDGLSAQVDRLTDRIEELIGAIPAAQGVDPDGSTGPHAGLREDAPVIPALERLDEIPGISRATAQGIIAEIGLDMTRFPTPGHLVSWAKLSPRTIQSGPRTRAGRTGKGNPYLKGILGEAAAAASRTDTFLGELALPADRTAPRQAQGPGRRRPHHPGHHLALAQQPDRPLPRARRRLLRQPHRQRQESPQPHPAAGSARVHRHPRPGRMTRRTAHPAGDHRPGFAAALWLRQVIYRLGGSASVLSGLPVTLSDAVEGVAQGRPLSGSSVSDLPVRACQGLPPPPADAEPAGSTAMREIRHPMAISSANGAMVSKPWWSIQHKNTVSARLGYGVRATTVTSAKDSSHGDGSGHGG

SEQ ID NO: 290045 - protein, 400 aa, unidentified
MKKTAGLDVHKDTVFCGIYDGKLQSEVKEFTTTTVSVYSLGEHLQTEGVQEVAIESTGIYWIPVWNILEEMGFSLMLVNPYLIKQMPGRKSDVKDAQWIAALLHKGLLRGSLIPCQQIRELRTYSRKYVRLQQKLTSVLQEIERTLEICGIRITSLVSRISAMSVRRIIEQTIQGEDNPLELVKHIHGRIIKRQGREKVIESLTGFVMPQHRFVLEQALEEYDLLVMQSDRCLSKMAELCKLHYSKEFELLQTIPGISEISAMIIIAETGADMKAFENSGKFIGWTGLRPRNDESAGKFKSTATTKGNKYLRTILVQVAWAASRTKNSYFKEKFNRLCIRKPRKKALVAIARKIGVVIFNVLNKTECYNSSLLIVPQTEKVQQQVIYHKKELERLEKILN

SEQ ID NO: 290046 - protein, 370 aa, unidentified
MKHFITFVGLDVHKDTIDIAIAESDGNKEVRHYGKIDGDLAALDKAVRKLQSKGAELRFVYEAGPCGYDIYRHLTKQGFTCIVVAPSLIPKKSGDRVKTDRRDAMGLARLYRSGDLTAVYVPREDDEAMRDLSRSREDAVNASRTARLRLCAMLLRLGYRYNRKTMWNAAHFRWLSTLKMPHPAQQIAFQEYIHAVTECGERVDRLTEQIHKLIPEWRLASVVKALQALRGVSLMVATTTIAEIGDLSRFANPRQLMAYLGVVPSEHSSGKKEKRGGITKTGNGHVRRALVEAAQAYHHQARVSRILLARQEGLPDSIRKISWKAQVRLCGRFRKLTGRGKPRNKVVTAIARELSAFMWAIAKEVPIQYA

SEQ ID NO: 290047 - protein, 410 aa, unidentified
MKQSKSKIKANTVRVDERNIVGIDIGKRKHAATAVSPKGITIAQLKSFENNRKGVDQLERHVLVPATSRRKPMVAMEATGQYWNALHDELQRRGYSCVVLNPIQTNARGRNQIRKTKTDLVDSGLIARTILSGDARWTIVPDEATFELRLLVRHRWRLIRTHGIILRYAISLLDRIFPEYEGIFSKPFLPSIRQLIRDVGITPRSLIGNRKLVQTVLEQASRKKFSQEKIDLLLSRAKESIGTQQGDKTVNHQFRMIVDFLDFAEKQIKEVNTELRKRMTETPCPITSLGIGPELAATILAESGDVTMFAGPEKYSAFCGLDPSEYKSGDSIQGRTPISKRGSPLLRWAMYMSAITVCKKHHDFNRIFERHAHRGYRYAMIAVAHKLARVIWRLMKDNRDFTKRPPKRTC

SEQ ID NO: 290048 - protein, 315 aa, unidentified
MVTGIDCSKDYFDIAVLKEGKLTFKSRFANNIKGFMDMLPHVQDTHVVMEATGPYYFQLARFVHDSGLRVSVVNPLIIRRYAQMRMSRAKTDSKDAMVIAEFAQMTSPKLWTPPTEEIQKIRNLETYLEGLKQRRQMLCNQLHAFESAGTIEQLLYNEIKEEVESYDKRIKDKECEIEKLIKQNYAEMAVNIRSIPGIGPRSVSMLIIATDGFGMFENYKQVISYFGLAPRIYESGTSVKGKGHICKMGMGQIRKVLYMAATSAIRCNKACKELYERLRGKGKPYRVALIAAVNKLIKQVFAIAKSGEPYKAQFG

SEQ ID NO: 290049 - protein, 394 aa, unidentified
MLYLAIDQHKNQMTINIRNEQGDVIQKGQISTAHAEVDDFFVAFTKKARKHRGYMAIVEVCGFNDWLLEKLKKTRCSEIVVIQPDNSAVNKTDKRDANALCELLWNNRKRLQGGQRPNGIRRIFPADPADAQVRQLANFRQHLGQQRTKTINKIKGIINKHNMAQDAPTEIYSTKKFREWIAKVQLPVVDRMEIDMHIQTWELQDKQIAEVEGELIKRSEIRMKDVLRLKAIPGISAMGAITLLSRIGDIKRFKNPDSLANYFGLTPGCHNTAGKHRVGGITKRGNAVARHVLNFAVIHIVRKDAAMKEWHKKIKKRRGAKTARVAVMRRLATIIWHILRWEKPYQFRYDPPASAPKKGDLRSPKEVLKGIGNSNHSRRQEKTPLKCRSKARAQ

SEQ ID NO: 290050 - protein, 346 aa, unidentified
MLYAGLDLSRKRLDFELLADSGERVLAGAVPPDADGLRGLAGRVSGFGEPVRAAVESMNGARFVHDQLELLGWRVEIADALKVKGLAPLACKTDKIDSHVLAELCRRDLVPAIWLPTPEVRGERERARFRLHLVRQRTRLKSRIHATLLAFGHPCPVSDLFGVRGRALLEQLALPEPWRGDVDASLRLIDQVDREIAAIERELRSLGSEHRYVPLLMTIPGIAWILGYTIAAEIGEIERFSAPKKLVGYTGLCPKVIQSGGQDRRGPLAKNGPKYLRWAYIEAATHACRYHPYRDPYQQTKQRLGRNRGAKVATITVARKLAEASWWMLSKGEPFAPTGATQVLAA

SEQ ID NO: 290051 - protein, 329 aa, unidentified
MEHFAGLDVSVKETSVCVVDDTGKIIREVKVASEPGTLLAVLKNPAYHLKRIGLEAGPLSQWLFSALAEAGLPAICVETRHMRAALKAQINKTDRNDARGIAQMMRAGLYRPVHVKTVRSQKLRMLLTHRKLLQSKAIAIENDLRATLRNFGLKVGMVGTVKFEARIKELVENLPDLTVLVEPLLIVRRVLREQIGILHRRLMAIVRDDDVCRRLMTVPGVGPVVALTYRATVDVPARFRNSKAVGAVFGLTPASYQLGEINLTGAISRCGDEMMRAVLYEAAQVMLTRTIKWSWLKAWAMQIARRRGMKKAIVALARRLAVIMHRIWG

SEQ ID NO: 290052 - protein, 408 aa, unidentified
MADKIAGIDVHKKVLMVVVMDARTPESKPERRRFATMPSELRRLSTWLQERGVEEAVMESTAQYWRSVWLELEPHMCLHLAQAFSNRAPRGRKHDFKDAERLVRRLIAKELILSFVPDGEQRIWRNLTRMKLQLTRDRVRIQSQIECLLEEMRIKLSIVVSDLLGSSGLRILHALANGETDAKSLALLGDDRLKCTEEQLVEALTGRSHPMHGQMLGLQLERLRLLDEQIAKLNSLIAQAMKPHQDAVIRLAEVPGLGIDSAQQVIAEVGVTASTFSSAAEFTSWVGTCPGKEESAEENSSSRSAKGNKYMRRVLNQAAHAAARSKGTHFQAVFRRLLPRLGYQSAVWAIAHRLCRLVWKILHQGIRYIEQGIESEPKLLIYRAKYLAKQLRKFGYNVQITPANGAPA

SEQ ID NO: 290053 - protein, 361 aa, unidentified
MLYRTSIGLDVHARSIAATAFIPETGEIVQKAFPHDAGKVAEWAKGMPQPARCACGSGPTGSGLKRKPGKAGVPCVVGAVSKMLRPSGDRARTDRRDATFLARMLAVGSTVGVAMPTEAMEAARDLARAREDCRHDLMRARHLLPEFLLRKGIVYPGKTAWTKAHREWLGRPGFADPCERLVFGEYLESVRSPGLRRARPGRAIEERAAGEDMAPAVSALRCVRGIPTVTAFSIAAEIGDFSRFPDARAFMSFVGLVPSEPSGGESVSRGSITRTGNIHVRTLLVEAAWQHARPLRPMSAAAMGDAAGVPADVAEAAARANRRLHSRAAHLRGRGKPASVVNAAIARELAGFVWALARMAG

SEQ ID NO: 290054 - protein, 310 aa, unidentified
MERIFVGLDVSKNRLDVHVRPAGESFTLAYDEAGLVTLVTRLSALRPALIVLEATGGYEAAVAAALANAGLPVAVVNPRQIRDFARATGQLAKTDALDARVTARFAETVQPAARPLATEQAQVLGELVARRRQLVEMVGAEMNRRRQVRDRGLQTRITAHVTWLTRAIEELEGDIQRLIRSSPVWRETEDLLTSAPGIGDITAHALIAELPELGQLNRRRIAALVGIAPFNRDSGLWRGRRMIRGGRPAVRRALYMATMVAIRHNPPITDVYRRLTRAGRPKKVAIIAAMRKLVTILNAMLRDQRRWQPA

SEQ ID NO: 290055 - protein, 352 aa, unidentified
MLIIGCDFHPGFQQVAIFDNRTGEIQEKRLQHRAEAEQFYRSLAGQEVLVGMEACGHYPWFERLLQELGMELWFGDAARVRASVVRKQKTDRRDAEHLLKLLRQDGFPRIWVPSLEVRDVRQLLVHRHKQVQARTRTKNQLQAMALGHGVQKKYKLWTKAGRAELEQLPLLPYASERRKRLLEELDTLETEIVELDRRVAEEARQRPEAVRLMTHPGVGPVTALAMVLTLGPAERFASAKQVGSYFGLIPSEESSGGKQRLGKISKQGSSFLRFLLVEAGQTAARLDPQLKRFYRRLAARKNRSVAKVAVARKLATRMYLMLREDWTYAQLSQAVMQGSPSHSVVEKDKPTG

SEQ ID NO: 290056 - protein, 342 aa, unidentified
MKQYVGLDVSQRETAVCVVNETGQVIFEGKAKSNPGVLTDLLSKHAPHAERIGFETGAMASWLWHELRRVELPVVCIDARHAHAALSVRMNKSDQNDARGLAELVRVGWYREVKVKSEESQKIRAILVARSRLVSMRRDIENQVRSLIKECGLLFPRAIGQQFRSQVSELLGVDHLLLSVISPLLSIHENVCQQQGKFDNEVRRLAKLDETTRRLMTVPGVGVVTALTFRHTIDDPSRFRSASTVGAYLGLTPRRSQSGETDTNGKISRWGDRLLRTYLFEAATVLLYRTKKWSSLKAWGMKLAKRIGMKKAKVAIARKIAVILHCIWVDGTSFDWGQPKPI

SEQ ID NO: 290057 - protein, 308 aa, unidentified
MIAQNYVGCDISKQWLDFFDETSGRLRRIDNQADAIAAYVADLEPSRDFVVMEATGVHDRLLRHALAKAGVPFSRHNPAHTHHYSKSTRRRAKTDPLDARMLSDYGRRYQPEAEPAPREEGEQLQSLVGHRDQLVEMRATLKKQLGEAFVEIVVTSLKDLIAGLDARIKAFEGQIAEVIRQAEDTARDYTLMVSVPGVSKVGAFSLLALLPELGQRSPKSIAALVGLAPFDNKSGKLNRRSQIQGGRSRVRRALYMAALTAIRTCDRFKTFYTALAARSASKKLAIIAVARKLLVVLNAIMRDKTAFA

SEQ ID NO: 290058 - protein, 419 aa, unidentified
MNKIETKKQRIVNAKTLIVAIDIGKTTDTGYCRCPSGKDIKTFEFSNNAEGFKKLWDRICWMKMSHHLEEVVVGFESTGAYGEPLVHYLRQKPVKLVQVNPMHTKRMKELQGNSPGKTDRKDPKVIADIIGLGHALSVVIPEGAAAELRRLTLARERSIERRTALYNQLQDLVFIVFPEFLQVMKDVKTQTAQYLLRHYPTPQDMVACGSEALIRILRQVSRGKLGKERAQALYDAAMQSVGLEEGRRGILLETEEILSGLEACKRFIEKMEEEMVPYLEQIPYSDSLLSVKGIGKITVAGLIGEVGDFRQFHTLREVMKLAGLDLFEISSGKHKGNRHISKRGRPLLRKLLYFAAINTIRKGGVMHASYQRYLERGMPKIKALIAIARKLLGILFALVRDHSQYVESHSPKEVLKLAA

SEQ ID NO: 290059 - protein, 396 aa, unidentified
MIGFVGLDIGKDAFTAAFLWVDPQGQTHTRKPQTFSADRAGWQAFLACWRTLPPQTWHVGLESSGPYTRLYLHHLQALPHPVYLISPLQAGHLRRSRSLRKTKTDRIDAETLAAWLFSAWQEERLPRQARTSPSLRDLATLYDQLTQEMTRVQNRFRQVLHLLFPELERRQRRFPKALRRLLQTFPSARQIAQASDEDLAPFCRRISWTPDKLRALAATSWGVYDEAAVIHLRQLLALWDELETRRQQVWLDLRQQVRQRYPDAWKRLRAIPGLGERLTALFLALTGDLSAFPSPKALVAFAGLDPSVYQSATFHAHGRLSKRGSPLLRHILFLIAQALVRYTHRFRQTFLHHRHQQGRAYREAMVIVARKALTIFHMLILRQRDFVDLAPQTSGL

SEQ ID NO: 290060 - protein, 435 aa, unidentified
MEEVTDEPLYRDRVCGIDIGKAEMYATIRVPSDKDPDRRMSETRSFPTTRRGVLALADWMRCWQVPAVVMEATSDYWKPVLYRLEAEGFECVLADPKQVKNLPGRPKRDPSDSSWLAQCFERGSVRACFVADPEFRVIRLHTRYRRDLTEDRTREKNRAEKLLESAAVKLSSVVTDLHGVTGCDIMNHLIAGERNPKVLAQLARGRARRKISDLEQALDGAEFFTSRHAALLRAMLARIDQISTQIDELSAIIEELLAPWEEQLQQAGSMPGWGRRSAQDILAETGPDMTRFATGGHLASWGGRIPLDKQSGKRHGQGRHKKGNKYIAAATGETAVAAGKTQTREGARYRKLARTRGKNKACVALGNTQLKVYHKLLSTPGLRYEDLGPDYYQDRARTRSKIAHHVRELEALGLEVTLCRIPESDPATPAETTTA

SEQ ID NO: 290061 - protein, 426 aa, unidentified
MNYTQNSKIAQVTERTLVIGVDIGSEMNYARAFNWRGQELSKKVFRFSNSQEGLQSFSDYLRNNQAIASAEQIIVGCEPTVHYWFTLAKYLKAQHINLALVNPYHVKQIKELDDNSPKKTDQKDPKTIAKLVADGRYSYPYLPEGIYADLREAVSSRERIVEELNAVTNRLKRWLKIYFPEYLTVYKKFSSESGLTVLETAPLPQDVVKLGADGINHLWREKKLRAVGIKRAQPLVEAAQNSIGLDGGVCARMEMQMLLEDYRVKEVQLEKATAVLEAETLKIPYTEKLLSIKGVGLITVAGFLSEVGDIRRFDSPKQIQKLAGLELKENSSGKHRGRTSISKRGRKRLRKILFQVMLPMIQNNAEFREVYEYFTTRQKNSLKGKQTIIAAGCKLIRVFYAILKHGVDYDPQKLRMDIIRPESAAA

SEQ ID NO: 290062 - protein, 341 aa, unidentified
MTAIIGIDPHKTTHMAVAIDGDERAVARLEVRADRAQTQRLLAWAAPLGAERMWAIESAGGLGKLLSQELVAAGEHVVDVPPTLAARVRLLGAQKAAKNDGNDALSTAIAGLRHCGLRVVRGDGHSSVFRLLAGRYDDLIGLRTQAACRLHAVLRELVAGGAPRRLSADRAAKLLRSVRPGGLVEGERKRLAGDLLADVRRLDRELAAIKTRIRDALDASGTALVELHGVGPIVAGLILAHVGDPARFATPERFASYNGTAPIEASSGPHKRHRLNPRGNRKLNHAMHLIAVTQVAHDTPGRVYYQRKLVEGKTNKEALRALKRRISDAVWRQLQLDVTTR

SEQ ID NO: 290063 - protein, 343 aa, unidentified
METYVGLDVSLRRTSICVVDQTGKVLSEGTVNSTPEAIVEFVKLKATGAIRIGLETGPTLTWLWTSIRGLGLPVICIDARHAKAVLKMQINKSDRNDALGIARIMQCGWYKEVRVKSLDSHAMRALLESRALLVKMKRDLENQIRGLLKNVGLLIATARGQGLHARIQELVEGKPHLAVAVLPLLETRNGVVRQIAEFDRKVLMLARNDSQVRSFMTVPGIGPITALCYRATIDVPSRFKRSRSVGAYVGLTTRRYASGEVDWTGRISKCGDAMLRSYLFEAAGVLLTRVQKWCALKAWGLRLAKRVGLRKAKVAVARKLAVILHRMWTDGTQFQWSTDKVAA

SEQ ID NO: 290064 - protein, 324 aa, unidentified
MNVDLIYVGIDVSKTSLDVCVGVAGNVSTLSNDSAGHDALCKMLLPLKVGLVVLEATGGYEFACASALQAAGLPVAIINPRQARDFAKAMGKLAKTDRIDAQGLAHLAQVWAARPDAAKLVKPLPNEQQQKLAALVGRRRQLVEMRVMENNHLGTAHRSTHKSIKSVIKSLGTQLRHIESELESHLKQYHADLSALLSDVKGIGAVTVATLVGELPELGTLNRRQISALAGVAPYNHDSGRLKGQRSISGGRATLRTALYMATLVATRYNAPIKAFYQRLVDAGKPKKVALVAAMRKLLTILNAMVRDGKPWDESIHIKGAKMA

SEQ ID NO: 290065 - protein, 304 aa, unidentified
MNGIGIDVSKRQLDVGTTDGEILQVSNSASGFAELDLWLRKQPASQIVLEATGGYEQSVLNFLHNAGHPVVRANALRARRLAQGLGQMAKTDRLDAYALAQMAALVKLPPYQPLKPWQQKMREFVRARRQTMEALTVARQQQEMVTDRELRRLLQANISRLQGIVGRLGKQIAEQVAQQPQLAVLKSMKGVGPGLQAILASYLPELGRISGKRIASLVGVAPMSHDSGTMRGKRSIHGGRAEIRQVLYMASMSAMRHEPRLRDFYQSLRARGKEGKVAIVAVMRKMLVILNARVRDAENGLVPA

SEQ ID NO: 290066 - protein, 368 aa, unidentified
MKQVTTYVGIDAHKKDLFVAMLTGPNPKPVTWQLPNEPTAVRRLVRKLEREAPGPVRVFYEAGPCGYALQRQVTTSQIRCDVVAPALIPRKPGERVKTNRRDACKLAELGRAGLLTAVQPPTSDDEAVRDLARARDDAREDLQRCRHRLGKLLLRRGLHFAGRNWTRAHRQWIDGLTWTHAAERAVVDDYQLAIDQTQVRLGELDARLAEMAKTEPYREPIGWLRCFRGIDTLTAMLILAELHDFRRFTSAPALMAYLGLVPGEDSSGEKHRRGRITRTGNALVRRLLVEVAWHYQHRPAIGMALTRRRNGQPARVIAIADKAQQRLCRRFRKLVAEHKPAPKVAVAIARELAGFVWAALQPTSATAH

SEQ ID NO: 290067 - protein, 448 aa, unidentified
MKHQPEEIADEEHEQVAERVAAIDVAKASGMVCTRVPDHKVPGRRVTQVWQVAATTNAVMTLADELAGQGIERVVVESTSDYWRPFVYLLEARGLNVWLVNAQSVKQVPGRPKTDKLDAVWLAKLNERGMLRPSFIPPIEIRQLRDYTRLRIDLTHDRTRHKERVEKLLEDALIKLSCVAADIFGVSGRAMMAALIAGERDPRALAALAKGRLRVKRTALLEALTGRFDDHHAELLRILLDEVDGLTAKIEMLTGRIDKLIQAIPAAQPPGVPPGPDGPSRDQAPLPVVERLDEIAGVGRSAAQTIIAEVGLNMAQFATPAHLVSWAKLSPRTIQSGARNRSAGPGQGNPYLKGVLGEAAAAAGRTETFLGERYRRLAKRIGKLKALVAVARSILVIVWHLLANPSARFRDLGADFFVTRGNNDRKVHSLVHQLEVLLGHKVTLAQAA

SEQ ID NO: 290068 - protein, 350 aa, unidentified
MKILALDLGKFNSVACLYNKASAEHEFQKIRTTPREVRALFVATKPDLVVFETCSFAGWIHDMTGDLGIPAQVANPNHEGWRWNHVKRKTDRDDALKLARLAAMNQLPTVYVPRRCVREWRSFIAYRHKLVARQTAIRNNIRSIFSRQGLTLPVGQRAWTAEGFRKTATDARALEALAHDQLWRGMLDLELRALDAVGQLLVAADVRLNAIARADERVKRLRTIPGVGPRLAEIIVATIDDPKRFRNARQVACYAGLTPKQYESGMMRRSGRISRHGPALLRGLLVEVAWLVKRYNPWGEAVFQSIAKGQRSRRKQAIVALARRLLIRAWAMLRDGTSWRDPCLSPTSAT

SEQ ID NO: 290069 - protein, 347 aa, unidentified
MDHIGMDVHKKESQICILAEGGELIERRVRTEPERFTAILGDRPRGRILLEASTESEWVARCLETLGHEVIVADPNFAPMYATRTRKIKTDRRDARALAEACLLGAYRRAHRLSDPQRHVRGRLLVRDALVRTRTCYISLIRALLRQHGYRVPSGSAEAFLRRVLALSLPGRLLSQIAPLLAVMRHVNRQLSYSDQVIEDVTAQDERVQRLRTVPSVGPVTAAAFVATIDDVRRFRRAHEVEAYLGLVPRELSSGESQRRGRITKAGHARMRWLLIQAAVSILRRRPPQAEALHAWALHIAARRGKHVAVVALARRLAGILYALLRDGSVFAPGRSRHPGAALALPA

SEQ ID NO: 290070 - protein, 413 aa, unidentified
MGRVIGLDISKRSAEVAILVPGTQQLERRRFAADGPSIVAFAAELTGDDRVALESCTNAVAFHRLLCHHAGAVVVSNPLKTRVIAEAKVKTDKVDAEILARLLAADFLPPVWVPDAATDRLRHLVFHRQGLVTQRTQAKNRIHAVLHRNLLAPEVSDLFGRTGRRLLARVALPDDERTLLDADLRILDFVTGEIQATDQQRAQAALDDPEVRRLMTVPGLALTSAVALKASIGPVSRFAAAPKLVSYFGLNPSIYQSGQTAYHGHISRRGRSQARAVCVEVAHQLVKAPGPFHAFFERLRRRKPYNVAITAVARKLVVLVWHMLTHAEDYRYAPPARTRRTLNALHQLATGTPAPRAPRSAPHASPDDHQAGREAESHYRTNLQERFGSHHDPRPAAPPPRRPRTTGRSQKET

SEQ ID NO: 290071 - protein, 356 aa, unidentified
MTNSTKYIGMDVHKESISIAVRNTAGKIVMESVIETKTSMILEFVEGLRGDVHVTFEEGTWSAWLHDLLKPRVTRLVVCDPRRNALLQEGNQNDRVDARKLAELLQNNQLRSVYHGDHGLRALKELVRSYLTITKDLSRVMTRVKAIYRSWAIPCSGKQVYSSRRRAEWLGKIQEPGVRRRAEFYYQQLDALRALRQEVRRDLLAESKKHKIWKRLCQIPSIGPIRAAMLLGILQTAHRFRTKRQLWTYSGLGIEVHSSADHHTVKGQLERKKKHIEIRGLNENCNHDLKNLFKGAAVVAATKPGPFEKFYAALLAKGMRPEMARLTLARKIATIVLIVWKRGVCFDANHLKPQTA

SEQ ID NO: 290072 - protein, 348 aa, unidentified
MVVVGADVHKRSHTFVAVDEVGRMLGEKTVTATSAGHTAAIIWAREQFGVELLWGIEDCRNMSARLERDLLSAGQQVVRVPTKLMAQVRKSARTRGKSDPIDAEAVARAVLREPGLPVASHDEVSRELKLLTDRRDVLVAQRTSAINRLRWHVHELEPARAPGRLDAAKHQHVLQVWLATMSGLVAELARAELADIIRLTGDITTLATRIGERVRHVAPTLLGLPGCAELTAAKIVGEAAGVSRFKTEAAFACHAGVAPIPVWSGNSAGRVRLSRSGNRQLNAAFHRIALTQIRISGPGQHYYRKLTAAGKTKAEARRCLKRRLSRAVFHALHADHQTRNQAPKTAAA

SEQ ID NO: 290073 - protein, 388 aa, unidentified
MGFNPSPEPKFRRQVTSEFNKFVGLDVHKSTIAISIASDDGAEVRYFGEIKNTKEALSNFANKISQGSLKLSFCYEAGGCGYEVYRHLRNIGHDCMVVAPSLIPKKAGQRVKTDRRDSLNLARLHRAGELTGVWVPDAMNEALRDLTRAREDMKHLQRQAKQRLLAFLLRHGWTYSGKSNWTKDHFNWLETVKFQHAAQQIVFQEYVDTVKYCGKRVESVTQQIEICSRESACWPVIESLMALKGIDLISAATIMAEIGDLTRFDSAPQLMSYLGLVPSEHSSGSSVRRGGITKTGNSHVRRVLVEAAWTYRFPARKTAHTQKRAKVTTEAVQEISWNAQKRLCQRYKELNANGKIKVQTCTAVARELAGFVWAIGQTVPLKPTANVQ

SEQ ID NO: 290074 - protein, 342 aa, unidentified
MDHFAGLDVSVKDTSVCIVDDTGRIVREVKVASEPDALLTVLRNPAYHFNRIGLEAGPLSQWLFSALAEADLPVICVETRHMRAVLKAQINKTDRNDARGIAQMMRVRLYRPVHVKTLRSQKLRMLLTHRKLLQSKAIAIENDLRATLRNFGLKVGMVGTVKFEVRIKELVENLPDLILLVEPLLVVRRVLREQLDLLHRRLLAVVRDDAICRRLMTVPGVGPVVALTYRATVDVPARFRKSKSVGAVFGLTCSRDQSGERDRPGAISRCGDEMMRTMLYEAAQSMLRSTKWSWLKAWAMQIARRRGMKRAIVALARRLAVIMHRIWVDGTEFRWTREAAAP

SEQ ID NO: 290075 - protein, 401 aa, unidentified
MTTVWAGIDSGKRAHHCVVIDQAGTVLRSQRVDNDETALLELIAGVLDLADGDAVCWATDLNAGGAALMIALLAAHDQQLLYIPGRTVHHAAATYRGDGKTDAKDARIIADQARMRTDLQPVRGADQISVDLRLLTSRRTDLICDRVRAINRLRATMLEYFPALERAFDYSKSKAALTLLSGYQTPQGLRRIGVSRLTAWLKSRGCRNSDTVAQAAVEAAAAQHTTIPTQSVGSALVAKLAAEITAIDQELAELDREITDRFQQHESAEVLLSVPGFGPVLAATFLANIGGNLEGFDSVDRLACVAGLAPVPRDSGRISGNLHRPRRFNRRLLRTCYLAALSSLKNSPASRAFYDRKRGEGKSHKQALIALARRRLNVIWAMLRDHTAYREPVLARTLLVA

SEQ ID NO: 290076 - protein, 383 aa, unidentified
MTLVQELTNMYIGIDVHKDSCYIAALNEAGELLEEKQIETEDIEDWIQTLDKNCKIAMEASTASKPIYHTMKEKELDVLMAHPARLRVIAESTQKTDRTDSFHLANLLRLNYLPCSYVPDENYEQMRNICRYRVSLGKKTTRIKNEVHALLTRNNIQMKKSDIFGVDGLEKLRSLQLNMIDTLLLKSHLEELNYLTDKATFIEDIMAEQGKTDPDVKLLMTIPGINFYSAMTIIAEIGDITRFPNPKKLVSYAGLTPRLRESGNISLKGKISKKGSRILRWILISAVHSVIRCRKGNKKLRKYYNHLIKRGKAKQVAAVALAKKLLIVIYTMLTMKRKYDDGDEPLARRKLAKMNLRATTLPTSSCIGEIDELKRKIKLIGGV

SEQ ID NO: 290077 - protein, 378 aa, unidentified
MGGDSTVVGLDTHKAAIHVAMLLPGAIQPVQWQIANEPAAVRHLARKLRRAAEGEVRCCYEAGPCGYALQRQLEAAGVSCTVVAPSLIPVKPGERIKTDRRDARKLAELFRAGLLTAVAPPTAAEEAVRDLCRAREDAVEDRLRARHRLGKFLLRRGLIWRGGKKAWTQRYRDWVRGLRFEDAADQAVVATYLLAIEQVEERVRTLEGQLEAVAQAEPYRERVGWLRCFRGIDTVTAVTLLAELHGFQRFTTPRALMAYLGLVPSEHSSGEAQHRGGITKAGNLHARRLLIEAAWHYRHPPAIGKALRRRRQGQPARLLAVADRAQQRLHRRFSRLSARGKMANKVVVAVARELVGFIWAALTPAAAVRTPRRAARTA

SEQ ID NO: 290078 - protein, 403 aa, unidentified
MNPCITIDVSKETSHVQGFLDNNVPLSKPRKILHTKEGFSNILTIYNQMVYRTGIKPTVFFEYTGVYHKTLMAYLKANNLSFIPIPPLVAAKVRHADLRNKKTDARDCKTLSFVYYENKVKKYYEPTKDEKKLKDLHRYYMITEKQYQEITVHLYEMIDTIYPFYKSIMSDFDCFTSLKFLQKYPHPDYVTSHREKTLIKDFMEITGHGEKYSTNVIHKLLNVINDTIPGCNSDDFEVEMLKDYATQALFYKTRLNKTLEEINRIINQDSSKKSLVENIDSIPGIAMNTAARFIAEVSNVDRFKSSKALIAFSGTDPNINQSGIIDGKHLPITKCGSKRLRTILFIMVRSMIRKRIPANPIKDFYKKKTQLGLPPKVVLIACINKLLGIIYQLNKTGEVFVLK

SEQ ID NO: 290079 - protein, 354 aa, unidentified
MLQRRWRPASSKMSRHTLAGGDGRKLLDLLARLKARAEQRIAAPVKVVAIHEVGLDGFWIHRLLEANGVESHVVDPASIAVPRRHRRAKTDAIDGETLLRTLMAWQRGEPRVCAMTVPPSPSEEDRRRISRERAALLRERIRHTNRIRGLLFGQGIVNYNPLNKNRRVCLEELRTGDGRSVPARLKAEILREIDRLELVLRQISQVEAERDEMLRPAEANSPAALLMRLKGIGAEFATVLYLEGLFRHFENRRQLAAYAGLAPSPWKSGSIDHEQGISKAGNPRLRTTMVELAWMWVRYQPDSALSCWFRQRVGSERGRTRRISIVALARKLLIALSRYVTHGEIPAGAVMKAV

SEQ ID NO: 290080 - protein, 320 aa, unidentified
MQNDRQSSEIVILGVDTHLDVHVGAVISQAGKLLGTHIIQTNQAGYLELLDWTRSFGILERAGIEGTGTYGAALTRYLIKNGIYVVEVNRPDRSKRRLEGKSDPLDAENAARAVLSGSSKAIPKMQSGACEALRIISVARRSAVKARTQAINQLRALLVSAPQDVRDKLWKSKPHECVTACINSEVSEHSPLRIALCSTLRSLAKRWMALTEELNELDESLDKLTRKYASNLRSQFGVGPQTAATLLAVAGDNPERLKNEAALASLCGVNPLPASSGKTVRHRLNRGGSREANNALWTIALVRMRSDPRTRIYVDRRTGD

SEQ ID NO: 290081 - protein, 336 aa, unidentified
MPMYQLGIDVSKNTLDLCLLREGIKGRIKTRKLKNTADAAKVVAEWLKKQSCELGEVHIIMEATGVYHEPLAYGLHFAGARISLANPHRTREFARGMNILTKNDKVDAWMLACYGSLKEPEAWTPPPESVRYLRALLRRRDALVADSTREKNRLEKSVFTDSPDAVRASIENMLQELSNEIEHLDVLIQEHIKTHPELNQDFRLLTSIKSVGYLLGLNMLAILKSHSFESTEQAAAFLGVVPVERRSGTSVKGKPKLSKIGPPEIRTKLYLAALCGLRFNPVMKQMYTKLCQRGKSKMCAIGALMRKLVHWCYGVLKTQLPFDAEYNQQSYYKTIF

SEQ ID NO: 290082 - protein, 342 aa, unidentified
MPVVGGMDIHRKQLTFDYVDLDNGEVVRGRIAPADRDELREWLERFTARSQVAFAVEGCTGWRYVVEELQRAGVEAHLAEPAETAARRGPKRRAKTDRSDARLLRELLVDGRIPESWIPPEPVLEARVVVRLYKDLLDERTGWLQRVHAGLFHQGVPDLDVTAMSDAGRQRLAEARLSPATRTAVDVGMRQVDRLTADMIRIREQIAVISRRQPACRALQATHYGVGPLTSVAIWSEMGDCRRFHSSDDAVRHAGLDVTVYSSDGHRTAGHLARQGPVVLRWAFYEAAVYAGRPSSPDHAYFRQVKARLDGQLALLSVARKLARRCYHTLRGLGDQVLAPAA

SEQ ID NO: 290083 - protein, 364 aa, unidentified
MKRKVYVGMDVHKETIQIAYLTSNTKEMVKEQQIKHNEVHIKKFINKLKTEWNEIHCCYEAGVTGYPLYRYLKSLGVNCILVAPGKIPRQSSDKIKTDKRDAIKLARLLRSGDLESIHVPSEEDEAVRDYLRSRDSLRLDLGRNRQRLMKFLLRKGNVYSTTKYWTVSHYKWLNNLHFENEILHETFNDYYSRVRVQEENLKAMDQKIQEIAKSEAFRERVGILRCFRGVDYLTAMFLLSEVNDFRRFKTAGSFMSFLGLVPGEYSSGSKRKQTGITKTGSPRLRRILTEAAWQHRFPGTGSKIVAARRTGQPALVVALAEKASLRLHKKFRNLQLRGKTPQVMITAVSRELSGFLWAAMNLVA

SEQ ID NO: 290084 - protein, 313 aa, unidentified
MSVSVSKPIVGVDVAKDELVIYQTELDLLETLPNNKPAIKKWLKALPAPVDVAIESTNIYHLEFADLAHDAGCTIYMVGGYELSHYRKGVKVRAKTDALDAKLLARYLKNEYEELHPWTPPSPLYRQLLSLFRRRAALVQARVGLVQSWANEPLLKAAFAEQIASMQRLEVLVEKMINDLLKEAGLLAHLRRCMKVEGIGFLTGARLIAAFQRGEFKNADAFIAFLGMDLRVSQSGQKDGRRSLTKRGDPEARRLLHNAAMSASRTATWKGFYEEQRAKGFSTTQALVILARKLARVVFALLKGQSEYQPKAS

SEQ ID NO: 290085 - protein, 346 aa, unidentified
MNNNTKKGPVTVLGIDLAKQSFQLHGVDEAGQVVIKKKLNRTQLSAFVANLPVCLIGIESCGGAHHWTRLFTEMGHTVRMMAPQFVKPYVKSNKNDSADAEAICEAVQRPTMRFIPAKSIEQQDIQSLHRIRSQLVARRTAQANQIRGLLMEYGIVIPQGISYIRKSLPDILEDGENRLSVLFREQLSGLYEEMVHLDERIEVLELSLKTISAQNEDCKRLLTIPGVGLMTATALIAAVGDVNVFKSGRELAAWLGLVPRQHSTGGKPTLLGISKRGDSYLRTLLIHGGRAVVRSANKHEDKRSQWVAGVEQRRGKNITAVAVANKNARIAWALLTKKENYQSCAA

SEQ ID NO: 290086 - protein, 423 aa, unidentified
MKNVSKRSNGKKLEMVGKNAAKTEKTPERPKGSRAAKQEPGKETKKLQRLNVRCLLRKLEAAKNAPKEAAPEDGIGYWIGIDLGDKHSKYCFLDKNANIVAEDSLATTVTEFEQYFKAIPRSRIALEVGTHSPWVSSLLERLGHSVIVANPRKIGGGKKKGLRKNDKLDARMLARQVKSDPNLLYPIQHRSEGARHALVLLRARHAVVGARTKLVCAVRGLVKSDGKRLPRCSAESFHKVDRAEVSEALRDTLEPMFKQIEYLTEQIKAYDKKVKRMCEETYPETELLRQVDGVGVIVALAFILTLDNARRFAKSRDVGAYLGLIPRQYDSGDSQPQMRITKTGDRMMRALLVQSAQHILGRFGKDSDLRRHGLKIAARGGKNAKKRAATAVARKLSVLLHRLWITAEAYEPLRNSTPKEKVA

SEQ ID NO: 290087 - protein, 387 aa, unidentified
MTKVNDLSRSLAALDQDTTLIAVVELSSKSWLVAAAVPGIERHPLKKLDPDASALLKLIERWRGEAERRGRTIKRVVLAYEAGRDGFWLARWLKERDIEAYVIHPASVAVSRERKRAKTDRLDAAMLLRVLLGWLRGERGHCSMVAIPSMDEEDARRPSRERETLVGERARITNRIKGALARFGIRSFNPLLRKAPQSLEKLQTAEGGPLPVNTLEEIKRGLARMAVVREQIAAIEKARVHRLKQAPKTGSNAMVQLLARVIGIGIETADMLVREVLSRTLRDRRAVGRYAGLTGSPDESGSRRREKGLTRAGNARVRRGLIQLAWRFLMFQKQSALTQWYRARTAGATPTQRKSLIVALARKLLIALWRLVTTGEVPHGVVLRPAI

SEQ ID NO: 290088 - protein, 429 aa, unidentified
MNYNTQNAKIASITEKTLIIGIDVGSETHYARAFSWRNYEYSKKPFAFSNDETGFAAFKEWMNDIAEKHGMEVIIPGMEPTGHYWLNLGAYLQEQGIKPVHVNPHHVKKSKELDDNNPSKNDRKDPKTIASLVNEGRFSYPYIPTGIYAEIRNLSNLRIQTQEEITRIKNRMARWFSIYFPEIKDVYRNPDAVSGLMVIKQAPLPCDIRELGVEGVNKIWRDARLKGAGIKRATTLVTAAEHSIGNTEAPRSARKEIRNLLEDYEGYKKRMDELMEEIEKTLSEIPYIDKLMEINGIGIKTVSCFIAEVGDIGRFDNPKQVQKLSGYAIVADSSGKHNGESRISHRGRKRLRYALYEAAISVIGKNREFKEIHSYYRTREKNPLKKMQSVIAVACKLIRIFYAILTKGVDYDGQKMLNDIVRPEIQPAA

SEQ ID NO: 290089 - protein, 352 aa, unidentified
MEIIGLDLHKRETQLCRQQPDGHIVDERIPTSRVRFTQTFGGVAPARILLEASTESEWVATHLEQLGHTVIVADPNFAPMYATRSRRIKTDKRDARALMQACALGAYRPAYRLSAPRVHARAALAVRDTLVRTRARMITLIKTLVRRDGLRVPTGTSRTVVQRVATLELATTAPALGAELAPLLAMLPGLTAQIATLDATLAAVAADDPVVARLATAPGVGVVTAVAVVATLDDITRFRSAHAVEAYLGLVPSEDSSADRRHLGHITKAGNARARWLLVEAGWRILRSKQPEMAALRAWGRAIAARRGARIAAVAVARRLAGVLYAMWRDAVPYDATKLQRRARRAGAPPGP

SEQ ID NO: 290090 - protein, 413 aa, unidentified
MNVLHPRCCGLDVHKSSISACILLREGGRVQKHQRRFGTMTQELQELAEWLRQFGVTEVAMESSGVYWKPVWNILEGQFTIVLANAQHIKNVPGRKTDQKDAEWIAQLLQYGLLRASYVPCEIIRDLRDLTRMRASLSQEASRISSRIQKVLEDANVKLASVATNVLGKSGRAMLQDIITGEDNPEQLASLALGHLRVKIPQLQLALEGKIRFHHRFLLRRLLDQVQFVEHEIALLDERLEDIGRQRPDLAHAVARWDTIPGIDRVAAWALLAEIGDNMGQFPTAGHLASWAALCPGNHESAGKRLRGTTRQGSPWLCRMACQCAWAAARTKNTYLSSQFRRLAARRGKKRAIIAVAHTLIVIGYHLQKNQSNYDDLGGNYFDRIHSDGLKRYLVKRLQQLGHKVTLEPIETA

SEQ ID NO: 290091 - protein, 345 aa, unidentified
MEQIIRIGMDTSKHIFQLHGVNAAEAPVLRKKLPRKAMVAFFEKLEPTVIAIEACGASHHWARLLQSFGHTVKLIPPQLAKPYVKRGKNDAADAEALCEALSRPTMRFVPVKTAEQQAALMLAGVRDRLIRTRTQLANAIRGYAAEFGLTAARGMAHLVPLLERLQADESLPGLARELFALQAKEYARLQKEIAAVEAKLMTWHRADERSRRLAKIPGVGPIGAMLLTMKTPEPALFRSGRQFAAWIGLTPKDHSTAGKLRLGVITRAGDEGLRSTLVAGATAVIQHVRRGGRASPWLLELLKRKPPKLAAVALANKIARIAWKLMVSGEVYRINATPPILVKVA

SEQ ID NO: 290092 - protein, 445 aa, unidentified
MSPRNDAKTETQPYAAYIGLDWADQKHFWSMCTADGKRTRGQLDNTPEAIEVWAAELAQQFGGRPVVVALEQARGAVIGMLSKYAHLVLFPVHPTTLANYRKAFSPSGAKGDPTDGDLILDLLVKHPERLRRLQPDTVETRSLQFLTEERRKLVDQHTSATQRLINWLKQVFPQILRWFDDPAAPLVGDLLLRWPTLQQLQKASSKTLLKFFHEHNCRSEERIKQRLDEIGKAVPAITDPALLKTGTLCIHNSVGILKHMRSGITAFDRQIVEIYRAHPDRAIVESFPGAGPALEPRLIAAVGSQRDRFDSANSLACFTGIAPVKQSSGGACWIHWRRACPKFIRQTFHEWAACSIRCCDWARVYYEQQRAKGKGHHAAVRALAYKWIRIFFRCWRDRVPYSEERYLKNLRPAQASAGQNGSQLKFAWKPCAGFSKLVEVLEVSS

SEQ ID NO: 290093 - protein, 333 aa, unidentified
MDHCAIDLGGKKSQVCMRSPDGRVLLETRCDTLSLPAFLRQLPHSRVILETAAEAFRIADAAKAAGHEVRVVPATLVRTLGVGARSTKTDRRDAQVLSEVSCRIDLPSVHIPSARSREWKTICGMHDALMGSRTKLINNLRGWLRGQGLRLSSGRAETFAGRMAEIESLPEYVASQVAMLALLTEQIRISERRIEDLARSDELCKRLMTVPGIGPSTATRFVAAIDDITRFESAHKVEAYLGLAPGESSSSERQQRLSITKAGPSTVRWVLVQAAWSLQARCRSVAARPLQLWTAEVAKRRGKRIATIALARKLAGILYALWRDGTTYELRQL

SEQ ID NO: 290094 - protein, 478 aa, unidentified
MKAKPQEKNKRATNHHWHEMNRKQRRETMRKIQSEDLSLEVIHPDAAGIDIGNESHYAAVPPSRDSQPVRCFGCTTAELKAMAAWLQQCRIRTVAMQSTGVYWVAVYDILEQAGLEVYLVNARDTKNLPGHKSDVQESQWLMKLHTYGLLRNSFRPSQKIRTMRTYWRQRNDLVQSASRHILRVQKALTQMNVQLANVLSDISGVTGQAIIKAILAGERNPHKLAEFRDPRVQASEEEIAHYLEGNWQPDLLFVLKQEQDGYEFCQQQMAECDRQLAQYLQQREDRSQGAPLPEEKRKGRLKKKSGNKPQFDLRTGLFRMSGTDLTRIDGIDVMTATTVISEAGYDMSKWQTENHFVSWLRLCPDNRISGNKVIGKGRLPTHNPISIALKIAATTLRQSQTYLGAQFRRLRTKLGAPVAIKAMAAKLARLVYRMLRYGMKYVDQGAAVYELKHRELQVQQLKSKAAKLGYKVTLLPAA

SEQ ID NO: 290095 - protein, 346 aa, unidentified
MTTVDATRPVTGGVDTHLDVNVAAALDAIGGLLGVAEFPTTPARHRRLAEFLASFGTLTRVGVEGTGSYGAGLSRYLRGSGVEMVEVDRPNRQSRRRTGKSDPVDAIEAARAALSGRAQGEGKSRDGNAEAIRALVVAKRSSRSTKIQTLNQIRHLGFTAPEELRSRLKGVSRQHLGAIAAALRPRAGGDPVVFATKTALSLLGHRVLVLDAERERLNLLLGELVKKTAPQLLEIHGVGVDTAATLLVTAGDNPGRIRSEAAWAHLCGVAPIQASSGKVTRVRLDRGGDRQANSALWGVVITRLRSDPRIQAYMERRLKEGRSKPEVIRVLKRYVAREVYHRLPRA

SEQ ID NO: 290096 - protein, 458 aa, unidentified
MESYLGIDASKGYSDFALLGKNKQPLEEAFQLDDTRSGHNRLKELLQHFIAVHKISLLYCGIESTGGFENNWYAAFIEMSKSMPVKIARLNPSGVKKNIEAGLNRNITDALSARYIAEYLVSHTEKTSYEGQDTKYASFRDVQTCLNLQKKQSTQMINELKMVLYSSFPEMVRFCKDSIPTWVLEMLILYPVPACFIKLKPERLAKIRHITLGKAEDIIEKAKTSIASRPDATREFIIKSLARQILQKQEAIKDFKGFLAVNCTGPEVDLLQTIKGVGAYSAASIMVEIEDIKRFPSAKHLASYFGLHPELKQSGDKKVSRMSKKGRPAIRATLYMCAQTAVVHDPHLKKIYHNHRSKGKTHRAAIGIVMHKLLRIVWGILSSNKPYDARVDQKNQTKNINEQKNIETEEMDKKRRFQKPDLTAPISSRQNKKRKAHLESQVGNAERMRDHLDAPEQN

SEQ ID NO: 290097 - protein, 348 aa, unidentified
MSKHTAIGIDLAKRVFQVCLVDTRHRAVRVNKVLKRSELLDFMRRQAPCRVYLEACGGAHYWGRQFSAIGFEVSLIAPQFVRPFRKGHKTDANDALAIVEAGLRPGMRFVARKGIEQQDLQGLHRVRERLIKQRTQLINQTHGLLQEYGLVSGRGQRALKQTLWRVLEDAQNELTPMMRALLAEQMTELAQLNARIAELDQRVRQQAATVVPCRELQAIGGVGPVVAGLLYCALGDGKAFANGRQAAAYVGLTPRQYSSGGKVSLVGIGRTAHGQLKAALIRGAHAVIKTLGHKDDARSRWLRALVARAGVNKAAVALANKTVRTAWAMMRHGECYRLEYPHTPAMTA

SEQ ID NO: 290098 - protein, 416 aa, unidentified
MNAVGIDVSSRKSTVAVLRPLGEVVCLPFDVTHDIAGLASLAEKLKAIDGETRVVMEHTGRYYEAVAKALHEAGLFVCAVNPLLIKEYGANSLRRVKTDKADAVKIARYALDNWADLRDFTPMDAIRYDLKTLNRQFQLASKQRTASANNLIALLEQSFPGIRKCFDSPVRSDGTQKWVDFAHSFWHVDCVRKQPFAAFCERYRKWCKRHAYLFKLSNAEEVYALAKRAVVLTPKSKVVKVLVQEAANQLSSISRSVEVYRAEMDRLAAMLPEYPVVMAMYGVGKSYGPQLMAEIGDVRRFERKQALVAFAGIDPMPNQSGDKNVRSNKSSKRGSPYLRKTLFNVIRTYLQCAPQDEPVFQFLNRKRAEGKPFYVYMLAAANKFLRRYYAKLRDYFASLDTLQPVAPIPTILKAAL

SEQ ID NO: 290099 - protein, 493 aa, unidentified
MGACELESGDVALAAIPIRKMTIGIAQTLLLIIDWRIAMPKRTTGDRPELKPVNVGAAAIDIGSKMHMAAVNPACTDVPVRSFGTFTQDLHDLADWFKACGVTSVAMESTGVYWIPVYEILEQRGFDVILVNARYAKNVPGRKTDVSDAAWLRELHSFGLLRGSFRPDAEIATLRAYLRQRERLVEYAAAHIQHMQKALMEMNLQLHHVVSDITGATGMRIIRAIVAGERNPDVLATYRDVRCHSSIETIRAALVGNDRHEHVFALTQSLELYDVYQAKMLDCDRKLEVLIAALNNKGATPVGKLSKPRIKTKQVNAPAFDVRTALYGLLGVDLTEIHGLGPSLALKLVGECGTDLRAWPSAKHFTSWLCLAPGNKISGGKVLSSRTRRSSSRAAALLRLAATTVGRSDTALGAFYRRLSSRAGKSKAVTATARKIAVLFYNTLRYGMSYRDPGADHYEQQYRSRVLANLQRRAKSLGFVLQAIPGDANPAVS

SEQ ID NO: 290100 - protein, 385 aa, unidentified
MFYVGIDIAKNKHDLACINETGETVITNFRFANSCQGFHQLKLKLEQLSPITQDVQIALERTGHYNYNIVTFLRDLGYNVFAYNPLIIKEFAKSQSLRKTKTDRKDALLIARKLRSDVTPERYQTDRVLDELKELTRYQNRLIQSRSRCKNLYIRLLDIIFPELHRIVNNLYNQFIYDLLTNYPSPQRIARARFSSLLKIKRLTADKAHQIQETAKQTIGNASPVLSLELVQLIESIKHYDKQINQVQEEINLLMIELNSPITSIPGIGSRLGAIILAEIKNIHNFKNLNQLQAFAGLDPAIYQSGQMDNTGHMVKRGSSYLRYALIQAAKLIAIYSPHFKAYLRLKISQGKHYNVAVTHVAKKLIRVIYHLLKTNQLFDETKLR

SEQ ID NO: 290101 - protein, 331 aa, unidentified
MTNNVCVGVDVSKNILDTLFKYPAGQAAEQRSFSNAKTGRKKLISRLSQMPGAHVVMEATASYHLGLMYDLNEADIPFMVVNPFCAKAYGRSKNLRSKSDTIDANTLAEFGSERPFIPTQMPSDNQLKIRQLASVIRLLTKHRTATKNSLRMIEQMPVISSEATKELKKIIALIDKAIARTTEVMKQLVLACHKETLALINSVKGVGLKTTLILISYLGDLDSFQSAKQVAHFMGLGNVDNQSGQRTRPRRISKRGHPELRSLMFLCALSAARHNTSCRDLYQRLMAKGKPKKVALIAVANKLVRQIFAVVKNKTPFENNYLEKASISLAS

SEQ ID NO: 290102 - protein, 331 aa, unidentified
MFPVGIDVSKNTLDLCMLYDGIKGRIKTRNIQNNRHSVENILRWLRLQHCSPEDVHVVMEATGVYHERLATELHDAGFRVSLANPHRSREFARGMGIMTKTDKVDAYMLACYAFLKKPHRWEPPAPEIRYLGALLRRRDVLLGDALREENRLEKYLSTDTPADIISSCRRMAQLLREEVSNIERQIKAHIKASPALRRDYTLLNSIKSVGPQLGMHMLVVLRSHNFTSAEQAAAFLGVVPIEKRSGTSVRSRPRMSKIGPPQLRAKLYMSALCGKIYNKRMRNIYDEMCLRGKPKMVAIGALMRKLVHWCYGVLKTGTVFNDEDLKPVLST

SEQ ID NO: 290103 - protein, 376 aa, unidentified
MQDSIFIGLDVHKATISVAVARGERGGEVRHWGTVPHRADHVRRLVEKLAAGGGRLLFCYEAGPCGYGLYRQLVEMGHDCIVVAPSLIPVKSGDRVKTDRRDAVMLAKLHRAGELTAVWVPDAAHEAMRDLVRARATAMKVLNKARQHLQGFLLRHGCVYPGKKGWTKAYRRWLTTVRFQHPAQQIVFQDYVDAVADAEARVEKLTGQIADLLPSWTLAPVVEAVQAMRGVAFIVAVTVVAEVGDFRRFDNPRQLMAYLGLTPSEHSSGASVRRGGITKAGSGIARRALIEGAWSYRMQARVSRKLHDRLEGLPRAVRDIAWKGQLRMCQRYRHLVAAGKAKVVVTTAIAREMVGFIWAIARAVMPSPDAPARAQG

SEQ ID NO: 290104 - protein, 342 aa, unidentified
MQIAILGIDLGKNSCSVVGLDVAGRVVLRRRLHRDGVIKLATGMSGCVMAIEACCGAHHLGRLLRDHGHQVRLMSPEYVRPYVKAQKNDDRDAEAIAEAATRPTMRFVELKSEAQLDMQSLHRARDRLVGERTALINQLRAVLLERGIVVPQGRRKLERYVDALLAEEEIRLSPRIGLLVEDLRAEWRELDRRILAFDDEFAAQARTDETTRLLTSIPGIGPLNATALTAAIGNAQTFGRGRDLAAWLGLVPKQVTTGGKPKLLGISKRGNGYLRKMLIHGARAALPTLSKGETPLGAWLRGLLARAHVNTVVVALAAKLARIAWAVIRRGAKFNMKAATAS

SEQ ID NO: 290105 - protein, 413 aa, unidentified
MEVLYRRCCGLDVHKSSITACALLREKGRVQTERRRFTTMTHDLQNLATWLRQLGVTHVAIESTGVYWKPVWNVLEGQFTIILANAQHIKNVPGRKTDANDSEWIGDLVQHGLLRSSYVPSEIIRDLRDLTRGRARLSQEASRIASRIQKVLEDANIKLSSVASNTLGKSGRAMLDAIVGGEIDPEQLADMALGHLRAKIPQLRLALEGRVREHHRFLLKRLLHQLRFIEGEIDLLDQRLEEIGQQEPAIAAAVLRWTTVPGVDRVSAWSLAAEIGIVMEQFPTAAHLASWSGLCPGNRESGGKHLSGKTRKGSPWLGRMACQCAWAAARTKNTYLSLQFRRLAAKRGKKRAIIAVAHSILIIAYCMQKNQCEYRDLGSDYFDRLNADGLKRYLVRRLEGLGHKVTIEASGGA

SEQ ID NO: 290106 - protein, 340 aa, unidentified
MNSAAAISVNEATLSRTGYQRVIGVDVAKDKLDLCDSHEKITGSINNDLDHIHKRLLDHIDPASRTLIICESTASYHLLMMDAAHDRSVDVAVVNARQVRDFAKGQGRLEKTDQIDAGVLCQFGEDVKVHLTAPRTAQEKNHTALVNRREALLKMRGQERMRLEHTHDAEAIKFLEEMLENIQKQLQSVEKRLEAILKELAKEDPKVNILLSHTGVGKVTTSVLLTRLPELGTLNRKQVAKLVGVSPIANQSGRKDGKRPIRGGRQDVRNAMYMAANSARRHDPATKAFYERLRGQGKPFKVAMVACMRKMLSTLNQMVRNGETFDATKYASMAEVQSCR

SEQ ID NO: 290107 - protein, 312 aa, unidentified
METKFVGIDVSKLTLDFDCLPVDAPQQFADDSVGVEALVALLKGSGVERIVVEATGGYETAVVSALAVAGLPVVVVNPKQVRDFAKAKGHFAKTDKLDAKVLALFGERMKPPLRAFQDAAQRALADVLNRRLQLVTMRAQEKTRLASVPTVAKKDIELHIAWLDKRIAKLETDLGDRLKTSPVWCHKAELLESVPGVGDVTTFSLLADLPELGTLNRQEISALVGLAPFPDDSGTRKGKRYIRGGRAEIRCVLYMATLSAKTYNPPIKAMFERLTKAGKPFKLAMTARMRKLLTILNAMLKKDQAWKIQPSA

SEQ ID NO: 290108 - protein, 453 aa, unidentified
MARKHKKDSKANNAMLPVMRPDAGGIDIGATEIFVAVPADRAAENVRSFPTFTQDLYALADWLKQCGVKTVAMESTGVYWIPLFQILEDRGLEVCLVNARHVKNVPGRRTDVCDCQWLQFLHSVGLLRASYRPEQEVCAIRSLLRHRESLVQMAATHVHHMQKALDQMNLQLHHVISDVTGQTGLAIVEAILAGERNPYVLAKLRNDRIKASEAVIAKSLVGDYRPEHLFTLRQSLVAYHHYGKLIDGCDREIRRCLEEFKPPHLPDASEGGSQKSQSMTASPDGVLRSELNRVFGIDLTQIPGIRVGIAQTLFGEIGPDFTKFRSASAFASWMGLCPDNEISGGKVLWVGTRKVKCRAATALRLAAQSLHHSKSALGDFYRRMRAKLGAPKAITAAAHKLARIIFHLVTTGQEFNDSRFAADQLRYQKRQEAKLRAKAKALGFQLIPIEQTG

SEQ ID NO: 290109 - protein, 391 aa, unidentified
MVCVGIDVAKDKHDCCILDSDGTIRADCITIPNNMDGFKQLLQTIRDCTKKSDKIKVGLEATGHYSYNILGFLLDNDLAVYVMNPLHTNLYRKSLSLRKTKTDRVDARTIATMLLSDVDLKSYTDTAYHNEELKSLTRYRFEKVQERAKLKKSVSRLVKILFPELEQLVPTLHIASVYSLLSEYPCAKQISEVHLTKLTNLLTTASKGRYGKDKAIQIRDSAKTSIGSVMPAKFLELKHTIKLIRELTSEIDEIEVSIQKIMDELNPPILSIPGVGIQSAAMILAEIGDFSNFESPDKILAYAGCSPSTYQSGKLTNCYAHMEKRGSRYLRYALYNATKYVCHWNPVFAEYLAKKRAEGKHYNVALSHATKKLVRLIYALQKSGKAYLVAA

SEQ ID NO: 290110 - protein, 379 aa, unidentified
MLHSIEDIVHLCNLIKSYDEETRVVLEDTGHYHLPVVSLLVEKGIFVCTVNALRMKKYCSQSIRKAKTDKIDSVRIASFGLTYWYELTPVMPPKDVYRELKLLARQYYQTVSILVKAKVNLSNLLDQVMPGIQNLMSDSPSNHKLTDFVDRYWHYGHILAMGEKRFLTDYCKWAKKKGYRVYERLAKEILAVAQNGIPVLPNSLSTKLVVQEAVRVIHQVELSRDTILAQMQQLAKSLPEYSVVRNMPCIGDVLAPRIIAEIGDVKRFRNKHSLIAYAGIDPPPYQSGSFNSTERHITKRGNSYLRKTGFEIMQCLIQHKPVGDPVYDFIQKKRSEGKCGKEAMIAGLNKFLRIYYGRVTELYTYTSDKLVFCSRVDIS

SEQ ID NO: 290111 - protein, 358 aa, unidentified
MDATTVAVDLAKNVFELAVADAHWKITQRARLTRQQFSRWFDNRQTCTVVMEACGSAHYWGRVLREKGFEVRLLPPHYVRPYVKRNKTDAADAAALIEAFRCADVKPVQIKSVEQQALQSLHRARSLWMATRTARINALRGFCREFGLVVSPGSRVGVEQIARLLADPASAIPALLRPTMVQLLEEVRLLEARISQLERQLTEAAKASEACSRLLTVPGIGLLTATAMVAATGGSVAHFKSARHFASWFGLTPKESSSGQTRHLGRISKRGDRYLRMLLTHGARSVLRAATVAQRAQRPLDPLRQWATALQARSNHNKATCALANKLARICYASMRDQEPFAKGRLIDKAERQTYATD

SEQ ID NO: 290112 - protein, 344 aa, unidentified
MKITTVGLDLAKNVFHVVCFNERSKEVKKRVLRRNQVLEFFTQLPPCQVSMEACAGSHYWGRQLRALGHNVKLISPQHVKPYLRGNKNDYNDARAIAEAATRPDMPTVGIKTAEEQDMQAIHRMRSQCSRDRTALSNSIRGLLGEYGIVFAKGVATLRRKIPEILEDAENELSLRFRNLLARRYDQLVELEDHIAFYTKELERLSQQDDGCRRLQTVPGFGPIVASAFRSVIGDGRTYARGRDAAASIGLVPRQYSSGGKNVLLGISKRGNKYLRKQLVHGARSVVLQAANKEDPLSRWINRIRVERGWNKAVVALANKMARIGWAVLRHNTRYQATSIVETDG

SEQ ID NO: 290113 - protein, 343 aa, unidentified
MQSISTIGLDIAKSVFQVHGVDADGQVVLRRQLKRRQILAFFQKLPPCLVGIEACASSHHWSRQLQALGHTVRLMPPAYVKPYVKRQKNDTTDAEAICEAVTRPNMRFVPTKTVEQQSCLLLHRARHLFIRQQTGVINSIRAYLAEFGVVAPVGRRGVEQLLEVVADPADCRLPEVARTCLAALGSQLRALKAQILEFDRRIMAWHRSNATSKRLDAIPGVGPALATALVASIADPNAFRSGRDFSAWVGLVPKQNSSGGKDKLGSISKQGDRYLRSLFTAGALAVIRYAKIHGTGHRPWLTALLARRPTKVAAIALANKLARMAWAMMARNERYKEPAALTA

SEQ ID NO: 290114 - protein, 457 aa, unidentified
MTRKYSQQMNPKKDKPQTGRKAAANGARQARPATGKRKSGQLPPLQMRSDAAGIDIGSQEIAVAVPPDSDPEPVRTFQTFTADLQALADWLQQCGIRTVAMESTSVYWIPLFQILEQRGLEVFLVNAHHIKNVSGRPTDVGDCQWIQQLHSVGLLRTSFRPPQEICALRAIVRHRHSLTEMASQAIEHMQKALDQMNLHLHHVISDITGETGLRILDALLGGERDTRKLAQLRDRRIRSSAQTVRKALEGDYHAEHLFTLRQSLERYRFLEQHMADCDREIARRTREIAGGGVEAVAVPAASKPLKARKGTSAAWLESQRREYFRLFGVDLTQVDGIGMGTLQTLATEVGPDLSRFRSAAAFTAWMGLTPKQEISGGKLLRSKTAKNKSRLAYALRMAAQSLLSRRSALGDEFRRLRARLGMPKAITAMARRLGCIVYHLITRRTAFDPSLLLRQQQ

SEQ ID NO: 290115 - protein, 386 aa, unidentified
MQTVADRPEAPTAVRTDLGAIFVSLELSRSTWLITSLSPGGGEKMSKQVVRGGDVAGLLERFARLREKTRARTGKVFPFVVIQEAGLDGFWIDRALQNEGIESHVVDPASIATSRRRRRAKTDGIDGEALVRALLAYKRGEPRVCAMVKAPTPEEEDRRRLCRERKVLIVERVRHVNRVKGLLFSQGISGYEPLRRDRRERLDTLQTGDGRRLPDHLKAQVRRELDRLELLLEQIKAVEAERDVLLAAQRVAAPAAMLLDIRGIGPEFAAILWSEGLFRHFDNRRQVASYAGLAPTPWQSGSIDREQGVSKAGNPRLRTTLIQLAWLWLRHQPQSALALWFEERVKRNGGRLKKTTIVALARKLLVALWKYVTAGVVIEGVVMKRA

SEQ ID NO: 290116 - protein, 457 aa, unidentified
MLYSHVAGIDVHKKQVTVTVRIPDPRRPATRWEKTRTFRTFYADLLAMGSWLAECGVTRVAMESTGPYWWPVYAALREVGGPGLIVDVVNAAHVKAVPGRKTDVKDSQWLARLLEVGLLRGSFLPPDDIREIRDLTRYQTKLTEERSREKQRLLKVLEAAGIKLDVVASDTFGVSGRAMLDALVAGERDPVVLAGLARGVLRNKTDDLRLALSGRFTVHHGQMIGFHLARLDHLDQMIGQVREKVGHPGIPGTGRRAASGPAGLIAPFAEQIRLLTSIPGIGERVATVVISEIGVDMSRFPSAKHLAAWSGLAPGNNESGGRRRRARHRKGNTHVQSILIEAALAASRTRTRLGARFHRLHRRFGGRANNTAGKKAGFAVAHTLIKVIWTVLATGQPYTDLGHDYYTRRVNPESHTRRLIAQLEALSGKKIILVDHDDGPPSPDDTHSSYHDGGAAA

SEQ ID NO: 290117 - protein, 463 aa, unidentified
MHAKSPQGEKEKSVGKKVDWKALDIVHRDAAGIDIGGSEHWVAVNPERDAEPVRCFGCFTADIHMMADWLAQKGVRSVAMQSTGVYWMPVLEILEQRGLKVYLVNARNTKNLPGRKTDVQECQWLLKLHTFGLLNNSFQPSDEIRTLRSLWRQRGNLTADAASAIQRLQKVLIEMNIQLGAVLSDLSGVSAMKILRAILKGERDGWKLAELARPQVKAKRADIAKSLEGNWREELLFILRQHIELYEFYQRQIAACDRQLRRRLRSFDSKVDLAAEPLGPKPRGKKGSRNAPQFDLRSELYRITGIDWAQVNGIDVLTSQTVITEAGADLAAFPSEKQFTSWLGLCPSNETSGGKVLNRRTRKVVNRAATALRNAASTLLRSQSYLGAQYRRLRTRLGAPKAITAMARKLACLFYRLIKHGQQYVDKGTEYYEARYREQQIRSLAKRAQKLGLQLFIPDAEAA

SEQ ID NO: 290118 - protein, 356 aa, unidentified
MSMVAHTHPFVIGVDAHARNHALAILACPTGEVVDEGQFPATGAGLQRAVDWVARRTGGDLDTLWVVEGVGTYGARLARAAADAGYSVAEAARMNARANRGVGKSDPLDACRIAQAALPLDVAQLRRPRTDDGVRAAVRVLIASRDHISMERTAAINALTALLRVAELGVDARRALTGTQIALVAAWRTREEALATRVARAEAVRLAKRVLAADQEIASNAKQMTALLNSSPARKLLDQPGIGPVTAAVTLAAWSHPGRVRSEAAFASLAGVNPIPASSGNTVRHRINRGGDRRLNRALHMAVVTRMRMDPATRAYVEKRTAEGRTLREIRRCLKRYLARQIYRHLNAASEALLAA

SEQ ID NO: 290119 - protein, 435 aa, unidentified
MKQNLKKVHPRAAGIDVGSKSFYVSVGDQEVRVFPTFTADCQALREYLLSKGVTTVAMESTGVYWINLYGVLEGAGIEVYLVNGRDVKNVPGRKSDVKDCQWLQQLHSYGLLKKSFIPEGDIRKVRSYLRLRQDHIRASATQILLMQKALTQMNIRLAEVINDITGASGLRIIMAILSGERDAGKLTELCVSQIKDKKRELVYKSLEGDWQEEHLFALQQAVTTWEHYNGLIRACDKAVEKQLAVMTEGRPKIKSQSKRKPIRYHRPEIVNLHEPLLQLTEGKDPTGIPGLTDYSFLQIVSEVGTDMSAWPTEKHFASWLKVAPMRSSSGKVSKRVMHKRHNKAGLLFRNLAQGILTSKHLALGVFGRNIRARRGGAVAIKAIARKIACYYYRVMTKGGDFVDQGIASYEQQLQERKRKYLEKMAAKLNLQLVPA

SEQ ID NO: 290120 - protein, 402 aa, unidentified
MNAVGIDVSKGKSMVAIMRPFGEIVSAPFEIKHTASGINSLVELINSVEGESRIVMEHTGRYYEVLAHQLSKANLFVSAINPKLIKDFDNDSLRKVKSDKADAVKIARYTLDKWQNLKQYNVMDELRNQLKTMNRQFGFYIKHKTAMKNNLIGILDQTYPGVNTYFDSPARSDGSQKWVDFASTYWHVDCVRKMSLNSFIDHYQNWCKRKKYNFSQSKAEEIYGKAKELVPVLSKDAITKLIIKQAVDQLNSASTTVESLRTLMNETASKLPEYPVVMAMKGVGTSLGPQLIAEIGDVSRFTHKSAITAFAGVDPGVNESGSYEQKSVPTSKRGSSDLRKTLFQVMDVLIKTHPQDDPVYQFLDKKRAQGKPYYVYMTAGANKFLRIYYGRVKEYLSSLPES

SEQ ID NO: 290121 - protein, 338 aa, unidentified
MELYAGIDLHSSNNYLGIINEEDQRLYQKRLPNRLEDILPVLEPFKESLKGVVIESTYNWYWLVDGLQEHGYKVHLANPSAIKQYEGLKHTDDKWDSFWLAHMKRLNILPEGYIYPKEERPVRDLLRRRLLFVRHRTSHILSLQSAITRNLGYKMTVNEIKRLDDCDADRLFEEPFLVSSAKNGISTIVFLSERIKEIEKGVKSHVRLNSEFIHLKTIPGIGNILGLTIMLEVGDIRRFPKVSNYSSYCRCVKSERLSNKKKKGEGNRKNGNKYLAWAYVEAANFAIRSYPDFQSFYNRKKAKTNGIVAIKALSNKLARASYYVMRDQVSYDAGKMFR

SEQ ID NO: 290122 - protein, 361 aa, unidentified
MTHNMTTPPDARKVIIGVDTHKHVHVAVAIDTWGIRLGDHSFVADSGGYEALVMWAQTHGRIEAFGIEGTGSYGAGLVSTVRCAGHRVVEVNRGDRRTRRAAGKSDTIDAEVAARSVLAGQATAIPKTADGAVEMMRQLKIARDTAVKARTTAMNTLKQIVVHAPSGLREALHDLTDHSLLRRCAGLRPGPLDTRPAAAKHTLRALARRWIALAEEIATHDRHLARLTTETSPTLREGFGVGAHTAAELLILFGDNPDRIRSEAAFAKLCGVCPIPASSGRTTGRHRLNRGGHRQANAALYRAVIVRMRYHQPTVDYVARRTADGRTTRDIIRCLKRFLAREIYQRVMTDFRARQEIIQAA

SEQ ID NO: 290123 - protein, 421 aa, unidentified
MTVYLERGYNRKEYQWFYKQYQNIYSKEFFMIYVGIDVAKDKHDCFITNSDGEVLFKSFTIPNNREGFETLFQKVQSVSDDLAKVKVGLEATGHYSYNLLGFLLDKGLPTYVINPLHTNLYRKSLSLRKTKTDKVDAHTIASMIMSDVNLKSYSDTSYHNEELKSLTRYRFDKVKERAKLKSSVSRLVCILFPELEKLVPQLHMASVYALLSEFPSAHAVASTHLTRLTHLLSESSHGRYGKDMAIIFREAARNSIGSNMPAKSLELKHTIKLILELTSEIDEIEVEIKAIMDEINSPILSIPGISYNMGAMIVAEIGDFSRFDSADKILAYAGMSPSTYQSGQLDNCHSHMEKRGSRYLRYALYNATKYVCHWDNSFGAYLAKKRAEGKHYNVALSHATKKLVRTIYAMEKSGRVYLPTV

SEQ ID NO: 290124 - protein, 388 aa, unidentified
MTQASCPLSPPVTLDYENTLVLAIELSKTKWVLSAQVPGLLRVKAKQTIEPKAEALLAAIDGYRNRSRAAGRTVERVVAIYEASWSGFWLARWLGRHGVETHIVQPSSVPVDRRARRAKSDGIDAELLLRTLLAWLRGEPRVCSMVPIPDEADEDERRRVREREDLVADRISLVNRIGAVLATLGVDGYNPLRRDRRVRLETLRTALGGPLPPHARARILRLLDRLDLVCAQIAELEQERDAALEKEAPDKAEKMIRQLVGLRGIGVQSATVLVREGFVREFANGKALGSYAGLTPTPFSSGSTEREQGIGKAGNRRLRTVMIELAWLWQRYQPGSAQVSWFRERVGGTGRRMRKVMVVAMARRLLIALWQFATQGVVPEGAIVNPAG

SEQ ID NO: 290125 - protein, 342 aa, unidentified
MQPRFKPTVCFRQCVGIDVAKSTFMACLSMLDAEGCSTPPIEFTNDRHGFNQLVRWTRKESLKGYPLCFVMEPTGVYYEALAMHLTKLGMTVHVVPADRVRDFAKYEGYKTKTDKIDAYILSMLGCENRRLKNWAAPDEQLASIRSLCRLRASLVKHSTMLKNQLGALTASSFSDKKTVRICSAALDDIDKNISKAETMIRNLVDKSEQFKEAVRLSTTVPGIGQTTAAAILAEVGCFANFNNQRQVISFAGLDVVARQSGPQDPKRHISKKGNSTMRSMLYICAMAAIRCNPKMREFYDRIKKSNPSGKVALVAVMRKLMILMYSVCKSKKSYDPDYSTKG

SEQ ID NO: 290126 - protein, 387 aa, unidentified
MPQPNDLSRSLVALDQNSTIIAVVELSQSSWLVGGVVPGIERQPRKKLEPNPERLLALLHRWQDEAVRAGHTITRIAVAFEAGRDGFWLARWLAARGVEAHVIHASSVAVSREHRRAKTDRLDTELLKRGFLGWLRGERGHCSMARVPTIAEEDAKRPNRERDCLVGERTRIVNRIKSTLARLGIRTFKSTLRKAADRLATVHTPEGVPLPPNTLAELQRDMARLGLVVSQIRQIEEARQKRLEQQHEAGPHAMVRLLARIVGVGVETADMLVHEVLSRAMRDRRAVARYAGLTGSPDESGARRREQGLARAGNARVRRGMIQLAWRFLMFQKESALTLWYRGRTADSRRGTRKTMIVALARKLIIALWRFVTTGEPLEGVVLRPAT

SEQ ID NO: 290127 - protein, 355 aa, unidentified
MTSTKYIGMDVHKESISIAVRNSVGKVVMESVIETKASMILQFIDGLRGDLQVTFEEGTSAAWLYDLLKPHVTKLVVCDPRKNKSMREGNQNDKIDACRLAELLRVDHLAPVYHGEHGLRTLKELVRSYLTIAKDLARVKSRVKAIYRSWAIPCTGKQVYARRHRAEWLGKISEPGVHRRAEFYYQQLDALRVLRQEARRDLLAESKKHKAWKRLCEIPSIGPIRAAVLLGILQTPHRFRTKRPLWNYGGLAIEMHSSADHRRVDGQLQRSRKNVLVRGLNRNCNHDLKNLFKGAAAVASSKPGPFQEFYAGLVAKGMRPEMARLTLARKIATIVLIVWKKEVCFDASHLKPQTA

SEQ ID NO: 290128 - protein, 415 aa, unidentified
MNKVQNTRGYERYMAMDIHREYILVGAWNEEKEWILTPRRVSIERFSEWVKKNIGEGDIVVLETTTNVWATYDIVAPLASRVLVANAAEVEEIAKARVKTDKEDIKKLLKLLVGGIVPEVWVPPMHVRELRAFISYRGRLVKTGAMIRNRLQSLLHKHNLKMSETGLLDQAWWERQKDISPLEKMQIRQELALLQEVEKLKLAVDEELQRQSTGVLWGKPALQLMQLPGVGYIVAMTVLSAIGDISRFESAKKLVGYAGMGAGVHDSGKTHKDKKITKKGRRELRWGMVEAAWRAVGMSPFWKAEYEKYLSRLRKKNQAIVVIARKLLVAIWHVLSKEETDIHASEEDLAYKMLLLSWSLKEDTRQGLTYKQFAKYALMQLGVEKDITRFVRKNVPRRLAPRDEVLARMKELGLA

SEQ ID NO: 290129 - protein, 323 aa, unidentified
MNKDKEIFGIDISKDVFDVYSVLEGHCQFKNDATGFKLFLKTLPKTAVAVMEATGYYHYRLAQYLFKQGVLVSVVNPLSVKRFIQMKLAKVKTDKSDAKAICEYGQINEVPLYTALTDVQSECLQLFRLLDAYLKKRTATKNKIHGEDTLGIPSKFVYRSLKRDLKHLDKEIAGIDKRLLELVKQEQQQQLTLLKSIPGLGVKTSLFLIVVTDGFSKFEKASQLCSYVGITPTTRISGSSVRGRSRISKMGNRKLRNLLFLCAFSACKHNKACRELYERIVNKGKSKKLALIAVANKLLKQAFAIVKSGRPYDENFVSVLKTK

SEQ ID NO: 290130 - protein, 384 aa, unidentified
MQKLNDLSRSLTPLDPDGTLIAVIEMSQSSWLVAGIVPGVERQPLKKLAVDESALLNLLNRWRVEAEKAGRKIERIAVAFEAGRDGFWLARWLRARSIEAYVIHASSVAVSREHRRAKTDRLDTELLKRAFIGWLRGERDHCKMVAIPTTKDEDAKRPNRERESLIGDQTRIINRMKAALIRLGIRGFNPKLKKAAGRLEDLRTPEGEPIPPNTLAELRRDMERRRLVSDQIRQIEEARLERMEQAPGDGPHAMVRLIARVIGVGIETADMLVHEVLSRKLRDRRAVARYAGLTGAPDESGSKRREKGLAKAGNARVRGGMIQLAWRFLLFQKDSALAQWYRTRTEGGRNRKTIIVALARKLLIALWRLVTTGEVPAGVVLRAV

SEQ ID NO: 290131 - protein, 354 aa, unidentified
MDSITIGMDLGDRYHQVCILDKKGNVIKVCQVSNTQKAIEKFFRGYAGATVAIEAGTHSPWVSRELEGCGCKVFIGNPRKLKVIWSSTQKSDVRDAEMLARIARFDPGLLSPIRHRGEQAQADLAMIKARDVLVRTRTGLVNHVRGILKSMGIRIPSCGTPNFAKKARGHLPDILLDMLLPVIDQIEAITEKIEDYDRKIRMLSERRYPETFLLSQVPGVGPITSLAFILTLEDPQRFEKSRQVGVFLGLTPRRDQSGQTDKQLRITKAGNSYLRQLLVSCAHHILGPFGPDSELRRFGLRIASSGGKNAKRRAVVAVARKLSVLLHRLWVTGEAYDPFYKSHNGSTKLLRRVA

SEQ ID NO: 290132 - protein, 490 aa, unidentified
MPLLSKEAGSLSGLRYLGLDLAKRESQISVLDDAGVEVFTRRFQTTRENILQLASELRPTDTIALEVTTNAISIARLLKSNSKARIILSNPIRTKVIAVAKVKTDKIDARVLAELARANYLPEVWLPDEDTESLRQFFSDRRSLVERRTEMKNTVHSILHRNLIVCEQTDLFGVAGREWLDSLIERSANESLHLHKLDRLRLGSLLREIDRQDLLVADMESIIASYIATRPALRAQLDHLLSVPGVSLIVGAGVLAAIGDVKRFASAKKLSSYFGLVPSTRQSGDLQARHGRITKAGRSEARWLLVEAAEHLRKAPGPLRQLYTRISRKKGRNVAVVAVARKLAELCWHLLTKHQDYIYSPPRLTLEKRARVRFLAKRKLGVKIKSATARTKSQPALYGTGLEGRRVKDKIVSLASAHAEQLYRAIVGDKDLNELEHSPDQDNGPTNFDPTRPRMLEWERILEQVAANLKVEDLSKRRTKKKSSKEEDKD

SEQ ID NO: 290133 - protein, 339 aa, unidentified
MKNIKYFIGLDVHKEKTSYCVRDRLGNILTEAEAATLYSELEPRLKPYLTASMIGLEASTSHYTLYQNFLRNNYHIKVANTIQLRQLIAKNDKLDAQRLSEMLRLGTFPCSYIPEEKIQHLRSLIQMRHALMQEKVRCNNRIQAFLDRNGVMMPPCKAFSKKWKHALMQYMGAGNVSTELRYEYDHYVYLEKTNEQADQEIIGYTKTYWNQEYQLLRSITGFGVLLPCYIIAFVHPIERFLSNRKLRRYAGVIPVAKESGDTTSKGRIPKTTSKALLRWALVQAANTIGKTNTRLGRYYRRKKNQKKNTGIAKIAVASTLVDIIYKVLTTKKPYTSSAC

SEQ ID NO: 290134 - protein, 366 aa, unidentified
MLRKAGLSDEADPENYLGGSSKTMYFIGLDVHKKTISYCVKDAAGCVHGEGKIGSTRGELDAWVRTLPQPRTIAMEATIFTGWIYDHLLPHAEKVKVAHPLMLRAIAAAKRKNDKIDAAKIADCLRCDFLPECHMASTQIRDRRRLLRYRRLVIRQAVQMKSRISGLLMETGVSYNKLRLHRMGYFEQLLNRSDELPDCIRPLLKMSREHIDRAIRLDRALLKSLQQDPLLVDRLRRLRTIPGVGPITALTWALEVGDTSRFRSIKQAISYCGLCGAEKSSADKIMRTPISKQRNKHIQQVLVEAARMAPRYSQELALLYERERQRGNPNRAILAVARKMVAHMLAVDRRKTDFFAAGKLMPTTAA

SEQ ID NO: 290135 - protein, 419 aa, unidentified
MNKIKTDKCRIVNAKMLIVSIDIGKTINTGYCRCPDGKDVKPFEFSNHAEGFRKLWDRICWTKTANRLEEVVVGFESTGAYGEPLVHYLRQKPVKLVQVNPMHTKRMKDLQGNSPGKTDRKDPKVIADIIGLGHALSVVIPEGAAAELRRLTLARERSIQRRTALYNQLQDLVFILFPEFLQVMKNVKTKTAHYLLRHYPTPQDIARCGFETLTSILKRVSRGKLGRVRSQALYSAAVQSVGLREGSRGILLEMEEILSGLEACKRFIEKMEEEMLPYLEQIPYHDSLLSVKGIGEITVAGLIGEVGDFRQFHTLREVMKLAGLDLFEISSGKHKGNRHISKRGRPLLRKLLYFAAINTIRKGGVMHACYQRYLDRGMPKTKALIAIARKLLRILFALVRDHSQYDEQYSQKEVLKLAA

SEQ ID NO: 290136 - protein, 403 aa, unidentified
MIAALDIGKGAHYAYFRAPNGRDSKPFSFHNARKDFDTFWMRLCQFKKEQGLKDVVIGFESTGPYAEPLFHYLRKKPVTLVQINPMHGKRVKELTGNSPHKTDKKDPRVIADVISLGHALTLVVPEGAAAHLRRLTQARERVMRSRTAMGNQLQHLIFVIFPEFFKVFKDISTKSALYVIKNHPTPESIISADRKSLTEILREVSRYQLTHGRINELFEAAQRSIGIEDGKESICMEIAHLVSAIEHASRFIDEVEQQMAHHLDHIPYSHCMLSIKGVGLITVAGLIGEVGDFKRFHTISEMMKLAGLDLFEVSSGKHRGKRRISKRGRSLMRKLLYFAAINVVKSHGIMHEHYQEMLNRGMVKMKALVAISRKLLTLIFALARDNTVYVENYSTIHNVKLAA

SEQ ID NO: 290137 - protein, 358 aa, unidentified
MPRSVPTNTEVITLGVDTHKDIHVAVALDGLGRRLGTLSVPAIPAGYENLVNWARGFGPLERAGVEGTGSFGAGLTRFLRAQGIEVFEVIRPKRRDQYRSGKSDPIDAEAAARSVLAGTAIGQPKDADGEVEMIRTLRITRRSALKARAQAANQIQALLVTAPEGLKSELCELSTARLIEKASRLRPGATLSDVEAATKFALRSVARRYQHLSKEISELDERLNRLVSEVAPQLVAVEGIGTDTAASLLIAAGDNPERLKNEAAFAHLCGAAPIPASSGKTVRHRLNRHGDRDANRALYVIAICRMSCDKRTRAYVERRTKEGKSKKEIIRCLKRYIAREVYRILASLSLNKPPVPVP

SEQ ID NO: 290138 - protein, 380 aa, unidentified
MRNVRFIGLDVHAETIAVAVAEPDGEVRSLGTIPNRPEPIGRLIRKLGKAEQLRVCYEAGPTGYVLYWQLSELGVQCEVVAPTLVPVKAGDRVKTDRRDAEKLARCYRAGDLTAVWVPDVAHEALRDLVRARLAAKRDQLRARHRLSKFLLRHGRRAPEGSTAWSAKYLIWVKRQSFEQAAQQATLVDYLHEVEHAADRIERLERSIDTAIATLPEKIRAVIEALQSLRGIAKISAVSIMAEVGELSRFESVRQLMGYSGAVSREHSSGERIRRGAISKTGNAHLRRIVIEAAWAYRHHPGLGATLLARQRDLSEEVKTIAWKAQHRLHARYAKLLAKGKAKQQVITAVGRELLGFIWAIGMAAERSQSDAPGRTFKRAA

SEQ ID NO: 290139 - protein, 344 aa, unidentified
MAETIMIGLDLAKNVFQVHGVDAAGLVVLRRQIRRVQMEKFFAGLQPAVIGMEACAGAHYWARLAQRYGHEVRLMPPSYVKPYVKRNKTDGRDAEATCEAMQRPTMRFVVVKSEQQQAMLVLHRTRTLLVRQRTMLANALRGHLAEFGIVAAQGVKGLRGLIERMQTPIAAGVPEFARDALLVLAGQWQALDAQIRALELKIVRSVRESAAARRLLAVPCVGPIIASAMVASVGDARAFRSARGFAAWLGLTPRQRGTGGKQRSGPISRQGDRTLRTLLIVGASAKLRQELARGVSDPWLRDLLARRPRKVATVALAARTARIVWAVLAKGEDYRDRASVPVAA

SEQ ID NO: 290140 - protein, 330 aa, unidentified
MAILGIDISQKTYDATVVTDTGVRHHRQFANTEKGFHDLDQWLSTYHVSDLHACMEATNVYWEDLAEHLFQHGYRVSVVNPARTKGFGISQLQRNKTDKVDSGVIADFCERLSPRLWHPPSPERRQLRDMVRHIDALKKTRTQQINRMKTCRNPLVTQSFQVIIDALNAQIADMEAQIETLVSTHATLKEQRALLMSIQGIGATTATKILAEMYDLDEYLNARSAAADVGVTPCHYESGTSVRRRPRLSKVGKASIRGALYWPAISAMQHNPVVRDVKERLEKKGKSQKVIIGAAMRKLLHLSYGVLKNKIPFDANYVNRSTTLTETCVN

SEQ ID NO: 290141 - protein, 323 aa, unidentified
MVVSVGIDVSKDKHDCFIVSSEGEVLADAFIIPNTMDGFHYLLQRIRHCTAPQDKIKVGLEATGHYSYNLLGFLLDNGLTTYVLNPLRTNLYRKSLSLRKTKTDRVDARTIASMLLSDAGLKPYTDTAYHNEELKSLTRYRFDKVKERAKLKSSIARLVCILFPELEKLVPSLHIASVYALLEEFPGAKQVANTHLTRLKALLETASNGHYKRDMALEIRNAAKNSIGSQMPAKSLELQHTIRLIRELDREIDEIEEQIQSIMDELHSPITTIPGLGFRMAAMILAEVGDFTRFDSPDKLLAYAGMSPSTYQSGAYFLANTNA

SEQ ID NO: 290142 - protein, 463 aa, unidentified
MRKRKYNKSGKTVKRGAGFTITHPRAAGIDIGSASHFVAVPPESTDEPIREFASFTADLKELADWLRECGVDTVAMESTGVYWIPLFELLEERGFKVMLVNARHVKGVPGRKSDVIDCQWLQQLMTYGLLRGSFRPPEQVCILRSLWRQRGMLLKSQSRHIQHMQKALMQMNIQLANVIADVAGETGLKILRAIVAGERDPHILARMKNRRIRAGEGEIAKSLEGSWRLEHLFALKQALDAFDFVAHQVFECDREIDRQLERLHIREDEPEKGRKLCRTRNSPNFDLRTHLFKVCGVDLTRINGINVTTALAVISETGADMSRFATVKHFTSWLGLCPGTKITGGKVVSSKTKPCANRAAQALRLAAASLYKSKSAMGAYFRRLCSRMDKPKAITAAAHKLARLVYTMLTKGQEYTDQGQQYYEQRYKDQVLRQMIKRAEKLGMKLVPNENSTRLTHLFSATC

SEQ ID NO: 290143 - protein, 426 aa, unidentified
MKYTQNERIMQITEKTLIVGIDVGSEKHYARAFNFRGVEYGKLLIFHNDAEGFAILEGWIRKLAVQNGFKDVTVGMEPTGHYWFTLGEHIKRTGMRIVLVNPHHVKKSKELDDNNPSKTDRKDPKTIAMLVKDGRYMEPYIPEGIYKELRNLMDSRWRITKELFAIKNRIRRWISIYYPEFTKVFVDWEGKAAMLILKECPTPAKIIEKGIDGIIAIWKEHKIRAVGMKRAVMLLEMARLSIGTKEGMTSAENELQMLLEDYESKMRQYERTMDLVERLAREIPGFEEMLAIKGVGLVTAAGFIAEIGDVRRFSHPKQIQKLAGLSLKENSSGKHKGKTTICKRGRRRLRYYLTFGMMPLLSKNEEFKALHEYYTSRKTNPLKKMQSLVALSNKLVRIFYVILTKKVAYDPQKMMNDIRRTEIKAA

SEQ ID NO: 290144 - protein, 334 aa, unidentified
MELIKQVFGIDVSMDSFVSKVGTIATDQQTEIGTLRDFKNTIQGFRPFYKFAQSQQIEGVPQYFLMEATGVYYEALAYFLKSKGAHVVVVLPNKAKYFAKTLTIKSKTDPIDAHMLTQMGLEKRLSEWEPPSEQMKELKLLTREHLSLKELKTDAMNRIHAKTHSFKPGKDTVRRLRREIILYETLIKEVELSIRSLLQRDFKMWVKIQNILRVNGVGLMTVAKVLAETNAFALIRNGKQLTSYAGLDVVFNDSGKHHGKTRISRKGNKHLRRSVYMPAISAIKSNPKLKSYYDRMLEKGKPKKVGVIAVARKLLLLIYFLWINETEYDPEYAA

SEQ ID NO: 290145 - protein, 420 aa, unidentified
MEEITEEPAELVERVAALDIGKASLVCCVRVPHESRPGARRQEVRTYDTVTPALLEMRDWLICQGVTRVVMEATSAYWKPPFYLLEDDIECWVVNARDVKNVPGRPKTDKLDAVWLCKLAERGMLRPSFIPGRAGRQLRDLTRYRRTLTQERTREKQRAEKLLEDAQVKLSSVISDIFGASGRDMLAALIAGQRNPHALADLARKRMRAKTSVLRQALTGQFTGHHAFLLAMMLGRVDALTAQIDQLTTRIEKAIAPFAAQVAQLDEIPGIGVTTAQEILAETGTDMSRFPTPGHLVSWAKFAPKARQSAGRSKAAATGKGNPWLGGTLGEAAISAARTSTFLAARYKRVVKRRGKKRALVAVGNSILTIVWHLLSDPDAHFTDLGPDWHDRLAPQRRKRQLITELERLSGQKVTLTDAA

SEQ ID NO: 290146 - protein, 343 aa, unidentified
MQSISTIGLDIAKSVFQVHGVDAAGQAVLRRQLRRRHVLAFFQKLSPCLVGIEACASSHHWSRELQALGHTVRLMPPAYVKPYVKRQKNDTTDAEAICEAVTRPNMRFVPTKTVEQQSCLMLHRARHLFIRQQTAVINSIRAHLAEFGIVAPVGRRGVEQLLEVVADTADRRLPEVARACLAALGSQLRALKAQILEFDRRIMVWHRSNATSKRLDAIPGVGPALATALVASIAEPGAFRSGRDFSAWVGLVPKQNSSGGKDKLGSISKQGDRYLRSLFTAGALAVIRYAKIHGTGHRPWLTGLLARRPTKIAAIALANKLARMAWAMMARNESYKEPAALAA

SEQ ID NO: 290147 - protein, 350 aa, unidentified
MLHAGLDLSRKRLDVCLLSEHGELVEEFAVPPDADGLRGLVRHVGDRGAPVRGVIESMTGARFVHDTLEHLGWEVLIADAQKVKGLAPLACKTDKIDARVLAVLSERDLVPAIWLPDPRVRAEREQARFRLHLVKHKSMLKHRIHSTMLSFGHACPVSDLFGVEGRELLERLQIPDPWRQTVDASLQLIDDLERQIAQINRDLKASGAEHPYVPLLLTVPGIGWVLAFTIASEIGDITRFASAKKLCGYTGLCPRVNQSGEKDRCGPLTKQGPKYLRWAMLESTMHALRHPAYAERYQRNKKRLGRQRGARVAQIDIARKLTEAIWHMLTNNQPFAPTPASGGAAFRLAA

SEQ ID NO: 290148 - protein, 346 aa, unidentified
MDKIIRIGMDTSKTVFQLHGVNATEQPVLRKKLPRKAMIDFFRHLEPTVVGIEACGGSHHWARLLGSFGHEVKLLAPQLVKPYVKRGKNDAADAEAICEAMSRPTMRFVPVKTQDQQAALMMIGMRDRLVKRRTQLTNAVRSHAAEFGLVSARGIDKIEPLLERIAADESLPALAKQLFASFAAEYAHLQSQFDEIDAKVMAWHRQDQYSRRLAEIPGIGPIGASMLVMKVPDPSGFKSGRHFAAWIGLTPKNHSTAGKVKLGGITRAGDEALRSVLVVGATAVIRQVVSGRGKPAPWLVELLKRKPRKLAAVALANKMARVAWRLMTTGEFYDSTYVLAPMGQAA

SEQ ID NO: 290149 - protein, 352 aa, unidentified
MYYIGMDVHSKVTMVCVLDANGKVIYEYVFKGGLRDLVDRLKALKSQLGGTIKVCYEASGGCGWLFDKLVEMGLKVQVAHPGKLRMIFRSKRKNDRVDARKLAMLLFLDQVPLAYVPAPDVRAWRKLIEYRGKLVASRVATKNRIRAILRSNGILAPRGLWRATGLAWLMAQELPEFEVIQREMLLEELSQVQAKIKRVESVLKKRAASEPAVCVLKTIPGVGIRTAEAVVAYVDKPDRFRRNKSVGCYFGMVPCEDTSVKSRFGHITKEGPATVRKLVVEAAWQAIRRDQTMKEYYERLCRRDPNRRKIALVATAHHLLRVMHSMMLSGEAWRDPAAKAAPARPQPLKQPA

SEQ ID NO: 290150 - protein, 337 aa, unidentified
MEYCGLDLGRRSSRYCIVDNARDVVQEGNVRTHKTHLRRVFSKREPMRIVVEATTACFWVADQLIELGHDVRVVDPNQTKAIGAALIKHDKLDARVLAQLCAADLLAEVRIPTLEQRLGRMPLTARDVLVRSRTRIVNCIRGMLASEGFVLPSTSPKRLVSLLDEEPPPDIPPALYAALVPLLEALVGLEANIEASTAPVYELAKTDPVLRRLQTVPGVGPITASLFVLAIGDPHRFRSGRAVGAYLGLVPRLYQSGATLRRGRITKHGNAQARWALTISANALLLSKKDSALQRWGQNLVERIGRQKACCAIARKLASVLWSLWKNEQSFQAFAPN

SEQ ID NO: 290151 - protein, 403 aa, unidentified
MAAVMTGVDPHKGSHTAVVISPAEDPLGELRVRASAGQAGKLIGWAAAWPERTWAVEGAAGLGRLLAQQLVAAGERVLDVQPKLASRVRLLQAGDTNKNDPNDALSVAVAALRSTVCREVIADDYRVVLKVRSKRHRDLARTRNQVACRLHSVLCDLVPGGHQKEISAAHAARILAQATPSGAVALARAELAAEFLADLRHLDGQLRDTRKKLAAAVRASGTTLTQVFGVGPVIAGTVIGDVGDVARFPGRDHFASYNGTAPVEVSSGNRKIHRLSLRGNRRINHAIHMAAITQLRHKHSEGRAYYDKKVAEGKTHKEALRSLKRKVSDAIFARLQADARQARESGPGGQPGNGSDSSAASSHPERQLFGPATPGPDTTIRPGTTAGTPSPSKPALKKTRPAT

SEQ ID NO: 290152 - protein, 346 aa, unidentified
MTILIKYACGVDMASKKFDVCLTSLDIELNTKIKGTKKFDNTASGIKAFYEWLQKKCKSTGTPVYILVEATGVYHEELAYSLSAKGANISVVLPNKAQKHLQSLGLKSKNDKIDAYGLSLMCAQQKHEEFKPLDPFYYELKTITRFYQTTQENITAYKNQLHALEYGVYSSNKIKSEMKKLISANEKLKDCLVKEMKKLVNDRPDIKKKIENILGVKGIGFITVCTIVAETAEFENFKNIPGLVSSAGFDVVENTLGKHVGKTKISKRGNSRIRRALHLPSFVVVKYEKRFKVFYDRIFERSLKPLKAYVAVQKKMLVLIYTLWKNNQEYNSNIYFQNLEKKVAQN

SEQ ID NO: 290153 - protein, 369 aa, unidentified
MGFDQIIAIDLGKFKSVACVMDASTRRHRFEDHLLTTPASLRQFLAATMRQHEPAPAPARTLLAIETCDAAGWVHDLARSLGLDVVVANCCHEAWRWQKVKRKTDRDDALKLARMALNGDLPTVHVPPPQQRQKRRLILQRRSLVHRRTQVKNSIRSIFSQQGLTELLPRGKKAWTKMGVKQMAEEARPLHDCSIDELWRGRLHVELQLLEALSAQVATVERKLDDLAKGNQQIELLETVPGVGTRLAEAVVVCLDDPHRFKSAAEVGSYAGLVPKLIESGTMSRVGRITRRGPSLLRGMLVEVAWLVWRHNAWAKSFVARISRGMKLRKKIAIVALARKLLVILWAMLREDRPWQGWRDPGELPAGST

SEQ ID NO: 290154 - protein, 494 aa, unidentified
MKERRWYVGVDWATQEHVVCLLDDQGNVLGERAFAHSGEGIATMGSWLLDSTGAQPSHLHVAIEMPHGAVVETLLERGMVVHAINPKQLDRFRDRFTVAGAKDDRRDARVLGDSLRTDAPCFRQLRVDDPTVIQLREWSRIAEDLGQERVRLSNRLRQQLLRYYPQMLQLGDELESEWFLALWEMAPSPQQTTRLREPKVSKLLKEHRIRRFDAGHVLTVLREKPLIVAPGTTEAAVAHITSLVARIRLLNRQHKEALQRLDQLTTELAAKEPEPGQGHEQRDVEVLRSLPGIGRIVLATLLAEAWQPLGQRDYHTLRALSGVAPVTRNSGKRSGNRSIVVMRQACNMRLRQAVYHWARVAAQYDPKSRAAYVALRARPFAWAKSANHRRPPLARRLRDAPRSTALRHQPADRCMSSSPTLSQTNPLPNGEESTHASAPRRRPHSRRSARDSRSRRCASVRRCSARGKAPPAASRRSAQKLRSVPAPTSEERRE

SEQ ID NO: 290155 - protein, 436 aa, unidentified
MIDKIHPGYAAIDIGQEKIFIACAGDSQVRSFCTFSGDLQLAAMHLKQHGVSKVAMEATGVYWIPIHDLFQSQGLEVTVFNGAHARNMPGRKSDVLDCQWHAMLHSHGLLTPCFIPPDEIRQLRCFYRLRDDHLSIGASHIQHMQRALDLMNVRLHTVISQIHGVSGLRVIKAILGGQRDPVALSELCDMMILKRKRQEVIKSLEGDWREHHIFALRQALEGYEFCQRQAAACDQEIEALLKRINQDKPPANPDPDLKIKPIRHNAPKIANLHGLLITMTGGRDATQLPGFTALGFMKLLGETGTDLSGWPTCKHFTSWARLAPGSNQSGKKRKRTRRGKTVVGQIFREAVMSLAKSKHVALGAAYRRIKAHRGAAIAMTAIARKLAELYYRLMTKGLDYVEQGIETYEARHKEQTLRYLKKTAGKLGFSLTPATP

SEQ ID NO: 290156 - protein, 343 aa, unidentified
MQTVRTIGLDIAKSVFQVHGVDAAGQVVIRRQLKRRQVLTFFQKLSPCLVGIEACASSHHWSRELSALGHTVRLMPPAYVKPYVKRQKNDAADAEAICEAVTRANMRFVDTKTLEQQSGMVLHRTRQLCMRQQTSVINAIRAHLAEFGIVAPVGRNGVEELLDIVADPSDKRVPEIARLCLAALGAQLRGLKEQILEFDRMIRAWHRSSEISMRLDECPGVGPVLATALVATVADPKAFRSGRNFSAWIGLVPKQHSSGGKDRLGSISKQGDRYLRGLFVVGALAVIRYAKIHGTKHRPWLTALLARRPVKVAAIALANKIARMAWAMMVRGESYKEPVALAA

SEQ ID NO: 290157 - protein, 387 aa, unidentified
MPQPNDLSRSLVALDQDSTIIAVVEMSQSSWLVAGMLPGIERQPRKKLEPSAERLLGLLHRWRDEAVKAGRKITRIALAFEAGRDGFWLARWLRAHGVEGHVIHPSSVAVSREHRRAKTDRLDTELLKRGFLGWLRGERGHCTMARIPTIAEEDAKRPNRERECLVRERTRIVNRMKGTLARLGIRNFKPTLRKAAERVTTLHTPEGSALPPNVSAELQRNMARLGFVVSQIKEIEAARQKRLEQEPETEPHAMVRHLARVVGLGVETADILVNEVFSRPMRDRKAVARYAGLTGSPDESGAKRREQGLAKAGNARVRRGMIQLAWRFLRFQKESALALWYRARTADSRVGTRKTMIVALARKLLIALWRFVTTGETLEGVVLRPAG

SEQ ID NO: 290158 - protein, 378 aa, unidentified
MRFYNQAHRFYCGVDLHARTMYLCILDHRGQVVLHKEVPCEPAAFLEAIGPFRDGLVVACECLFCWYWLADLCQAQNITFVLGHALYMKAIHGGKAADDKTDSAKIAHLLRGGNLPIAYVYPKGLRETRDLLRRRMYLVHKRAEVVAHVVNTNSQYNLPPFGKKLIYARNRQALKIAQRFSDASVKKSIEVNLRLLDCLDDLIADVELYLERTVKVDDADTFYRLRSIPGVGKILALVLFYEIHDIKRFAGEGEFLSYVRLIRPVKTSAGKVKGSGGGKIGNAHLKWSFSEAACLLARESDQAKRFLARKEKKHGKPKALGILAARLGRAVYHMLWQKKPFDPKRFWNGEPGVTPEKLKKSVVKRPRRAKGSRCVLQA

SEQ ID NO: 290159 - protein, 425 aa, unidentified
MGSIRRYGLGRPEAFLAAPTCCSQVSEQGELVNTPEDVEEWAVRLRQRFGGRPVAVCLEQSRGALVYMLTKYPHLVLFPVHPTMSANYRKTFSPCGAKSDASDTAALLDLLLRHRDKLRCLQPDTADTRLLHLLVEERRQQVDERTAQSNRLRDCLKLYFPQILSWFEDVTTPLVGDLLVRWPALEKLQRANPAVLRRFFHQHNCRNENLIDERIAAIYQAMAATSEEAVVEACMLKAQSLVALLAALRSNIAGFDRRIEELVQSHPDASLFASFPGAGPVLVPRLIAAFGTRRDRFQNAVEMQTFSGIAPVKEASGNSEWIHFRFACPKFLRQTFQEFAGHSIGHSQWARAYYEHLRNDEKKEHHAAVRSLAYKWIRILFRCWKDGKLYDENIHLQSLRRRSPLVTRLGWDAIAGFQKPSEKIS

SEQ ID NO: 290160 - protein, 357 aa, unidentified
MERSVTDNSINFNGKIVNVGIDVHKQSWRVTAMVEGVVIKAVTIKPYYSVLKKILSHFSGAHIRVAYEAGPAGFSLYDELTADHIECMVVPPSLIPVESGNRVKTDKKDSTKLAHYLENNLLKRVWVLSKEERAHRQLLRTRRQIAHHRSDVMRQIKSLLLFHGIPYPSEGPQIWTKTFVRWLRTVKGDEYIVHSLNVLIDVYEYLTQQVKGLTEEVIKLARSEKYAHRVQVLTSIPGIGVLSAIEILVELQDVGRFRSADQLAAYIGVTPSQYSSGERVRMGSITHLGNHRVRTILVESSWTVIRKDPSLYKVYESIKQRRGAKRAIIAISRKLVIRMRRLLLDDKPYTINHSLAA

SEQ ID NO: 290161 - protein, 370 aa, unidentified
MKEHSIFVGMDVHKNSIDIAIAEKGRQGQLRHFGTIESSLTALDKVVRKLVSNGKRPCFVYEAGPCGYQIYRHLTAKGFDCAVVAPSLVPRASGNRIKNDRRDSLMLARLHRAGELTAVCVPHDEDEALRDLTRAREDAKIDEKKAKQRLLAFLLRSGHRYSGRASWSQAHRRWLADLKMPHRCQQIVLQEYIEALNHCSLRLQRLTDQIRQMVPRWRLFPVVQALQSLRGVSLIVSATTVAEIGDFKRFQNPQQLMSYLGLVPSEHSSGEKTRRGSITKAGNTHVRRMLVEAAWAYRFRARVSRALLQRQEALPPSIRDIAWKAQVRLCARYRRLWARGKIKAVVTTAIARELCGFIWAVATAVEGTTA

SEQ ID NO: 290162 - protein, 375 aa, unidentified
MTFKEWILDIKERHEKDKVVLGMEPTGHYWFNLGKFLQDNEMKPVLVNPHHVKKSKELDDNNPTKNDRKDPKVIAGLVREGRYMIPYLPDGVYADLRTASNIRFQLQAELTRIQNRISRWFNIYFPEYKTVYGKPDAKSGMLILKAAPLPEDILTLGIDGVNQIWRDAKLRAVGKARAKTLIEAAEHSIGSKEGTMSARMEIRMLLEDYESKNMRLQEVMVLIEELVKEIPMAEKLLEIKGVGIRTVSGFLAEVGDISRFNNPKELQKLAGLALVENSSGKHKGKTTISRRGRKRLRYLLFEVAMSLVAKNPEFRELHNYYTARRLNPLKKMQSLMAIAAKLIRVFYAMLTKGVDYDPKKMISDIKRPTVYLQAA

SEQ ID NO: 290163 - protein, 344 aa, unidentified
MKLYVGLDVSMKETSICVVDKVGKVFREVKVATEPTAILAVLMDETLAIERIGLEAGAFSQWLYGALAEAGLPVVCVETRHMKAALSAQRNKTDRNDARGIAQMMRVGLYRPVHVKTLTSQKQRMLLTARQLLKAKAIDIESDLRGTLRNFGLKVGVVGEAKFEARIRELIKDDPDLAEIVEPVLIARRTLRQQLGVLHRQLLELARHDPICRRLMTAPGVGPVVALTFRATVDVPSRFKSSKTVGAAFGLTPRRYQSGETDRMGAVSKCGDRMMRAMLFEAALALMVCSRKWSWLKAWGMKIARHRGMKRAIVAVARRLAVILHRMWVDRTEFRWTREQAAAA

SEQ ID NO: 290164 - protein, 521 aa, unidentified
MSRSVAARSAKNRKPFHLQKPTGQLGPRVRAVGPEHFGIVAVDCAKARSRYLLGDFYGRPLLEPTTLPHTRGDLQAAIDRIRHAQLQHDLRDVVVLIECTGEYHRPVQRAFRQAGFDTRLVHPYTAKQYRQPADPDNKTDDTDLAAIFRAGTHGFGLIEAAWPDDYLTLKLLRRHRRDLVDKTSLLCCQIREVLHAAMPGYAECFSDPWEAPGPLVLARHFTSAQDVRQAGLEGLRQCAAAAAIIVRRDTLHKVLAWAEQAPPGHSHVPDLQRILGTLDDDRLAKTRQILELERTLAHFVVRTPYALLLIIPGINIVTVADLAGELGPIELYANPNAITGRAGLVPSRYQSDQVDLDSGPLRRRGNRRLRAVLMQTADNLVNCNHYFGARAELWRRAGKDPRWLRVKVAKIFSRLAYALVAGRQLFPHPCCQPRHYLLGKLLEFHGGHGTPPAELRQDLEAVIQHLPAKTRVEEAQPLEERLHELMKRRRGPQPLAAIIPMILARLGKVVVQSEDHEGAEP

SEQ ID NO: 290165 - protein, 445 aa, unidentified
MHDVQDEPLFAERVAGLDIAKAMVEVTIRVPSDTMASRRQQETRTFGTTRRELESLGDWLACWGVTRVGMEATSDYWKPVFFRLESRGFDCHLYNAAQVKALPGRPKTDRADAAWLARITERGMISSSFVPPEPIRRLRTHTRYRRHLTQARTAEKQRVEKLLEDGHLKLSAVISDIHGVSGRAMLDAIAAGQRDPRALAQLARGSMRGKIRRLEEALDCSSFTEDHAAVLAMMLAVIDQYTAQIETLTARIEALTEPWLRQVGQLDAVPGIGPVCAQDIIAETGADMTVFPTAAHLVSWARWSPQVSQSAGKRKGSNATGRGNPYLGAALGEAAISAARTQSFLGAKYRRLARRMPKKKALVATGNSMLTIIHALLSDPQASYHDLGPDYYEQRMHARRQARNHVRSLERLGYKVTMSAYWVTCRWAYDVTRCGGLGRNSSFRP

SEQ ID NO: 290166 - protein, 320 aa, unidentified
MGAIWVGIDVSKQRLDVAIRPAGETLTVDNDEAGIKALSKELRKWSPQLIVLEATGGHEYASAYSLTKAGLPVAVVNPRQVRDFARAVGKLAKTDGIDAKILAHFAEAVQPPARPVADQQLEEIGHLVTRHRQLIEMIVAEGNRRMSLRGTAQRDVDASIRFLRDRLDKIDEQMKTLIAKHPDWKAKSELLNSVPGVGPVLISSLVAELPELGSLNRKQVAALVGVAPFNNDSGQSRGRRRIWGGRAHLRSLLYMSVVAGIRFNPTIRAFYKHLIGAGKAPKVALVACMRKLLVILNAMLKSGQAWRSTGASADSAAAAE

SEQ ID NO: 290167 - protein, 362 aa, unidentified
MPMLAELVDAVVGVDTHRDTHQVEIALSNGAPIACTTISNDTSGYAELLAWIVDHAPGPRLAVSIEGTRSYGIGLARAAAAAGLVVLECEQPHRKARRGKGKSDPIDAHLAVLAALRLDADRLPLPRADGDREALRILLCARHELSVATTAQTNRLRALLLGGEDGERDLARATLTDPVLVTVVRRREPRQASREQAVRHGEIRRLALAVRAGRHALAANRAQLQTIVDEMAPGLTERRGVGAVTAAQAIVSFSHPGRCRNDAAFAALSGTNPLPASSGRTVRHRLNRGGDRALNSAIHTIAITRMRCCPTTKDYVARRRAEGKSSREIQRCLKRYIARELYRALNASTTLTDQTSAAPAAA

SEQ ID NO: 290168 - protein, 366 aa, unidentified
MKKYTVFRSVTAAPAAAKSNLTKSGSVLKLGLDIHRDKFVVVAQHDHATPRPPQGFAPAEFVPWVEGRLRGGFEVHVVYESCGLGYGLYRALLEAGAHCYVIAPQQLDERNTRVKTDGRDGRALCLRLDRYLAGNKDSLAVIRVPSEREERARHWGRQREQLVRHRQKMEAQGRSLLISHGLLAPARWWRPQSWNRLGKLLPAWILPHLELYRPALLALDQQVGALTIELEKAAPAALPKGMGAMSSVVISREICDWQRFKNRRQVSSYTGLCPGEYSSGTKRVTGSVTKHGNGRLRAALVELAWRMVRFQPLYHAVQQRLAVLAKGARATGAQRKKAIVAVARQLAVDLWRIHTGRCTPSILGFN

SEQ ID NO: 290169 - protein, 386 aa, unidentified
MAHSTNILPRSADYDQTLVLAIELSNKSWVLAAQVPGLSQTKAKRTIDPDKNDLLAAIDGYRTRAAAAGRSVKRVITSYEAGWCGFWLARWLMAHGIEVHVVQPSSVPVDRRMRRGKSDGIDAELLLRTLLAWLRGEPRVCSMVPIPDEADEDARRCVRERSELVSERVGLVNRIGAILATLGADDYNPLLQSRRRRLTELRTGLGDPIPPNALAKITRLLTRLELVLAQIAELELERDAVARTDAPDHAGKMIQQLISLRGIGVQSATVLVREAFVRRFANGKALGSYAGLTSTPYSSGGIDREQGIGKAGNRRLRTVMVELAWLWQRYQPGTAQVAWFRERVGSTGRRVRKVMVVALARKLLIALWRFVIDGVMPEGAVTKPSI

SEQ ID NO: 290170 - protein, 408 aa, unidentified
MNTLYVGIDISSKSNIVYMMLPNGDKHSNFSVANSHEGSIQLVKRIYSALTSHSLDTVLIGLEATSVYGDNLVYFLREDATLAPFNSRIHVLNSKQVKKFQDAYNDLPKNDYVDSFVIADCLRFGRINKEVYSGDYRYQALRNLTRARFFTVQNLIKEKQRFMNILFKKYSTMTQEKVFSNTFSATALAVYEEFASAEALANMDLHELTDFIIEKGKNRFQNPDAVAKAIQKAARSSYRLPKTVNESVNQVLSISITSMKALESQIKKFDKAIKVQMELLPNVLISILGIGPVYSAGIMAEIGDINRFDNQAALAKYAGLAWKQYQSGGLEAEVTRLIPSGNRFLKYYLCEVAFSLVRCDKEYSDFYHLKYKEVNRCQHKRALALTARKFVRLVFRLLKDNRLYCQAK

SEQ ID NO: 290171 - protein, 347 aa, unidentified
MRFYRGTHHHYCGVDLHARTMYLCLTDHRGTVLLHERIDCTPEAFLEAVEPYRDDLVVCAECIFCWYWLADLCAEHGITFILAHALYLKAIHGARTKNDRVDSEKLVVLLRGGVIPQAYVYPPEMRATRDLLRRRLFFTRKRGELLSHVRTTFHQYNLPAPKGTLLTQKSREQVPAHFDDPIVRTSVEADLELCTAYDGIIRTLEKTVDQQAMSHDAHSLHLLRTTPGIGKILGLTILYEIHTIDRFPRVQNFSSYARLVKAPKESAGKRLGTSGSKIGNAHLKWAYSEAAVCFLHNNPRGKQHIKRLRRRYGKGKALSILAARLGRATYFMLKQKRAFDMDRFFPN

SEQ ID NO: 290172 - protein, 341 aa, unidentified
MEAGYDGRQIVGIDLHRRRSVVVRVAADSGQRLGMVRIDNEPMALAAEIAKAGEQPDVVLEATYGWYWAADVLAEAGAGVHLAHPLGVKGFAYRRVKNDERDAADLADLVRMGRLPEAWIAPPATRQLREQVRHRAKLVALRSGLKASVHAVLAKEGVRVAMSDLFGVAGQAMLDELRLGPAYAERVASLRRLIDAVTVEIDMVGRRVSAQLDADRGYRAVQALDGVGPVLAAVFVAEIGDVTRFAGPAQLCSWAGMTPRHRESDTKVHRGRITKQGNRLVRWAAVEAVQRVHRGAIGAARARIGAHRGVNIAKVAAGRKLLTLVYYGLRDGHIRYQPRPA

SEQ ID NO: 290173 - protein, 338 aa, unidentified
MAIVTVGIDLAKSVFAVHGVGVSGKPELVRPEVRRAKLLELIAQLSPCLIGMEACSGAHYWAREFQKLGHTVRIMAPKFVAPYRMSGKHGKNDAADAAAICEAVTRPNMRFVPIKTLEQQSQLFIHRAQQGYVRERTALINRMRGLLSELGIVLPQAQTAFKQGIHLVLEDLPGPCNLVIGDMLCELDRLEERIARNDRTMAQLARQDEQAQRLMQLRGVGPTTATAIVASVGDGHDFESGRQFSAWLGLVPRQHSSGGKARLGRITKAGDSYLRTLLVLGARAVLMAARGKDDPLSRWALQLKERRGYGKAVVAIAAKNARMCWAALRLGEGFRVPA

SEQ ID NO: 290174 - protein, 412 aa, unidentified
MEVLYARCCGLDVHKSSITACVLIAQSGKPLKHIRRFGCTTRELRELVVWLQEFGVEHVAMESTGVYWKPVWNVLETHFQIVLANAQHIKAVPGRKSDTKDCQWIAELLQHGLLRGSFIPPLVIRDLRDLTRARTSLSQEHSRIASRIQKVLEDANLKLASVASNTLGKSGRAMLAAIIGGEQSPERLADLALGHLRAKIPQLQAALEGQVRDHHRFLLQSLLRQLYFIETEIELLDARLEQLGQQHEDLAEALNRWVTVPGVDRVAAWSFIAEMGADVSHFPTAAHLASWAGVCPGNNESAGKRISSKIRKGSPWLRRMACQSAWAAARTRNTYLSAQFKKLAARRGRKCAIIAVAHSILVIGYHLQRKGCAYTDLGGNYFDRLHAEGLKRYLVKRLESLGHSVTLQPRIA

SEQ ID NO: 290175 - protein, 342 aa, unidentified
MKEVTIIGVDLAKNVFQLHGSAADGSVVFRKKLSRAQFQRFMAAHPSCNVAMEACPGGHFWTRELTRVGHVARMISPQYVTPYVKRQKNDAADAEAIVEAATRPGMRFVEPKTAEQQARAVVFRIRQKLVAQRIELINALRSHLYEFGYIAPVGLQHLPKLLEVIADEASDLPKAARLACRGLLEQIDNLSKHLDTLNEQIAELGKEGNTSRTLQTMPGVGPITALAIEAFAPAMESFSRGRDFAAWLGLVPRQASSGGKTRLGRISKAGQHDIRRLLIIGALAAMVGACRRGVPEGTWLGKLMRRKPRILVAIALANKMARQIWAMLTKKQSYRDPASAAA

SEQ ID NO: 290176 - protein, 417 aa, unidentified
MQKHNNSGKKSEPTSKRTKSRGPVQRDTKEVLAELVETLRKKLDLKVEAGSTGEEDRRGKFRPNLDRLTVGVDLGDQWSHYCILGLEGEALAEGQLRTTQQHIAEFFQALNAARVVFEVGTHSAWVQEVICGCGHEVLVANPRLMEGSKRRKRKNDRIDANKLARLGRVDPQSLHPMRHRSKEVRQDLVVLRARDALVAARTELINATRGLVKSMGSRLPKCSSPSFAEKVEEAVPVEIREALLPLVRMAAALSDCIQRYDEKIEKLGREKYGHTALLRQVKGVGPITALAYVLTLENPQRFVKSRDVGPYLGLVPKQEDSGESQPQLGISKTGDTMVRKLLVGSAQFILGPFGPDTDLRRYGLRLCERGGKNAKKRAAVAVARKLAVLLHCLWVSGEVYEPLRQGLPPRIAPAVAA

SEQ ID NO: 290177 - protein, 408 aa, unidentified
MDHNFEFFAGIDWGSERHRVCLMNRNGQTLAERWIEHSGDSLAELTAWFRQQTSDSPSRLAAAIEIPRGAIVETLLEHGFAVFSINPKQLDRFRDRYSPAGAKDDRRDAFVLADALRTDMHCFRAARLDDPVLIRLRELSRLDDELAQEQNRAINRLREQFHRFFPQLLQLSECANEPWLWALFELAPSPLRAARLTEAKIARLLQQHRIRRLTAAQVRAVLKTKPLILAPGAAEAAAEHALWLLPRLRLLDQQRTHLGRRISALLDELAAPVEGQNEHRDAAILLSLPGLGRKIAATMLSEASQAIADRDYHALRCYSGAAPITRQSGKKKVVRMRRGVNERLRNALYHWARVSVVFDPPSKKRYAGLRACGHSHGRALRGMADRWLKVLTAMLITGTLYDPQRRAA

SEQ ID NO: 290178 - protein, 396 aa, unidentified
MEERPLNNAWVGVDVGKEFHWAHVLDTSGRMLLSCRVENDEADLLALIEEVFSLAEEVLWATDQPGGSAALLLALLWEKGQKVIYVPGLTVERSRDAYRGESKTDAKDAHIIADQARMRRDLGELLPGEEALAELQLLLARRRDLVADRSRAITRLREALLALFPALERNLDLNNRGALILVAHYQTPAQIRRAGRKRLAAYLRNRGVQGADALAQKALSAAKAQSLTLPAEGVAVRIVAELATEVLSFKEKISALDGELQQRFFARPEARILSSLPGMGPILGAEFLVSAGDLRAFGSADQLAAYARLVPAARDSGKRTGNDRRMRGGNKVLKRVFYQSAFASLRSAPESRAFYDRKRAEGKRHTQALIALARRRVNVLWAMLRDGTTFETRSAA

SEQ ID NO: 290179 - protein, 413 aa, unidentified
MSVTDEPGSRRPTAGVDWATADHAVAIVDPDGEQTGRFPVTHDAAGLRTLVRKLLAAGVAEVGIERPDGPVVDALRAAGLVVYVIPPGQLKNLRSRYGSAGNKDDRFDAYVLADVVRTDRRRLRPLLVDQPVTTALRQTVRARRDLVAHRVAIANQLRAHLQICFPGAVGLFADIDSDISLRFLERFPTQDRADWLSPKRWTAWLASVGYCGRTLPETLHTRLRDAPAGATGPAADTAATVTAAFVAVLRTITAQIDARAARIAEQLDLHPDAPIFTSLPRSGRVRAARLLAEIGDARGRFPTPDSLACLAGVAPSTRQSGKVEVVSFRWGADKQLRDAICDFAGDSRHANPWAADLYTRARTRGHDHPHAVRILARAWVDIIWACWTTNTPYDPAKHRALQRILNQDQPTAA

SEQ ID NO: 290180 - protein, 334 aa, unidentified
MQYIGIDLHLKQSFICILNEKGEKVEELILPSKKKLLETYFSDIETSTICIEAGSHSPWVDRLLTELGHIVYVGQPRKIRLIAESTLKNDRLDAEVLARLVRADPKLISPIQHRSEETQILRSTLRVRSVILQSRSRAINCVRGLLRTFGISFPVGYPEAFPRRVREKELPDSLKEMVAPLLETIEYLSQKVAILDKKIENTVVTDPITKSFQEIPGIGPIIAFAFVTCIDNPDRFGKSRSVGAFLGLRPRLRESGGKTQLGRISKEGDVGLRSLLVQGAQAMLRSNKSCALKSWAENLIPRIGKRKATVALARKLAVVMHRMWVTNQPYCAFP

SEQ ID NO: 290181 - protein, 427 aa, unidentified
MPYRIAGIDVHKRMLAVVVSDVEIDGEYVFERRQFGGNPAQLRLLADWLLEQQVEEVVMESTAQYWRPVWGTLERYWKPVCQKRDGARPTSGTLHLAQAQSNRARRGRKKDFADAERLVKRLVANELTLSFVPDPQQRLWRTVARAKYQQRRNRVQLQGRLEALLEEAHIKLSSLVSDLLGASARRILKALAEGETDPAALAGLADYRLRATPEQLRDALGACQELNPVYRRLLKAVLEELELIDKQIAQLDQELADLLRPYQDQVERLAEVPGLGVDSAQQIIAQVGATAATFPSEGDLSSWVGACPGDYESAGVSYSHRSPKGNRPLRRILNQAANAAVKQKGSIFEILYRRYVPRLGHNQTIGLIAHRLCRLIWKILHQGVRYKEFGPAVSGKSKHRRAARMIRELRSLGYRIELANPQSAVPA

SEQ ID NO: 290182 - protein, 369 aa, unidentified
MKKHNTVKQSPKWAAAGEAGPITIGMDLGDKTSCYYVLGGDGEVLSEGSVATTKKAMTQKFGGMGRCRIAMEVGTHSPWLSRLLSRLGFEVIVANPRQVRLISASSRKNDRMDAQLLARLARVDPKLLRPIRHRSEEAQADLLKIRVRASLLEARTSLINAARGFTKAQGDRLPACDADVMDVEKMEALPESLQETLRPLLEQVEGLTEKIQKLDTTIEQIARTKYPETELLRQVNGVGTLIALTFVLTVEDRRRFDRSREVGCYVGLRPKQGESGESQPQLRISKEGDLYLRQLLVQGAHCILWRGPDTDLKRWGLKLAARGGKNAKKRAVVAVARKLAVLLHRLWVTGEVYEPLRNSQAQQEKGRAA

SEQ ID NO: 290183 - protein, 346 aa, unidentified
MEHYAGIDVSLELSSVCVVDAQGKIVKEAKVASEPEAVVAFFEALGFAVKRIGLEAGPLSQWLHAGLKEAGFETVLLETRHVKAALSAMTVKTDRKDARGLAQLLRMGWFQQVHAKSMASQEVRALLVGRKQLLGRLIDVELSIRGILRGFGLKVGAVTRKGFEARIRELVTGQATLERIAEAMLSARAALKAEYEKLHKAVLAIVREDAVCRRLMTVPSVGPLVAITYKSAMDDPSRIAKSKAAGALFGLTPKKYQSGEKDVTGGITRTGDEMVRTALYEAANVLLSRITRFSKLKRWGMDVAKRRGSKRAKVALARKIAVILHRMWIDGTTYRWADAKPIAAQA

SEQ ID NO: 290184 - protein, 341 aa, unidentified
MKNLFIGVDFSKEKVDVAIIFADGLTETAPRVFNEFKTTVSGYKQLVKWVEQNSYGIDSSLWLFCGENTGDYSKGLCNFIYGKGYDMWLENAKSIKDASGLRRLKSDRADASMIAEYAMRNYDKAVMYEPLSESLTQLRELFLYRQMIVRHRCSFQVRRGEKRLTMEKSPVKTMISQSGRHIVSELNKEIEKIDKRIADLIKSDEELTEVFTIVTSVPGIGTQNAVCLMVYTDNFRRFNYDSRKIACYYGLAPFGKDSGTSVHSDPHVHYMANRQIKAMLTQAALAAVNFNPIMARYYMRLVERGKKKQVALNNVKNKLVHLVTAMVRNRQTFTPEYKISA

SEQ ID NO: 290185 - protein, 365 aa, unidentified
MQKISTMQTSEENILNGQLTIGLDLGDRFSSYCILDEVGKILREQKVPTTPEEMQQTFGRMVRSRIAMETGTHSPWVSRLLTGLGHEVIVAHAQRVRLIVKSRRKDDRLDARTLARLARIDPELLSPVQHRSAEAQIHLTEIRARAGLVSARTALVNAARGLVKSYGERLRKCGTQQFRQEITSGLSTGLREALEPLVREVESLNERIKEYDRRIERMAKETYPEVELLKQVKGVGDLIALAYVLTIEDPHRFRKSRDAGCFVGLQPGRRDSGESAPQMHISKEGDEYLRKLLVQGAHYILGPFGEDSDLRRWGKKLAERGGKNAKKRAVVAVARKLAVLLHRLWVSGEAYEPLRNSQKAMSTAA

SEQ ID NO: 290186 - protein, 281 aa, unidentified
MKLYGGIDLHSNNSVIVILDEKDQVVYKKKHKNDLLEILACLLPFREQLQGLVVESTYNWYWLVDGLMEAGFKVHLANPAAMQQYSGLKHTDDKSDAHWLAHVLRLGLLPEGYICPKKERSVRDLLRKRSQLVRQKTANVLSIINLFTRNTGKAINLRQVKKLTAEELRNQFGDESLCLAVASNLEVFRCLEAQVKLLEQAILGKVKLRKEFIQLKTVNGIGDILALTIMLETGEIERFPKAGNFASYCRCVGSQKISNGKKKGKGNTKNGNKYLVRTAEQ

SEQ ID NO: 290187 - protein, 430 aa, unidentified
MGLVVQTAIHPEQDDHDMPYEWFVGIDWGSQQHQVCVLDRDRRRVGERAVDHDGASLARLATWLWSMSAGQPQRVAVAIEVPRGAIVEGLLERGCHIFAINPKQLDRFRDRHSVAGAKDDRRDAFVLANSLRTDRPSFRRLQLDAPQLLVLRERSRAEETLREAFRRSANQLRDQLHRFYPQMLQLCSAADETWLWDLIDLAPTPAHVALLNEEHVQRVLKAHRIRRVQAQEVLTCLQAPALPVAPGATEAAQAHCGFLLPCLRVLAEQLQACSQQVSALLHTLAQEPSEGEGPSDVAIVQSLPGVGRKITAWLFAEAAQPLAQRDFQVLRTHGGVAPVTRQSGKRRQVVMRRGCNPRLRQALYHMARVAMQRDAHFSQVYEALRAKGQRHGQALRTIGDRLLRILMAMLRDRICYNASRIHREPVVQRG

SEQ ID NO: 290188 - protein, 360 aa, unidentified
MTSTMTFAGLDVHARSTHAAAIDVRTGELRRARFGAASEELIEWMIGLPQPLRGCYEAGPTGFALYRAARAKGIDLCVVAPSKTPRASGDRIKNDRKDAELLARLLLAGQLKPVSVPTRALEAARHLCRAREQVRSDLMRCRQRVSKLLLLHGRVYPEPTTWNQRHRRWLGGQRFDEAVAELAYLDTLAAVDGLVARKAALDERLSRLALEGEWAETVARLRCFRGIDTLSAFALALEIGDFCRFQRPAQLASWLGLVPALDQSGESRRQGVITKTGSSYARRLLVEAAWQYLREPRIGVTLRNRQEGQPAQVLQIAWRAQHRLYRLQKRLRARGKPGNVVTVAVARELACFLWAAAVTE

SEQ ID NO: 290189 - protein, 346 aa, unidentified
MSQPQHFVGLDVSVKQTALCVVDAQGRVVHRALVESDPVVIGGHLLALGLAFERVGLEAGPLSPWLYAGLVEAGLPAICVETRHMHAALSARINKSDRNDALGIAQMMRVGLFKPVHVKTPASQQRRLLLTSRKLLQRKVYDIENDLRGQLRNFGLKVGVVGAVGFEQRVRDLVGDLPAIAAVVIPLLAARSALRVQLAKLHKMLLDEVRADPVCRRLMTAPGVGPVVALTYRACIDNPARFSRSKCVEAHYGLTPRLYQSGETARVGRVSRCGDAMMRAALYEAALVLLTGSRGRWSTLKAWGMGVAKRRGMQKAIVAVARKLAIVLHRMWRDASDFRWSTAQAA

SEQ ID NO: 290190 - protein, 387 aa, unidentified
MTVRSVNNLPAATRGETARCLFAIELSKQSWVIAFNTPLSEKISRRTLKGCEWKGLLELIEEVRARVSRETGRAVEVISCYEAGYDGFWLHRQLEAHGIRNYVIDPASLQVDRRARRVKTDRIDTERLLRSLMAYLRGEPKVWSVVRVPSVAEEDARRLHRERDRLVSERVQHVNRIKGLCALHGIYDYNPLRPQAMARLEQLRTTQGGALPPRLKSEIKRELQRLKLVVEMIATLEAERDAIVEDEASTHLNAKKIQNLHKLKAIGPEFAAVLVGEIFHRDFNNRRQLASYIGFAPSPFQSGNVAHDQGISKAGNRKGRTTGIELAWLWLRYQPDSDLSVWFQTRVGTMKGRIRRIAIVALARKLLVALWRYLETGLVPRGAVLKG

SEQ ID NO: 290191 - protein, 344 aa, unidentified
MKKVLIGIDFSKEKFDVAIIVKSTSTQEHALFDNKVSGYRKMIKWINSVVEDIPCSSWLFCGETTGGYSRMMSDWLYAQGYDVWIENALVIKRTFPLKRLKNDTVDAFMIAEYALRFEDRVQLYEPLSQALTELREIFLYRHHLVRHRCSFEVRRIEKRFTQQKSANKNVISQSARHIITEINKEIAKCDEKIKEYIESDDQLSSIFAIVTSMPGVGTINAVSLMVYTNNFTKFAYNPRKIACYYGIAPFGRDSGTSVHTDPRVGFIANKMLKSLLTQAALASVRTCPQIAKYYQRLIERGKKPMVALNNVKNKMIAIITAMVRTGCMYQPDNICLATQSVIVK

SEQ ID NO: 290192 - protein, 412 aa, unidentified
METVVERPAALDVHKEHVTACVRVPGEGRTREQHVAEFATTVVGLLVLRDWLAAFGVTQVTMEATGVFWKPVWAILEDEFECVLVNARHVKQVPGRKTDVKDAEWICQLAEAGLLKASFVPPKPIRALRNLTRYRKTQIQERSREANRLHKALEDTGIKLDCVATDILGKSGRAMLDALVAGTTDPEVLANLAQGKLRAKLPALKEALEGRFDHLHAVWIGAILAHLDFLDEQIASLSQTIGEQIAPFEKAVELLCTIHGIQRRTAEVIIAEIGVDMSVFPTAKHLASWAGLCPGNDQSAGKRRSGKTRKGSKWLDWALEEAAMATIRTKDSYLAAQYARLRPRRGHKKALGAIKHSLITVIWHMLTTGELYTDLGGDYFRKRDPERLTKRLIAQLESLGHKVILEELPQAA

SEQ ID NO: 290193 - protein, 367 aa, unidentified
MSSIAHRGFVHLGMDVAKDSIAVAVLPPDRDTAEVDKIFHDTDSVRRLVKRLGKPKEIWACYEAGPTGYDLQRLLVSMGVRCDVVAPSLIPKSSGDRVKTDRRDARRLAGLHRAGELTPVAIPTPAQEGVRDLCRTRGDMVQDLTRARNRLSGFLLRHSVVWRGGSPWTERHRRWLATLSFDDPAIAATYSHYLATVTLRDTALESVEADLVPWCTRDPFGDQVRRLAAYRGVTRIGALCLAAEVFDWRRFPRARPFMSFTGLVPGENSTGLTQRRGSITRAGNAHLRGQLCEAAWAYQHSPNVGAGIRERQVGVPPETVARSWAAQVRLSRRFRQLAAHKNVRSVVAAAIARELAGFLWAEMVAEV

SEQ ID NO: 290194 - protein, 350 aa, unidentified
MNATTYGLDIAKSVFQLYWVDPESGEIFNRRFSRDQLVRFLSNREPGRVALEACSGAHWWARKIASLGHQAILLHAKYVRPFVQTNKTDAADARAIWTAAQQPGMRTVAIKSEAQQAILSLHRIRSELVDTRTRQVNQIRGLLGEYGLYFRYGRKALMNELRARIAEIEQTVPPLIWRALQRQMAQLRQLETDIAEAERENLNWVKAEPAAQTLTTINGIGPLTATATVGVMGSPDTFRSGRAFAASLGLVPTQTGSGGKIRLGHISKRGDPYLRKLFIHGARIVVTRSKQRPEWVEALLTRRPVNVVIVALANKMARTAWALLAHGQTYDRQHVSVRPRASGPQAVQSI

SEQ ID NO: 290195 - protein, 367 aa, unidentified
MEAQVKKFDFTDQNIYVGFDAHLNSWKVTVMAEDIVYKTFTQPPKPDVLYNYLKKNFPGGNYHSAYEAGFCGYWIHDKLLSFGIKSIVVNPADIPTTDKERVQKEDKRDSRKIARSLSTGTLMPIYVPSIQTQRDRSLLRTRAMLVKDLARYKNRIKSFLYFYGISIDDSFSNPQSHWSNRFMSWLESIEIDGGSGKETLQILISECKNLRTSILEVTRQIRKLSQTSTYNNRVILLKSVPGIGLLTAMIILTELESISRFNNLDKMCGYIGLIPSTKSSGEKERTGDITPRGHSVLRTAIIESAWTAIRNDPSLMKSYLSYCKRMESNKAIIKIAKKLLSRIRFVLNNNKPYVCLIENNNISIKTR

SEQ ID NO: 290196 - protein, 422 aa, unidentified
MLEEDPQVEEIIARVAALDIGKAEVVCCVRVPHEGKPGRRLQEVTTYSTMTRSLLGMADHLRCLGVTRVVMEATSDYWKPVFYLLEAQGFETWLVNARDVRHLPGRPKTDKLDSVWLCKVAERQMLRRSFVPPAEIRRLRDVARYRVDLIEARTAEKQRAEKLLEDAQIKLSVVASDIFGASGREMMAALIAGRRNPVELAEMAKARMRRKIPALIEAFHGHFTDHHGFLLGKMLARIDALNADIAELDAVIEELITPFVSAVERIDEITGFGPIAAAGVIAEIGMDMSRFPTPGHLASWAKYTPGVKQSAGRKKGRSPTGPGNRYLARILGEAAMTAGRTDTFLGERYRRLARRIGKQKAIVAVGRSMLVIIWHLLSDPKARYSDLGSDFYDKRINVERRRRNHIHQLEALGYKVTVEPAA

SEQ ID NO: 290197 - protein, 390 aa, unidentified
MDVTTNKCCGIDVHQKKITVTTLIGDPAEKPKKLTQTFGTTTPDLKICGQWLADQAIEMVLMESTGQYWRPVWQILETFGFKMILCNPRIIKNIPGKKTDQLDSEWIAELARFGLVAASFIPPRPIQELRESTRTRKSLTQAGTQTKNQIHNILQRSNIKLTSFISYVSQGSGLKLLNLLINGEVITTESVSKCMHRKLKASPQELVAALDGSLSANDRILLDIQLNLLKHNQLAIQRLESNIEEQLKQFQELYLRLQEIPGVSQHIATIIIAEVGPDVSPFPNAAHLASWTGICPGNYESAGISKSGHVRSGNIYLKTALVTAALGAKKQTDSGLKDFFFRLRSRMGAQKALVALAHKLIRIIYAMLSNNCSFRDYKRDQQMKHLLASN

SEQ ID NO: 290198 - protein, 358 aa, unidentified
MVTGPKHQKEKRSMEHFAGLDVSVNETSVCIVDDTGRIVREAKVASEPEALLAALKNRAYHFKRIGLEAGPLSQWLFSALAEAGLPVICVETRHMKAVLKAQINKTDRNDARGIAQMMRAGLYRPVHVKTLRSQKLRMLLTHRKLLQSKAIAIENDLRGTLRNFGLKVGVVGTVKFEARVHELVENLPDLAVLVEPMLTVRRVLREQIVILHRRVLAIVRDDEVCRRLMTTPGVGPVVALTYRATVDVPARFRKSKSVGAVFGLTCAKYQSGELDWSGRISRCGDEMMRSMLYEAAQSMLVHSKKWSWLKAWAMQIARRRGMKKAIVALARRLAVIMHRIWVDGTEFRWTREQAAAAA

SEQ ID NO: 290199 - protein, 342 aa, unidentified
MLYVGIDVAKNKHDVTALNVPGKTVLKPLTFSNNKAGFELLDLSLRQLNQDCLIALEDTGHYAFNLLNFLHEQGYKVYTYTPLLIKEFAKSLSLRKTKTDKKDAHGIALKLLSDPNREQFQHDNRQVELKILARHIHRLKKKQSDWKVQYTRCLDIIFPELDKIVGKHSEYTYQLLTCYPNPQKRLEAGFDKLIEIKRLTASKIQDILSVAPRSIGTTSPAREFEIIENIKHYKRLIDKAETCVNDLMAEFNSVITTVTGIGNRLGAVILAEIQNIHAFDNPAQLQAFAGLDSSIYQSGQIDLAGRMVKRGSPHLRWALIQAAKACARFSPAFKAYLKTKLE

SEQ ID NO: 290200 - protein, 404 aa, unidentified
MKGPIVSIDVSKGKSDYQAFKNLNVKYTGSRSIKHTKEGFDEIVNLVREMEKKLEAEVCVVYEATGVYHRVLKKVLEDNNIKQFIINPLLSAKTRKNDSLRCPKTDKLDPKSIAKTYYSHSLHNSHKQETIYHELRELSRYYEDILVHIRKDKVAFRAQLDIVFPGYDTLFDDLYGPVALAVIEKYPHPEMLQKKKINTVSKVIQSKTCHRQAVSDTMADKAIEYSKTIYSGCDKDDIEVLILQRFIKKLNEDMAEAERTIGEMIKLAQELPDFSIIKSIPGIGDNLAARIIAELGDMTRFKKKNELVAFAGLDPRISESGQNDGDHMHITKKGNKRLRCLLYLAVTCSIRLKRDDNSIKDFYIKKKQQSNPMCSKAAKTACASKLVRIIYSMCKTGELYQYNK

SEQ ID NO: 290201 - protein, 570 aa, unidentified
MVVVGTDAHKYSHTFVATDEVGRQLGEKTVKATTAGHATAIMWAREQFGLELIWGIEDCRNMSARLERDLLEAGQQVVRVPTKLMAQTRKSARSRGKSDPIDALAVARAVLRETDLPLATHDETSRELKLLTDRRDVLVAQRTSAINRLRWLVHELDPERAPAARSLDAAKHQQALRTWLDTQPGLVAELARAELTDIIRLTGEINTLAQRISARVHQVAPALLEIPGCAELTAAKIVGEAAGVTRFKSEAAFACHAAVAPIPVWSGNTAGQMRLSRSGNRQLNAALHRIALTQIRMTDSRGQAYYQRLQDAGKTKRAALRCLKRRLARTVFQALRTVHQPSSEHTQPAAACHRSYCSSHLGEPPRLTDMTQKTRIQPLPPKRAGLLIRALYRIAKRRFGEVPEPFTVTAHHRRLLIANVVHEALLQRASRKLPPSVRELAVFWTARSIGCSWCVDFGAMLQRLDGLDVDRLTDIDNYATSSKFSDDERAAIAYAEAMTADPHSVTDEQVADLRARFGEAGVIELTYQIGVENMRARMNSALGITEQGFNSGDACRVPWAAPDVPSAESR

SEQ ID NO: 290202 - protein, 344 aa, unidentified
MTNYTIIGIDLAKTKFHFAAMNNEHKIVLKKAITRKDFFEQISTLFPKQQTFAMEACGGCHHVAQKLRELGHNVILLKPKDVKPYAKSRQKNDLNDAIAICKASLDPEIMHVQPKTKKQQEIAYLHKARQNTIQQRIQRSNSIMTSLQEFGYITKCGKSRFASDCKDFVNDALENGFISIVIYNQMLIDCREISQLIAREKDIEQDIIANNKSSNDAQLLVTIPGIGPINASILSNKSVEIYETARDFASSLGLVPKQSTTGGVIRLGSITKQGDRYARTMLIQGARSIVMRTSRSNVPNDKIYHFIQRLKESGKGFNVICVAVANKLARIAYACIKGGVEYNA

SEQ ID NO: 290203 - protein, 355 aa, unidentified
MKRTTKYVGLDVHQATTVTTVREESGRVVARTILPTDATAIVDLFRGMRGSVCVAFEEGTQAQWLHDLLVPLVDHVIVCDRRGQSSQGNKADQTDADLLSDLLRQGALRAVYHGGHERATLKELARTYQNLVEDSTRVMQRLKALFRARGIKTPGTAVYQRPRRAQWLGQLSATGVRFRAEALYSELEVLQQLRPMAKAAMLAEARRDPAWAVLRTVPFLGPVRVALLLATLQTPWRFRTKRHLWAYAGLAVVTRASAEYELDDRRAVRRRRRRPLTRGLNRNHNRVVKDVFKGAATAAAVRAGDLQTWYQGLLARGMREELARVTLARKLAALTLRLWKRGERYDPTKLTVPAQ

SEQ ID NO: 290204 - protein, 318 aa, unidentified
MDQVYIGIDVSKNTLDVACYSTREHWQFPNHDTGIRELVELIRSQSPALVVAEATGGYETAVAYALKKAGVRCAVVNPREVRDFARATKHLAKTDMIDACVLAHFAAVTKPEPRPLSDENTRELEAILARRHQVVEMLTAEKNRLHHARYPVRDDILLHIAFLEQRLVDCDSSLEGRIEESPVQREKYNLLMTAPGVGPNLARTLLVALPELGSLDRWQIAALVGVAPFNHDSGRRRGTRHIRGGRSDVRAALYMATLSATRYNPLIRQFYIRLCGKGKLKKVALVACMRKLLTILNAMLKQNSPWAVYQPEPSLSCV

SEQ ID NO: 290205 - protein, 409 aa, unidentified
MDLLHPLCAGLDVHKDTVVACLRRVVKGKVEREVRTFGTTTRELLALSEWLASAGCRHVAMEATGVYWKPVWHILSDGDFELVLANARHVKNVPGRKSDVSDAVWLADLLAHGLIRASFVPDAETQELRGLLRARKQLVRERTSHVQRIQKTLEDANIKLDSTISDVLGRSGRAMIEALIAGETDPDRLAALAHGRIKASQARLREALRGRVTDCHRFLLRLHLGQIDGLSKAIADIDREVEARIEPFRKAVELLSSIPGVSTLSAQVIIAEIGLDMSRFPTVGHLLSWAGLCPKSDESAGKRRSTRMRKGAPWLKPNLIQCAWAAKNAKRTYLQAQFYRVRARRGEKKAAGAVAASILTAAYHMLQRGVFYQDLGPEHFERSKAHQAKRYVKGLQNLGYAVAITPIAA

SEQ ID NO: 290206 - protein, 344 aa, unidentified
MTYYAALDVGVRSLALCIIDDDGEVRHERNLASEVDDVVACLRGFGEEIECVGFEAGTLTQWLTYGLRAAGFRPVVMEARHVKAALGAMRNKTDRNDARGIAQILRSGWYREVHVKSLESHYVRTLLASRKALLRKCIDLENEVRGLLKVFGIKLRKGIRHGAFDRAAREPIEANAALAHALIPLLDVRLELHKGFLELDRRVRALAHKDEVCLLLMTTPGVGTITALTFRAAVDDPRRFRRSKNVAAHFGLTPRRHQSGERDTPGHISKAGDTEVRSALYAAANIILTRSAKWSSLKAWGARLARSKGRKRALVAIARRLAVILHRMWIDGTPFSFTEPEAAS

SEQ ID NO: 290207 - protein, 393 aa, unidentified
MRKPKQRIKLLNDLSRSLTALDVNHTLIGVIEMSQKSWLVAGIVPGVERQPLKKLEPDETALRKLLERWREEAEKAGHKIKRIAVALEAGRDGFWLARWLRRCGIEAHVIHASSVAVSREHRRAKTDRLDTELLKRAFLGWLRGERDHCKMVAIPTLADEDAKRPSRERESLVGEQGRIVNRIKAALARLGIRNFNPKLKRAGERLEGLRTPEGEPIPPNTLAELRRDITRRRLVTDQIRQIEDARLERLKHAPKEGPHAMVLLLARVIGVGIETADMLVQEVLSRKLRDRRAVARYGALTGSPDESGSKRREKGLARSGNARVRRAMIQLAWRFLMFQKKSALAQWFRARTENARGSRKKMIVALARKLLIALWHLVRDGVVPEGVVLRPAK

SEQ ID NO: 290208 - protein, 340 aa, unidentified
MTITTVGIDLAKNVFAVHCVDQNGKAVLVKPKVSRAALSELIAGLPPCVIGMEACSGAHYWARLFRQYGHDVRLMAPKFVSPYRMAGKTGKNDAADAIAICEAVQRPHMRFVPVKDESQQAMQCLHRTRQGFIQERTATYNRLRGLVSEFGVIAPQSTDALRHAVSDQKETLPVQVRLCIDDLLAHVTNIEEKIAEYDRVLSRVAKTDHRSQQLMELKGIGPTTASALVASIGNAHDFKNGRQLAAWLGLTPSQYSSGGKSKLGRITKAGDAYLRTLLVQGARSVMVGAENRTDSFSRWVCSLIGRRGYWRAVVAIAAKNARLCWASLHYGDDFRLYSVN

SEQ ID NO: 290209 - protein, 349 aa, unidentified
MKIIGCDFHPSYQQIVMWDKATGEMLERALSHERKEEVRAFYAGLQGPVRVGIEASGQSQWFEQLLAELGPEVWIGDAAKIRASCERKQKTDRRDAELLVKLLEEERFPRIWVPTPAERDARQLLLHRHKLVRMRTQLKNQLQALALNQGVQRKRKLWSEAGRKQLEALPLLPWASRRRAELLVLLDQLEASIGELDGAAAEQANTRPAVRRLMTHPGVGPITALAFVLTMGPAQRFRRGKQVASYLGLIPTEHSSGGRGQRLGPISKQGNPFLRGLLVEAAQSAVRHEPEMRRAYQRLAQRKCRALAKVAMARKLAVRLYWMLRTEVDYAQLIQGSHAGQLESFRGRV

SEQ ID NO: 290210 - protein, 344 aa, unidentified
MEHFAGLDVSVNETSVCIVDDTGRIVREVKVKSEPGALLQVLKNATYRFKRIGLEAGPLSQWLYSALAEAGLPVICVETRHMRAVLKAQINKTDRNDARGIAQMMRAGLYRSVHVKTLRSQKLRTLLTHGKLLQSKAIAIENDLRGTLRNFGLKVGSVGKLKFEARIKELVENHPDLAMLVEPLLVVRRVLREQTAVLHRRVLAIVRDDEVCRRLMTVPSVGPVVALTYRATVDVPARFRNSKAVGAVLGLTPCKDQSGERDHTGAISKCGDEMMRVMLYEAAQILLTRTVKWSWLKAWAMQIARRRGMKRAIVALARRLAVILHRIWVDGTEFRWTRQEAAAA

SEQ ID NO: 290211 - protein, 341 aa, unidentified
MAVAGGLDLHRGQLTFDYVDTGTGESWRGRICPADRESLRGWLRRFHGVPDVEFAVEGCTGWRYVAEELQRAGITPHLAEPAETAGLRGRKRRAKTDWADARHLRDLLLDGRIPESWIPPGHVLEARALVRLYKDLLEERTSWQQRVHATLFHQGIPVVPKLGTADGQQRLDAAELSAAGRRAVQAGLRQIERLTQEMASLRRELARLSSRQPGCRALRRAHYGIGGLLSVAVWAELGDCRRFSSSDDAVRHTGLDITIYDSDGKRARGHIARQGPPVLRWALYEAALYASRPASPDYAYYCGVRDRIDGQRALLSVARKLARRCYHTLRDLGEDALAPAA

SEQ ID NO: 290212 - protein, 342 aa, unidentified
MEITTIGLDLAKNVFQVHAISSTGEVVVRRALRRAQVLPFFSKLPPCLVGMEACGTSHHWARELARLGHEARQMPPAYVKPYVKRGKTDAGDAEAICEAVGRPTMRFVAVKSVEQQAALALHRTRDLLVKQRTQLVNMIRGLLAEFGIEMARGLHHALELAARIASGTAPDLPELAVRIITGLAGQIGDLQVRLTALERELLAWHRKSELSQRLSTIPGVGVISATALAASVTDPGRFRSGRQFAASLGLTPLQNSSGGKERMGRISKMGDRYLRRLLVVGMTSLIRRARAKPDSVDPRIAAMLARKPARVVTVAAANRAARVAWSIMARGGSYRAPASLAA

SEQ ID NO: 290213 - protein, 460 aa, unidentified
MSKKQVSLEVVNPYAAGIDVGSRSHWVSVGQDAEDVKEFGVYTEDYEAMVIWLRKHQVSTIAMESTGTYWQNVFSHLVSQGFDVILVNGRQTKNIKGKKTDILDCQWIQKLHTLGLLSSSFLPDSTTDVIRTYSRHRHNLIKQVSSTVLKMQKYLRLMNLRLDVVVNDIVGLTGKEIITAFLSGETDGTALAKYRHYNCRKSESEIAKALQYNGRKDYFFALKQEWKTYQHLQKQIDETDKEINILLKSIIQNDEKKKVHKAKKKDYKRKNKNAIRGTDMNKIGIQYFEGIDLMAIEGVNDATVMSFISEIGLEGIKKFRTSKEFTAWLRLAPNNKISGGKVLSHHLPKGSNRLKIALRQSANVIGNLKEGHLNDFFRRINYKKGRATAVSATARKLAVIIWNMLSKGEQYKPPTEYLFLDQKRKLGIIKRISKQITKFDIKMEEIGFGNSLIINEEFLR

SEQ ID NO: 290214 - protein, 356 aa, unidentified
MVSRVVVGADVHKRTHTFVAVDDAGRKLGELTVKADTSGHDKAVRWVQREFGAEGVGVKWGIEDCRHLSARLEIDLLDAGQQVVRVPPKMMAEQRRTARTRGKSDPIDALAVARAVLREPGLPEASHDEASRELKLLVDHRDDLVAQRTQVINRFRWHLHRIDPTVDPAPKALKRAATRRQLAEFLAGRSGIDARLARELLADIDAVTGRVNALEKEIAALAVVQAPALLELPGCGALTAAKIVGETAGIARFAHEAKYAMHAGAAPIPVWSGRTKGRVRLNKSGNRQLNAALHRIAVTQIRRGGLGKTYYDKRLAAGDTKTEALRCLKRRLARVVFNTLKNNPSTTAATRLAAAA

SEQ ID NO: 290215 - protein, 347 aa, unidentified
MEHLGIDVHKKESRICILTEAGELIERRIHTEPQRFAAVLGDRPRARILIEASTDSEWVARCLEALGHEVIVADPNFAPMYATRTRKVKTDRRDARALAEACLLGAYHAAHRLSDPQRHVRGRLLVRDALVRTRTRYISLIRALLRQHGYRVPSGSAEAFLRRVLALALPGRLLSSIAPLLAVMRHLNRQLTYADAVIEQVARGDERVQRLRTVPSVGPVTAAAFVATIDDVQRFRHAHQVEAYLGLVPRELSSGESQRRGHITKAGHARMRWLLIQAAVSILRRRPPQAEALRLWALHIAARRGKHVAVVALARRLAGILYALLRDGTVFNPRPSPRPALAAALPG

SEQ ID NO: 290216 - protein, 314 aa, unidentified
MPESERAVGIDCGKDFLDVAVFPGAGWHRVANTSEGHRELVAWITERAIGVVGLEASGGYERPVRNALRAAGVSVRVFDPARVRHFAKAKGRRAKNDRLDAAVIAEFTATQTAELLLPADPAREELAGLIKARRLLVSKRADLGKGIPHAPAAAREALTNAVEHLAQEIATLDAAIAQTAKTLSSLSRTVQDLQTAPGIGPLTAVTLAVLLPELGRISGGKIAALVGVAPFDRDSGTLRGQRHIAGGRADVRRALYLATLSAATHAKGVIADFYEGLIGRGKPPKVALAACMRKLIVRLNAMVAQGANWEAKPA

SEQ ID NO: 290217 - protein, 449 aa, unidentified
MGKQKRSAVVLEPDAAGIDIGAEEIYVAVPLDRDEESTRKFNTFTRDLNALAEWLERCRVRTVAMESTGVYWIPLFQILEERGFTVYLVNAHDLKSVPGRKSDVSDCQWIQYLHSVGLLRTSFRPPDHICAVHALWRHRASLLQMAAEHTMHMQKALSQMNLQIHHVLSDITGMSGLAILDAILAGERDPAELAKLCHVRVRSPRETVARALEGDYRPEHLFTLRQSLDGYRFHQKLISDLDCEIARLMQTLPSAAENLAPPMTRTKRTAYRRQGNDPSFDLRGELYRIAGVDLTDIPGVSTVTAQVILTEVGPDVSRFRHASAFASWLGLCPEKRVSGGKVLSCRTRRVAHRAATALRLGAHALSRAKGYFGEFFRRMRSKLGTASAITATAHKIARVIYHVLLTKEPYSETVFYQCEEQSRERAQLRLRRYAHQLGFQLMPIASSDC

SEQ ID NO: 290218 - protein, 342 aa, unidentified
MDYFAGLDVSVKDTSVCIVDDAGRIRREVKVGSEPDALLAVLRNPAYRFKRIGLEAGPLSQWLFSALAEADLSVICVETRHMRAVLKAQINKTDRNDARGIAQMMRVGLYRPVHVKTLRSQKLRMLLTHRKLLQAKAIAVENDLRATLRNFGLKVGMVGTIKFEARVKDLVDNFPDLATLVQPLLVVRRVLREQISILHRRVLAVVRDDEVCRRLMTVPGVGPVVALTYRATVDVPARFRKSKSVGAVFGLTPARDQSGERDRPGAISRCGDEMMRTTLYEAAQVMLLRSAKWSWLKAWAMKIARHRGMKKAIVALARRLAVIMHRIWTDGTEFRWTREAAA

SEQ ID NO: 290219 - protein, 391 aa, unidentified
MDRVWAGIDAGKEFHWARVLDASGAEVFSRRVENDEADLSKLIDEVLSIAEDVVWATDQPGGSAALLLALLWEQDQRVLYIPGLAVDRARDAYRGESKTDARDAHVIADQARMRSDLGGLTASEGDLAELQLLLARRRDLVADRTRSVTRLRETLLALFPALERVLDLNRRGALTLVAHYQTPAAIRRMGRKRLASFLRNRGVKGADTLAEKALAAARAQSATLPAEGVAARIVVELAGEALDLKEGVEALDGELRQRFFARPEAKILTSLPGMGPILGAEFLVETGDLSAFESADRLAAYAGLVPAAHDSGKRVGNDRRMRGGNKVLKRVFYQSAFASLRSAPESRAFYDRKRREGKRHTQALIALARRRVNVVWAMLRDGTTFEARSAA

SEQ ID NO: 290220 - protein, 335 aa, unidentified
MELNYFIGCDVSKNELDFAVMQGKQFLYHEEIANEPGAIQSFLSKLKKLPEFNLATVVFCMEHTGIYNNHLLICLHKKKANICLEAATQIKNSLGNIRGKNDKVDAKRIAEYAYKNREEIKLWQPKREVLQHLSQLAGTRTRLISARKMLKTAINENNGFVKKSIAGQQEQFCARTLNSIDADLEKVENQMQHIIDNDAELKRLFGLITSINGIGKVTATQIIITTNEFKDIDDPKKFACYAGVAPFTKESGLFKGKARVSHMANKTVKTLLHMSAISAISCNEDLKAYYERKVSGENKNKMLVINAVRNKLILRIFACVNQNRKYEKNYKKLVA

SEQ ID NO: 290221 - protein, 418 aa, unidentified
MRSIKTKKVTKINDKTVIATLDIGKNVQYGYFRAPNGNDVEPFAFYNSKKSFNTFWQKLCQFKDKEGLEQIVIGFESTGPYAEPLFHFLMKKPVRLVQVNPVHTKRVKELTGNSPNKTDKKDPRVIADVISLGHALTLVVPEGPAAQLRRLTQARQRAIKTRTSMINQLQHLIFVIFPEFLNVLKISTKTARYFIKHYTTPERIFVLGLDSVGQVLKKISRGKLGQDRAKQLYEAAKNSIGISEGQQSIVFEIEHLIGRIEAEDQFIDSLEKQMRVYLQQIAYSQNILSIKGLGQVTVAGLIGEVADFNKFDTISEIMKLAGLDLYEISSGNRRGQRRISKRGRPLMRKLLFFAAINAVKSKGIMHEKYQQMLNRGMLKMKALIAISRKLLGLIFAIVRDNTKYLENYSDNYHYKLAA

SEQ ID NO: 290222 - protein, 418 aa, unidentified
MNVKTRRTKKQVNVENQAIKLLAKEELGRKIEVIKKELRSYTWRDLETNGKFAKNDKLSFITDDMLIAGCDIGSETHYIRAIDVRGRELSSGAFEFSNTSEGFANAKAWVLALAAKNDKKQIVLGLEPTGHYWFALAAWMISNGISVVRVNPYAVKQSKEIEDNSQLKDDRKDPKLIANLVKDGNYGMPYLPEKVYADMRRLSMFRDQLTEDRIRNINRLHRELKIYFPEHMDAFGKIDGAFTLEVLKVSAIPSDITALGAEGIKNIWHNEKLRGRGYSRANEIVSYAEKSVGLTDGIDAGREAVKWYAEQILKLVACSSGKHKGQTKISHRGRKRLRYWLFQAAKSAVSHADEFKQLHEYYTTRTNNPLKKMQSLVVIACKILRVIYTILKTGTTYDPQKLLEDIKRPTASHAPMAA

SEQ ID NO: 290223 - protein, 403 aa, unidentified
MKRRRDRVCGADVHKDLIVATITGDDVPTIRENFGTTKAELKRFHNWLVANKCEQVAFEATGVYWMPIYDALSQNIDTIVANPLQIKTIPNDKSDSKDSNRIATLCLNGQIKRSRVFTDEDRDLRMMTRARSGYVKTRTQFRNRIHKYLSSSGVKLSSTMDDIFCKSGRYILDCLAKEKPLEETLKGIPSGKIRKKQDLIRSALENGLNDTNRMLLIDALEILDNLESKMEKLSLEVLKGVQQKSKDLAIVMSIPGIGFTSASVILSEIGNYRDFKTPNQIAKWCGLNPGENESAGKKKKCGITKKGSKHIRVILVQAAQTISNMNKTALSRFFKRLIKKKEHNVAIIAVARKLICLIYHLLINQELYQEDECRKSRSSQDKSCQTRAANHQKPRSKSSGSIF

SEQ ID NO: 290224 - protein, 418 aa, unidentified
MEVEHDEQEIIQRVAALDIGKAELVCCVRVPGPGRRRMQEVRTFLTMTRSLLVLSDWLRSLGVTRVVMEATSDYWRPPFYLLEDSFETWLVNAGDVKHLPGRPKTDRLDAVWLCKVAERQMLQPSFVPPPPIRVLRDLTRYRVDLVTARTAEKQRVEKLLEDAQIKLSVVVSDIFGVSGREMMAALIAGERDSRVLAEMARGRMRSKTTRLVEAFIGRFSDHHGFLLTTMLARIDALSADIDAVQHRTEQELAPFASAVARLDEIPGIGATAAAVIIAEIGVDMTRFPTPAHLSSWAKFAPGVKESAGHKKGNGATGHGNRYLARVLGDAAVNAGRTDTFLGERYRRIARRRGKKRAIVAVGRSILVIAWHLLSDDNAQFRDLGPGYYDSRVNLNRKMRNHVRELQALGYKVTLEAAA

SEQ ID NO: 290225 - protein, 415 aa, unidentified
MALKIVYQICCGIDVHKTFVVACIASTNKQGVTTYKRHRFSTFTQGLKELLQWLLDNHCKDVCMESTGKYWIPIYNVLEKDCNIVLAHPKYVKAIRGKKTDKKDAKWIADLFKHDLVAGSFMPPADIRQLRDLMRYRFKLTCFMSSEKNRLQNCLTVSNIQLASVVSDTFGKSSQRILDKILENPDDTSFDIEPLIHGSMKKKLPELELAIDGFITPEQAGKLKVIKKHFEDLESRKAELEKLILALASPYQQELDLILTAPSFKNKFTAIGIISEIGVNMEAFPSAKHLCSWAGLTPTNNESAGKKKSVRVSKAGCYIKPLLVQCANTAIKSKQHPEIRNRYLRIKKRRGHKKAIIAIARMLLTALYHMLKNSENYNSDLYKKSDVLPTTREITVEQAILMAQFQGYRIKSATE

SEQ ID NO: 290226 - protein, 394 aa, unidentified
MRFAGIDIAAETHVVAVMDAAGAVLVKPTPFTEDAEGYARLLDRLGPPSELLVVMEATGHYWKNLFVTLAAHGVAVALINPLRTHRFAGEDLARTKTDAIDALGLARFGAQKRPAATRLPDAATEELRELVRLRDRLVQDFGDHVRQLHRLVDLGFPEFTRYVKGLDSELATALLQDYPTAQAFQGVSVTRLARLRYDGRHQVGAELAQALISAAARSVGQHHAEAYRVQVRYACEDLGVLRRRLRTLEGDIERTLNDHEVGSLLTTIDGIGPQTAARLVAELGDPARFRSAAALAAFVGVVPALRQSGKRTGTRAGLTAIGHGPLRAKLWMPTLTAVRKNPWLRAYYERLRARGKLPKVALVAAMRKLLIAVYTVAKHRRPFISTPVAAESRP

SEQ ID NO: 290227 - protein, 336 aa, unidentified
MARGVRTAAAHADGFDVLVRWARGLGSERVWAIEDCRHVSGRLERFLVARGERVVRVAPKLMAGAREGARTRGKSDPIDALAVARAAVREGVGTLPTAWLDERALELRLLVDHREDLVGTRTRDQARLRWHLHDLDPTFTVPPRALDRAVWWQRVRARLEQEPTGVRVQIALELLEQIRGQTASIRALEAELARRVHAYAPRLLAERGCGPLTAAKLIGEIAGIERFATDAKLARNAGSAPIPASSGNRTRHRLDRGGNRQLNCALHRLAVNKGLWDPDTAAYLARRQADGKTRKEALRCLKRHLARRVWKLLRTPAPSHTPSITIHCNMPTHALT

SEQ ID NO: 290228 - protein, 448 aa, unidentified
MSKIKTKTGKVKRISQLTVINPKVAGIDVSDSEMMVAFPIDSEQVEVRPFGTFTRDLEDIAKCFREFGITSVAMESTGVYWVPLFLLLKDQGFEVLLVNAKHVKNVTGRKDDESDAEWIQKLHSCGLLRGSFQPDNLIHTLRSMVRHRANLVRTSSTYLNRVQKALELMNIKLHTIISDIDGKTGRLIIEAILAGERNPEVLADMRDRGIKASREDIIKSLEGHWTTEHLFELDQCWDLYSYHGQKITKCDSMIEKQLIGIIASENEGVVPDVPHVKRKKSGKKKIPFNLTADLKEISGVDVTEVCGISELSALTILSEVGTDLTKWKTEHHFTSWLGLAPNTKISGGQVISSKIAKKKHYAGQAFRVAANSLYKSKSPLGDFYRRIRANAGAPKAVVATARKLAIIYYKMLQNQEAFNPRALIDFQKKHNEKKISKLKKIIAKLEAA

SEQ ID NO: 290229 - protein, 363 aa, unidentified
MTTNNETQGKAERASVETGVILKVGLDVHAEKIAVCVQVDGATPQPAQLVLREGLLAWLARLRAKYADAKVVSCYEAGPLGYALHRELLAAGIINYVVAPQRLDDRGKRQKTDRLDARALLERLDRFERGNRHALAIIRVPTPAQEQARARVRLREQLAKTRRQHEARGRSALLAQGIRVNGPWWRPARWAKTAAELPAWLRELVSVWQQLAVTADEQERAVRAELEAAAPKALPRGVGALTWSILAREILDWSRFQNRRQVASYTGLCPGIHQSGGKSHEGSINRCGNRAIRRALLELVWRLVRWQPQYPPVRALALGALSARQRRKHAVAAARHLAIDLWRLATGQCTPAQLHLDAAFAPV

SEQ ID NO: 290230 - protein, 355 aa, unidentified
MERYIGMDVHAASCTLAVISEKGRRLRDFPVETNGQALVEAVRMIPGHKHLVFEEGLQSAWLYETLNPHVDEIVVAGVTESRGPKSDKRDAYGLAEKLRVANLDKIIFKSPRQFTRLRELSRIHITLVRDSVRVKARIKSLYRSRGILVSGENVYGVRLRKGWQKQLCSRAQTRATRLYDHLDFLLEQKKQAEVDLLREGKNHSIVRILETAPGFGSIRAARLVPIVVTPHRFRTKRQFWSYCGLGIVTRSSSDWIQTADGGWIKARVPQTRGLSRQFNHVLKSIFKGAATTVITQSNKDPIYARYERLLDGGTKPTLAKLSLARMIAATVLRMWKDEEEYDPGRAGPPMETREG

SEQ ID NO: 290231 - protein, 316 aa, unidentified
MTTTAVVVGVDVAKDRLDVAVRPSGEVWSEANDETGITTLVERLRPPRPALIVCEATGGFERAAIAALAAAGFPVVVANPRQVRDFARATGQLAKTDQLDAAILALFAERVRPTPRPLPDAAVQLLDAVLTRRRQLLEMLVAEKNRLGFAPKPLHRGIQAHIRWLERQLDDVTKELAGLIEASPVWRAKDDLLQSVPGVGPIVSSTLLGELPELGTLSHKQIAALVGVAPLARDSGTLRGKRQVWGGRASVRTALFMAAMCGRRWNPTLKVFYERLKAAGKPTKVALIACARKLLTILNAMVRDQSRWMSNVQYSC

SEQ ID NO: 290232 - protein, 350 aa, unidentified
MRRPKEKLIAGLDLHSNNVMIGIINQDGKRVAHRKLECDLAAIIEFLKPLKPQLLSMAVESTFNWYWLVDGLRAAGYPIDLANPARIEQYRGLKHANDLDDAYHIADLQRLNILPQAHVYDPALRPVRDLLRRRTNLVQERTAMLLSFKSLYARTTGQSLNLNDVKKMDPKEAPKLYEHPANQLIAQVQAEHMQALEQSIKRIEKAVEGCAHELPIYEKLLTIPGIGRILGMTITMEVGDIKRFKTDGDFASYCRMVDARHLSNGKQKAENNQKCGNKYLAWAFVEAANFSRRYNENCRRWYDRKAAKTSKVLATKALGCKLAKAAWHIMAKQCGYDEKRMFPELAMKTK

SEQ ID NO: 290233 - protein, 349 aa, unidentified
MVADELDYVVGVDTHRDEHTLALVEATTGAVLAQQTVAASAGGYAQALRFAQQQAEGVRLWAVEGAGHYGAGLARYLSERGETVLEAGRSSRSERRLRGKDDQLDAVRAARAALASEPLARPRSGERREALRLLLVARRSAVEVRREALVQLRSVIVTAPDRLREELRGLPVRRLLERCSNLRRSNSARADQRATRLVLRSLARRIEAVTLEAAELEGEILAQVRALAPQLLEEPGVGPIVAAQLLVAWSHPGRVRSEAAFARLAGVAPVPASSGQTRRQRLSRGGDRQLNRALHTVILHRRQHDPQTRDYIARRIAEGKSRREATRLLKRYLARHLYRLLQNQEPLMA

SEQ ID NO: 290234 - protein, 343 aa, unidentified
MENLFIGIDYSKKSFDVSAYISSEKSKEEKMKLHLLGHQNFSNDETGYIQMLSWLGTLTSLSPKHWLFCGEDSGLYSYSISHYLYIKGFSIWLENPLHMKRSMGLVRGKSDKKDSGLIALYSYRFRDRRVDFVPKQDTIQRLQDLEAYRHRLIKAKKLLGDSSKELNLYEQTRDTAVLVYEKSMELVEQIESQLKEVEVQIQQVLKSDKEVYDNYERITSVKGISWKTAVVLLIYSHNFTRFETARQFACYAGVAPFEYSSGTSVKGGTHTSRLANMRVKSLLGMAAMSAKRFNKDIAEYYNSKTSDVLAHRVIMNNISNKLIHICFALVRHQTMYQYTYKLV

SEQ ID NO: 290235 - protein, 422 aa, unidentified
MLGVGIDWAEEFHDIALGTPESGVVEQVRIQHGPAGVARLVERCLALEPDPAEVRVVLETRHGLLVEALLDAGFTVVPVNPDLVARRRGPARKKDDAEDARICCLLALDRHASLKQLIPHGELGTELRAIARDDERAARDQRRLLNRLRADLITTYPAALVLAGNELGSVTVLRLLERWPTQEELAAATREELVGFARAGRHGWPETFADKVAAALATPSLPTRAALARAKAAGIRLAAVQLLALHQARRGWERRMAEILLGAPRTGRDHTAKDPDPGNAFPGGDIYLSFPGLGDRLAARVAAEIGEHIGQFDTPNALQCYAGQAPVTRRSGKSDFVVARRLAHNRYLGDAVHQWAFCSLSRSAWARQFYDTKIAAGKSHNAALRALGNRWLEVLWHCLTRGVHYDEATHQANRQRALHTAA

SEQ ID NO: 290236 - protein, 347 aa, unidentified
MKILALDLGKYKTVACDYERETGEHRFKTTCTTPAALEQLVKEVKPDRVVIEVCNIAGWVCDRVRGMGVEVQVANTNDDAWRWRKVKKKNDRRDALKAAQLSAVNQIKEVHIPQIEVRQWRALIAFRQQLVRRRGRIKNHIRDLLVSEGQLLPRGGSCWTQLGIARLEALARPLSEVSMSELWRGQLAIELRQLREVQQEIAAAEEKLDAIAAADPRIKLLRTIPGVGPRLSEAIVALLDRPERFHKASEVSAYIGMVPKEMDSGETVRRGPITKQGSRLVRSLLVEVAWAGLRHNPWVRQTYQRISGGKKSRQKIAIVAVGRRLLVRCWAMLRDGSSWRTPLSVAT

SEQ ID NO: 290237 - protein, 427 aa, unidentified
MPYQIAGIDVHKKMLAVAVADIEVGSDFHFERLKVGTSPVQLRALAEWLVEREVEEVVMESTAQYWRPVWEALERYWKPTRRTRPDANPLSGTLHLAQAQSNRGAGGRKRDFPDAERLVKRLVAQELTLSFVPDTEQRLWRTVMRRKYQITRSRVQLHNRLESLLEEAHIKISSVVSDLLGTSARRMLNAVGDGETDPAMLAALADSRLRATPDQLRDAFGACADLHPVYRQLVKLTLDELRVIEDHLAQLDQQMAQLLAHHHDAVQRLAEVPGLGVDSAQQIIAEVGASAAAFPSEKQLASWMGACPGNEESAGVNYSHRCPKGNRQMRRVLNQAANAAVKAKGTIFAIVYRRLVPRLGHAQAIGAIAHRLCRLIWKILHQGVRYEEHGPAVSEEAKKVRARKMIRELRSLGYHIELLPAPSSKPA

SEQ ID NO: 290238 - protein, 353 aa, unidentified
MIHVGMDLHRNNSMVVAISDKTGELFAARRIDNDRPDELWQYLDQFESEPIRVVLEATGNSRWMYRLLKSRSNVEPVVVVPQKVRIIAETVSKSDRVDAEALAFLSTMNALPRSWVPDGDVEELRELTRHRAALVRRRTQTKNSISGILTRCGLRRPYDDMYGVRGLAWLREVELPGHMRYQVDAWLDALEHTESQIQKVEGILYGRLARSDRWKEDVELLMTMPGVGKLTALTILAELGDYHRFRRRSQVASFAGLIPKSKRSNETVRYGRITRRGPAALRTILIEVSLHAVRQSVRYRPLYEKFRAQKRCNAGKAAVARKMIEDAWTMLRKRQAFHEPIVATYTRQPARAG

SEQ ID NO: 290239 - protein, 354 aa, unidentified
MKYFAGLDVSLEETAICVVDEVGRMIKEARAASEPDALHVTLASFNLSFERVGLEACSLTAWLHGELRSAGWPAICIESRHAKAAMGAMPNKTDRNDAHAIAQIMRTGWFKAVHVKTPICRSWRSLLVARRAVLNEMRTIENVVRAILRETGLKLGTPARKDFIVRARELIAGEQTLASMIEPLLEILGTMLREFARLTKQVLTIVRDEPICRRLMSAPGVGPLTALAFRATIDRPERFRKSRDVGAHLGLTPRRYQSGETDIQGHVSRCGDELVRTALYEAAHSLLIRSKKWSSLRAWGMKIAKHRGMARARVAVARKLATILHRMWIDNAEFRFGQEHNIAPTVKAIAGAAA

SEQ ID NO: 290240 - protein, 404 aa, unidentified
MNDSMIGYAGVDWAMDGHAVCVVNGHGTAVIEFDVEHSAEGLSEMCRRIAGTGARRVAIERPDGPVVDALLGAGLEVVVVSSRSVKALRERYGTSGNKSDRSDAFVLADCLRTDGHRWRSLEPDSPATVTLRGHVRARKDLVETRVAVANQLRAHLRIVFPGAVGLFSAIDRPIMLRFLERFPSATSAGWLSEKRLATWLRANSYSGSKDPAELYTRLSAAPAGVIGVDGDARGAITLAYVNVLKTLRTQIDELNTRLDELLDAHPDAPIFRSLPRCATVRAATLLAEIGDCRARFPDPESLCCLAGVAPSTRASGRHRVVTFRFSSDTKLRAAICDFAGDSWRGNEWAAHRYHELRASGKTHPHAERILARSWTHIIWRCWQDNTTYDPTRHGAYQRLLNNAA

SEQ ID NO: 290241 - protein, 410 aa, unidentified
MQVLYPRCCALDVHKETVVACLRLVIDNKVVKEVRTFETTTASLMALSDWLAENRCTHVAMEATGVYWKPVWHILADGDFQLILANAAHVKNVPGRKTDVSDAEWLADLLAHGLIRASFVPDMPTQELRALLRTRKQLVREHTSHVQRIQKTLEDANIKLDSVISDIMGKSGRAMLKALIAGERDPDRLARLADARLKASSAQLREALRGRVTKNHRFLLRLHLRQIDALDAAIAAIDRQVEADIAPFRVAAEQVSSVPGIKALSARVILSEIGIDMSRFPTDAHLVSWACICPRSDESAGKRRSNRIRKGSRWLKATLVQCAWAAVKKKDSYFRAQYHRIRMRRGAKKAIVAVAASMLTAIYHMLKNGTLYEDLGYNHFDRHGKERQKNRLIKRLTDLGYAVQVASAPA

SEQ ID NO: 290242 - protein, 398 aa, unidentified
MTESSDYESVQVFIGVDVGKDTHHAVAINRSGKRLFDKALPNDENKLRSLISDLKQHGQILLVVDQPATIGALPVAVARSEGVLVGYLPGLAMRRIADLHAGEAKTDARDAAIIAEAARTLPHALRTLKLADEQIAELSMLCGFDDDLAAQTTQASNRIRGLLTQIRPALERVLGPRLDHPAVLDLLQRYPSPEKLASLGEKKLAAQLCKLAPRLGKRLAADIAQALAEQTVVVSGTNAAAVVLPRLALQLITLRKQRDEVALEVEQRVLAHPLYPVLTSMPGVGVRTAARLLTEVACRAFASAAHLAAYAGLAPVTRRSGSSIRGEHPSRRGNKALKRALFLSAFAALRDPLSRAYYTRKMSQGKRHNQALIALARRRCDVLFAMMRDGTFYTPQAS

SEQ ID NO: 290243 - protein, 346 aa, unidentified
MNIYIGLDVSLASTAVCVLSSHGKVVKEITALSEPDDLERVLRSLLGTVVAVGLEAGPLSQWLYRHLTEAGFDTVLMETRQVKGALKAMPIKTDRRDAEGIARLLHMGWFRPVHCKSISAQEMRALLSSRKAILQAIVALELSIRGVLRNFGLKMGRIAKGGLEDRVLELADGNVMLQAAARPVLSARAALRLELAGLEKRVRDHAKSDPVCRQFMTMPGVGPIVALTVKSAIDDPERFRSSKDVGPWVGLTPRREQSGERDIMGSISRAGDAGLRTALYQAAMVMLHKGRPNWLTAWAWNVAKRRGKKRATVALARRVGVVLHRMWLDGSTFRFTQAEAAAVSGA

SEQ ID NO: 290244 - protein, 310 aa, unidentified
MDVIAVGIDVSKDHLDVAVRPTGDAFAVERNGSGLEQLVARLGQIAPSIVALEATGGFETVAAAALAGAGLPVVIVNPAQIRAFAKALGQRAKTDPIDAAVIAHFAEATRPPIRPLLDEATRLLADLVARRRQIIDMIGAERQRETRIALPRLKKSIARVVKMLEKELAEIDDDIDDAVRGSPAWREKEDLLASVPGIGPTIARTLIAELPELGQLGRKQIASLAGLAPFTRQSGQWRGRSFIGGGRKAVRTALFMGAMVAKRHNPILRAFFDRLISAGKPKMVALIAVARKLLTILNAILRDKSSWQNP

SEQ ID NO: 290245 - protein, 408 aa, unidentified
MRRRQTRPGPEYKPPFSGGIDLGKTLPQASIVDAEGTPCMAQVVALAHTREGYARLFTLLAEATGQAAPTEVTVGCEATGPYWLSAQGSQVLVLNPVYVKARRGTTLRGTKTDPVDARLMAGLLQREPVPASHVSAAEGQGLRDLLRLRADLVAQIGDVKRRIISILARTCPEFATGFTDVCGQAARTLLETWTLPEELAAVPTARRAAGLARLSHGHCGAEKAQAVRAAAQQSIGVQRGADALAFARRLLWRQIREVECLVAAWDQEISRRYTTLDQYLRTVPGLGAATASAISAEIGRIQRFTDSDQLVAWAGVAPQLHESGHTAGQTKMSKRGSPYLRRAVWQAALTAGRFDPMFRAIYDRQRQRGTHHLVALSPAANQRMRVISAVLKGQRPYEPNYHLQTSKT

SEQ ID NO: 290246 - protein, 452 aa, unidentified
MAQGSGLTRGDRNRNRKIAALREVIRRDRAVLAVDLGEDKQAAVLVDHEGRVLARKTVRAKAHQLGGLVEWAAGQAARAGFGGLVVACEPTGHRWKALMGLADAAGAGFCCVQPLAVHKEREKDDYTRDKTDHRDAYLIGKLAVRLDCYLPERADQAWARLRHLGARRSALVADLIAGRQQIGDLLGCAWPAALGTAARPLESTTWLAAMGVVTDRCCGDPARLRKTGYDKFAAAIRRELPRWGAKRACGKIAEGLWEALADPGGVAAQRRGALERVHLLLADWRSLLAALADTEGRMRAVLDELGLTALAASIDGMSAVGAAVILAETGDPSRFASGRAVVKHAGLNPAENTSATLAGATRISRRGRPGLRTAAWRAAWPGLRHNPVLRARYAHLTGRDGNRLSDGQARAACAAALLRWLYAVITRRRPWDARIAAGTIPARGAVTAPAAG

SEQ ID NO: 290247 - protein, 363 aa, unidentified
MRIIGCDLHTRQETMAMLDTETGEVVEKTLQHEGEKVREFYSALPRPVQVGIEATGSMLWFLNLMEELGIDSQVGHPAKIRAAEPRKQKHDRRDEDLLLKLLMENRFPSIWMPSKELRDLRALLWHRHHWVRTRTRVQNALQAMALTNGLRRGKSLWSQEGQHAIASLPLGPHAAHRRTALQALYRELDADINALDKRVLEQALERPEARRLMTHPGVGPVTALATDVFLGDPVRFEDAKALASYVGMIPSEYSSAGRQRLGGLSKQGNPLLRFLWCEAAIHAVRRDPLLQRFYRRKLVQKGMGKARVPSLANWESGSTSCCAIRLIMKSSVVVARCDRRTVRLVRGYLKWAMVLHYSDRQID

SEQ ID NO: 290248 - protein, 403 aa, unidentified
MATPDEVDVWIGLDVGKEEHYATVLDDHGDKLVARSVGNDEADLEALIDAGDKHGKPALVIDQPGSIAQLALAVAQRRGIPVAYVPGLVMRRAADLYPGEAKTDPIDSYVLADTARTRRKQVQWLSVTDEILEQLQILNGFDIDLAADVTRVASRLRDALTSISPALERAVGSRLSHGGIRVLLAKYPTPTALRKGGKTRVAKLVKTRSPRLANKVADAVFSALDAQTVTVPAEATIGRIIAELSAELDRLHERRETLAKEIEEVFLSHPLGPVLVSLPGIGTRTGARILAEIGDGSRFDSGAKLASYAGLAPVLRQSGSSLKSVSRSRRGNHRLKNALFLAAFAAIRTGESKVFYDRKRAEGKRHNAAVICLARRRCDVILAMLRNGEAYLDSTAEEIDKAA

SEQ ID NO: 290249 - protein, 387 aa, unidentified
MPQPNDLGRSLVALDQDSTLIAVIEMGQASWLIAAIVPGLNRHPLKKIAADEEQLLQVLRRWKKEAETAGRMIKRTAVAYEAGRDGFWLARWLGARGIEAYVIHPSSVPVSREHRRAKTDRLDTELLKRAFLGWLRGEPDHCSMAAIPTLTEEDAKRPGRERESLVSERTRIVNRIKGALARLGIRNFRPMLRNASQRLETVRTPEGVALPPNTLAELRRDMARLSFIKQQIKEVETARLERLQRAPGEGANAMVQLLTRVVGVGVETADMLVHEVFSRNLRDRKAVARYAGLTGAPDESGKRRGERGLAKSGNARVRRGMLQIAWGFLVHQKDSALAAWYRTRTADARGTTRKTMIVALARKLLIALWRLATTGEVPSGLVLRAAA

SEQ ID NO: 290250 - protein, 366 aa, unidentified
MRKLSTRRVIGSNILKGYQLTIGLDLGDRWSFYCMLNKLGEVVREEKLPTTPEAMKRTFEKFPASRIVLETGTHSPWISRMLTEQGHEVIVAHAQKVQLITKSSRKDDRHDARTLARLGRIDPELLGPVRHRSAQAQIHLTVIRARAELVSARTALINAARGLAKSYGERLPKRGTQQVGRELAAALSTALREVLEPLLQGVESLNERIREYDQQIEQIAKDVYPEVTLLKQVKGVGTQIALTYRLTIDDPHRFPKSREVGCFLGLRPGRRNSGQSEPQKNISKEGDRYLRTMLVQGAHYILGPFGEDSDLRRWGLKLAERGGKNAKKRAVVAVARKLAILLHHLWVSGEVYEPLRNTNRAMRVAA

SEQ ID NO: 290251 - protein, 474 aa, unidentified
MNTNSTQTSKSIFSEKYFCGIDLASKVIQVSVTKPGEGSFDKALSKDEFTKFIKANNPEDYIYGMEACGDSNYWAELINTLCNDKAFIFPAKKCRSYNHGCKDDRGDARGVRDLLLTYFLSPDASTIHPCVIRDRQNRADMALLKSYGDNQSDITRNVRRLIAFLKEQDATLCYSYSMSPESTIKAATEYIKKLNKEEAQNNSFLISDIQTQSAIIAMLLKRRSNILMGFLKYFESHSECQYFMAIPGVGLLLAVGTHIITQGDFTRFKNARSFAAYTGFTPAHSGTGGKNKIAHMSDNGNPVLKALIYEGANACTIIQKYKNKKDKRVKIRYGRQIAIDLWKIGINLKNPDIKEIVSHYDAELASKITEKNTSTKLCKFKSKCNKANKTFERLSSTPAVTSWCQNNLLEQHKQDSALSPYLAEFKNKNQLIDLSDPEGPFRRQSATLVAYLVEHNEVQELEINDLERLDFGEW

SEQ ID NO: 290252 - protein, 342 aa, unidentified
METAVTIGLDLGKSVFQVHGVDAGGTVVVQRRLTRSRLLQFFAKQAPCLVGMEACAAAHHWGRELQKLGHRVRLMPPSYVKPYVKRQKNDAADAEAICEAVTRPTMRFVEIKTCEQQGTLVLHRVRLMLMRQRVQLSNAIRGHMAEYGLVAPVGRNGLQRLIAILGNPDDERVPEVARASLAPLVSQFGLVNGQVLENDRRVRASARSTELGCRLMEVPGVGPVLASAMVATVPNPTVFKSGRNLAAWIGLVPRQNSSGGKEKLGGITKQGDRYLRQLLVAGALAVIRYAQRHGTKRPWLVHLLARRTPKIAAVALANKMARMIWAMMMTGERYREPMVAAA

SEQ ID NO: 290253 - protein, 399 aa, unidentified
MKRPAGIDVHKDFLEVAFRELSGRVKVLRIEYTPRGLNKLIKLLRRCGITDAYMESTGDYYLPLYYALKGAGIKPHVMNAYKIRRPEANKTDERDAVWLLEVGESDLFSDSYVPDEDIQALRFLVRKRIKLVDRISDIKREINNILWRLGLQASQFAKKLRSKKKRKLLLDLLEGRLGPDSISDGDVRALYDVLSKSEFRAYIFVLKSRLAELAYLESQLEEFDREIEALAGRFEGVIRILMSVPGISFVLSVGILSEIGDIGRFPSPGHLASYAGLIPTAKNSGGRKRAGRPSKKTNKYLRRYMFLAGMAAVRGRSCVVREFFQRLLSRGKHYKVAVVAVARKLLCVVWYLLCRGEFWREDGYFKGLRRPSRRRRVRISVREAIAILVRAGYVVRKRA

SEQ ID NO: 290254 - protein, 337 aa, unidentified
MPLVQPTQPPVVLVAIDIAKLRHDVLIEAPGWKSRKRLILPNTAAEFRLFADYLHGLKHPVRVVFEATGNYHRPLAHFLMAEGFHLELIASLAVARTREAMHNSWDKNDPKDAQVLLHLLKTGVTQHYHDPLANHIHDLQELSLTYAQISLEKTRTQHRLLTHYLPLYFPEIERHYHASRSEWLLSFLQVFPTPAMIARLSMKDFVQQAWPVVGRKVGKQRLLEDIYRTAQSSIGIPVQEDSEAVAMFRVVLGEMIRLCQLRDQLEQRAALHLKDNDDFQRLQQIPGIGPILALTILAEAGDLRRFSHHRQFLKFCGLDLSPDREQLSGQVRTISPA

SEQ ID NO: 290255 - protein, 347 aa, unidentified
MKHYAGIDVSLNSSSVCVVDESGTIVRETKVASEPVALINWFKSLCTRMERIGLEAGPLSQWLYGALRESGLPVELLETRHVKAALSAMPVKTDRNDARGLAQLMRLGWFRPVHCKSIAAQEVRALLTARKLVQSKLYDIEMSLRGILRGFGLKVGPTTSRSFAARINHLVAGQASLETVAQALLSVHAAALREFKILEKQVRQIGRADERVRLLMSAPGVGPLVALTYVSAIDDPKRFTSSKAVGAHFGLTPKKYQSGETDITGRISKIGDSTVRAVLYEAAHIILTRPIHGGALKSWAMRLAKRAGMKKAKVALARKLAVVLHRMWVSASTFDFEKANGCMRAAA

SEQ ID NO: 290256 - protein, 412 aa, unidentified
MSDDTVSWFAAVDWGSEQHQACILDAAGKTKGERAFPHGGAGLAALCDWLVSVAGDPGMVAVAIEVPHGPVVDALLDRGFAVHAINPKQLDRLRDRFSVAGAKDDRRDARVAAAGLRTDPQLFRPVQAGDPAIIELREWSRLAEELQQERVRLGNRIRQQLWRYYPQRLELADDVAAEWVLALWTMAPTPAKAARLREATLARLLKQHRIRRIDAEAALDILRQPAITVAPGVTEAAVLHLQSLIARLRLANCEFHQAERKLGELCAALTQAEPAQDGGPSDAAILASLPGVGRSTLATLLTEAGRPLARRDDAALRTLTGVAPVTKRSGKTCIVVMRRAAQARLRQAVFHWARIAVQHDAKSRSRYDALRARGHTYGRALRGVADRLLGVACILLQRQMLFDPAHGTTVGP

SEQ ID NO: 290257 - protein, 513 aa, unidentified
MGRVEAMPCSKPGKSLSRLQISLYIKLEVGQTIKGDIEKIYLVCYPVLEKKETSCKEIVWGHTTQNYLDRRFPMNQEDRNRLEDFRQFRREVRGSSEYLLVGLDVAKDKHHAFFGTATGKTVFRRLVFENNLEGFRKLLAQTEAMKVREGLKKVVFGMEPTGNYHKPLGEHLIRCGHGVVLVSGVAAHENRKTLDGRWDTNDTRDAANVADLVSQGKCLFYEFPVGALQDLRNLLSLKRRLKKQEHGYRVRIRNHLLAKYFPELDRYYEQSESTALAIVRWCLDPSEVAGLEYKEFVQRVSSIRGRSSQEKRLQAIWKMAVDSVGCEAGPTVELEAQVMVEGLKQIRESIRQIEEKIHEVCSQFPEYEFLLSIPGFGRDVSSKVLGAIGDPYRFQNGRQVLKLAGFDLSAERSGKSSERAVPVLSKRGKADLRYALYQAALIASVRTPDFIVYYTEKLRGREREPGIKIKMRVKLAAKLLLIAWTLMKKKEPFHPSSFRTARQPFSAGDGRER

SEQ ID NO: 290258 - protein, 462 aa, unidentified
MARRKRKISLPSDALPPQLATANLHAAGIDVGAEEHWAAVPPCDDPQPVRRFGANTADLEAVADWLWDCGVTTVALESTGVYWIPLFELLETRGFQVLLVDPSKMPRNGRPKTDVHDCQWLQRLHTYGLLSACFRPEDQGVVLRSSLRQRATLLADAARDIQHMQKALTQMNIKLQHVVSDITGVTGLAIIRAILAGERDPTQLARLRAPRCKQDEAAIAAALQGTWRAEHLFALQQALERYAFQHRQLAACDARIASHLETVADQSHGAPLPPKRGQRRRHRNRPAFDPREPLHRMTGVDLTRIEGIDETTALIVISEIGLDMSKWPSEKHFTSWLGVSPQRRISGGKVLSSRTRPTTNRAAAALRLAAASLHHSKSALGAYFRRMKSRLGTPKAITATAHKLARLIYSMLKHGTAYVTQGLEAYEQQYRARVVKNLSRKARELGYELVKPVEATSETSLA

SEQ ID NO: 290259 - protein, 366 aa, unidentified
MKKTSTVRVNGNMIFKGHKLTIGLDLGDRWSYYCVLDEAGEILLEQKVATTPEAMKQIFEKIPRGLMAMETGTHSPWVSRLLKELGHTVLVAHAQKVQLITKSNRKDDRHDARTLARLARIDPELLGPVRHRSAKAQIHLTVIRARAELVSARTALVNAVRGLVKSYGQRLPKCGTEQVSRQLAAELSAELREVLEPLLKEIESLNERIKEYDVRMEKIARESYPHVALLKQVKGVGTQIALTYVLTLDDPHRFAKSREVGCFLGLKPGRRDSGESQPQMRISKEGDRYLRTMLVQGAHYILGPFGEDSDLRRWGLRLAERGGKNAKKRAVVAVARKLAVLLHRLWVSGEVYEPLRNSHKAMRAAA

SEQ ID NO: 290260 - protein, 341 aa, unidentified
MNHIEYFIGIDIASEDFAAAIFTTPEEPRVAQEKIPNTADGFNSFEQWLAKCKVTHGNSVFCMEATGVYGEALCYYLAAKGYRVTVEPPLKVKRAFDESGHKTDAVDSRQIAEYAYRFVDELAFWSPNDDLVEQIRVLLSSREQFTTQLVANQNSLHTLKRKPVQTPVANQAFQQAIDRLKAAIKTIDREIKRLISEDPQYGQMISLLVGIPGVGMLMAANLMVLTKGFTRQMTANQLAAYVGICPYQHTSGKSVYRRARSRQCGPSQLRKLLYLAAMSNRNHNEHYKKYFLRKVAEGKAKRLVINNIANKLLKVICAMIREQAPYITNYRSVNPTLLKSA

SEQ ID NO: 290261 - protein, 385 aa, unidentified
MTNQLQGTTFIPRDHDVFGGLDVDKKSIAVTFTDHGTMRKSLKLPYSASQLLNYTRKHFPDQRVAFVYEAGPTGFGLHDELTAASHPCLVVSPSMVPTAPGQRVKTNRLDSKKLSEGLRGGQLRSIHVPTQSYRELRHLVQLRDTQVAQLTASKCRIKSLLLYEGIPFPAANGKWSGKALRQLEALPCSGAVRFKLDRLIDALQFHFQSAAVVQKEIRHFCQNDPELRQCISFLASLPGIGSITATHALARLGDWRQISNVRQIAGFLGLVSSEHSTGDKENRGQITRIGDSRLRNKLIQCAWVAIHKDPELCAFYRRIYERQPRKVAARKAIVAVARKLTTRMYAVLKEQRPFVIRADSLIAPLTAEETAGLRVRLDAAQNDQP

SEQ ID NO: 290262 - protein, 421 aa, unidentified
MEVVHERCCGLDVHKRTVVACVLRPGEGGVVTPEPETFSTMLGELERLAGWLAERGVTHVAMEATGVYWKAVYNVLEGADRFTVLVVNPEHVKAITGRKTDRADAERLAFLLRHDLLSGSFIPAREQRELRELTRARTALVRERARVVQRLEKVLEGANIKLAAVVTELLGASGQAMLDAALQGVTDPEELAGLAKGRLRPKRDLLAQALAGRLTRPLRFLAQQHLDHWRELDARLAAFDAEIAELLRPFDHLVARLDAIPGVGRRTAEIILSEIGTTVAAFPSERHLAAWAGLSPGNRQSGGRRKAARTRHGNPWLKAALTEAAWAATRCKHGYLAAQYRRLAPRRGRKRAIVAVAHSLSTSIYFMLLHDIPFSDLGGDYFDQRDRDRREQRALATLHNLGYDVALTPRPEPPTPATEAA

SEQ ID NO: 290263 - protein, 386 aa, unidentified
MQASTVATPTAGHIGTIFVAIELSQRSWRVALHSPDKDKISHHKLEGGDHAELLALVGRVRERAARALGGVPAVASCYEAGYDGFWLHRLLLAAGITNYVFDPASIAVDQRARRVKTDRIDGERMLRTLMAYLRGEPRVVRIVRVPAAEQEDARRGSRERDRLIKEQTAHTNRIKALLRLRGMAVGNPRRRDWLSWLATQRDWQGQAVPPRMLSEIRSEHARLMLVRDRLDALAQEAAAAEPMPAEAEMTRRSELLRRLKCLGPAFATTLTSEVFYKDFRNRREVGSYFGLTPSPWRSGGIDRDQGISKAGNPRARCAAIELAWLWLRHQPDSKLTLEYRKRTLDAGKRIKRVAIVALARKLMVALWRYLTTGLVPEGAVLKAVKI

SEQ ID NO: 290264 - protein, 343 aa, unidentified
MQIHSIGIDLGKTTFHFVVLGAAGKVLMKKTFSQKQLLTFTANLQTSLIGLEACSGAHFLGRALRKQGHDVRLIPAQFVKPFVKSNKNDFVDAEAIAEAVERKNMRFVPIKTDDQLDLQAIHRVRDRLISRRTAVINQLRAFLLERGMVFAQTPAKLKAAMADILENADVDLTPQMRNLIDMLWGEWKTVEQQILELTEQLERISDEDAGCTRIRQIPGIGPIVATAIVAAIGNGAAFRKGRDFAAWLGVVPRQYSTGGKAKLLGISKRGNVYLRKVLIHGARAAVLRIKRDRAAIGPWLDRLDARAPKNVVVVAMANKLARIAWAVLSSGQDYRPSSIVSAA

SEQ ID NO: 290265 - protein, 322 aa, unidentified
MGMNWVGIDVSKQRLDVAIRPVGETLTVDNDEAGIKMLTKELARWSPQLIVLEATGGHEYAAAYGLTKAGLSVAVVNPRQVRDFARAVGKLAKTDPIDAKILAHFGEAVQPPARPVADQQLEEIGHLVTRHRQLIEMIVAEGNRRMSLRGTAQRDVDTTIRFLRDRLDKIDEQLKTLIAKHPEWKAKAELLNSVPGVGPVLISSIIAELPELGSLNRKQVAALVGVAPFNNDSGQTRGRRRIWGGRAHLRSLLYMSVVAGLRCNATIRAFYRHLLAAGKAPKVALVACMRKLLVILNAMLKSGQKWHSPTPVATEPGALVVE

SEQ ID NO: 290266 - protein, 494 aa, unidentified
MKAIAGKAKAKHSNSSKRNAKMAARGEPKGMEIVNPHAGGIDCGAEEHYVAVPPQSVEPGQPAVRCFSAFTEGLDASVEWLKACGVTTVAIESTGVYWIALCQKLEAAGIEVFLVNARHVRHVPGRKTDVKDCQWLQRLHSFGLLSASFRPEDGICRLRSLQRHRLNLIWTAGAEIQHMQKALQQMNLHLHHVVSDITGLSGLRIIDAILAGQRDAVQLAKLRDYRVCKSTVAQMEAALVGDYRPEHLFVLGQSLQAYRFYQARIQECDVQIESHLQQLAQRYESSSALAAKLPEPEVLNDAQAQNPQPAKPKVKRKPQANEPKIDLADYLRRICGVDLTQVIGLNVLSVLLIVSEIGVDMSKWRSAKAFSAWLGLCPRNKISGRKVLDTRTCKVISRVATTLRLAAQSVGRTDTALGIFYRRKKGHLGPAKATTATARKLACLVYHLLKYKEQYREPDPATYQLKVEKAILARIQKQAAVLGYKLLPTALVPA

SEQ ID NO: 290267 - protein, 396 aa, unidentified
MYSLFVGIDVSKDSFSINGIDGKENVVFSLIAAMDRSGFSECMKAISSHSEDLSHVVVAMESTGSYHMNLLSFLTSQEIHTIVVNPLLIKNFSKLSLRKTKTDKKDAHTIARFLFTQRDSLDRFFAHQYKDLKDIAREREFILKLIGSEKNDIKRMLKSTFPELERIFNVFGDVMLLFLREYPSARLIRDADPECVMKAFQHTDKRLRIYKSKDEIIKAAHNSIASSHPAIEQLLPGKIDTLLYLNKRLDEVTNMLVMWCKSAMKDDLKILTSVNGINIKTAAPFLAEMGDYRNYKTYKNFIAFSGLDPSINESGTFTGMSKLSKRGNRHLRRIIYLMTFCAIRIKGPLKTYFTKRRDEGLPFKKALFATAHKLIRILFTMLTKRTYYVSGEMITG

SEQ ID NO: 290268 - protein, 350 aa, unidentified
MIIIGVDFHPEFQQIASVDTDTGEFQEKRLTHREEAEKIYRALACAGQKVRVGMEASGHARWFERLLAELQIELLIGDAAEIRTKRVRKQKTDRQDAQLILRLLLEDRFPQIWVPSWENRDLRQLLWHRHRMVQARTRIMNQLQAVALNEGLRCKKKLWRERGREQLESFRLAPWASRRRRDLLELLDRLNPTIAELSQAIQQEVEKCPEARRLMTHPGVGPLTALAFVLIIGEADRFQCGKQVASYLGLVPLEDSSGNRRRLGHITKQGSSMLRFLLVEAAQVTARSLPQWRSKYLHLMMRRGRKTAKVAMARRLAVHLYWMMRQGWDYQQWIKFGSHAGQLGNRHGVQ

SEQ ID NO: 290269 - protein, 354 aa, unidentified
MACHGPQRRGRPPVDEYGGRQYVGVDLHRRRSVIVRMTPEGERLGPPVRIDNDPFVLAAQVASWGESPEVVLEATYGWYWAADVLAEAGAVVHLAHPLGVKGFAYRRVKNDERDAADLADLLRMGRLPEAWIAPPAVRGLREAIRHRCKLVAIRSGLKAQVHSVLAKQGVRVPVSDLFGVGGQQLLDRLRLDAAYAARVGSLRRLIDTFTFEIDVLAARTAADLRGHEGWQAIQTIPGVGPVLAAVFVAEIGDVHRFRRPEQLCSWAGMTPRHRESDTKVHRGRITKQGKHLLRWAAVEAVQRLRGGPLGSARARIAERRGTNIAKVAAARKLLTLVYYGLRDGHIRCLQPHPA

SEQ ID NO: 290270 - protein, 419 aa, unidentified
MSFKILKNNCCGLDVHKTWIFACIAITDSHRRTEYKQARFSSFTKGLQELCDWLAKYNCTDVCMESTGKYWIPVFNVLEKNNIWVTLSHPKYTKPQKGNKTDRKDAKWICDLYMCGMVKPSFIPPADIRQLRDLVRYRFKLTCMITSEKNRAHNCLTISNFKLDEVFSDIFGKSSRSITEQILQHPGETFDVAQFVDGRFKTPIEEIQAAVDGAISTEQAVKLRQCLNHIDELEKHQAEIEREIFRLSDKYEEVLNLIRTVPGFDKNPMTAIQVLSEIGGDMSVFPTAKNLVSWAGCCPRNDQSNQKIKSTRISRAGSYFKPVLVQVANALIKSKKHPEFTTRYRRIKARRGHKKAIIAICRMILTAIWHILTDLKPYTTEGFLESRPVNDSKILTTSQALNLLKQRGYVIKDDIVSVP

SEQ ID NO: 290271 - protein, 389 aa, unidentified
MSVIDRPAALAATAVENGIVAVSLELSRSKWLVTSLLPGSEKMSKHVVAAGDGAGLLALLERRRRQAEGRAGGPVRVIAIEEAGLDGFWLHRLLAANGIESHVVDAASVAVPRRRRRGKSDGIDGETLLRTLLAWRRGEPRVCSMVRPPSPREEDRRRVVRERAVLIRERIAITNRIRGLLMSQGVADYQPSRRDRRQRLETLVTGDGRALPPQIKRELSRALDRLDLLLEQIAAVEAERDAVEETAAGEAARTDDPTRLLLRLRAIGPQTAAVLTLEAFYRHFDNRRQVASFAGLSPSPWQSGAVAHDQGISKAGQPQLRKTMVELAWLWRRHQPGSALSRWFAERARGQDPRRRRALIVALARKLLVALWRYVNTGVVPEGAAFKAA

SEQ ID NO: 290272 - protein, 338 aa, unidentified
MFFIGIDPHKTSHTAAVLDAHEHLVSEVRVGADRSQRARLMAFAAGFEPRCWAIEGATGTGALLAQQLVAAGETVLDVPPALSARVRLLDNARSDKTDAHDARSAAVVALRHSNLRTVDLEDHSALLRLLAKRHHDLVAHRTRAVCRLHTVLCLLVAGGLPKGLSAARAASELRRIRPTDQVGIERRRLAGELLAEVRRADADLIELKARIAVAVAASSTTVTDVVGVGPIMAAYLIGYSGDVRRFPTAGHYARYNATAPIEASSGPNARHRLNPRGNRQLNHALHIVAVTQVRNNTPGRAYYLRKQAEGKTRKEAMRALKRRISDAVYRQLLTDTPR

SEQ ID NO: 290273 - protein, 328 aa, unidentified
MSKRSFFVGVDVGKDELWVAIDGYRPRRFVHCTSGIRLMHQWAEEAAEGSPLHFCMEATGVYSLSVAYQLYTYPDTALSVVNPAQINAYAKAQLKRTKTDQVDARVILSFAQSQRLPIWSPESKSLRQLYQLVVQADAIRADLRQWANRRHAQEYTPDVPEAVKKTQQAIVRSLTQQLAKVEEAIAILCRTDHELKEQVELLVTITGIAHLSAVKVLAYGGNALTQRNRKELTAHAGLASCHHQSGTSVRGKSHLAKQGDQRLRTALYMPTLVGIVHNPVLKQFYQHLLQMGKPKMVALVACMRKLLLIIRSMLINKKSFNPEILPLT

SEQ ID NO: 290274 - protein, 387 aa, unidentified
MKKNTRFVGLDVHKDTISVAIAEPGRQGEVKFYGTVSNTPEAIRRLVKKIGPATNLDFCYEAGPCGYVLYWLIVGLGAVCSVVAPSLIPQRAGDRVKTDRRDAEKLARLHRSGELTPVYVPDEEHEALRDLVRARETAIEDQQRARNRLSKFLLRRGINRPKGWSAWTMKHLEWVEKQRSELKYESDRNTLTDYLYEVNHQAERIKRLDQAIHEAVANGPSRVRAVVAALAGFKGVGELTAVTLVAEIGDFSRFDKAPELMSYCGVVPSEHSSGGPGKARRGRITKAGNAHLRRVLIESAHHYSRGPRISKGLAHRQRELAPEYRDISWRAQHRLHQRYRRLIAREKPSGKVIVAVARELLGFIWDVAVRAEYAHDEKNRRGRRTAA

SEQ ID NO: 290275 - protein, 344 aa, unidentified
MNYYAALDVSLRSVHLCVIDDQGEIKAETKLSSEVTDIIAYLDALDLEVSIVGLEAGTLAQYLTYGLQSAGFEVVCMEARQVKAALSAMRNKTDKNDARGIAQLLRTGWYSQVHVKSMESHRVRALLSSRKAVLSKCIDLENEIRGLFKVFGIKLPPKLGHGSFDIAVRDVIETDTTLSHSLLPLLDARLVLYHCFRELDNRTRHMAHADSVCRRFMSAPGIGFITALTYKAGVDDPYRFKHSRTVGAHFGLTPRRFQSGEIDIDGHISRCGDRDVRCALYTAANALLTRSSKWSPLKAWGMKLAKTRGHRRAVIAVARKLAVILHRMWLDDVPFHWSTEVTRS

SEQ ID NO: 290276 - protein, 433 aa, unidentified
MEEVTDEPLYRDRVCGIDIGKAQMVATIRVPSDKDPARRASETRSFGTTKKEVLALADWLRCWQVPAVVMEATGDYWKGPFYRLEAEGFQCVLADARQVKNLPGRPKRDPSDSRWLAACFERGAVTACFVATPEFRLIRLHTRYRRDLTEERTRDKQRAEKLLESAAIKLSSVVTDLHGVTGRDIMDHLIAGERDPKALAQLARARARRKIAELEEALEGAEFFTPEHAALLAAMLARIDRVNEEIARLTEVIEQLLAPYEEQLAQAESMPGWGRRAAQDAVAETGAGMTRFRTGGHLSSWAGRTPLDHQSGKRKGRATAKKGNRYLAGLLGETACAAGKTQTREGARYRRLARKRGKAKACVAVGNTQLKVYHKLLSNPGMRHQDLGPDYYERQRDIRRQIAHHIGKLGDLGFEVTLCRIPAPEPDGTSQAA

SEQ ID NO: 290277 - protein, 348 aa, unidentified
MSQRNQYVGLDVSLKETSICVIDEADKIVWRGRVDSTPKAIASAVKQHSPHAVRIGLESGQLSNWLFQELQAAGLPVICVDARHAKAALSLKVNKTDANDAVGLAQIMRVGWYREVTVKSLDCQAVRALLVARAQIVSQITTLKNSVRGILKTFGRVLPKGLRSQFPVRVRAAIDGHPVLEAIIEPTLRVLEAARAQLLVYDRAVIQRARSDSTARQLMSAPGVGSVVVLAYITAIEDPARFKRSSSVAAYFGMTPRRYQSGEVDYAGRISKCGDGMVRCLLFEAAKVLLSRSARPSALKTWGETLGKRVGAKKATMAVARKLAVILHRMWTTDTTFQWSAEAGSSAA

SEQ ID NO: 290278 - protein, 454 aa, unidentified
MVARKKSISLKPGKGREALRITYPNAAGIDIGSASHFVAVPPDRDDEPVREFPSFTADLNAIADWLTACKIDSVAMESTGVYWIPLFELLESRGFKVFLVNARHVKNVSGRKSDVLDCQWLQQLMTYGLLAGAFCPAEDVCVLRALWRQRGMLLKTQARSVQHMQKALAQMNIQLANVISDVAGETGMKIIRAILAGERDGHVLAAMRNARIQASAEEIAKSLQGSWRAEHLFALKQAVDSFDFTGTQLAEVDLELERQMQVLKTDEGEPARGKKRGRRRNSPKFDLRTQLFRMCGVDLTRIDGIDVTTALAVISETGSDMTRFPKVGNFTSWMGLCPGTRITGGKVMSGKTKRCANRAAQALRLAAASLRTSQSALGAYFRRMCSRMDKPRAITAAAHKLARLIYTMLTKGEEYTDQGQDYYEKHYREHVVRNLSQRAAKLGMKMVPMEQAVP

SEQ ID NO: 290279 - protein, 396 aa, unidentified
MARIWVGTDIGKTHHHAVVLDAEGKRLLSRRVLNDEPELLALLADVLAIDMDVVWAVDVADGMAALWINILLNHGQQLVYIPGLAVNRASAGYRGTGKTDAKDATVIADQARMRRDLTTLRPDDEHAIELRVLTGRRADINADRTRRINRLRGQLTSIFPALERMLDLGNVGPLVLLTGYQTPAALRRTGRRRLETWLRNRKVRGADALAEAALEAAERQHTALPGEKVIAQVVHTLAKEVMGLNEQLTEIDKLIAARFREHGLAEVISSMPGIGPLMGAEFLAATAGDMGRYGSADRLASLAGVAPVPRDSGNVSGNLHRPRRYHRGLQRVFYTSALISIRSCDESRRFYERKRAEGKRHVQAVLALARRRVNVLWALIRDGRCYQGELPVTTTA

SEQ ID NO: 290280 - protein, 373 aa, unidentified
MPKYSTAFGMDVHLRSTTVCALDADTGEAVTRRFPGNPWGEIAGWMDGFPGPSLAAYESGYLGFAPQRELAGLGVECVVAAVSKIPRSAADSASKNDRNDAARMAKAILAHDISPVWVPSPEVEGIRDLAGAYDGATARLATAKQRLLAFLAKRGFVYGGTTPAGNPRKYWTYDFLRWLDKVRPEDDGGVRTLAALRNEVEAAAEARADLLSEYRAAVDASPIAAEAAALQSIKGCAFALAAAFSAEVGDFTRFRSGRQVTAYSGLAPSQRSSGDSVRLGGISGAGNALVRKLAVEGSWCYAAARHQPKLMPRDTGVPLEIRMHGRKGSERLLRRREEMLARGMPAAKANAATAAELVRWLWALGMMCREGAE

SEQ ID NO: 290281 - protein, 342 aa, unidentified
MDITSIGIDLGKTTFHLVALNHQGKVVVRKKFSRKQLLAYTANLPSSLIGMEACSGAHFLGAALRGQGHDVRLIPAQFVKPFLKSNKNDFLDAEAIAEAVGRGNMRFVPIKTDDQLDLQALHRVRDRLVHRRTAVINQIRGFLLERGITFAQGPVNLRRHMPAILEDAEQNITPRMRNLLHTLWQEWKSLNTDIECVSEDIERICNQDEACRRLRQIPGVGPLVSTATVAAIGNGAAFRKGREFAAWLGLVPRQHSTGGKARLGGISKRGNVYLRRMFIHGARAVLLRVKYDTAGFGQWVHQLEARAHRNKVIVAIANKLARIAWAVLSSGNEYRTATVTAA

SEQ ID NO: 290282 - protein, 487 aa, unidentified
MDENGGGAGRFVGAFATGDRAEADETAVACDPDRQSGPRCIEVPFFVAPGNGEHAWQCLDYTCGVTVAFTWMEARMEVIIERCCGLDVHQETVVACVLIGAPGERPRKEIRTFRTMTRDLEALRDWLQELGVTQVGMESTGVYWRPVHAVLEGRFDLIVANARHVRNVPGRKTDVKDAEWIADLVRHGLIAKSFVPPAPQRELRELLRYRRKLVESQTAERNRLLKLLETANIKLASVASDVFGVSGRAMLKALIEGSASPEAMADLARGQLRRKRDDLVLALEGRMEEHHRFLLATQLRRLEAAEQDIAALDHRIEAKLKPYCVQHALLMQIPGVDWVVAAALIAEIGVDMSVFLSVYHLAAWAGVAPGNHESAGKQKSGRARKGNVHLRTMLVGAAISAARTKGSYLKDKYHRLKARRGALRAALAIAHKILVSAYHMLAKNLPYRDLGEAYLDQISQTRTVANLKRRLERLGYNVTLEPKAVPA

SEQ ID NO: 290283 - protein, 387 aa, unidentified
MQKPHDNSKASPAAFVQDNTLIAVIELGLSNWLVAGLIPGVSREPLKKLEPNPEDLLKLLHGWRDEAIKAGRPITRIAVAYETGRDSFWLARWLRERGIDAHVIHATSVAVSREHRRAKTDRLDTAMLKRGFLGWLRGERGHCTVAIVPTMEEEDAKRPHREREGLVHEQTRVVNRMKSALIQFGVRNFNPKLRKARVKLETVRTPEGKSLPPNTIAALRRDMERLKIIKEQIKAIEQTRLQQFEQKPEALANRMVYLLVRIYGLGWETADLLVHELLSRTLRDRKAVARYAGLTGSPDESGSKRREKGLSRSGNARVRKIMIQLAWRMVKFQPDSALVQWFKQRTENAKGSRKPMIVALARKLIIALWRYANDGVIPEGFRLHSAA

SEQ ID NO: 290284 - protein, 458 aa, unidentified
MVQTKRPRSRRDMPAVHPDAAAIDVGATMHVVAVPPDRDPEPVRTFGTFTADLHRLADWLRACRIKSVVMESTGVYWIPIFEILEQKGFDVQLVNARDAKHVPGRKTDVSDAEWLQRLHEHGLLRGSFQPKGEVKALRSYLRQRERLLDSAATYIQHMQKALTQMNVQLHHVVSDITGVTGMRIVRAIVAGERDAATLAAFRDSRCKEPVETIREALIGNYREEHVFALTQALELYDIHQKKVAECDKRIETVLEQLKATRPTPAKPLPAPRHKTKQSNAPNFAARDALYAVLGIDLTQIHGLGPYLALKLVGECGTDLSAWPSAKHFTSWLSLAPRNKISGGKILSSATRRSNNRAASLLRLAAVTVGRTETALGAFFRRLSARIGKAKAITATARKIAVLFYNALRHGMKYTDPGAAYYEERYRQRVLSNLQRRAKAFGYVLQAAAPQAPQAVGVS

SEQ ID NO: 290285 - protein, 349 aa, unidentified
MKKIVKQVLGIDVAQKELVVCFGIMYDTWIPGLVAYKVFVNNEKGFDELFKWVTKLADSNVAVRYVMEATGVYHEKFAYYLCNKNLEVSIVLPNKISNYSRSLETKTVTDKTSSEAITLFGLERVLDRWFPAKGIYKQLQQLTRERNQIIEERTVIKNQLHAELTEAKSNKRSIERAKKRLLLLDKQEKEVKNDLIELIKTDEEVKEVVMLICTITGIGHLTAVTVLAETNGFELIRNKSQLASYAGLDVREKQSGTSVKGKPTISKRGNKHLRKAMHMPALSAIRRDERFKAIFIRLVSKHGIKMKAVVAVQRKLLEMTYTIFKTRKAYNKNYFKENIEIKEQQSAEI

SEQ ID NO: 290286 - protein, 373 aa, unidentified
MIAGIDTHKDTLAVAVVDDSGRLVAGGDVPNTERGFAQLVDMFTAHHVQRVGIEGSGSFGRAVAVHLALCWQSGQPVAVVEVPTLMTSHERHGQLGKGKTDPVDALAIARITTREQQLPPVRLTVGAAADLRALLDYREDLVRERGALVNRAHAELGGLRPGYQQQIPILTTRARVRAAVDLLGDDSSIRATLCRRRLERVIAIDTETAELKRQITRLVAAADTTLTDLYGVGPLVAARFLAEVVDIRRYPNRNAFASANGTAPLPASSGRTVRHRFNPGGNRQLNRSLYTIALTQIRGDTEGRAYYERKRAAGKSKREALRCLKRRLSDIVFTTMRHDAASADASPDQASPPAWPLLVGVGAVDANEARLTA

SEQ ID NO: 290287 - protein, 365 aa, unidentified
MTTRQRSTSSSTDPPVRREVVLGVDTHGEVHVAAVVSPLGKVLGTESFPATVAGYRRLLVWARRRGTVRRAGVEGTGTFGAGLSRYLLAQHVQVFEVNRPDRTARRLLGKSDPLDAQAAARAVLSGRTRAQAKSGDGPVQGARIYKLAKDSAVKARTQAINQVKAVLVIADPALRERLSSLGNAELFRTCATVSPPDGGGDEDAVVQATHMTLRMLAERIEQLTGQINELNQRLTRLVERHAPQLLVPMGIGPDSAVTLLITMGDNPERLNTEASFAALCGVSPIEYSSGRRITRRLNHGGDRQANAALHRIVFTRLRHDPRTQAYYERRTQEGKTRREIIRCLKRYAAREVFNLVRTVSSVPPL

SEQ ID NO: 290288 - protein, 468 aa, unidentified
MPRRPRAAASAQIEPPQSPSPPTEPLGPTDSPALLGLDVSQAEVVACLFLPDGRVAARWTEPNNQPGARALAERLVGLANKHGLRRIRIGLEATNLYWWHLACFLKSTPLLSALTPEVYLFNPRLVSGLKKAYSDHGKTDRIDAWFIAERLRIGRLPAPFEVDLTYAPLQRLTRFRFHLAKTLAREKNYFLTFLFLKFSAFGQVEPFGDSFGATSSALLEEFTTEELVAAPLEDLARFLDEQGRGHFENPTELAETLQRAARDSYRLDKVLDQPMTLILGTTMATIKTLQHQIQEVDKTIARELEALPLERRIIRSIPGLGPVWTAGLVAEIGNIHDHDNEASIAKLAGLVWHPCQSGSFEAEDANLAKSGNAYLRYYLVEGANSVRQHCPEYREYYEAKLAQSPKHAHKRALVLTARKLVRLIDTLLRAGMAYQAPETRQDWKEARTRPHAARPGTPRRARLAGAAG

SEQ ID NO: 290289 - protein, 326 aa, unidentified
MITIGIDVSKAKIDCLWLRDVVTGKVKSKVFKNTTEGHSALLQWAINNAHVESDEIHFIMEATGIYHESLAYALYEAGANVSVVNPAQISNYAKSFGIRSKTDKKDSLVIARFGATQQPRFWQPEPHEIRTLKALISRYEAVCQDIQREENRLEKMTVSPVSDEVIISIETILTQLKTEKKRLEDLINRHLNQHPNLKEDRALLESIPGVGPIVSRLMISVIRSREFVAAPQCAAFLGLVPIQHESGSSVRGKSRLSKTGNSNIRAKLYMAAIVAIQHNPDIKQQYERLLKNGKSKMSALGAAMRKLVQICFGVLKHQTPYQSRVV

SEQ ID NO: 290290 - protein, 388 aa, unidentified
MHVVAAQSEAAIAIRTDLRAIFVSLELSRSTWLLTSLSPGAGEKMSKHSVSAGDTAGLFSRFVELQQKAQTRTGRTFPIITIQEAGLDGFWIHRLLQGEGIESWVVDPASVLTSRRRRRAKTDKIDGETLVRTLLAYKRGEPRVCAMVKAPTPEEEDRRRICRERKTLTAERVRHVNRIKGLLFAQGVGDYEPLRRNRRGRLEELATGDGRPLPEHLKAQISRELDRLEVILAQLKAVGSERDAMLEPAKEGPPTPASLLVQLKGIGPEFAAVLWSEGLFRSFNNRRQVAAYAGLAPTPWQSGSVAHEQGVSKAGNPRLRTTMIQLAWLWLRHQPGSALSIWFRERVQRNGGRGKKTAIVAMARKLLVALWKYAVHGILIDGTAAKAA

SEQ ID NO: 290291 - protein, 345 aa, unidentified
MWIIGCDFHPGFESLSIFDKRSGEVIEKRLLHPQEAAGFYRGLAEPALVGIEAGSPCAWFRRLLAECGHELWVGDAAKIRAAEPRQKKTDREDAALIRRLLVEGRFPRIWVPTEEERDVRQLLLDRHHRLRARTAAKNQLQALALNQGVQKGWRLWTAAGRQILSELAMMPHAARRRDELLAWVGRLDEQIAALDVLIAEEVKKRPEAERLMTHPGVGAQTALATVLTLGDVRRFAHARQVAAYVGLAPAEYSSGGKQRLGHISKQGSALLRFLLVEAGQTAVRFDEELKRAYRRMCMRKGNRAVAKVMVARRLGVRLYWMLRNQWSYAELVRHAGEPGSFRGKR

SEQ ID NO: 290292 - protein, 337 aa, unidentified
MSSLSFFVGLDYHQSFIQVCVLDREGNVLANLKSPNSAEHVALLVRGVVPKSARVFVALEACTGAANFAEELVRHTGWSVDLAHAGYVAKLKQSPDKTDFSDARLLADLERVGYLPRVWMPPESLRDLRRLVRYRQQLAAARRNVKLRITALLREERIVAEQRRWTKAWQHWLAGLDEISPQMRWVMDQHLEALQRLEREIRAAEARLCAATCDDAIVQKLLEIKGVGLVTAVTLRAEIGRFDRFRTGKQLARFCGMTPRNASSGNRQADAGLIKAGNPELRRVIIETAHRLGRYDLRLSKMNTRLRRRGKPGSVVAAAIGNRWMRWLYHQMKTISV

SEQ ID NO: 290293 - protein, 345 aa, unidentified
MSQIIRIGMDTSKYVFQLYGVDASEQVVLRKRLNRKAMLEFFANLPTTVVVIEACGAAHHLARMLGKLGHTVKLIAPQLVKPYVPRNKNDGRDAEGLCEAASRPRMRYVPVKTAEQQAALMLLGVRDQLVSRRTQLSNTIRGHAAEFGLTTARGLDKLAAFLAAIEQDERVPVLARELFAMLARQYDQVQAELKAIEAKLLAWHRADATSRRLAQVPGIGPVTAAALVMKAPDPHAFRSGRLFAAWLGLTPKDHSTAGKTRLGKITRAGDETLRQLLVVGATSVVKQAKAKGRGPDWLVELLKRKTPKLAAVALANKMARIAWKLMTTGDSYNAARFDAKTATAA

SEQ ID NO: 290294 - protein, 308 aa, unidentified
MFPVGIDVSKNTLDLCMLYDGIKGRIKTRNIQNNRHSVENILRWLRLQHCSPEDVHVVMEATGVYHERLATELHDAGFRVSLANPHRSREFARGMGIMTKTDKVDAYMLACYAFLKKPHRWEPPAPEIRYLGALLRRRDVLLGDALREENRLEKYLSTDTPADIISSCRRMAQLLREEISNIERQIKAHIKASPALRRDYTLLASIKSVGPQLGMHMLIVLRSHNFVSAEQAAAFLGVVPIEKRSGTSVRRRPRMSKIGPPQLRAKLYMSALCGKIYNKRMRNIYDEMCLRGKPKMVAIGALMRKLVH

SEQ ID NO: 290295 - protein, 461 aa, unidentified
MAKQSGKRKQGGAKVDATEGLPPLNLHAAGIDVGSAEHYVAVPLDRDVEPVRRFGSFTADLHRMAHWLKDCRITTVVMQSTGVYWMALHDVLESHGFEVNVANARHTKTLPGRKTDVQECQWLQKLHTFGLLNNSFRPPEEIRVLRGYLRQRENLVAAAATCIQHMQKALTEMNIQLANVISDISGTTGLAILYDIVRGERDPYKLAMHKHSRIRASRQEIARSLQGTWRQELLFVLEQSLDLYQTYQQKIQTCDERIDGQLRSMEPRIDPVSEPIPEPRRGKDARGHQSGFDLRGQLYRITGVDLTRIDGIEVQNAQTIISEVGVDMSRWKTEKHFASWLGLCPDNRISGGKVLKRGTRHVVNRASTALRLAASALLRSQSALGAKFRRLRSKLGAPKAITAMAHMLARLVYRMLKFGHDYVDRGIEFYEAKYQHQQLRRIAKQAAVLHMQLIPLTGVVS

SEQ ID NO: 290296 - protein, 458 aa, unidentified
MSQAKRSRGRQELSPVHPNAAAIDIGATMHVAAVGPDCDERPVRTFQTFTADLHRLADWFAQCSVKTVVMESTGVYWIPIYEILEQRGFKVMLVNARDAKHVPGRKTDVSDAEWLQRLHEYGLLRPSFRPQAEMAGLRAYLRQRERLLDYAAAHIQHMQKALTQMNLQLHHVVSDITGVTGMRIIRAIVAGERDPAILASYRDVRCHASVETVRQALVGNDREEHIFALTQALELYDVYQAKVAACDGQIEAVLTRLKQSAVPPTEKLPAARYKTHSSNAPAFEVREALHAILGVDLTQIHGLGPYLALKLVGECGTNLSAWPTAKHFTSWLGLAPHNKISGGKVLSSKTRRTSNRAATLLRLAAITVGRTDTALGAFYRRLSGRVGKAKAVTATARKIAVLFYNTLRHGMSYADPGASYYEDRYRQRVLGNLQRRAKSMGFVLQQQAEPAGAQADVS

SEQ ID NO: 290297 - protein, 312 aa, unidentified
MIQQGYGGIDVSKDRLDVMVLPERQFFSVENSTAGCGELVQRLRGWSVATVGLEPSGGYERGVIRALLAAGLSVRRINPNKLRQFARARGVLAKNDHLDARLIAEYVAIMPTRVVQCDPVTERLAEVVTMRRQLCDEHVAVENQTAHLEDAMLRRLNKRRLARLEADILLLDRRMAEIVASNASLARRYELLTSMRGVGPTLAFSLIALLPELGQMGRKQIAALVGLAPYDFDSGRLKGHRCIYGGRLPVRNVLYMAALSACRYNPALTAFHLRLADANKKPKVRIVAVMRTMIVILNAMLRDNVAWQPNST

SEQ ID NO: 290298 - protein, 372 aa, unidentified
MQNDTTTTVHVALDVHKDSIIAAYSVGLGEVQNLGNVGVLERDITKLCTRMQSKGPHVSFVYEAGPTGYGLYRLLTKKGFACMVCAPSLTPRKPGDRVKTDRRDAIKLVKALRMNDLTRVHVPDVQDEAMRDLVRAWGAAKQDMRQARQRLKSFLLMHDVRYTGTANWGPKHRRWLSEFVFATPWSQIAFEEHRRAIDERMAQCERLEKALREAAPQWHWYPVVEAIQALRGVQFTVAITLIAEIGDLSRFEHPRQLMAWLGVTPSEHSSGGSRKLGGITKAGNSYARKVLIEAAWSYRFPAKVSRIIQVRHERLPKPVIDRAWDAQLRLCSRFRKLTARGKHKNVAVVSIARELAAFLWDIARMTRVQPGA

SEQ ID NO: 290299 - protein, 436 aa, unidentified
MQPEVEEIPDAEHELLAARVAAIDVAKASGKVCVRLPGRARRRVSRVWDVAATSGAVTELAEHLVGQGIEKVTVESTSDYWRIWYYLLEAVELSVQLVNARDVKNVPGRAKTDKLDAVWLAKLTEKGLLRPSFVPPAPIRRLRDYTRLRTDLTHDRSRQVQRLEKLLEDALIKLSAVATDITGVSGRAMVEALIAGQRDPKVLAGLARGRMKTKHSALLAALDSRFDDHHAELARMLLDQIDALTTQIDALSARIDELLTAMPDAQPVDPHPGGPTPGPSTDTVSDAALGAVDRLDEIPGIGPNVAQVILAEVGLDMSRFPTAAHLVSWAKLCPRTIQSGPLTRGGKTGKGNPTSKVHSATPLPQPPRPTPSSVNATVASSNAAASSKPWSRSPAPSWSSSGTCSTTPPPGSATSAPTTTQPGSTPNAEHATTSRN

SEQ ID NO: 290300 - protein, 394 aa, unidentified
MKLIGIDIGKNKHFFCIMDKDSGEIVSQPASFSNDKEGFDFLLQKIKSYPKDSVIIGMEDTGHYHFALLKYLLDLQYTVALINPKTTDFNRKMQGGITKNDKLDTINICDVLDTPERKKQYRITKVNKFDLYEQKQLTRQHHNLKEELNVYKNRLQKSIDIVFPEFNSLFKSKYGTVYINILKTFGSAENIANTDIRTIRKCFEIDGRGNRISLTPERLKERARSSIGISSLAEVIQIKHLSAQIDLIEEQLSEIDKKIEEFSIQNNSPILSIPGISHFSGTSILAELGDISNYSKPSQIIKFAGVAPLHYEPSQFNAQHTAITKKGSKYLRKTLYQIILPVIRHNPVFNKYYQLKISQGKGHRCAQGHCVRKLLRIIYHLLKTNQQFDPQLLR

SEQ ID NO: 290301 - protein, 373 aa, unidentified
MPKYSTAFGMDVHLRSTTVCALDADTGEAVTRRFPGNPWGEIAGWMDGFPGPSLAAYESGYLGFAPQRELAGLGVECAVAAVSKIPRSAADSASKNDRNDAARMAKAILAHDISPVWVPSPEVEGIRDLAGAYDGATARLATAKQRLLAFLARRGFVYGGTTPAGNPRKYWTYDFLRWLDKARPEDDGGVRALAALRNEVEAAAEARADLLSEYRAAVDASPIAAEVAALQSIKGCAFALAAAFSAEVGDFTRFRSGRQVTAYFGLAPSQRSSGDSVRLGGISGAGNALVRKLAVEGSWCYAAARHQPKLMPRDTGVPLEIRMHGRKGSERLLRRREEMLARGMPAAKANAATAAELARWLWALGMMCREGAE

SEQ ID NO: 290302 - protein, 488 aa, unidentified
MSKLDICMTGLALTFTLCMTGGACMPSKKTPKKRALDELACVFPNAAGLDIGSAEIVAAVPPDRDAEPVRVFATFTPDLHALVAWLVACGIDTVAMESTGVFWIPIYELLEAAGITPYLVNARHVKTVPGRKTDWNDAQWLQKLHALGLLQASFRPDAEIRTLRTLVRYRAELIERRAPHINHMIQALKHMNIQLSLVLTDITGKSGMAMLRAIIAGERDPQQLAQFRESGCKHSEAEITKALTGTWDDAQLFILQQAVEIFDYYTAKITACDDKLEQQYQAMESRAEKDAPLPDLPPAKKDSRSKNALRFNARAQIARVVGVDLVAVMGLSAVTVQTIISEIGTDMECFPTLKHFCSWLGLAPHNDKSGGKVVRSRTMKVRNRANQAFRQAAQSVAQSDSSFGAYYRAMRARLGPKQAIVATAHKIARTVYHVLKTREPYREETAAEYDRKRRERELKHLARRAQKLGYTLTAVPDRTSESQPEPAG

SEQ ID NO: 290303 - protein, 394 aa, unidentified
MKLIGIDIEKNKHFFCVMDQQTGEIISQPVSFSNDKEGFDFLVQKIKSYPKDSILIGMEDTGHYHFALLKYLLDLQYTVALINPKTTDFNRKMQGGITKNDKLDTINICDVLDTPERKKQYRITKVNIFDLYEQKQLTRHHHNLKEEENVYKNRLQKCIDIVFPEFNKLFNSKYGIVYMNILKMFGSAENIANTDIRTIRKCFEIEGRGNRISLTPERLKECARSSIGISSSAEVIQIKHLTAQIELIEEQLTEIDKKIEEFSIQNNSPILSIPGISHFSGTSILAELGDISNYSKPSQIIKFAGVAPLHYESSQFNAQHTAITKKGSKYLRKTLYQIILPVIRHNPVFNKYYQLKISQGKGHRCAQGHCVRKLLRIIHHLLKTNQQFDPQLLR

SEQ ID NO: 290304 - protein, 345 aa, unidentified
MPIVGGLDIHRKQLTFDYLDTVTGEVRRGQIAPADREHLRAWLARFAGRDDVAFAIEGCTGWRYVAGELAAAGIAAHVGEPADTAAARGRKRHAKTDKTDARHLRTLLAEGRLPECWIPPAQILDYRALLETYHDLRREHTAWVQRIHAVFFHQGAPRLGEGALRTEQGLAALRAAAVAHLSPAGQLQVATALDMLAAVGARMEVLRKQLLDAARHLTGAKVLAARLYGAGPVTALALTCWLAGAGRFSSSRKAVRFTGLDITVWSSDRKGPPGRLSRQGPPVLRWAVYEAGKTHARSSAPDHRYYTAVKDRKNSKRAALSEARKLVRQACHILTELGDDALTAA

SEQ ID NO: 290305 - protein, 400 aa, unidentified
MSTEYGKVAGIDVHKKWLYVVVDGQRRRTGTTPTELRDVRAWFSELAVQSVVMESTAQYWRPVWAALEGHFGLFLAQAQSNRARSGRKTDFADAERLIRRLIAGELVLSFVPEPRQQEWRMLTRARVEYTREINHIRNQIEALLEASGIKISGYLSDLLGVSGRRMLEALAGGETDRVRLSALADARVRASCEELQAALDGHMTVCQRVLLNQQLSRVKLLEQYIDALSGMLQQCLESHRDAVARLCQIPGIAVCAAEQIIAEIGPEAKAFSSDRKLASWVGICPGREESAGKSRSNACPHGNRPMRRILAQAAWAAVRTKDSFFQHLFKRLVPRLGVQKAVWAVAHRMLRIVWIVLHRGVYYKELGPLALQPASQQRRIRHMIRELASYGFQIAAPQPA

SEQ ID NO: 290306 - protein, 346 aa, unidentified
MKHSVGLDVSVKETAICIVDEAGKVVREGKVATEPQAIIAFLSSAGVEYARIGLEAGPLSQWLVNGLSEAGLPVICVETRHMKAVLKAQQVNKSDRNDARGIAQMMRVGLYKPVHVKTLASQQARMLLTSRKLLRDKLQDMENELRGTLRNFGLKVGVVSSGHFEARIKELVAGQPPLEMIVVPLLAVRRVVREQLAKLDKMVLDQVRDDKLCRRLMTVPGVGPIVALTFRATVDQAQRFARSKTVGAHFGLAPRRFQSGERDYDGGVSKCGDAMMRTALYEAAQVLLTRTRTWSWLKAWGMQVARRRGAKKAIVALARRLAIVMHRMWVDGTEFRWRKEADTAAT

SEQ ID NO: 290307 - protein, 343 aa, unidentified
MQIHSVGIDLGKTTFHLVALGAAGKVLARKKFTRKQLLDYTANMQASLIGLEACSGAHFLGRALRKQGHDVRLIAAQFVKPFVKSNKNDFVDAEAIAEAVERKNMRFVPIKTDDQLDLQGIHRVRDRLISRRTAVINQLRAFLLERGMVFAQRPAKLKAAMADILENAETDLTPQMRSLIDMLWDEWMLVERQIEKLNLELERISAADAGCTRIRQIPGIGPVVATAIVAAIGNGAAFRKGRDFAAWLGIVPRQYSTGGKTKLLGISKRGNVYLRKILIHGARAAVLRIKRDRAPIGAWLDALDARAPKNVVVVAMANKLARIAWAVLSSGEDYRPTANAIPA

SEQ ID NO: 290308 - protein, 355 aa, unidentified
MSQEKYIGMDVHQATISVAVLDSRGKLIMESILETKADTILEFLQGLNGSLSVTFEEGTSAAWLHDLLKPHVSRLVVCDPRKNALLKDGSKSDRIDARKLAELLRGNQLTSVYHGEHGMRTIKELGRSYLTITKDLTRVMSRIKALYRSWAIPCSGTSVYAPRHRGEWLGKIPEPGVRLRAERFYQQLDLLQPVRQQARRDLLTESRKHQAVKLLRQIPSIGPIRAALLVAQLQTPHRFRTKRQLWAYSGFALETHDSGEYRYVRGKLQRNRERMTVRGLSNNHNPDVKNLFKGAAISASTHPGPLYDFYIALLAKGMRPTMARLTLARKIASITLSIWKKGVDFDVTQLHRQEA

SEQ ID NO: 290309 - protein, 365 aa, unidentified
MRSTKMAKQNEETIAAYIGLDWADSEHEVTMLVVETGEVESRKLKQESEALADWVQSLRERFSGRKVAIAIEQRKGALIYALMCYDFLILYPVNPKTLARFREAFYTSGAKSDPGDSGLLLDLIRLHRDKLRPWVPEDADTRLLQMLVEERRGLVDEVTRLTNRLKSTLKQYFPQALEWAGELDSRQALDFLTRWPMLESIRKAGAVAVEKFYRQHSMRNQDKIEQRVKAIKEARALTTDRAVLAASKMKALAIVRQLRALGKSIVEMEARIQELFEQHRDHEVFSSFPCAKKVLGPRLLAAFGGDRTRYESALELQSFSGIAPVTRSSGKSKTIHKRMACPKFLRQTFHEYAAQSIKKPGCART

SEQ ID NO: 290310 - protein, 369 aa, unidentified
MKMNSKNNKEKARQKALQAKSRKMKLTVGIDLGDEWSHCCFLGEDGEIVEECRVKTTREAVKSRFGELKLAVIALEVGTHSRWVSQMLSEFGHEVIVANARELRAITGSDRKSDRVDAEKLARYARVDRRILRPIKHRGEEAQVDLVVLRARAVLVKTRTQMVNSVRGMVKSFGYRMPKCSTERFVKLNNEVPEKLREHLAGLMEVLEHVQKQIEEYDQRVEKLAKEKYPETTVLRQIWGVGEITSVSYVLTIEDKGRFEKSRDVGPYLGLRPRRSQSSESDPELRITKAGDCFLRSLLVKCAQRILSKKGPDTALKQFGLRIEARGKKKAKKRAIVAVARKLAVLLHKLWVTGEVYEPFPEATVRKAA

SEQ ID NO: 290311 - protein, 436 aa, unidentified
MPMTFARLLDPTFEDDDDPFRFYDPSGEPLEDRLYLPCGIDPHSKVCGVVFVHPLPHRQDILAQRIIRNNNLQDVTWLMETGLRLAPQFGAHPIYVFETTGPFWRPYRHFLHRAGLATATVSARQSKSARSTGTRKTKNDLKDAYNIAKVFKQGESHATRIPPEPMASLREYTRLHLFFVEYSVAIQNRMYSIKYQIHPGFDAHFSKPVLPTALALLKEELVHPQRLKACELSYLTQVIREASHGRLGESLAHRLLESALTTFTIPYTPEALSFNLKLLAEAYEHIHRAILPQLRERIKDCLAQVPFEHHLDEIPYFGPIVIGTFLGELGHPGWFRTVDSVVAWFGLDPAVSESANKPAGTTHLTKRGTKYGRRIMWLVARNWAQYTPQGRSVFRKEFYKNKLSYDGAICVLAAKLVRIAFAMVRDGSHFDINKAF

SEQ ID NO: 290312 - protein, 334 aa, unidentified
MEKITTVGIDLAKSVFSLHGVDEAGRVVLRRTVRRDQLVGVVAGLSPCLIGMEACSGAHEWGRRFQGLGHTVRLMAPKFVTPYRKSAKNDGNDAEAICEAVTRPSMRFVPVKSLEQQALLAMHRVRQGFVVERTATINRLRGLLSEFGVVLPLRSVTVRRQAATAAENLPELARRAIGDLLEQLRTLDERIGAYDREIEAQARLSEPAQRLMKIRGIGATTALAIVATVGNAREFKNGRQFAAWIGLVPGQYSTGGKSRLGHISKRGDSYLRNLLVQGARSVLNSAGMHQDRMSRWILELQPRRGYYRTLVAIANKNARIAWALLAKNETLRAA

SEQ ID NO: 290313 - protein, 316 aa, unidentified
MSDALYVGIDVAKDSFDVASDPPGLALSLPNDPTGRQHLLDALRNHPVALIVLEATGGYERSLVADLIGAGHKVVVANPRQVRDFARGIGQRAKTDRIDAQVLARFARMVKPEPRQKASEQAVNLAELVTRRRQLSDLMTQESNRLPMARHVKVRKSLQKVIGLLERQIRDLDKMIRDHIDSDDGLRRKDQIVQSFKGVGPGTSAMLLSHLPELGRLNRQQIAALAGLAPWDFKSGQWAGQSRIWGGRMPVRNMLYMAALSAIRSNAIIRKFYQRLESHGKLFKVAITACMRKILVILNTLVRNDCLWSPPLPENA

SEQ ID NO: 290314 - protein, 408 aa, unidentified
MELVHAVCCGLDVHKASVSACIRRVMEGGIIKLEERTFETTMRGLKALLDWLMESGCGIVAMESTGVYWKPVYHVLSPSVKVLVANPAEVKQRKGKKTDKADAQWIAELLAHDLIEPSFIPPAEITALRDMIRMRTALVNNRTQAKNRVLGLLEDTNIKLSSVVSDTFGKSGRAMLDALVSGDRDPKALAQMAKGLLKKKIPQLETALEGSFTAHHAFLIKVSLSVVDLLDKQIHELDKHIESMVMPLRTELDEVISIPGVGETAARGIISEIGVDMDRFVTDTRLSSWACVCPGNNQSGGKRKSGRTRRGNRYLRRVLVECAWAAGKTDSFLGRTFRRLQARIGGKKAAMAVGHKIPVIIFHLLKEGAVYDEGKYNRLTPREEDKRKKRALETLRRLGYCVTLERAA

SEQ ID NO: 290315 - protein, 344 aa, unidentified
MEPMYYIGLDVHKRKISYCVKDSSGKVFAEGSLPATRLDLDLWMKTLPQPWSAAMEATMFTGWIYDYLKPHAAALKVAHPLMLRAIAAAKKKNDRLDASKICDCLRCDFLPECYMASTEIRERRRTLRYRNLLVRQMVQMKNKISGLLMEAGVSYNKQRLHRAGYFRELLATNSDIDEGLCSLLRLCRETVVRLQKTESAMVLSLERDSLLMDRVERLMTIPAVGPITALTWALEVGDAQRFSSIKKAISYCGLCGAEKSSGNTVQRTPLSKQRNKHLQSTLIEAAKMAPRYSPNLAMLYDKEKQKGNANRATLAVARKLVAYLMAIDRGQRNFQAVETNCIAA

SEQ ID NO: 290316 - protein, 382 aa, unidentified
MQTIAPVNPTILLAIELSTSTWLVAARLPGLDKPRLSRIDGGDTAALLALISSLRARAACGLDATMGVVCCFEAGRDGFWLHRLLTAHGVVSYVLEPTSILVNRRARRAKTDRLDAEGMLRVLAAYLRGDRQACSMVRVPTPDQEDAKRTHREREHLVQERLRIENRIEALLFTQGIRKRPSLRSWERDLTVLRTGDGRKIPRHLRAELDRLRRRLVLTLELIREVEVERDQVTKTKPQDQAHHKMTALCRIRGIGENFAAVLTREVFYRSFDNRRQIASYVGITPMPYQSGAMDRDRRIGRAGNPRARTTMIQLAWLWLRYQPDSELAEWFRERVGTLAGRTRRIAIVAMARKLLIALWRYVETGVIPTGAEIRAETTVAA

SEQ ID NO: 290317 - protein, 323 aa, unidentified
MRKRQGPFSQVVGVDVSKDKLDFAFADGKRTRSIDNAPKQIVRELIGRINNPESTIVVMEATGGYEGRLVTLLHEHKIALAVVNPRRVRDFAEGIGRDAKTDRLDAQVIAFYGQVVKPEPQVAKSEEDKKLKALVERRRQLLDLINQESNRLGQTTDREIRGYIQETLKTLKKQVETIDKRLAKCVKANTANARKVEIFESVKGLGPVSISTFLAELPELGQLNRGQIAKLVGVAPMNRDSGKKSGRRRTFGGRSYVRRVLYMATLVATQFNPRIKTFYQRLLRQGKPKKVALIAAMRKLLTIVNTLIKNDALWDATPNQARV

SEQ ID NO: 290318 - protein, 410 aa, unidentified
MPLYCGIDWATDHHDVAVVDDDGRVVARGRVGNNAAGFAQLLTLLADAGDTATHPIPVAIETDRGLWVAALRETGRAIYPINPLAASRYRPRYALSGAKSDATDAVLLANIVRTDADAHRPLPADTELAQVIRVLARAQQDAVWARQQIGNQIRDLLKDFYPAALVAFDQLPNGGLARADARTILAVAPTPEAAARLTPARLRRLLAKAGRQRRLDRDIERLCAIFTDTYLHQPPQVENAMGIQLSALLRQFDAACAAAEELAEAAIAHFERHPDAEIITSFPGLGNLAGARVLAEIGDDRTRFADARGLKAFAGSAPITRASGKKTVVLHRHIKNRRLAVVGAIWALGSLRASPGARRHFDARRATGDWNRQAQRHLFNKFLGQLHHCLQTGQLYDEHRAFPPPLPLAS

SEQ ID NO: 290319 - protein, 344 aa, unidentified
MGEVNTIGLDIAKSVFQVHGVDDTGTVVIRKRISRAKVLEFFGNLSSCLVGIEACPSAHHWSRELQALGHTVRLMPPSYVKAYLKRSKNDANDAAAICEAVTRPSMRFVPTKSEEQQSGLMLHRSRQLLVRQRTMLSNAIRGHMAELGIISAKGRNGTAELLKLIARTGDGRIPLTARFCLEVLARQYVTVTAEVAAIDKRIHAWHRSCRESRRLKEIPGIGPIVATALVAEIGDWKQFRSGRNLAAWIGLVPKQHSTGGKERLGRITKQGNRYLRWLLVAGAMAVIRYARQHGTKRLWLTRIMARRPTKVAAVALANKIARMAWAIMARGERFAQPRLLPTAA

SEQ ID NO: 290320 - protein, 362 aa, unidentified
MKNQIPQITIGVDLGDTKHRFHVLDQAGNEVRRGSMPNTPSALSRLAGSYPGARIAIEVGTHSPWVSWHLSEAGCEVIVANARKLRAVYENERKCDQRDAQMLAKIARLDPDLLHPVTHISKQAMTDRLALSSREQLVESRKRLIQSVRSMVKSLGCRINSCSAGRFPALAREALGAEEGVMPGIGPMLTAIEGISASLRQLDERIDRLGAESHPVTWQLRQITGVGPITALAFALAVEDPRRIEKTRDIGAYLGIVPRRDQSGDTDKSLGISKTGNAYVRKLLVQCAQHILGAHGPDCELRRFGLRLASRGGKAHKKKAMVAVARKLAVLMLSLWKSGEDYQPERGRETQPDGTTPDLAAA

SEQ ID NO: 290321 - protein, 483 aa, unidentified
MKPKRVEKNKKASCRPTPNNWHKMNRKQRREMTRKIQSEDLSLEVVHPDAAGIDIGNESHYVAVPPTRDSQPVRRFGCTTSELKEMSVWLKQCAIRTIALQSTGVYWIAVYDILEQAGFEVYLVNANQTKNLPGRKSDVQESQWLMKLHTYGLLRNSFRPSQEIRTMRTYWRQRNDLVRAAGRHIQRMQKALTQMNIQLANVLSDVSGMTGQAIVKAILAGERDPYQLAALRNWRVKASEEEIARSLEGNWQEDLLFVLQQEQDGYEFCQKQMAECDQRLQQYLQQLEDRSHGAGLPEEKRKERLRKKKKGNAPQFDLRAELFRMTGTDLTQIDGIDVTTTMTILSEAGWDMSKWKTEHHFVSWLRLCPDNRISGDKIIGKGRLPTNNRVTNALRMAASTLRLSNTYLGAQFRRLRTKLGAPVAIKAMAAKLARLVYRMLRHGMPFIDRGAEFYDAQHRKLQINYLKRKAANLGFQIIEAPAA

SEQ ID NO: 290322 - protein, 338 aa, unidentified
MAILYVGIDLAKNVFAVHGVNEAGKPELVRPSVPRAKLLELIAALPPCTIAMEACSGAHHWARQFQAHGHTVKLMAPKFVAPYRLSGKRGKNDAADAAAICEAVQRPNMRFVPIKTVEQQSRLMIHRARQGYVEARTATINRIRGLLSEVGHVLPLKAATVRSQATALLEDLPGWVNTTIGDLLSEVHRLDERIEQYDRHIAQMARQDERAGQLMRLAGVGPTTATALLAMIGNGHEFSNGRQLSAWLGLTPGQYSSGGKTRLGRITKAGDAYLRSLLVLGARAVLQAAQGKDDSVSRWAVQLAARRGYWKAVVAIAAKNARMAWAMLRQGEKFQMPA

SEQ ID NO: 290323 - protein, 526 aa, unidentified
MASSNKHSKLRACDEGRYTSDGLKNVTLDDGTRVVTSPSNDIKRPVCGSVDVHKSVLMAAACVTDKESLNAVFYVRQFTSSNSDIRLMAEWFASYGVQDVCMESTGKYWIPVYDILEQNGIKPILTHPKYVKQAKGKKTDFRDAIHIANLFRMDLVAASFIPPADIRDLRELCRYRLKLTYIRTSEKNRFQNSMTISKVRLDSVFTDPFGKSASNIMSYLIQTDPDEVSDEKILSFVRRGVKASPEEILDSIHGYEFIGAQRDKLEVIQTHMDDLNKCINMIDEKLSYYRLKYSKVILHLVTMIGISEESALYILGEIGADMSVWRDSDSLASWAGLSPANNSSAGKKKTTKIGKGGHYLKPLMVQCALAAIKSTKKHPYFYYKYLTLKKRRGHKKAIIAIARKMLVAIYHMIRDDKDFEPIDYEQVVTRKQSQKELNLTNIIEFLGEHGVDPETIRTVETQCSQAGQTGEGTSTSKPKKSQQKKQPKSKTETTPTEQKPAKRRGRPPKSPQTKSQSSTQSAAATA

SEQ ID NO: 290324 - protein, 347 aa, unidentified
MLIIGCDFHPGFQQVAIFDNLTGEIQEKRLQHRAEAEQFYRGLADPEVRVGMEACGHYPWFERLLAELGFELWFGDAAKVRASVVRKQKTDRRDAEHLLDLLRENRFPQIWVPSLEVRDVRQLLVHRHKQVQARTRTKNQLQAMALSQGVQKKYKLWTKAGREELEQLPLLAYAAQRRKQLLQSLDGLEAEISELDRRVADEARQRPEAVRLMTHPGVGPVTALALVLTLGPADRFESAKQVGSYFGLIPSEDSSGGKQRLGRISKQGSSFLRFLLVEAGQTAARLDPQLKRFYRRLAARKNRSVAKVAVARKLATRLYLMLREDWTYTQLCQAVMQVSPSHSVAGQ

SEQ ID NO: 290325 - protein, 421 aa, unidentified
MKSETTKAMKTHQELTHYAGFDWAKDHRDIVVVDLQGRIVSEFRIEHSLAGWRQWKEKIAAFPHLGVAIETSFGAAVEQLLDSGVTVYPVNPKSAKRYRERKCSSGDKTDRHDAWSQADALRLDGHGWRALTVQDPVVAELRILCRDEVALIEERTALVNQLQQALHEYYPTALEAFDDWLSVGAWSFVETFPSPEALTKAGKRKWEKFLHSRKLYRPQTYQKRIDTFQQAAEWHVGAALAAAKSFLAVARCKQLRVLQLQLDAYRKRIEAIFASHPDSGMFGSLPGAGPKLAPRLLSEIGSDRALYQDLQGLQCMAGTAPVNYQSGKIHKVHIRRSCNKHLRHAMHLFADKSRAQSSWAAVYYAALRERGMTHAQALRCLGQRWLKIIWKMWQTGTAYNAALHMQNQLAHGSWVLQIQSK

SEQ ID NO: 290326 - protein, 340 aa, unidentified
MLYAAIDIHKHAFQAAVLDPEAGEVVEARFSADRESLARWAEEWQGRVVAVTIEATTGWRWVWRELAARGFDVRLAEPVQARALLGRRRSAKTDRLDARWLARLLAKEMLPQSWIPPEEIQRLRDRTRLRKTLAEDQRRWGQRLHAFLLHEGWPCPKSRLLTPQGMRWAAALKLSEHGRLQVDSLLAIIAALEVQLETVDGELRRFARTDQRCQALQSIYGIGPILACHLLAEIGEACRFRRAKQITRLAGLDPVVDESGETRRRGHLAKAGSPQLRWALVEAAVHANRPNAPDLELYQAVRDRRDTTVARLSVARKIGKRAYHVLRELELAAPETAFEA

SEQ ID NO: 290327 - protein, 346 aa, unidentified
MENDTLAAVDIAKEIFEVGVSGRPGRVALRKRLPRDRFLEFFAQLPPATVVMEACGSAHYWARRIEELGHVVVLLPPQYVRPYVMRNKTDRTDVDGLLEAFRNERIRPVPIKTVTQQVIATLHRLRSGWLADRVRSINSLRGLLRELGFFIPEGRRHVLPEAWEIIQDHRRGLPDALKPSLAALCEEIASLSTRIEDVEAQLEALARQIPLVARLRSVPGIGLLSATALYAFIGDPSRFPSGRHMASFIGLTPREHSSGLRRHLGRISKRGDSYLRMLLIHGARSVLWHAKRMKNPDRLRSWALRLERKVKHNKAAAALANKLARICWAVWKNDRDFEVVPEPQAA

SEQ ID NO: 290328 - protein, 426 aa, unidentified
MAYRIAGIDVHKKMVAVAIADVEVVGTWRFDRRQIGTSPSQLRGLAEWLVACEVDEVVMESTAQYWRPVWEALERYWQPQRRQARSDPRAGALHLAQAQSNEGHRGRKRDFPDAERLVKRLVAQELTLSFVPAVTQRLWRTVARRKYQATCNRVQLQNRLECLLEEMHIKLSSLVADLIGPSARRMLRAIANGETDPGAVAALGSRRLHATPDQFCDALGACTDLHPVYRRLLTLTLDELEVIEHHIHQLDEELALLLCGHQDAVERLAAVPGLGVDSAQQIITEVGPAAATFPTAKRLASWVGSCPGHDESAGINHSHRAPNGNRQMRRLLNQAANAAVKAKGSIFELVYRRLVVRLGHAQAIGAIAHRLCRLVWKILHDGVVYEERGPAVTKHRAQRRAAKMIRELRSLGYRVEPASPPASSLA

SEQ ID NO: 290329 - protein, 416 aa, unidentified
MKIVRPICCGMDVHKNIIVATIGITNKKTRITEYIQETFSTLTPDLLNLKQWLINHKCFDACMESTGKYWIPIFNILEDEINIYLTHPKYVKAIKGKKTDKKDSKWICDLFKHDLIKFSFIPPKEIRALREISRYRYKLVGMRSSERNRYQNCMTVSNIGIGSVFSDPFGKSAQAIMKEVLESDIIEDEKILKCIHGSCKNKDKILDSIKHCNIETDQRFKMNESMTHMEELQVHIDNCEIEMMKRAAPMFDRFMHITQLPGISTLSAILIISEIGVDMKQFESDKQLACWAGLAPANNESANKKKSVRISKAGQYLKPLLVQCALGAIKDKEGYFGIKYSRIKKRRGHKKAIIAIARMMLVSIYHMILTGETFNPSDYESFKNPKPPIKQQVLTEESAIEFLKKSGFDVSKLTKP

SEQ ID NO: 290330 - protein, 350 aa, unidentified
MLIIGCDYHPGFQQIAFVDTETGECDERRLAHQEEAEQFYLKLRERSLGVRVGMEASGHSRWFERMLHDLQFELWIGDAAEIRTKRVRKQKTDRQDAQLLLRLMIEDRFPRIWVPDAENRDLRQLLWHRHRLVQMRTRVMNQLHVVALNEGLRRKKALWRAAGRKELESIALAPWATHRRQDLLDLLDQLTPKIQELTRALEEEVEKRPVTRRLRTHPGVGPLTALAFELVIGTPERFHCGKQIASYVGLVPSEESSGDRRRLGHISKQGNVLLRFLLVEAAQVTVRSQSEWRNMFFHLAMRRGRKIAKVAMARKLAVHLYWMWRQGLDYGQLHTLGSHAGEPGNRDGVQ

SEQ ID NO: 290331 - protein, 367 aa, unidentified
MSSVTSAAGPIHLGMDTSENTIVVGILMPGGEVPVIDRIWNEEGSVRHLVSRLGDPAALRACYEAGPCGFELRRLLASMGVACDVVAPSLIPRRAGDRVKTDRRDASRLARLHRAGELTPVRVPSAAEEAVRDLVRVRAALLADRKRARQRLTAMPLRHGRAWRSGSSWTQAQSKQWIAGQRFEEPALAAALAHYRAGLDTRRAELDAIEAELAPWAGREPLAGPVARPGCYRGIAELHGLALAAGVAGWHRFPSARAFTGFTGLVPGEYSSGDKTRRGSITKAGSEPVRTALVEAAWAYRFKPAIGVTLRRRQRDAKPDTLARSWKAQRHLHAKYKAMTARGKPPAVAVTAVARELAGFAWAEMTS

SEQ ID NO: 290332 - protein, 348 aa, unidentified
MYDSKDIILAVDYHDENLVIRQFNCHTGQERLLKYRTTSRNIRKIVSDSANEVAQVGGHVFWIMESTTGWARVKKAIGPSATMLVANVLQMPLPPKAYRRKTDKIDTGRILREFLNGSLPVAFQPSDELRQIRRLVATRESLVSRRTALRNWINRYLAHETWRSRAGLWSAKGMRNLKRFAASVEGPDKVVLSVKLKELEHLLELQTIVETELLAIYKQWPEAQWIDEIPGIAEISAVSILARVGPIERFDSPEELISFAGLAPGIQQSDGTKREGRIGGGGTDKHLRHYLIEATFWARRVPRYFKTYERMLDKRGPKIARVVVARMMLRSIHKMLRAQVRFNRLRVA

SEQ ID NO: 290333 - protein, 282 aa, unidentified
MAAVMIGIDPHKASHTAVAIGEKEAPLGEVRVRASAAQAERLVAWAAPWPERTWAVEGAGGLGYLLAQQLVAAGERVLDVQPKLGARVRLLATGATNKNDPNDARSVAIAALRSTAPRPVAAENHAAVLKVWSKRHRDLGRTRTQVACRLHAVLCELIPKKRLTAAVRASGTTVTEIFGVGPVIAATLIGYVADASRFPSRDRFAAYNGTAPIEVSSGDRKIYRLSRRGNRPLNHVIHMAAVTQARRRSLTLTFRCASCRASLRSPSARHCWSGSATSGWSC

SEQ ID NO: 290334 - protein, 466 aa, unidentified
MKSFYLGIDVSKGYADFMIINSKKQPVVQGFQLDDTFDGHQSLYNTLGRFLAKHDDATLFAGMESTGGYENNWYSSLIDFQGSLNIQTTRLNPFGVMHNSKADLKKNTTDKISAQNIAEYLVAHPEKVVYQQQDRMAGLRKQWGFVQMLTKQCTQFLNQLNGLIYSAYPELLSYCQNGVPAWVLKVLVKYPSAANLKRVHVKTVTKIPYVSRKKAENLIAGAKRSVASATDIATQQLIVATAQQILHLKKTIAEQTRYMLQECSMPEVELLKTFPGISDLSAVGLIIEIQTVKRFAEAKKLASFFGVHPVYKISGDGAGGFKMSKQGRTAPRQILYMVALSAIQCNPLIREVYEKHRKQGKHNMAALGTCMHKILRILYGMLKHNMPFNPHIDIANRLRSVRMKNDTSKDNTNRRFQDYDQKAPVSRRQKKKRLERERSHNVCDTNIGITAPVPLADIIANILPKL

SEQ ID NO: 290335 - protein, 345 aa, unidentified
MEHHAGIDVSLEWSSVCVVDASGKIVREIKVASEPEVLVEFFKGLSLPVTRIGLEAGPLSQWLHAGLTRAGFETVLLETRHVKAALSAMSIKTDRNDARGIAQLMRMGWFRPVHAKSVGSREVRALLVARKQLLSKLMDLEASMRGILRGFGLKMGVVTRKGFEARVRELSAGQAMLERVTSAMLEARAALWREFEQLHREMLRIVRDDEICRRLMSTPGVGPLVAITFKSAIDDPGRIAKSKTIGALFGLVPKKYQSGERDVSGGITRTGDESVRTALYEAANVMLTRTTRFSSLKRWALEVAKRRGLKRARVALARKLGVVLHRIWIDGTTFHWTKHNPAIAG

SEQ ID NO: 290336 - protein, 321 aa, unidentified
MNVVGIDVSQATLDVVCMDEQRQTQYEQVENTLKGYARLQRWLRKRKVEAVCLEATGRYSEGVAEYLHEAGYRVSVVNPARIRGYATSQLRRNKTDKLDATLIADFCRTQQPEVWTPPAPEVRQLQALVRHLTTLETAKQQADNRLREAAALPPLVVQQLRNQRDFLVAQIKQLKQAIQDHINHFPDLKRQRDLMDSIPGMGKLTAAKLLAECRSVSRFDEVRQLVAFAGLNPAHHQSGSSIRKKTTISKTGNSAIRAALYRPAVSAKRHNPVLRRFAQRLVARGCCEMQVITAVMRKLLHLVFGVLKSGRPFDPNFQTAP

SEQ ID NO: 290337 - protein, 412 aa, unidentified
MLFVGDDWAQDHHDIEIQDESGRRLAKARLPEGVAGMARLHALIGEHLPDLDAGTDGDPVASQVAVGIETDRGPWVRALVAAGYRVFAVNPLQAARFRQRHSVSGAKSDAADAHTLADMVRTDSHQLRQVAGDSELAEAIKVVARAHKTLIWERTRHVQRLRHALQEFFPGALEAFEDLTAADALELLGKAADPTAAARLTRSQITAALRRARRRHVVERAEQIQTVLRTEQLTQPPAVAAAYAATVRSQVAVLTTLNAEIATLQEEVAAHFGQHPAAEIYLSQPGLGVILGARVLSEFGDDPDRYADARARKNYAGTSPITRQSGRQKYVLARYVHNDRLLDALGRQAFTALTASPGSRAYYDQLRDRGKDHNAALRQLANRLVGILHGCIKTSTTYDEITAWPASNEAVA

SEQ ID NO: 290338 - protein, 277 aa, unidentified
MRIIDMQINSVGIDLGKTTFHLVVLGEAGKVLVRKKFNQRQLLTYTANMPTSLIGLEACSGAHFLGRALRNQGHDVRLIAAQFVKPFVKSNKNDFVDAEAIAEAVERKNMRFVPIKTDDQLDLQAIHRVRDRLISRRTAVINQLRAFLLERGLTFARTPAKLRNALPDILENPEVDLTTQMRHLIGLLWTEWKTVEDQIEGLSHELERISAGDAGCTRLRQIPGIGPIVATAIVAAIGNGAAFRKGRDFAAWLGVVPRQYSTGGKTRLLGISKRGNV

SEQ ID NO: 290339 - protein, 366 aa, unidentified
MKKHTSKKQTTRKGTAKETFAFYIGIDLGDKKSDICVLDEQGELHDQFRLRMNAQELQTYFGSLARSRVAMEAGAQSRWVAEVIERCGHQVYVSNTRQVPYIHQSDAKNDPGDAYKLAELVRFQPRLLHPIQHRSQEAQTDLSWIRAREVLVRSRTQIINAIRGMSKAFGERLQKCSTASFTGKRADRIPAQIRSAVAPLLETIDHLNEQISYYDQMIEQVARTRYPRHRLLDQVQGVGVHTALAYMLTIGEPERFDKSRAVGSFLGLRPKQKDSGERKPQMGITKAGDEYLRKTLVNCGHYILGPHGADSDLRRFGLRICERGGKNAKKRAVVAVARKLAVLLHRLWISGEVYEPLRNRPVAAAA

SEQ ID NO: 290340 - protein, 402 aa, unidentified
MNAVGIDVSKGKSMVAIMRPFGEIVSAPFEIKHTASDIHSLVELINSVEGESRIVMEHTGRYYEVLAHQLSETNLFVSAINPKLIKDFDNDSLRKVKSDKADAVKIARYALDKWQNLKQYSVMDELRNQLKTMNRQFGFYMKHKTAMKNNLIGILDQTYPGVNTYFDSPARSDGSQKWVDFASTYWHVDCVRKMSLNAFIDHYQNWCKRKKYNFSQSKAEEIYGKAKELVPVLPKDAITKLIIKQAVYQLNSASTTVESLRTLMNETASKLPEYPVVMAMKGVGTSLGSQLMAEIGDVSRFTHKSAITAFAGVDPGVNESGSYEQKSVPTSKRGSSDLRKTLFQVMDVLIKTHPQDDPVYQFIDKKRAQGKPYYVYMTAGANKFLRIYYGRVKEYLSSLPES

SEQ ID NO: 290341 - protein, 330 aa, unidentified
MSDHRPTPTAIMGCDVSSSEIVIACATANQAVKTIANNRKAIAAWLKQLPKDAVIGMEATGRYHHTLADCAAVRGHRVYVINPKHLSLYAKGVGQRGKTDPLDASVIARYVAREGDQLHPYTVPTHTQRMLRNLLSQRAGVVKHCGAIRQCLLATESSGCAALKRAHQKALQSLQALIAEIDSQLKARVKADAALEQKRAMLQTITGIGLLNSLALTHRFNRTPFANSDAVVAAYGLDPRPKDSGNKVGQRRLTKQGNAEDRRLIYLAAQSAAKTKTFKPIYMALRAKGFATTEAIVIIARKLLRIAFAVWTSNKPFDPKKIGVQAFKKP

SEQ ID NO: 290342 - protein, 412 aa, unidentified
MDVIVERPGALDVHKAQVTACVRVPDEQGARVQHLAEFKTTVRGLLALRDWLKAHRVTQVAMEATGVYWKPVWHVLEDDFELLLVNARHVKQVPGRKTDVKDAEWLCRLTEAGLLRGSFVPPKPIRELRLLTRYRKAQIAERQREANRLHKALEDTGIKLDCVATDILGVSGRAMLDALINGTTDPVVLADLAKGRMRAKIPALREALEGRFDELHALLIGAILAHLDFLDQQIEVLSGAIEVKLAPFAAAVDLLRTIPGIEVRTAQNVIAEIGTDMTQFPSADHLASWGGQCPGNHQSAGKRRSGKSRKGSKWLNQALKEAAMAALRTNDSYLQALYRRKKSQLGHARALGAVKHSILCAMWHMLTTGELYRDLGGDYYQRRDPERQTRRLIAQLERLGHTVTLQETPLAA

SEQ ID NO: 290343 - protein, 370 aa, unidentified
MLDTTTFIGLDVHARSIKAVSLDVMTGEVRCATFGYDAGAVAEWVRSVDPRARCVYESGVTGFDLQKRLSGLGVDCVAGAVSKMIKPSADRRRKNDRNDAEFLARMLSVGNVVEVWVPDDECEAARDLTRALEDARDDLSRSKQRLSKFLLRHGLVFDERTPTGRRKGNWTRAHWSWIESIRFAERADNDVLAYYVDAVRRAAEEKARLEGLVEAEARKPRWRKRVDSLRCLKGVDTASAADLVFEAGEFSRFRNARSFAARVGLTPSEHSSGESDRRGAITKAGNKHLRKTLVEAAWHYLTRSGRPKEPARGQAPDRGARRHAAKGVRRLVERREALLARGVHGNKANVATARELACWVWAVGLMAEEA

SEQ ID NO: 290344 - protein, 373 aa, unidentified
MEKYSEVFVGMDVSKSRIAVGLAEGGGAGEARFLGEIEASEASVTKFVRRLSAKHGKLTFCYEAGPTGYGLYRLIGELGHACRVVAPSLIPRKPGDRVKTNRRDALSLARLLRAGELTAVWAPDERHEAMRDLVRARSAAAADLRVKRQQTGAFLLRLGRVYPGKKTWGGAHRKWLASQNFGHLEQRIAFEELVRAMEEAKARVARLERAIEEAVPDWSLAPMVTALMAMRGIDLVAATTILAEVGDLGRFQTPRELMAWLGLVPSEASTGDRVRRFGITKAGNGRARRALIESAWCYRFPARIGSAKLARVEAASPAARRIAWKAQTRLTARYRALMRKGKLKTVAVTAVARELAGFVWAMHRALAEEQAVA

SEQ ID NO: 290345 - protein, 344 aa, unidentified
MASTITIGLDLGDRLSHFCALDAAGRVCHEGAIRTEAGALAAWASHWPAARVIIEVGTHSPWISRLLTEHHLDVIVANPRRVVAIAAATRKSDRVDAETLARLGRVDPALLAPIQHRGATAQTALAHLRARDALVRTRTLLVNHVRGSLKSVGVRLPPCTARTFATKVAPHVPPMLTPALDGVLATIESLTRTIGRYDWQLERRALQEYPETAGLRTVPGVGVLTALCYVLTIDDPTRFPVSRDAAAYLGLVPGRDQSGRRDRQCAITKTGDPMLRRFLVGAAQYILGPFGPDSDLRHWGLTLATRGGGHAKKRAVVAVARKLAILLHRLWVSGATYQPIRAMA

SEQ ID NO: 290346 - protein, 346 aa, unidentified
MGTQITGGVDTHLEVHVAAALDDHGGLLGTASFATTPDGYRELGEWLGSFGEVVLVGVEGTGSYGSGLTRHLHARGVRVVEVDRPNRQRRRRAGKSDTHDAVSAARAAFAGDALGAPKTRDGNVEAIRVLRLARNSAMRDRTRALNQMRSLVTTAPDELRSQLRGLTIPKLVRTAAAFRPAGRTDVTSANRVAFKMLARRILELDDEVCALDALLTPLVAETAPEMIERLGVGTDTAGALLVAAGENAHRIRNERSFARLCGAAPLDASSGKQQRHRLSRAGDRQANSALWRIVITRLSYDPATRRYLQRRCSEGKTKPEAIRCLKRYIARELYACLPRQQLLDGT

SEQ ID NO: 290347 - protein, 345 aa, unidentified
MPIVGGLDIHRKQITFDYLDTATGEVGRGQIAPADRAHLRAWLARFAGRDDVAFALEGCTGWRYVAEELAAAGVTAHVAEPADTAFARGRKRHAKTDKTDSRHLRVLLEQGRLPECWIPPAQILECRALLEAYHDLRREHTAWIERIHAVFFHQGAPRLGEGALRTEHGLAALRQAAAVHLSPAGQLQVATALDMLAAIEARMDTLRQQLLHAARHLAGARALQARLYGVGPLAGLAMTCWLGGAGRFSSSRKAVRFAGLDVTVYSSDGKRSPGHLSRQGPEILRWVAYEAGKTHGRASAPGHDYYAAVKDRTDGKIAALAQARKLIRQACHILAELGDDALTAA

SEQ ID NO: 290348 - protein, 434 aa, unidentified
MWKDALLVVFQKASDEFLGGAAMEVVYPRCSGLDVHKRFVVACLSLIQNGERHKEIRQFSTMTSDIQALKEWLKAAGCSHIAMESTGVYWKPIFHVLEGEFEICLVNAQHMKAVPGRKTDVKDAEWIADLLQHGLLKASFIPSSEQQAVRDLTRTRTRLIQERNRLVNRIQKVLEDANIKLASVVSDIMGMTGHAILTALVAGQEDAECLAHLAQGRLIKKQDQLKAALQGKLISHHRVLLGELLQLIATLDRSIAHLDREIAERLRQHDGLIDRIDEVTGLSRRSIEVLLGELGWDMSRFPDAAHAASWVGICPGNHETGGKRLSGRIRQGNRWAKTVLIQAAHAAAQTQTYLGEQYRRIRTRRGAKRAAVAVGHSILVIFYQMVKTGESYHEKGSDYFITAHKQKIQQRLVRQLERLGNTVILQPKGETALA

SEQ ID NO: 290349 - protein, 347 aa, unidentified
MRFYTRQHRFYCGVDLHARSMYVCVLDQEGNVLVSKDIPTAPEPFLQLIAPYREDLAVAAECMFTWYWLADLCARERLVFVLGHALYMRAIHGGKAKNDRIDAHKIAALLRGGMLPQAYVYPQAMRATRDLMRRRNYLMRQRAELLSHITNTNHQYNLPALGVRPARPAERSGIAEHFAEASVRKSIEADLSLIDHYDRQLPALERYIESSAQGHDPLALAIVRTIHGMGQVLGLSILYEIQDITRFARVQEFLSYCRLVKPTKESGGKILGHSGKKIGNAHLKWAFSEAAVGFLRANKPAQALRQRLMAKHGKGKSLAIIAAKLARAVYFMLKRGQSFDRERFFAH

SEQ ID NO: 290350 - protein, 323 aa, unidentified
MNHKVGNDNTVARFIGIDVSKQWLDVACLPERETRRFGNDCAGLEQLCAWIVPLAPELIVMEATGGFETNAATALAAGGLALAVVNPKHVRDFARAFGILAKTDRIDALVLAAFAQKVHPPVRPLPDEEPRELIDLVDRRRQLVTMRAEEKTRLTQATPAARQDIKEHIEWLNERLRRLDIDLTAKLRSSSLWKTKEQILTSAPGVGRVTVATLVARLPELGTLNRRAIAALTGVAPFARDSGQHRGRRMIWGGRADVRNVLYMATVTAARINPVIRSFYLRLKQAGKPAKVALTACMRKLLTILNTMVRNNQPWQIPPTQTI

SEQ ID NO: 290351 - protein, 504 aa, unidentified
MDRNASGRNIKVKDGSVAIHPGLPQGGSGVACARQRIRTDARRLTKAQRRIPAAGEASAQTSERTIPHDGHRISARQGGTGAPHIPMNPALWNQQKHFAALDWARDHHDVVVVDGQGSVVRELRFDHTADGWKTLRDAMQPFAPLAIAIETRNGLAVEQLLAADYSVYPVNPKSAQRYRERKSPSGVKDDRRDAWTLADALRTDGHGWKRLEKEDSIIAELRLLTRDEVVLIEQRTALINQLQSALNDYYPTALAAFDDWTRPGAWAFVETFPTPHELVRAGSRRWKRFLHDNKIWREATEERRMELFRRAEELQGSPATVSAKSLLAVSLVKMLRVLDTQLETYRARIEECFGSHPDHDLFGSLPGTGPKLAPRLLAEIGDQRTRFVTAEGLQAYAGTAPLTIKSGQIEKHRVRFACSPNLRAAVHLWVDHSRQRCAWAEAYYRAHRDKGHSHACALRCLAQRWLKILWKMWQTNSRYDESLHTRNQLKHGSWVLSLHPSRVA

SEQ ID NO: 290352 - protein, 339 aa, unidentified
MGRYIGVDLHKNNFMVCFLDGETGEYELCGYRLSELSLFRGELLSGDSVGVESTGNTRYFVEQIRDCVESVKVINPSQFKVISHSVKKTDRHDAETIAEFLSKGMIPEVRMKDKKTSQIASLCHTRDKLVKLRTALKNKIHNILNSYGIQIKKESLTSEKGLRSVLQLPVDEIAQVELTVIVSQIRSLNEGIKALDAELSERGRSLKGYENITSIKGIGPKSGTILLSVIGDINDFESEKKLAAYFGIVPRVSNSNETTHSGRITKRGSKIGRTTLVQCTLIAIKYSPYLNLFYQRIKERKGSGKAIIATAKKLLGVIYMTLKEDVIFENFPQFLMKTT

SEQ ID NO: 290353 - protein, 482 aa, unidentified
MKKNNIYQNQSQELLSLFEQAANNAKVMCVPIDYAKKDHVVMFCNGYGDILRKPFSVKNSPEGVDYLTDQVIRSCHQRSISEKHVFFGGEQVGSFADNFVSTLRSQGWLVAGVNAHEAKKQRENLQASTDRLDLMGIAKSLLNRRANCSPAQSGIYLNMRTLVRHRRKLVGITTEVKNRIHAVVDRLFPGFLNESKSGITPFSNSSLWLMKERFSAPQIRRRRRSTLIESLRRLGTKKSECTADTLQQYAAQVLKPPQDYVHMLQLSLAQHVKHFCCLQESIGQLEKEIALNLAQTQGAFLTSVRGVGIVLAAGVSAEIGNPFEQKTINNLVSYCGIIPRVKQTGGPQGETRTGKVAKRCNRILKDYAVQSASHLGLHGPADLMSDYKRRDAAGQHADFGMARRYLRMAMCLMRTSQIYLPSRLRKAQAQVKQRADYYLMTWPYLRDKWQKLGTLETAFKADHPLGQWRTIVQQFYGIKLTL

SEQ ID NO: 290354 - protein, 337 aa, unidentified
MNAQVVGLDIAKNVIQVHGVNAAGAAVLTKRLKRSQVLEFFANLSPCLIAIEACAGSHDWARRLAGLGHRIKLIPAQYVKPFVRRSKTDARDAAAICEAARQPDMPTVAVNTEEQQAVQMLHRIRQRLMQERTALINQTRGLLGEYGIVFPIHVSAFKEGTRRLLADESNTLPALARDLLLDLCIELTALEERIDTVDRRVRRLAKEDERCARLQEIPGIGPVTATALIAAVGDARRYRSARHMAASFGLTPHEHSSGGKQKLLGISKRGDRYIRWLLVQGARSIMRFAGKRTDALSRWVCQLSSRRGVNVAAAALANKLARIAWALLAKSERFATA

SEQ ID NO: 290355 - protein, 403 aa, unidentified
MNAVGIDVSKGKSMVAILRPFGEIVYSPFEIKHTSSDISSLIERINSVDGESRVVMEHTGRYYEVLAHQLSEANLFVSTINPKLIKDFDNDSLRKVKSDKADAVKIARYALDKWQNLKQYSLMDELRNQLKTMNRQFCFYMKHKTAMKNNLIGILDQTYPGANTYFDSPARSDGSQKWVDFASTYWHVDCVRKMSLHSFIDHYQKWCKRKKYNFSKSKAEEIYGKAKELVPVLPKDEITKRIIRQAVDQLNSASSTVEELRTLMNDTASKLPEYPIVMEMNGVGPSLGPQLMAEIGDVTRFTHKGAITAFAGVDPGVNESGTYSQKSVPTSKRGSADLRKTLFLVMDVLIKTMPQDDPVYQFLNKKRAQGKPYYVYMTAGANKFLRIYYGRVKEYLSSLPQSK

SEQ ID NO: 290356 - protein, 312 aa, unidentified
MSQKVYVGIDVSKKNLDVFVSGLNIFKSYGNDDLGIKDLKDFLLPLSPALVLLESTGGLEQNAARALAQCFLKVTIVNPQRARRFAQAADLAKTDKIDAKMLSNFAYAFEDKLEVFKVLDDVSLKLKALSTRRNQLMKMKTQEKNRLRWVTEDSVIGDIKDMLDLISKKLKKLDEEVSSLIKANQAWSKRSEILQSSPGIGKVTSNALISCLPELGLGAKKKVSRLIGLAPINSDSGTHKGKRSIKGGRFNVRASLYMAVLSATRHNPVIKEFYQRLLAKGKPKKVALVACMHKLIHILNSMLAKGEKWKHA

SEQ ID NO: 290357 - protein, 401 aa, unidentified
MNAVGIDVSKGKSVVTILRPFGEVVASPVEVCHTDSALGELADTLKGLSGETKVIMENTGGYHLPIAYFLHEAGLTVCVVNALIIHNYGNNTIRKVKSDSADALKIANYGLSHWLELSVYVPENEIRHMLKAYSRQYNKYMKVKTALRNNLISLTDQVFPGVNELFSSPDRKSDGHRKWVDFVIRFWHPHCISLLSQKAFTTAYRNWCKSSGYNFSTSKAEDIYIESLGHINILPKNESTKMLITSAAKLINSISEIAHATAAEMKRLASLLPEYPIVMDFYGVGDILGPQIMAEIGDIYRFPKKSSLVCFAGLEPVENSSGKFRGDERISKQGSPHLRRALFLVMDCILMRAPANDPIFAFIDRKRTEGKHYYSYMAAGAAKFLRIYYARVKEHLDEIYP

SEQ ID NO: 290358 - protein, 544 aa, unidentified
MSICQGMQIFIRLVWLKLNSSLKIKKFSFIGKTVKVSEEKDSALGYEPVAKFLSSARFKSGNNLVHRHRRLTRLMIPGTQIYRQKGGIMEHYYLGIDVSKGYADLIILNSKKEPIVDNFQLDDTFEGHCYLYKFLVKFLDDHPESIIYSAVESTGGYENNWYNSLIEFQGFLNLQTARLNPLGVYHNNQADLKRNITDKISAKGVAEYMIAHPEKITYQQEDSLASLRKQWAFVKMLTKQCTQLLNQLESLLYSANPEILVYCKDGFPEWLLRLLAKYPTASNLAKAKVVPLSRIPYVTPDKAQELINNAKRSIASAKDKITQQLIVSTVKQILHLKETIKAQTKIMENECVISEVELLKTFIGISDHSAIGLMLEIQTIKRFKTVKKLASFFGLHPELKISGDGSAAFRMSKKGRKEPRQILFMVAMSAINTNPLIMDIYQVRVEKGMEKMAAIGLCMHKILRIIYGMLKHNQPFDPEIDRRNRERSAKRKKTIRMDKNRRFQVYDPKAPISRRQYMKRMERELSHSDNNTKSGINAPVPFPT

SEQ ID NO: 290359 - protein, 351 aa, unidentified
MPCKKDVAVVRTIGIDTGKNTLHMIGMDGKGTIVLREKVSRSRIAARLVNMPPCLIGIEAGMATHYISRDLLALGHEVKQVPPAYAKPFRQGHKNDFRDAHAVAEAVQRPSTRCVPIKTDDQLDLQALHRVRSRLIGDRTAVINQVRGFLLEHGIAVRQGPRSLRQQLPQILATRTDVLSPRMLRIIGDIVDDWRYLDDRIERVTDEIEGLARTDVNCGQLMSVPGIGPIIASATVAAVGNGTAFAKGRDFAAWLGLVPKQMSTGDRTILGRITKRGNRYLRMLFVQGARAILLRPKSWAKYSFGPWLTAAARRLHRNILTIALANKLARIALTVLVQGRSYETRIVPAAA

SEQ ID NO: 290360 - protein, 410 aa, unidentified
MELLHPHCAGLDVHKESVVACIRHMVDGKVTTRVQTFQTTTQGLMALLDWLAAEGCTHIAMEATGVYWKPVWHILSDGEFELTLANAAHVKNVPGRKTDVNDATWLADLMAHGLIRPSFVPDEPTQQMRDLLRTRKQFVRERSTHTQRIQKTLEDANIKLDSVITDIVGLSGRRMIEALIAGQTDPQDLAALAHGRIHATKEELEAALRGRVRGHHRFMLRLHLNHLQAVEEAIASIDQEVSAQLEPFRLAVEMLTTIPGISSLAAEVMVSEIGIDMSRFKTEGHLISWAGLCPKNDESAGKRRSNRMKKGAPWLKTTLIQCAWAASRTKGSYLQAQYLRIRSRRGPKKAIGAVAASILTAAYHMLKNGTLYQDLGASHFDNRDKGKQVLRLVNRLQNLGFAVQITSMAA

SEQ ID NO: 290361 - protein, 309 aa, unidentified
MEHFVGIDVSKDRLDVHLRPSGENFACARDGDALAGLVERLRMLAPALIVIEATGGYETVVASAIGAAHLPLAVINPRQIRAFARATGRLAKTDRIDAAAIAHFAEAIRPPARPIADAQAQALGELVARRRQVIEMIVAEGNRRRMARQRRVIRAIDRHLALLQAELSGLDGDIDAAIRSTPAWQADADLLVGVPGVGPVTTRTLIAELPELGRLTRRKIAALVGVAPINRDSGTLRGRRAIAGGRSAVRAALFMAALVASKKNPVIAQYYQKLRAAGKTAKQALTACMRKLIVILNAILRDRKPWQPT

SEQ ID NO: 290362 - protein, 351 aa, unidentified
MEIDTIGIDLGKTVFHLVGLDKRGEILIRKKFTRSQLLHLTANLGVRLIGMEACGGAHFLGRALREQGHDVRLMPAQYIKPYVKTNKNDYIDAEAIAEAVGRPRMRFVPIKSEEQLDLQSFHRVRDRWVRRRTSLINQIRGLLLERGITIRQGRQHVQTALPGILEDADTCLSGPLRTVLAQLQGELRHLQSQIDQIDEAIVKVAGEHEACRRLMTIPGIGSITATAVVAAIANGVEFSKGRAFATWLGLVPRQYSTGGKEKLLGISKRGNSYLRRLFVHGARAVLQRSENQAPGLRAWLAKLSARAHKNVVAVALANKLARIAWAVLTKGEVYKPALLGGEDLRSQLACN

SEQ ID NO: 290363 - protein, 390 aa, unidentified
MLLDHPSDGPTAIRTHIGAIFVSLELSRSNWLITSLSPGKGEKMSKHSVTAGDVAGLMKLFAELRRKAAARTGESYPIVTIQEAGLDGFWLHRVLQQEGIKSYVVDPASIATPRRRRRAKTDRLDGEMLLRALLAYKRGEPRVCAMVVAPSPEEEDRRRICRERRNLIAERITHVNRIKGLLFAQGISGYEPLRRDRRVRLEALRTGDGRELPSHLKAQIGREFDRIELLLEQIKSVEAAQDALLAAARKPASEDEAAPGPVTMLLALKGMGANFATVLWSEAFYRQFANRRQVAAYAGLAATPWQSGRIRHEQGVSKAGNPRLRTTMIQIAWLWIRHQPLSALTRWFKERSPQGRKRAIVALARKLLVALWKYVTQGVVIEGAVMKPAA

SEQ ID NO: 290364 - protein, 406 aa, unidentified
MELEPIHKSSIGLDVHQKHVTACLIAEQEDGSIHTETLTFGTFKRDRRALARWARDANPEIVVMESTGIYWKSIYSALEREGIVAAVVNARHVKQVPGRKTDVADSRWLAMLARCGLLRGSFIPPEELGNLRLISRERQKTVGMLASEKNRLHKILTDGGIRLSVVVSDIHGRAARQMIECLIEGGTPLEALQFANSRLKATPEELVDALDGDLTPTHRFVLREILQHIRDLEARITRFDIQLLAELESHRWALDLLQTIPGIDAVGAAMLIVEIGVDMEAFGSAQRIASWAGVCPGNNESAGKRKSARVRKGNPYVRRLLCEMANAARRTKSMFQSKYSGLVIRRGHKRTIIALAHKILKTVFVLLSRKVPYQDSQVDYKELMVQRNAPRWIAALRQYHMLPTKI

SEQ ID NO: 290365 - protein, 301 aa, unidentified
MNPNSQTYRSFVGIDVSKDKLDVCVQHPSLDCRHRVYPYDDPGLMKLTDDLKAIHPQRIVLEATGGLERNICHLLLHHGLPVAVVNPRQVRDFAKAFNRLAKTDKIDKIDASTLANFAQVVHPRIATIPDKNRQKLQALVTRRRQVLCLITQENNRVAGTQSPGVRKMIQQAVGLYQKQLKKLDGQIQQALVKNQAIQQQASILRSVPGVGPATTAVLLAQLPELGKLNRQQITKLVGVAPINRDSGTMRGRRMTGGGPTAVRHGLYMAALVATRYNPKIKVFYQRLLVNGNDCWSTAKPR

SEQ ID NO: 290366 - protein, 341 aa, unidentified
MRKTLYCGIDLHSNNAMYVITDEQDKQLLRQRLPNELPVVLKTLAPYRARLKVVAVESTYNWYWLVDGLQEQEYPVVLANPAEMEQYDGIKEADDLSDAAFIARLARLGVLPTGYIYPKADRPVRDLLRRRMLLVQQRTGIILSLQNMAQRQSGHNVGWRALRKLSDEERVELLGDHACLAFVTDEQVDLIELLTEKIKRFEKKVLEHAQLRPAYARLLTLPGVGTILALTIMLETGEIGRFQTVGDYTSYCRCVRARHLSNGKKKAHNNGKNGNPYLAWAFVEAMHHAVRTCPPAQSFYDRKRAKRNGALAPKALAAKWSKAAYYVMTRQEDFDLTRVFG

SEQ ID NO: 290367 - protein, 366 aa, unidentified
MKKDSTAAMGRKRIFKEPKLTIGLDLGDRSSHYCILDEAGNVILEHNLPTTPKGIHAVFRRFPRSRIALETGTHSPWVSRQLTELGHEVIVAHARNVRLIGESSRKDDQLDARTLARLARIDPDLLGPVRHRSAQAQIHLTVIRARAALVSTRTALVNAARGLTKSYGERLKKCGPEQMNRENSRGLSQELRDALDPLLGEIESLNQRIAEYDRRIEQIAKEVHPEVALLKQVKGVGTLIALTYVLTLDDPHRFRRSRDAGCFLGLRPGRRNSGNSEPQLHISKEGDRYLRTLLVQGAHYILGPFGQDSDLRRWGLKLAERGGKNAKKRAVVAVARKLAVLLHKLWVSGEVYEPLHNNSKVVSAVA

SEQ ID NO: 290368 - protein, 485 aa, unidentified
MAKRKLSTFDRLRLGAALNRKERRAVEQRLNSTDPGLEIVNGDAAGIDVGNESHYVAVPLGRDAQPVREFGSWTAALEEMAQWLISCGIRTAVMQSTGVYWIAVHDVLQKHGLEVHLVDARGTKNVPGRKSDVQECQWLMKLHTYGLLRACFLPAPEIHAVRTVWRLRDQHVKDAGRCIQHMQKALIEMNVQLHIALSDISGLSGQAIIRSLLAGQRDPKALAALRDPRCQASEEEIVHSLQGNWKPDVLFELQQAVDAYDFYHQQMAKCDQQLKQYMAVLPVRKAEMPVPPAPSSPATHTSNSSHSYKPRKPKGNQPSFDLEAELERILGVNATTIDGIGVMTIQTVLAEVGPDLSAWKTEAHWASWLNLAPKRDISGGKVIRHVRQRQSNRVGNAFRMAAQSLLRSQSYLGARCRYLRARLGGLKGVKAMARVLACLYYRLLTKGQVWVDRGVEEFDRRSQQRELAALERKARKLGMQLVAAA

SEQ ID NO: 290369 - protein, 406 aa, unidentified
MKVYLGIDWSERKHDVCMINECGEVLQQLVINHTPEGFLELDSARRKMGIEARECVVGLETAHNLLVDFLWDQGYEQVYVLPPNAVKSAQGRYRQSGAKSDASDARLIADMLRTDQGRYTAWIPDLAVTRQMRAKVSLIIFLTHSLVRTENRLRAVLLRYYPAALEVFSSLDAPITLAFIQEYTMPQAAAQLTFEQFKGFLKLHRHHQPKKWAGCYARLQRPQPQADPAILAVYSSEARLLAHLLDELAHAKTKALQELEEIYLQHPEHEIYDSLPGVGPFLGPALLSKFGDDRQRFPSSTVVQAIAGTCPVTVASGKKSIPQFRLACDHEFRYITQQWAKQTIHLSPWAHAYYANIRPHCHSDNDAYRRLANRWLEIVWKLWMDRKPYNETKHLKQKALRSMPRS

SEQ ID NO: 290370 - protein, 401 aa, unidentified
MKEFNPEQQGIETASALEIVRTAENVDVHAAYVGLDVHKETIAVAIAEPGRGEPIYRGEIANKPKSVEKLLAKLSESYHGGLLLFCYEAGPCGYVLYRQILASGHDCQVVAPSRIPKAPGERIKNDRRDALKLARLLRGGDLTAVWVPDQEQERMRDLSRARDDMKGQERKARQQLNAFLLRHGYHWPRGKSRWTPAHENWLAGLKMEHPWQQVVLEEYIAAERAAGERVAQLSDHLMRALPEWSLAPVVDSLIALRGVDKLAAIVLLAELGDISRFDSPRQLMGFLGLVPSEYSTGTRRRQGGITLTGNAHARRMLVESAWSYRFPARQTKHLKGKARNASAQAKQIAWKAQTRLCGRYRTLTRAGKNTKLVCVAIARELAGFIWDIVRREMPRLAPQQG

SEQ ID NO: 290371 - protein, 453 aa, unidentified
MEHRRIIGMDLGVVSDHVVAICDHTGTTLAKRRCRPTRSSLEAIEAAALAEAPEGTRLEVVIEPTGAAWMPVAVFFCRRGHTVYRVSSQKAADLRRFLSRHAKSNAIDALTLARLAIVDPEHLVALELPSAELAALTRRARAADALTEQIAARKTRLRELARHAMPTVDTVFTNKIGNADIAVLERYGDPRAILRLGPKRLASLIVRVSRGQHGAARAAAWLAVARDALELYDAEPAVPLADIAAELATEARLIRLLVAERDTHVRAREQAYAKADPTALARSLPGVAEAGGPMLVAAMGNPARFTNGAAFKAFTGLAPRANGTGDADAKGQAMSKAGSSRLRDQLVCSANVARRLDPQLAQVYWVQMVERGAHHTKAVCVVAARLAERAWATMARDQPYVIRDIDGTPVSPAEARRIIAERYHVPEEVRRRRRSRNHRRAGKAPQGVLEAHG

SEQ ID NO: 290372 - protein, 442 aa, unidentified
MKTTQTERRAAGIDVGSEQLFVAAAQGCVRVFSSFTAALLELRDYLLAERVTTVAMEATGVYWLPVYEVLEEAGLEVCVVNAAHARNLPARKTDMKDCQWLAELHRKQMLNSGFIPPTAIRELRDYARLRQDHLQMSAPHILHIHKALDQMNIKVHEVLSDMTGASGQRMVQAIIDGVRKPELLLTLCEEQVLKTKRQRMLAALDGRWKESQVFALRQAYENWQHYQKQIAACDQQIAQVLERLAAQAPAPVLTGQPQAKRKAKRLHKNAPAISNLDQLVVRITGGCDLSQLPGLTSYSIMQIIAETGTDMTPWATRKHFTAWLGLAPGSRQSGKTKKSQPRFRGRAGRLFCVVSQSLAQSKYLALGGFYRRVRGRRGGQVANIAAARKLAVLFYNTLRFGWAYVEEGLAEYEKKYKEQYVKRLKITAKRLGMQLVPEPACT

SEQ ID NO: 290373 - protein, 345 aa, unidentified
MNNITTIGIDLAKNIFQVHCNDKNGNKVKSKRLTRKQLPEFIANLSSCLIGMEACSSAHYWARLFTSYGHDVKLMSPQYVKPYVKTNKNDMADAEAIAEAVTRSNMRFVPIKNTAQQDILCLHKVRERIVKNRTSLSNQIRGLLLEYGITVNIGKSALKAKLAILIDDESLLLTPMMKELISDLYAEYVALDEKVKLYDTKIENLVQSNEQCKRLMAIPGVGPISATAMYASLGNVSVFKKGRHVSAWLGIVPKQLSSGNKTLLCGISKRGNGYLRQLLIHGGRAVLKSLGDKNDNFSSWARKLSQRAGFNKAAVAIANKNARHIWALLSGQEKYNDKLACRYNV

SEQ ID NO: 290374 - protein, 354 aa, unidentified
MPKTASAEITVIGIDIGKNSFHVVGHDSRGAIILRQKWSRGQIEARLANMPRCLIGMEACVGAHHLARKLATFGHDARLMPAKYVRPYAKGQKNDFNDAEAIAEAVQRPTMKFIATKTADQLDLQALHRVRERLVSQRTGIINQIRAFMLERGIAVRQGIRFLRTELPIILSTRSDVLSPRMLRVIEDLATDWRHLDERIETLAREIETIARQDAGCDRLMSVPGIGPIISSAVVAAIGSGDVFPKGRDFAAWLGLVPKQISTGDRTILGKISKRGNRYLRVLFVQAAWVVLVKPQSWERHGLKSWIEAAKKRLQHNVLAIALANKLARIAWAVLAKGRGFEATRTIDGSTQPA

SEQ ID NO: 290375 - protein, 322 aa, unidentified
MTPPDIYVGIDVAKDQLQVALRPGGEAWSVTNDRAGLRDLAKRLAASKPALVVLEATAGMEMPVAAALAGAGLPVVAVNPRNAREFARATGRLAKTDVIDAHVLAQFGEAVKPPLRPLPDAATQELNALVTRRHQLVEMLVAERNRLTQAAAKAVRTGIEEHIRWLEGRLADIDQDLSQTIRQTPIWREKDELFRSVQGVGPVLSTTLLAGLPELGALGRKQIAALVGVAPLNRDSGRFRGKRMVWGGRARVREALYMGTLVATRYNPVICAFYQRLLAAGKPKKVALTACMHKLLTILNAMARHETPWQTMHLTLAKQDGC

SEQ ID NO: 290376 - protein, 344 aa, unidentified
MEYYVGLDVSLRSCALCIVDGKGTVLFEREVPCEVSDIAECLEEFPHPIERVGFEAGAMSQHLFFGLTAEGFDVVCMEARQVNAALSAMRNKTDKTDARGIAQILRTGWFSPVHMKSREAHGFRALLSTRKALLKKTMDLANEVRGLLKIFGIRLPQTVKHGSFDGVVRPMIEIDDVLAHALVPLLDARVVLYQHYLELDRRVKRAASQDDVCMRLMTIPGVGPIAALSFKSAVDDPTRFTRSRTVGAHFGLTPRRYQSGEHDNPGRISKAGDRDVRAVLYAAANALLMRTMASSQIKSWGMRLMRTKGRRRAVVAVARKLAVLMHRMWIDGSEFRQDQVGGMA

SEQ ID NO: 290377 - protein, 393 aa, unidentified
MIIIGCDYHIGCDYHPGFQQIAFVDTDTGECSERRLEHREEAEKFYRDLGGQGAAVRLGMEASGHARWFERLLGELRFDLWIGDAAEIRTKRVRKQKTDRQDAELILRLLLEDRFPRIWVPRGENRDLRQLLWHRHRMVQARTRIMNQLQAVALNEGLRCKKRLWRDAGREQLEAFELAPWASRRRRDLLELLDQLTPTIAELTQAIEQEVEKCPEARRLQTHPGVGALTALAFVLIIGRADRFQCGKQIASYLGLVPLEESSGQRRRLGHITKQGNSLLRFLLVEAAQVTVRSDPEWRSKYFHLAMRRGRKIAKVAMARRLAVRMYWMWRKGWDYEQLKKFGSQRGTARNRRWCAVEHRVIDWVSRSPARGVRSSNHDRGCDRRDAWVGLSS

SEQ ID NO: 290378 - protein, 341 aa, unidentified
MEQATTIGLDIAKHVFQLHGADAAGHVLFRKRITRVKLLGFLAAQTRCVVAMEACAGAHYWAREIAKLGHHVRLIAPAYVKPFIKRQKNDAADAEAICEAAQRPSMRFVPVKTEEQQANGIVFRARDLLVRQRTQCVNALRGHLMEYGYVFPKGITHVEALVALVEDLQSSLPDSVRVILKLLVDTFTALEAQIAVLDAEINQRSKSDPTARRLMTIPGVGPITSTAITALVPAAEGFPAGRDFAAWLGLTPLQKSTGGKQKLGAVSKRGERTIRRLLIIGASAVVQQASRRGAPKGSWLAQMLARKPKMLVTVALANKMARIIWALLVKGGTYRAPAVAA

SEQ ID NO: 290379 - protein, 352 aa, unidentified
MSDYYVGLDVHKASICIAALNTDGKLVMDSVIETSAATVLDFLKGLRGQVEVTFEEGTHATWLYDVLKKTRARVIVCDPRKNRLLNAGNKSDRVDARKLVQLLRAGLLSPVYHGEHGVRDLKELVRSYEYLVEDSTRVMNRIKALYRSRAIACAGTDVYKQQQRETWLQKLAEAGVRARAARLYSELDHLTSLRREARQAMLVESRRHAASKILHQVPTLGTVRIAQLIAAVATPHRFRSKRQFWSYCGLAVRTRSSADHHFLGGEVRRAAKATTRGLTQDYNRTLKHVFKSAALTALRYEPFKSSYAELLARGLRPELARVTVARKIAAITLAVWKKGEAFDVDKLIKHAI

SEQ ID NO: 290380 - protein, 416 aa, unidentified
MQKHSNLPVKSEQRSKQTKSRVPVQRDTKELMAELLGKLMEKQDPKAISASAGKEQKQGRLRPNLDRLTVGVDLGDKWSAYCILGLEGETLIEGQLQTAPLGVAEFFQSLPAARVVLEVGTHSAWVRELISGCGHEVLVANPRLMEGSKRRKRKNDRIDANKLARLGRMDPQSLYPIQHRSPQVRQDLVMLRARDALVAVRTELINSTRGLVKSVGARLPQCASPSFSKKVKESLPVEIREALLPLVELVAALSDSIQGYDEKIEKLGSEKYGHTALLRQVKGVGPITALAYVLTLENPNRFAKSRDVGPYLGLVPNQEDSGDIQPQLGISKAGDTMLRRLLVGSAQYIMGPFGPDTDLRRYGLRLCERGGKNAKKRAAVAVARKLAVLLHHLWVSGEVYEPLRQGLSATLTQATA

SEQ ID NO: 290381 - protein, 342 aa, unidentified
MKINAVGIDLAKSVVQIHSVDEHGKKVLNKQFKRDQVMPFFANMPPCLIGMEACGSAHHWARKLASLGHTVRLMAPQFVKPYVKGNKSDAADAEAICEAVTRPNMRFVEVKSVEQQAVLSLHRVRQGFVKARTAQGNQIRGLMAEFGLIIPKGLSAICKRVPELIEDATNELNGSMRQLIQSLVEHLKDLDRQVTELERQIKVWHRGSAASCKLEKIPGIGPITASALSASVGDARTFSSGRQLAAWLGLVPKQHSTGGKPTLLGISKRGDSYLRTLLIHGALSVIIAARKKNNTGQWLDAVLLRRNANVAAVALANKNARIVWALLAHGRQFSEEHVSVRP

SEQ ID NO: 290382 - protein, 345 aa, unidentified
MNKQICIPQATVFCGIDVSARSLAVALINGDGSLAQREFPNSAGGHRALLAWLAKCGGRVRVSLEATGVYSLDLALALDAAETVGLAVLNPKLVNRFAQTLRRSKTDAADAVVLAEYSQRMPFSRWQRPEASHLRLRTIGRYVESLVVEQAGLKNRLRTAEQTSTTPRVVLVDLRRALASVERRVAKMRREALKLVRAEAALRERFQLLVSVPGIAEISAIRILSELVLLAPTMGVRQWVASSGLDPAHQQSGTSLHKPSRISRAGNRHLRAALYMPALSAVRNDPHLRAFYRALRSRHKTGLQALMAVARKLLHAIYGIFKTGRPYEGKLLFPNIQTEVESIAG

SEQ ID NO: 290383 - protein, 407 aa, unidentified
MEVLYPRCAGIDVHSESVTACVRVASGQEVTHEHRTVSTTTRGLLDLVDWLTTAGCTHVAMEATGVYWKPVWHVLEGAFTLVLANAMHIRNVPGRKSDMNDATWIADLLAHGLIRSSFVPPAPIQELRDLTRTRKQLVREIARHTLRIQKTLEDANLKLTRVVSDILGTSGRTILRALVAGETDPARLADLTKGRLKASRPQLLDALHGRVTAHHRFMIQLHLTQIEALEAALHDLEAHLGDTLAPFRAAISLLTTMPGLSDTAARVLVAEIGIDMSRFPTAGHLVSWAGLCPRLDESAGKRRATRIRHGAPWLKTTLVQSAWGATRKKGSYLQAQFLRLKSRRGPKKAIIAVAASMLTAVYFMLRDGVEYHDLGPQHLAQRDKAQIAKRLLQRLRDLGLNVEVTAA

SEQ ID NO: 290384 - protein, 411 aa, unidentified
MIKPLVKCCAGLDVHRATVVCTVIKEGKRGQINKETREYSSYRKSLLELGRWLCSKDVELAVMESTSVYWKPVYEVLEGLLPRIYLVNSRHVKNVPGRKTDVKDSEWLAELARCGLLRSSFIPPRDFREIRFLTRYLMKLSGYIASEKNRLHKTLDDCGIKLGCVVADMGGLTATSIIDALIEGKMTPEQMAELARTHLRKKKAELRMSLHQDLSDRHRYLLRCIQNHLRWLEKQRQEIGCQVVAAMEPYRQEWQLLQTIPGFDELSAALLLAEIGIDMGRFGKSDQLTSWAGVCPGSHESAGKNKSGRTRKGNKYLRQMLCEASNSARKTESQFKYLYQGLAIRRGHNRAILAIGRKLLEIGFVILSRKEPYKDPKVDYEKLLVMRNAPRWISKLRKYGYLPVNLKQKAA

SEQ ID NO: 290385 - protein, 313 aa, unidentified
MIIPLRCVGIDVSKHFLDIFDEAIGASERIANATQAITQLVSRWRCDALVVFEATGVYDLELREALRQAGVRFARINPARARDFARASGQLAKTDPIDARMLAAFARAMQPATEQVATPARDALARLAKRRDQLVLMRAQEKNRRSEADDRAMAERIGRFIEVLDGEIEEIEADIRTLIKTEQEISDDAQLMRSVPGVGPVACMQLIAQMPELGHVGPKQIAALAGLAPFNVDSGTYRGKRKIGGGRKRVRDALYMAALNAVRRADPFKAFYTRLRQAGKPAKLALIAVARKLLTVLNAMMRDRKPYKLAPAT

SEQ ID NO: 290386 - protein, 324 aa, unidentified
MAISALGIDVSKLTLDASIIIGSKPRHRRFENTMAGCEALVAWLRQERVGKVHACLEATGRYGMVVALMLHDAGHTVSLVNPAQIRDFTRTRLGRNKTDKIDSGHIRDFCALFEPPAWQPPSAALRRLCELQTMRAGFVASMTEWKNRAGSGVEDAMAHRLAQATIAHFAAQIDAVNDAIRETIDGDDTLRGKRDLLLSIDGVGEVLAAVILAELPGHDVIGDSAAAVAYAGLNPRRFASGTSIDHPTRISKIGNAVLRTALYMPAMSAMRCNAAVAALVARLRAKGKLAGKQILVAAMRKLLVICFGVLKSGKPFDAALAMPA

SEQ ID NO: 290387 - protein, 408 aa, unidentified
MMTFVDRHVTGGVDTHDDVHVAAVCDTETGRVIDTSPFPTTDAGYAELLSWMTAHGIIDQIGVESTGSWGAGLTRHLRAAGVKVIEVDRPDRKARRKDGKTDTIDAVAAARAVISGRATGTPKTRDGSVEAIRQLEIVYHAATRDRTRAINQFKAIIVAAPAALRHRLRDDLSLRNQLARARRFTDNHPDLVEQQTRFALRELARRIEFLDAHNSRLEARISELVIAHCPALIGLAGVGPHSAAQLLAAAGDNPQRIRSEAAFAKLCGVCPMPASSGKTTRHRLNRGGDRRANNALFTIVLNRMQRDPNTRAYVERRTTEGMSKKEIMRCLKRYVAREIYHVLTNPPTELITGEQVRAIRNERGLSLRTVATQFSTCAIQISRLERGLLHDTRRLEQIHHWISNHPLT

SEQ ID NO: 290388 - protein, 388 aa, unidentified
MQVIADRPEAPSAIRTNLGAIFVSLELSLSTWLITSLSPGSGEKMSKHMVQGGDIAGLLRRFAQLQEKAQARTGRNFPIIVIQEAGLDGFWIDRVLKNEGIESHVVDPASVATSRRRRRAKTDKIDGEALVRTLLAYKRGEPRVCAMVKAPTPEEEDRRRLCRERRVLITERVKHVNRLKGLLFSQGVCGYEPLRRNRRLRLDELRTGDGRPLPKHLKAQISRELDRLELLLEQIKAVETERDALLAAQQIAAPPSAAMLLAIKGIGPDFAAILWSEGLFRHFDNRRQIASYAGLAPTPWKSGSIDREQGVSKAGNPRLRTTLIQLAWLWLRHQPQSALTLWFKERVVRNGGRLKKATIVALARKLLVALWKYVTAGVVIEGAIMKAV

SEQ ID NO: 290389 - protein, 362 aa, unidentified
MSQSTRSFLGVDLHQCTVTLTAVDPSGEKIDRLKISTKSTGKIEEWLLALPRPSHLAVEACPFVEWFIDRFRPCVDQIDIADATELANLRGKRRKTDFNDSLDIAKRLARGECPLGYIADFELMQLRKLGRHWRHLSRLSSRTKHSMKSMLNAANIRGPKFDSVSAQRWFLANRDLLGPVQQQAFADLIDVLMLTDRQRERLRREIIFATRSQRFAPVVSLLMSVPGVGEIWAAIIAAEIGPFDRFPNADTLEFWAGLTADMKESAGRTQSGNITKAGSVTLRWALCQAAVTLCQCDARQEATRQRLIKRIGKPKANVAMGRRLLRILYAMVRDNKPFERGPTRDRTAAANKARLGRKKQAA

SEQ ID NO: 290390 - protein, 452 aa, unidentified
MENDVISMEIINPHAAGIDVGSRSHWVAVGQSEQDVREYGVFNEDLFAMADWLEEKQVKTIAMESTGTYWQNLYAVLLSRGFHVILCNGKFTKNIKGKKTDVKDCQWIQKLHSLGLLSGSFLPDGQTEELRTYCRHRANLIHSSASTSKKMQKYLRLLNLRLDVVVKDICGLTGLLIIRAICDGEKNPQKLASLRHGNCRKSEEEIAKALHSNNREDYLFALKQELDTYEYLQHKIIQCDLEIEKKLNEIIGSDDNKKQHYIDPKAHKRINKNTPKNIDLNLKSYQMFEGTDLLAIEGMSYSTVLALMSEVGIEGIRKFTTAKHFASWLRLAPNNKVSGGKVLSSRVPKGSNRLKIALRNAANAIGNLKESTPLRDFFHRINFRKGRVSAISATARKLAVIIWNMVVKGTPYINPEGYLFLDQKRKLGLVKRIKKQIDKFALTDQDLGFTNT

SEQ ID NO: 290391 - protein, 409 aa, unidentified
METVHSLCCGLDVHQAVVAACLRRVNADGTVSLEHRSFGTTLRELMALSDWLVESGCPLAAMESTGVYWKPVYHVLSGALTVWVLNAQDVKQRRGKKTDRADAQWIAELLAHDLVQPSFVPPPEIGALRDLVRMRTALVQTRTQAKNRVLKTLEDTNVKLASVVSDSFGVSGRAMLEALIQGGRTPHEMAKLARGVLRKKIPQLEVALEGSFTAHHAALIRLNLESLDLLNRQIAELDERIGTLVEPLREQVERLKSIPGVNETAARTILSEIGTDMTRFVSAGRLASWAGLCPGNNESAGKHRSGRTRRGNRHLRRILAECAWATRHTDTFLGHTFRKLQARIGGKKAAVAVGHKILVIGFHLLEEGTPYEDGRYDRPNPREETRRKKQALDVLSQLGYDVTLKKTAA

SEQ ID NO: 290392 - protein, 369 aa, unidentified
MKSSVSLSAGPIHLGLDVSKDRIAVGILRWDEQVPDTEMIFNDEASARRLIDRFADRGQLRTCYEAGPTGFGLYRLLTSMGVACEVIAPALIPKAPADRVKTDRRDCQRLARLHRAGELVAIRVPTEAEEAVRDLCRARADLVQDRTRTRHRLSKFLLRHDRIWREDAWTGKHERWLTGQRFDNPALHATYGHYRAVLAARDAELAALEADLAHWYTHEPFADAVARLAAYRGIAQLGALTIASEVGDWRRFPAARTFMGFTGLVPSEYSSGQAVHRGRITKAGNAHLRTQLIESAWAYQHRPSLGAVLRRRQNGVEAATAARSWTAQQRLCARFRRLSAVKTSRNIVTVAIARELAGFCWAEMTATQS

SEQ ID NO: 290393 - protein, 340 aa, unidentified
MDEYIGLDVSLKETAVSIRRDGKRVWRGKCPSDPQLLAALIRKHASAPKRVVFETGPLSVWIFHALAAEGVPAICIDARHAKAALDMAANKTDANDADGLAHLAEVGFYKEVRVKSFDSMLTRTLVAARTRLVRIGTELSNQIRGLMKTFGLIVPAVTGSKFEHHVHALLADNTDLGQIIRPLLEAWHAVRLRSAELGRKLLADARRNAACQLLMSIPGVGVVTATSFVSAIEEPANFKHSRSVGAFVGLTTRRYQSGEINYDGHISRRGDSHLRGLLYEAATVLLTRSRSECDLRKWGLQLRERLGFKRATVAVARKLAVIMHSMLITGEPFREKSAAA

SEQ ID NO: 290394 - protein, 308 aa, unidentified
MKIHPGFVGIDISKDFLDVFDGSVGAVRRVDNRPDAVDSLIAGWSGRDIFVLFEATGHYDKALRHVLGAAGIAFARVNPARARDFARAAGFLAKTDAIDARMLAAMAQCLRPGADSAADPAREQLAELHKRRDQLVAFRKQERTRFKGAVDLAGSLARHIAWLDQEVRDFDRRIATLIAEQQALQNAQRLMRSVPGIGPVCSATLLALMPELGSRSPKAIAALAGLAPFNTDSGRFRGVRRIHGGRRRVREALYMAAVSVTRTRSRFAETYRALRDAGKPAKVALVAVARKLLITLNAIIRQQQPFHA

SEQ ID NO: 290395 - protein, 323 aa, unidentified
MHSNYYGIDISKLTFDTVDQEGKHSRYSNDKRGFKEFSKNICKESLCVMESTGIYHLELARFLHTKSVAISVVNPLRIKRFSQMNLQRNKTDKADAKMISLYAQNQEVKLWKPAPKEVEEVKDICQVLEQYIEFRSGLKNKLDTLKIKKATKSLVNSVLDQIETVSVSIEELQKTADDLTASYKPEMLKNILSIKGIGKRTASLIIMASGGFEDFENAKQLSSYFGLAPTETSSGTSINGSGKISKMGNPLVRKKLYMCSLQASRCNTSCKNLYERLLAKGKPKKVALIAVANKLIKQVFAIAKSGLPYDDEYKSTFKSKNIG

SEQ ID NO: 290396 - protein, 337 aa, unidentified
MEYYAGLDVSMEETHICVVDRDGVVIHETRVASTPADIDAALMEGPACQRVVFETGRMAPMLYHGLIQRGVPVICVESRQAYQALKSLATHKTDRNDARGLAQLARTGFFKPVHVKSLAAHAIRALIIARKKLVGQRVTLENQIRGLAVAFGVRLPRSLSPAFIQQALRASDGIDGLSAAMQGLIAARTAVIAAVAAIDADIKKMTKASDACRRLMTIPGVGQLTALAFAAAVDDPERFKRSRDIGAYFGLVPRRYQSGEVDYTGCISKCGDRRVRTLLYEAANVLLTRCKGSLKIKDWAFAIAKRSTMRKARIALARRLAIIMHAMLRSGAEFKLA

SEQ ID NO: 290397 - protein, 400 aa, unidentified
MSGLKGSFDNFVGIDVSKDKFDACGITGDERKLFQFSAAMDRKGFEKLKDHLAVVSVSSVLIGMESTASYHVNLFSYLVSEGYNVLIVNPLLISNYVKMQLRKTKTDKKDAVVIALFLLANGSTLIQRVTPSLISDLRDLSRQRESLVDEMTALKINIKRLLNITFPELEHMTLVFTKSMLKVLKQYPSAFALRSADLVQLSQMLITDSYGRKREAFATELIKAARSSIGINSPAKEIILKQQVTLLLHLEDALREITGVLIEMSRKLMEEDINILTSIKGIGDKSAVNFLVEMGGDITQYDDSGKIIAMAGLDPAVYQSGQHEGKGRITKRGNRHLRRIIWMMTTRVIHYSDMFKVYYLKRRKEGLPYKMAVLATAHKLIRVIYAMLKQRTTFCPQANS

SEQ ID NO: 290398 - protein, 346 aa, unidentified
MNYYAGLDVSLKEISICVIDGTGTTVARGVSPADPEGVAGWFRTRSLSPELIVHESGQLSIWLQRGLERLGLPVFCIDARRAHKSLSARPNKSDAADAEGLAQLARTGWFTPVHVRTEDADRLRALVSARAQLIDLRKDLEGHIRGILKTFGIRLTGIGKGRQRQGFRDQLAAAGERDPILRTIADGFISVHTTLCQAAAELDRAVKEKAETHPVTRRLMTIPGVGAIVALNFVALIDDPSRFRKAENVGAFLGLTPRRHQSGEIDWSGRVSKCGDGVMRSLLFEAATTLITRVQKFSALKSWAVRLAGRRGFAKAAVATARKLAVLMLTLWKNETEFTWKKEAVA

SEQ ID NO: 290399 - protein, 387 aa, unidentified
METVADRAKPTAIRTDLRAIFVSLELSRSRWLITSLSPGNRDRMSKHSVQAGDIAGMLARFSELRHKTQARTGQSFPIVVIQEAGLDGFWIHRVLRKEEIESHVVDPASIATSRRRRRAKTDRIDGEALIRVLLAFKRGEPRVCMMVRAPTPAEEDRRRLCRERKVLTAERVQHVNRIKGLLFAQGVSEYEPLRRDRRDRLARLVTGDGRLLPNYLKAQIGRELDRLELLLEQIKAVEAERDSLLASTEANKSALPAMLLNLKGIGPEFAAILWSEGLCRHFDNRRQVAAYAGLAPTPWQSGSVDREQGISKAGNPRLRETMIQLAWLWRRHQPRSVLTLWFEERVRHNAGRLKKRTIVALARKLLVALWKYVNAGIVIEGAAIKTA

SEQ ID NO: 290400 - protein, 341 aa, unidentified
MDYFAGLDVSVKETSVCIVDDAGKIVREARVASEPEALLQVLTLYRFKRVGLEAGPLSQWLYSVLAEAGLPVICVETRHMRAVLTAQINKTDRNDARGIAQMMRAGLYRPVHVKTLRSQKLRMLLTHRKLLQSKAIAIENDLRATLRNFGLKVGMVGTVKFEARIKELVENLPDLAILVEPLLTVRRVLREQITVLHRRLLAIVRDDDVCRRLMTVPGVGPVVALTFRVTVDVPARFRNSKAVGAVFGLTPSKYQSGESDRTGGISRCGDEMMRAMLYEAAQILLVRSAKWSWLKAWAMKIARHRGMKKAIVALARRLAVIMHRMWVDGTEFRWTREVAAA

SEQ ID NO: 290401 - protein, 397 aa, unidentified
MIAVGIDVSKSKSTVAILNSDGEILAKPYDIHHVESDIDNLITYLRSLHDDVKIVMEATGHYHLPVLKKLHNADLFICVMNPYLMKKYGDNEIRRGKTDNKDAMRMAFYAFEKSYSLTRYSSLEQKYLDLKFLSRQYNQRVSTKVKNRIYLGNLLDETMPGIENILMSKTINPENNMLYKFIEKYHDFDTIKSMGQKRFLNSYAKLAEKIGCRNYQRKALQIYELASDSITTRGSDPYTILSIEQCLTLLKQSEVAAKATMVQMQSIAQTLPEYPIVHAMNGVGDNLAPRLIAEIGDVRRFTSGKALNAFAGNDAPPFQSGQYESTNRHISKRGAPSLRKACYEVMQCLKMHKPDDPVYLFMIKKEEEGKPLNVAKMAAVNKFLRIYYARVMEIYKS

SEQ ID NO: 290402 - protein, 357 aa, unidentified
MITSSGQITVGLDVGDKNIHACFLNQDGAIVEESRLGATPGALRRCFSSEERYRIIIEAGLHSPWMSHLLLGLGHEVYVANPRRLRAIYENESKSDRVDAQYLARIGRLDPTLLYPLRHRSPETRADLAVLRSRAALVRTRGTLVNHVRGVVKSAGGRLPRCETQYLARRAELNLPTELVPALSPILSTIAELTVRISAYDKQIERMAKERYPETELLRQVGGVGAITATTFVLTVEDPGRFPQARAVGSYLGLRPRQADSGTLKPQLHITKAGDKNLRSLLVECAHHILGHLGPDTDLKRWGLKLAERGGKNAKKRAAIAVARKLSVLLLRLWVTGEIYEPLRNARRHGELLSPAP

SEQ ID NO: 290403 - protein, 330 aa, unidentified
MVPKIVVGVDISKLTLDIAVIVGNSPIKTVKIANSEEDIRKFLDLLKDEYRFKNREIIFCAEHMGLFASFLTKIVLKRKIPFYLESPLQIKRSLGIQRGKNDQLDAIRIAQYAKKNYQSMRLWQPPRLCLENLKTLLSIRKRLIKTKKILSTPLKDNLYFLGKYDRKYQEDLFLPSIGSILNDIKMVEKEMKRLINHDEKLCHLMSLVTSVPRIGNIVGIQMIVYTNEFLNIECPKKFASYCGVAPFEWKSGTSIKGRTKISHLANKDLKTNLHMAAIGFAALPKTNLGKYYLRKVDEGKNKQSVINAIRNKLIHRVFSCVKNQQPYKDL

SEQ ID NO: 290404 - protein, 359 aa, unidentified
MQRKELSFSGQKIFIGIDVHKDSWRVAVAPEVGVIKGHSQKPSAKELLEFLKKHYPDGEYHAVYESGFSGFSTYYALQDAGIDCIVIHAADVPTTQYEEAMKTDKVDAVKLVKSLKAGLLTGIYIHKRDDIDARAVVRLRKTIQKQLGGYKSRVKHLLHSNGVAFPERFSTPGSHWSSTFINWLKKEVSLLSSTRISLDLLIAQVESIRQTLLLATRKVRELSRSERYKHDYELLTSIPGVGISVAMALLTEIGDFKRFRNEREFASYLGLVPTSHSSGGKVTHGEKTFRGNKKLGPQIVEASWISIYRDRGLGCAYASYKKRMEPQEAIVRVARKLSNIIFSVLKTDKEYEPYQWNEI

SEQ ID NO: 290405 - protein, 368 aa, unidentified
MNNKTITGNGISQASLVNNVHRVLNLGLDVHYWQVTVAMQEDGGRIKSAGKMGHPEFLNWVGKKLEEGWEIYSCYEAGASGYWLHRKLVELEVKNLVVVPKAMGQGGQKQKTDKRDAGELCDSLERYLRGQKKALSVVAVPTEEQEEKRALIRYHRQIMKDRGRCEARGKGLLCAQGIEVRGRWWQGDTWLALTSDPRVKDWMKEQLVGWRSKILSTDEEQKALRQRIAALAPAILPKGVGAYSAAVLHYELRGFEHFKNRRQVGSITGLCPGVHLSDGRGKEGSINRCGIGIVRWTLVEMVWRLMIWQPQYPPVRRLAAGLVKSKRAKKRLVVQAARRLAIDLWRLSTGQTTPEKLGLVMQSNPPAN

SEQ ID NO: 290406 - protein, 344 aa, unidentified
MQYIAFDVHKKYTWATVEDQSAQVVRQGRIDHRRGALRGFLSACEPGLPVAVETVGNWYWVVDEIEDGGFAPKLVNARLAKLMIGQVNKTDKLDNRGLNRLQRSGTLPTVWIPPAAVRDARELPRTRMMLVGQRTQLKNRVHSTLAKYGLSLPEVSDLFGKAGRQALSRLMAQLPPHTAQATQAVLEQLDGLEQAIKAVQQRIAEAFDDTAENKLLRSLPGVGPILSVVIATEMGDCRRFGSAARFASYCGTVPRVHVSGMRSYSGRVRMDVNAYLKWALVEAANAALLQGDRYGHVRRLYDRLRARRGHGKAVVAVARHLAEAAYWVLTKQQPYQEPKRSTRG

SEQ ID NO: 290407 - protein, 452 aa, unidentified
MAQRNRSFPLKRGKAPALAITHPNAAGIDIGSASHFVSVPPDRDEQPVREFAAFTADLNSLADWLTACGVDTVAMESTGVYWIPLFELLESRGFAVLLVNARHVKNVTGRKSDVLDCQWIQQLMSYGLLHGAFRPADQICVLRSLCRQRGMLLRTQARAVQHIQKALTQMNVQLANVITDVAGQTGQKILRAILAGERDGYALAALRDVRIRASADEIAKSLQGNWRAEHLFALKQALQRFDFVGTQLQECDQQIEAQLQTLHAHDGEPPKGKKRSRARNAPHFDLRAQLFKMCGVDLTRIDGIDVTTALAVISETGTDMSRFATAGHFASWLGLCPGTRITGGKVMSGKTKKVVNRAAQALKLAAAGLRTSQSALGAYYRRMCARMDKPKAVTAVAHKLARLIFTMLTKGEEYTDQGQAYYEERYRQRVLHNLAQRASKVGMKLVAAEQPA

SEQ ID NO: 290408 - protein, 341 aa, unidentified
MSEVSTIGLDLAKHVFQVHGADASGKVVFRKRLRREKVLEFFAGKPACVVAMEACSSAHHWARELTRLGHIVRLIPPAYVKPFVKRQKNDAADAEAICEAAQRPTMRFVAVKSETAQANAVVFRARDLLVRQRTQAINALRGHLGEYGLVVAKGPGHVIKLVEHVEDPDSNVPDAARLVLRTLVEALRFLRERIDLLDREIARRARENNEVRRLMSIPGVGPITATALAALAPPADAFRKGRDFAAWVGLTPSQHSTGGKQKLGTTSKMGERTLRRLLIIGASSVVRKALRQGTAAGSWLGRMLARKPRMLVIVALANKMARIAWAVQAKGEVYRAPVVAA

SEQ ID NO: 290409 - protein, 351 aa, unidentified
MTRYIGLDAHSESCTLAVLGPSGKRLRYERLQTSTALLKSFIKEVPRPRQLCMEEGTLSEWLCEELAPVVDKLVVVMPDRNPGNKSDLIDACKLADDLRRGTIRRPVYKAPGQFRTLREAARAHYVLQRDKVRAKSRLHALCRSCGHADLGKSLYSPTTRAEALQQLPEHLRPRAALFGQQLDALVECSSQAEHNLREQCSRLPIVQRIATAPGIGVVRAAYIVAVVMTPHRFRTTRQFWSYSGLAVVTRSSSDWVSDGAGRWRRSKTLQTRGLNHNRHPLLKNVFKGAALQITLMPEHPLGKAYQRLLTQTKPNLARLTIARRLAAAVLAMWKHGQDYEPTKHEIPTATA

SEQ ID NO: 290410 - protein, 357 aa, unidentified
MSSERSTLDFSGQSVYVGVDVGRKSWSVSIYTEQFEHKTFVQSPDAEALVGYLHKHFPGASYTCVYEAGYCGFWPQRALSAAGVKCIVVHPCDVPTTDKERKNRTDRVDARKLARSLRNSDLDAIYVPSQAAQEDRSLVRSRQQMVKKLTRCKNQVKALLACYGFTPPADVGGAHWSRKWLQWLQELQFERPSGRQSLELLLLEFFFLREQIANVTRQIRALSEEEPYQELVALLRTVPGISLLSAMILLTELIDLDRFPDFDHLASYVGLKPGEDSSGDKEIVTGLTHRCSAHLRAMLIECSWVAVRKDPALTLAFSELTKRMTKTKAIVRIARKLLSRIRYVLKHREPYVIGVVN

SEQ ID NO: 290411 - protein, 387 aa, unidentified
MEKTQRTLRKEDSTELGVLYMAFELSQSTWKLAFSNGRKIRTVTIEGRDLDQLQKAIDGSKSRFTIAGEVRMCSCYEAGRDGFWLHRYLVSSGIDNVVVDSSSIEVDRRKRRAKTDRIDARKLLHMLMRYHAGERLLWSVVHVPSVAQEDGRQLHRELDMLKKERTIHRNRIKGLLIQQGIAVNNPSSKKFLADLEVWRTWDGNALPSDLKARLVREYERLRMVEEQIYGLKKERQRRLEHAESPSVEKVVQLMTLRGIAVNSSWKFVNEFFAWRQFHNRRELGALAGLTPTPYDSGGSQREQGISKAGNSRIRTLAVEMAWVWLRLQPQSKLSRWYTERFSGGGKRMRRIGIVAVARKLLIDLWRYLEYGLIPEGAVLRTDMIRFY

SEQ ID NO: 290412 - protein, 347 aa, unidentified
MNFYNQQHAFYCGVDLHTRKMYLCVLDQQGNKRLHRNYSAKPKDFLRAVKPFREGLVVGAECMFSWYWLADLCQDEGIEFVLGHALYMKAIHGGKKKDDKLDSEKIARLIRGGTFPLAYVYPRQMRATRDLLRRRNFLMRRRGELLAHVQLVNYQYNLDPFEKRLQYASNRDGAAQRFEDLSARRNVEADLEMIGHYDQLLQRLELDVLRQAKVHDGQARFLLRTIPGVGEILSHVLLYEIHTIARFADVGRFLSYCRLVTPQHTSDGKPAGGGGAKIGNAHLKWAFSEVVPLMMRECPQAKKFVDRKEKKHGKSRAMTMLARKIARAVYRTLKRKEAFDLEKFFAH

SEQ ID NO: 290413 - protein, 342 aa, unidentified
MNEIITVGLDLAKNVFQAHGADASGRAVLRKKLRRDQVLAFFGQLPPCVVAMEACGGAHFWGREIGKLGHEVRLIPPTYVKPFVKRQKNDAADAEAICEAAMRPTMRFVPVKSELTQGAAMVFRIRELLIGQPTQAINALRGHLGEFGQIVPQGAANAARLIAIVEDPESGLPADAIATLKVQVRALTHLETEIGKLDAEISRRAKENEVARRLMTVPGIGPLIATALAVLAPPPDTFRKARDFAAWLGLTPRQHSTGGKQRLGTMTKMGERSLRRLLIIGANSVIIKRHVHAAARPGTWLGGMLTRKPPMLVRVALANKIARIVWALMARGGVYQSPVAAA

SEQ ID NO: 290414 - protein, 402 aa, unidentified
MISVGIDVSKGKSTVCILDNYGTIIKKPFVVEHTKESIEGLAAIIKGFNDEPKIVMETTGIYHLPILDCLLDHNLFVSVINPLVMNKYANTNIRPGKTDNKDSILIASYGIDHWFRLSSYHEIDTRYEKLKLLSRQYNQYIGMRVKSKLSLLNLLEQTMPQITTLLENDSQNINRDKLNAFALKYWHYDNITSFTKKQFVHNYKTWAKKEGYQASQPKAEKIYELASNSIPTLSSKDPSVKILISEAVRVYREINISAEIILTQMIDIASTLKEFDILKSMKGIGDNLAARFIAEVGDARRFHCASALIAYAGIDAPAYQSGQFNSVNRRISKRGSKSLRKVGYEIMASFARQKPLDNPVYLYILKKESEGKPKKVAKIAGLNKFIRIYYAKVRDAYLDCIE

SEQ ID NO: 290415 - protein, 342 aa, unidentified
MNQVNQSIGIDVSKDAIMCCMGTLESGQHCFSKSKSFPNTPKGFEALLEWSTPGKTSAVFVMEATGVYYENLAYWLDSQGYQLSVLLPNKMKHYAKSLNVKTKTDAVDAQVLSRVGLERTLHYWHMPSAMMREIKFLSREYRETKAKLVVIKNQLHAKKHSFACPLSVEKRLIGQMALLETQLLEIESELRAAAISDPQFYDKVTRLNTIPGISFITIITILAETNAFALIKNAKQLASYAGLDVEHRQSGAKEGKTKISKKGNRFIRNALYMPALCATKHNPHMKPFYTRLCERKPAKKVAVTAVARKLLVLTFTLWKNNQEFIENYTEESRQALKPAYTG

SEQ ID NO: 290416 - protein, 423 aa, unidentified
MTDPPLQSWLRFIAIDIHKHYLMIGAIDAAKQVVLPPRRVELSRWPKWAHANLLSTDAVVIEATTNAWAIYDLLAPLVGRAVVVHPAKVKLIAAARVKTDKIDVLSLAHLLRADLLPEVWVPPQHVRDLRALLSHRRRLVSLQTTAKNRLQSVLHRLNLRPPDGDAFAHKQRAWWAELDLSPTERLRVNQDVATLAHVVAQIAAVDAELRCLSTSELWAEQVPYLVLLPGIALLSAMTILGAVGDITRFATAKKLVGYAGLGAGVHDSGKTHRDKAITKQGRRELRYVMIEAARAAVQSHPYWKDEFAQLERRIGDAKAIVAIARKLLMAVWHVLMAKSADRRADAEQVAFKLMVWSWKLSDAQRGGLSTRQFIRAHLIRLGLGAELTHITRGGIKRGVATIEEVLALRPELRDPPRTAPPAG

SEQ ID NO: 290417 - protein, 353 aa, unidentified
MNITTVGIDLAKDVITVYAQDAQGRCVMSRNFKFKELAEWLVQLPEGCVVGMEACSSAHHWGRRMQTMGLQPRLMAAEFVQAFRKSRSAKNDHNDAEAIAIAVRQPTMRFVAIKTEDQQSRLSWHRMREGWKEERTALINRCRGLLLEFGYPISRSAAAFQRALKTCLHEETLPDNLHRLLAQIDDQLRQLDQQLALCDREIAQSAHNDEAAKRLQAVAGVGIITADAVCASVGNAHDFKNGRQFAAWIGLTPRQYSSGGKTQLGRITRRGDAYLRSLLVQGARSTLQATLKKAPDKLNRMQQWIIRLYGRVGYHKTLVAIANKHARQLWALLAKGETYDLNAWQQYAIGEAS

SEQ ID NO: 290418 - protein, 336 aa, unidentified
MDTVTTVGIDIAKNVFQVHGVDKKGHCILKKRLSREKLLDFMRNLPPCVVGIEACGSSHHWARELKKLGHEVKLMSPQYVKPYIKTNKNDCNDAEGICEAVTRPSMHFVSAKSIEQQDIQALHRIRQRLIEGRTALVNQIRGLLAEYGIVMAQGVSVVRKKLPEILSDENNNLTSLAKEIFRPLYEELETLDKKIKEADMCVEKISKASEVCQRLVKVEGIGPLTATALVAGVGDVSVFKNGRQMAAWLGLVPRQRSSGNKQLLLGISKRGDSYLRTLLIHGARSVVSRVKDGSSWLMGLIRRGGSNKACVALANKNARVLWALMAQGTEYQPRAL

SEQ ID NO: 290419 - protein, 437 aa, unidentified
MSKQKKQTATFRQTTETPSLPRAIHADNDIFVGIDWADQEHAVCHLDGEQRRRQTLDHSPEAIAEWVGQLTQLAEGRTIVIAIEQSNGGLFHALMQYPQLALFPVNPKQAARYREALANSGKKDDPTDAELLARFVREHHALLRRWKPEDQVTRQLGRLTELRRKAVELRKKTVQQLNSLLKLYFPQARAVAGELHQPLALELLRRWPTLRELQRANPATLRKFFRQHGHRNDEKIDTSIQQIREMKPLTTDSAIVAPNAQFVQMLVKHIKLFNQAIAEFDAEIHKLFAAHDDAAVFRSLPGAGAALAPRLLVAFGSDRSRFETAAEVQAYSGIAPVTKQSGKSRRVQRRFACSKFLRQTFHEFADHARKWSSWSKAYYNSLRDRGHRHHAALRSLAYKWIRILFRLWQDRKTYDEQLYLQQLQKKQVSYLKYLETT

SEQ ID NO: 290420 - protein, 345 aa, unidentified
MPIVGGLDIHRKQITFDYLDTATGEVRRGQIAPADRAHLRAWLARFAGRDDVACALEGCTGWRYVAEELAAAGVTAHVAEPADTAFARGRKRHAKTDKTDARHLRVLLEQGRLPECWIPPAQILECRALLEAYHDLRREHTAWIERIHAVFFHQGAPRLGEGALRTEHGLAALRQAAAIHLSPAGQLQVATALDMLAATEARMDTLRQQLLHAARHLAGARALQARLYGVGPLAGLAMTCWLGGAGRFSSARKAVRFAGLDVTVYSSDGKRSPGHLSRQGPEILRWVAYEAGKTHGRASAPGHDYYAAVKDRTDGKIAALSQARKLIRQACHILAELGDDALTAA

SEQ ID NO: 290421 - protein, 355 aa, unidentified
MKGELQNEKVLVRGKEVFIGVDVHKESWHVTARVDEEEVFHGRIPSQYHALQKLLDCFRDCRVKVAYEAGPCGFWLYDRLTENGIETIVVPPSLIPVESGNKVKTDKRDSRKLARLLENNMLKRVYVLNEEDRVDRELLRTRRQIVEHRNDVARQIKSKLLFYGIRSPFARRYGWHRNYIQWLKGMELPREGLRVCFESLIELYEYLSDQLLEINQKVKELSQSLKYRQRLKLLCSVPGIGTLIGMEILVELQDVERFKRAEELASYIGLTPSEFSTGQYVRQGRITRCGNKRVRTCLVESSWILITKDPLMRLKYNKLKAMKGAKRAIIAIARKLIIRIRRLLINNEPYVVGNC

SEQ ID NO: 290422 - protein, 387 aa, unidentified
MPRYIGLDLHRRYVHGCEWVPETQQERHFQFVNTSDGWSRFVTTLDSDCWVAMEVTGNAFQVFDWLSPHAAKVLLANPVELKRLGSGRHTDRVDAARLARMLAIGTLPTVWVPPQEIREMRILLRYRERLKSSRARFLNQIRAALRRNGFDLPPRAHPRLHLTPELLQALPGAERILILSACRQADVLNDEIASIDAEIAHRLQGVPEAKLLLTMTGLGPIAAAAVWAYIGDPRRFRSPKQVARYAGLDPSVHQSGDSAYHGPISKNGNGLLRTYMVEAALTLARSGNGALGTFWRRKSQQIGHNRATVALARKMLIVAWKMMLTGEPYRAANAKTVRNKRWQLNRISQRSTNWDHVAASVLGARWLAPDMGEATNRRVVEQTPVPA

SEQ ID NO: 290423 - protein, 369 aa, unidentified
MKQLITYIGLDVHKETIAVALAEAGKRNEVREYGKIANTPAAVKALVAKLARNGHALRFCYEAGPCGYGIQRQLTASRHDCIVVAPSLIPRRPGERIKTDRRDAINLAKLHRAGELTPVWVPDEAHEAIRDLVRARLAAVRTLRQARQQLSGFLLRHGHHYNRPAWTLMHRRWLAGLRFEHAVHHIVLEDCIAAVEAATARRDRLEAHIAAALPDWSLAMVVHALQALRGMALVAAATLVAELGDITRFANPRQLMAYLGLVPSEHSSGGTRRQGGITKAGNGAARRMLIEAAWSYRFPARISREQLLRQEGLAKPIRDTAWKAQERLCRRYRKLARAGKPPTVVTTAIARELAGFVWAIARQAQPTDA

SEQ ID NO: 290424 - protein, 412 aa, unidentified
METIFERVAGLDVHKAQVTACVRVPAAAGGREQHLAEFSTTVRGLIALRDWLEAHRVTHVAMEATGVYWQPVWHVLEDGFELMLVNARHVKQVPGRKTDCSDAAWICQLMEAGLLRGSFVPPKPQRALRTLTRYRKTQIQERQREANRLHKALEDTGIKLDCVASDILGKSGRAMLDALVGGTTDPEVLAELAKGKLRAKIPALREALEGRFEPHHALVIGAILEHLDFLDEHIDRLSEAIEEQLGPFAPGVQLAATITGVAERSAQVMVAEIGTDMSLFPTPGHLASWAGRCPGNDQSAGKRRSGHTRKGSKWLRITLEEAALAATRTNDSYPQAQYQRLRPRRGHRRALVAVQHSMLVAYWHMFTTGETYRDLGGDYYRKRDPERQTRRLIAQLERLGHKVTLETLPQAA

SEQ ID NO: 290425 - protein, 338 aa, unidentified
MKNTRIYPSTPAFFLAIDVGKPDLFCHIIGPNKTFSQRFDNTPEGICTLLKWLRSIATPQQFAACLEQTGHYGRAISHALADAGLATVYLVNPRQIKAYGEQRLRRNKSDTADARLIAEFLQSEHSKLLPWSPPGADNQQIKELSRYADSITQDNARLKTKCDMTTHKPILRSLRRRIKAQEKEIADIRLRINKIVEGNEVLHRQHELLASVPGIGDVTCQILLAELPDLELFSNARQLAAWAGITPRHFVSGTSGRSTTPITKIGSVYLRRALFMPAMNARVFNPLLKTFADRLKENGKEPKPIIIAVMRKLLHQIYGILKSDTPYNPEKRGLCSAP

SEQ ID NO: 290426 - protein, 320 aa, unidentified
MAKQVAVRTYGVDVAKAWLDIWSVEDERIVRIDNEAKSIDRWLSGRDAPFRVAVEATNCFHELFMARAHEQGHQVYIVDALKLCRYREAVGARAKTDQQDAALLARYLCQEQSLLRPWTPYPAGQTAFYRLLKRRASLVKTSIRLQQSLADLGPLQDDGQALIKHCQQLIHRLERELLARARTLGWLEELERSRSIPGVGRVTSLALVAAYHRGTFRCADAFVAFLGLDVRVRDSGTFRGRRKLTKKGDPELRRLLYNAAMAACRQPVWKAYYQSLKDRGFSGTQALVALSRKLARVCYALLKQQTSFTPNQRHGHCAAT

SEQ ID NO: 290427 - protein, 398 aa, unidentified
MNAIGIDVSKGKSTVAVIQPFGVVIAEPFDVSHTESDLNKLVQLIKSLSGETKVVMEYTGAYYEPIANALHNQGIFVSVVNPLLIDDYGTNRVRKVKTDKKDSLKIASFAIDKWLDLREYIPANDIRKTLKILNRQYVQYNKILVMQKNNLISLLDSCFPNANTLFTSPRRESDGHEKWIDFVLKFPHIHSISKLSLSAFKVKYQSWRRKNNYNYSDKKVADIHSYCKTQISVLPMTDSVIKIITEAAVMLNSTLETLCTFRDEMNRLSSTLPEYNAVMGIYGVGKVLCSQLIAEIGDVRKLNNSKSLVAMAGIDPPPNQSGKVDTKSRSISKRGSPVLRKTLFQIMTIIIQNKPVDDPVYQFLNKKRSEGKPYRVYMIAAAHKFLRIYYARVMQALN

SEQ ID NO: 290428 - protein, 491 aa, unidentified
MVGHSIGIDLSINGAHDCTILDATGQVTQRFTFDSSSAGLLKLEQRIRTLDPSQAAPTVVMEPTGLAWLLPCLYLRAQLPDVKVVRVKTSKVAALRRYLKQDAKSDRLDSLTLAKMPLVDPETLYAVDLPPAALQGLDRMTRQRAHLVESITARKNRLQAVVGGYLPGLMAVAGKPWEPTFRALLSVSLNPATLSRQDATMLQKALQDKPSRKAPSEELILRLRTACEQLTRLYGPVMAAGLVTKTFFEDVRDEVARELRLMDVEEQEVKELEAAIACRYQEVAPQDHLGTMPGLGAVTAPTILAAVGTPQRFHSQAAFRGWTGAVPHASESADSEAKGLPMTKAGPRRVKLALYQAAETARQWDPQLAKIYYDQMVHKGNPHYKAIGAVMSHLASRIHAVLTEQRDYVLRDVDGREVTMSEARTIVKTQYQVPAEIRAARRTNRRRKRNVSTRAHRGSAARSSRRSSPSSHTHSIRLQEADQIRPVAINH

SEQ ID NO: 290429 - protein, 426 aa, unidentified
MAKVEHTSDARVLVGIDISKHRHEVLIAVPGKTRRRRLTITNSTDDFMRLIAILREYGLPVRIGFEATGNYHRVLMYHLGVAGFDLKLVSSVALARTREALHNSWDKNDPKDAQVILHMLQIGAVQIFQDPMVAGTNDIQELSKTHDAVSRSKTELWHRILTHYLPLYFPEADRFHRSSRTDWFLAFLEMFPSPHMISALTKEEFTKAAWEVVGRKVEKTLMLSDTYETAKASAGLPVAPDSDAIRMFRMMLAEGRSLIRQRNAIEDRAVELLGGRADYQLLRTIPGIGPINALTILAETGDLRRFHHHRQFLKFCGMDLATVQSGMFRGRSKISKYGNARLRRTLWLAGQTAVLKKANSFRDKFERYIAQDRHNPDLRRKAYTAIAAKMARTIHAVIKSGEPYRPFFEGTSPGGRTSLSKGRGGA

SEQ ID NO: 290430 - protein, 321 aa, unidentified
MVVIDEEDNKVVDKRIDNNLHATLELLAPYKEQIKAVAIESTFNWYWLVDGLMDHGYQVELVNTAAVKQYDGLKYSGDHQDAFHLAHLMRLGILPTGHIYPPEYRQVRDLLRRRRQLVKHASSHVISIQNQIWRSLGYRVSCIDIRKKVFRLPFEPGSFLYHSANSNVIILKELDKQIALIEQQTLEAVELKDEFKLLTTVTGIGPILGLTIMLETGDINRFSAPGNYASYCRCVNSIRESNGKKKGTGNRKAGNKYLSWAFSEVAHYLVRFNPKAKRFYERKKQKRNGIVAIRAVAHKIARAVFHMLKNKQAFDIDRAFS

SEQ ID NO: 290431 - protein, 309 aa, unidentified
MKQSVVYIGIDVAKAHLDVAWAGTFRRLPNERSGHAALVRWIKQSTTPVQLICEASGGYEQALLESLEKSAVKVTLVQAVRVRQYARAAGILAKTDRIDAKVLAAFGSAMQPQPTPSLSVEQKRLRQYEAQRRHLSRTLVAEENRLAQLSCAQLRTLSRSLISKIKTQIKTIDRGISDLIAQDQTLCVKAQKLTAISGVGVRTAALLLAQMPELGQLNRRQAAALAGLAPFNHDSGSIRGKRAIFGGRRALRSGLYMAALSAARFNPILSSFYQRLRAKGKPHKLALTAVMRKLLLALNQTLKPLPYSA

SEQ ID NO: 290432 - protein, 430 aa, unidentified
MSDLFHRPVVGIDVSADFSMVAILSPSGEIHKKPFRISHNLESFKYLFSQIKEVEKTYGMKTGIFMESTGVYHISLFHFLKGEFDTYTINPLITNSNKNSDIRKVKNDKKDALSIARIGKFHNIKTSAVVDVNIFTLKMLIRDYFKLVDHAAGYKKKLSADLRIIFPNYLSIFSSPTLSTSIAILKKYPTPDSILNASKDELMNLLSIAKKGATWSNEKYMNLIAAAESSSVIGVYSSALAVKMKTTLSLIDVLENQAHILLAEIKEFVNSPNISDSFRKNIELLINIPGFGYITALTVMSEIGDIKGFVKPKHLVAFLGLDASVDESGKFKSSRNKISKRGSNFARRALYTVALASVRNSKNAQPINPILQQFYKENMAGKAKKVGLIAVMHKIVKYIFAVLRDQKPYEIRDPRIHNQMHLKTSSKQVA

SEQ ID NO: 290433 - protein, 342 aa, unidentified
MKDTIIGVDLAKRVFQVHGASIAGEVKFRKKLTREQFRLFIAQQPACIVVFEACGSANYWSREVEKLGHEPKLIAPQYVRPFVKRQKNDATDAEAIVIAARQPEMRFVLPKTAEQQAKSVLFRNRERLVRQRTELVSALRSALYEYGHVFPIGLAHLKRMDALVQGADCDLPSLIVTECRELLAQIAETTEKITAKTKRLKALADETDTARRLQTMPGVGPLTALAVEAFAPQMGQFRCGRDFAAWLGLVPRQHSSGGKERLGRVSKAGQTDIRRLLIIGAMTRILAHARYKGPAESWLGRMLAKKPKMLVGIALANKMARQLWAMLTRNEDYRDPAMAAAM

SEQ ID NO: 290434 - protein, 403 aa, unidentified
MDSPSADVFVGVDMAKSEHYAQAITTGGVEVFGRPILNDQADIETMLDVAGEHGQVAVVVDMTASGAQLLLAVAAERGVPVAYVTGLQMRRASELYAGTAKTDPRDAWVLADFARRNADRLTWLEVSDELLVRLRVLNGRDTDLATDSNRAMNRCRDALVAISPALERAIGHRLGQPGVRDALKRWPTPTALRTAGRAKVKSVIKKRSPRLGEKVSLEIFEALDAQSVTLPAEQTWGEVITDLLDDLERIHARRAELGKVIEEVFLSHPLGAVLVTLCGFGPRTGARTLAEIGDPTRFESGSRLAAYAGLAPTDWRSGRSINGAFQHRGGNHRLKNAMFIAAFVATQFDPAAKAYYQRKRAEGKKHDAAVICVARRRCDLILAMLKNQEPYDPRRHEEIPIAA

SEQ ID NO: 290435 - protein, 339 aa, unidentified
MKYTPVGVDIAKHVIQVHFINENTGEVVDKQIRRQDFLTFFSNREPCLIGMDVCGGSQHWARELKKLGHKVRLLQARFVKAFVMGNKNDVMDARTIWMAVQQPGKEIAVKTEEQQSVLVLHRTRRQLVKFRTMQINSLHGTFLEFGETIHKGRAAMEREFPEALERMKEILPPYLITVLENQYNRLNELDSLIEDVEKQLTSVARQNETCKRLLDIPGVGPLIATAAVATMGEASAFKSGREFAAYVGLVPKQTGSGGKIRLLGISKRGDTYLRTLFIHGARAAALLAKEASSWITELKKRRPASVAIVAMANKLARTVWAIAAHGRKYDRNHVSIRPY

SEQ ID NO: 290436 - protein, 401 aa, unidentified
MRKFNPEQHRIETASALEGVHSAGYQERHAAYVGLDVHKESIAVAVAEPGRAEPVYRGEIANQPKRIEKLIAKLSEAYAGAVLQFCYEAGPCGYVLYRQILACGHDCQVVAPSRIPRTPAEPIKTDRRDALKLARLLRSGDLTAVWVPDQDQEMMRDLSRARDDMKGQERKARQQLNAFVLRHGHHWPRGKSRWTPAHYNWLESLRFERPWQHVVLQEYIDAAKAASARVAQLSDHMMQALPEWSLAPVVDSLIALRGVDKLAAIVLLAELGDISRFDSPRELMAFLGLVPSEHTSGPRRRQGGITLTGNGHARRMLVESAWSYRFPARQTLHLKRKALNASEPAKTIAWAAQKRLCARYRTLTRAGKNTKVVCVAIARELAGFIWDIVRQEMPRLGRQAG

SEQ ID NO: 290437 - protein, 343 aa, unidentified
MQAVTTIGLDIAKSVFQAHGIGAEGTVIIRRQLKRRHVLAFFQKLSPCLVGIEACATSHHWSRELKALGHTVRLMPPAYVRPYVKRQKNDAADAEAICEAVTRANMRFVATKTPEQQSCLMLHRTRHLFIRQQTAVINAIRAHLAEFGIVARVGRNGVEDLLDVVADSNDRRLPEVARGCVAALGVQLRMLKAQILAFDRQIMAWHRSNETSKRLDEIPGVGPALATALVASVADPGAFRSGRNFSAWVGLVPRQHSSGGKDRLGSISKQGDRYLRNLFTAGALAVIRYAKIHGTKHRPWLTALLARRPTKVAAIALANKIARMAWAMMARGERYKEPAALAA

SEQ ID NO: 290438 - protein, 338 aa, unidentified
MEQVITIGLDLAKNVFQVHGIDAAGKVLVRRQLRRGDVLRFFGGLPRCLVGMEACATAHYWARELTKLGHTVRLMPPAYVKPYVKRGKTDVADAEAIAEAVTRPTMRFVAVKTADQQAALMLHKVRDLLVRQRTMLINALRGHLAEFGIIAARGPGGVTAAIISLHEAQDSLPELARVALHGLIDQLRMVRGEIARVEKRIVAWHRASNPSRRLATIPGIGPITASAIAAAVPDATLFQSGRQFAAWLGLTPRAHSSGGKERRVGISKQGDGYIRRLLVTGATAVIRLARQGNASKTWAAKLLERKSARLVSVALANKTARIAWAVLARNQSYVAPAM

SEQ ID NO: 290439 - protein, 318 aa, unidentified
MEEVVSFEQIVHRGCGIDVHKETIVATIDGVGLKRETRSYGATTRSLTELKEWLVEHRITHVVMESTGVYWKPVYNVLESADMAVWIVNARHVKYVPGYKTDKRDSKWLCKLLLAGLLKPSFVPPKEQRELRDLVRYRRKMIEQIASEKNRIIRILEDCNIKLSSVLSDTQGVVGTKIIDFLCKNGKIVKEDIDAFYHGKLKANKEAIEEACEGFVTEHHVFMLQTIKRDIVSCEEIISNITFRIKMILFPYRHVLERLDEIPGLDMKSIEDLVAEIGLDMEAFPTEKHIASWAGVSPGNNESAGKKKVDVLHTAISM

SEQ ID NO: 290440 - protein, 337 aa, unidentified
MTIIRIGLDTAKHVFQVHGVDENEQTVVRRQLRRGEMEKFFGKLAPTRIGLEACGASHYWARLLRGLGHEVVLLPPQYIKPYVKRGKNDANDAEAICEAMSRPGMRFVPIKSAESQAELMLLGVRNLLIKQRTTVINAIRGHAAEFGVIAAKGPVKVAELLQQAHTAEASVPELALDMLRLLAAQLDALDVKLKLIETRLMASHRENPLSQCLASQPGIGPIGAVSFALRVTDPKSFRSGRHFAAWLGLTPKDHSSGGRHRQGRISRQGNEALRKLVVLGATAVIRFARPGHASPWLLNLLARKPKKLAAIALANKMARTLWAMMVSGEVYRRPLPA

SEQ ID NO: 290441 - protein, 494 aa, unidentified
MKTEQPGKNQKTQKSNNRSKQASSPSSPTPGKWGEMNRKQRRAMMRKMQSEDVTLEVVHPDAAGIDIGNETHYVAVPPSRDPEPVRCFGCTTAELKSMADWLKHCRIRTVAMQSTGVYWMAVADILEEAGLEVYLVNARDTKNLPGRKTDVQESQWLMKLHTYGLLRNSFRPSPEIRTLRTYWRQRLDLVQAAGEHIQRMQKVLTQMNIQLANVLTDISGVTGQAIIKAILDGERDPRELAAYRDCRVKASEEEIARSLEGNWQDDLLFVLRQEQAGYEFCQKQMGECDRQLEQYLQQMEDRSQGAALPEETRKGRRKKKKGNAPRFDLRALLFRMTGADLTQIDGIDVMTAMTIFSEVGWDMSKWKTENHFVSWLKLCPDNRISGGKIIGKGRMPTNNRATTALKLSASTLRESKTYLGAQFRRFRSRLGPPVATKAMAAKLARLVYRVLRHGMKYVDQGAEKYEFQHRQHQINSLKRKAMMLGFQVIEAPAA

SEQ ID NO: 290442 - protein, 365 aa, unidentified
MKKNSRNEKATERSQAQARLTVGVDVGDKRSWFCILDEEGEIVVKGSLPTTPNGFKKQFELLGRSRIALEVGAHSRWISEQLKRYGHEVIVANARQLPLIYASDRKRDPVDAEKLARVARLDPKMLCPIEHRSVKAQRDLAILRARDLLVGMRTKLINAVRGLVKNEGVRIAACSPEKFPAKASEIAPRELMPALAALLEQIDSLNQRIGEYDQMIVHKAQTDYPETARLDQVSGVGALTALGFVLTVEDKHRFAKSRDAGCFVGLRPKQSESGESAPQLGISKAGDGYLRRLLVNCAQYILGRFGPDTDLRRWGLKLAERGGKNAKKRAVVAVARKLAVLLHRLWVTGEIYEPLRNNRSTVKAA

SEQ ID NO: 290443 - protein, 404 aa, unidentified
MFFMFYIGIDIAKNKHEASLVDVSGKALVDSISFSNSKEGCEKLLALMERFQVAKDDVVIGMEATGHYWLSVHAFFFELGYDVKVINPIQSEAFRKMYIRQTKNDSKDSYIIAQIMRFGQFSSTNLSEGGVIALRQLSRYRLALVDSCSDCKRRVIALLDQVFPEYGKFFSDTFGVTSKEVLLNYPTPEDMLTVSTNELAEVLNKASRGRFKEDKAAELQTLANNTFGIHFAKDAFAFQIRQLIEQLVFLENQIAELESEIAILLEQMGSFITTISGIGDTLGAIIISEIGDIHRFDTPGKLVAFAGLDVKVNQSGEFSSTRNKISKRGSPYLRRAIWLAAGRATFCDPILSEYYQSLRERGKHHLTAVGAVARKMCNIIFVILKENRPYEPLPPKKQNSENRC

SEQ ID NO: 290444 - protein, 415 aa, unidentified
MKKHNNSSKKSEQRSKQTKSRVSVQRDTKEVMAELLEKLTEKLDPKAISASAGKEQGGGLRPNLDRLTVGVDLGDQWSAYCILGLEGETLIEGQLQTTPPSVAEFFQGLTGARVVLEVGTHSAWVREVISGYGHEVLVANPRLMERSKRRKRKSDRIDANKLARLGRMDPQSLYAMQHRSSEVRQDLVLLRAREALVTVRTELINSTRGLVKSMGARLPKCSSPSFSQKVEEALPAEIRGALLPLVQLVAALSDSIKGYDKKIEKLGSEKYGHTALVRQVTGVGPITALAYILTLENPARFAKSRDVGPYLGLVPKQEDSGDIQPQVGISKAGDTMLRKLRVGSAHYILGPFGPDTDLRRFGLRLCERGGKNAKKRAAVAVARKLAVLLHHLWVSGEVYEPLRHGLAATMTQAAA

SEQ ID NO: 290445 - protein, 369 aa, unidentified
MTKTLYVGLDVHKDTIAVAVADEGRGGEVRFFGTIAHKADSVLRLTKQLSEGDKTPTFCYEAGPCGYGLHRHLTKLGFECAVVAPTMIPRKSGDRVKTDRRDAEMLARLWRSGELAPIWTPDEEQEAMRDLIRTRKQAMDAVKVAKQQLLSFLLRHGLRYENGSYWTKRHRRWLAEVRRFRFDHQQLAFEELKRSVDQAEARVATLDRAIEDAVQTWRFAPVVNALRALRGVNTTIAATVVAEIGDITRFENPRQLMAWLGLVPSEHSSGSTKRRGRLTKTGNALARTMLVEAGWSYRHPPKEGQPYLKRSEHLPQEIKDIGWKAQTRLCKRFRHLSNAGKPQPRVLAAIARELVGFIWDIARKTPLPA

SEQ ID NO: 290446 - protein, 399 aa, unidentified
MAAPSLWAGIDAGKLDHHCVAIDASGRRLLSRRVRNDEAALVALIEDVIALADGSSVQWAIDLNAGGAALAIALLLVRDQDLLYIPGRIVHHAAAAYRGDGKTDAKDAAIIADQARMRTDLPEFRHRDETTVELRTLCARRADVSADRNRALNRLRAQLLEYFPALERAFDYSHRKAALILLTGYQTPEALRRIGRTRLENWLRDRHAYNPGAIVSRAMEAANAQHIVVTGQHLAAVMVARIAQQILDIDAELADLDDMIEERFSRHHQASVIRSMPGFGPLLGAELVAATNGALDSFPSADRLAAVAGLAPVPKDSGRITGNLKRPRRYDRRLLRVFYLAATNSIKTCPESRAYYDRKRAEGKHHRQAVLSLARRRVNVLWAMHRDNTTYKSTAKTAA

SEQ ID NO: 290447 - protein, 345 aa, unidentified
MLAEEVAYVLGVDTHTDSHAIAIVETGRQKVEGSVSIPATRRGYRQALRLARLRAPGQRLWALEGTGSYGSGLARFLDSRGERVLEVERPRREGSRGRLKSDLLDAERAARAALSGAAGAAPRLNPQTQALRALLVAREGAVTASRAARNELGALILTAPPELRERLQGLPRAALIETCARLRPGTDSERAAVALALRSLALRVRHLNEEAKGLEQELATRVQALAPALLARRGVGPICASWLLVAWSEPGRLRSEAAFARLAGVAPIPASSGKLVRHRLDRGGDRRLNRALHTIVLGLRRTDAETQAYIARRVSEGKTQREAVRCLKRYLARSLFRQLEAMPRA

SEQ ID NO: 290448 - protein, 410 aa, unidentified
MELLHRRCCGLDVHKETVVACLRLVSDGKVTTEVRTFQTTTADLLRLSEWLAANECTHVAMEATGVYWKPVWHILDDGDFKLVLANAAHVKNVPGRKTDVSDAMWLAELLAHGLIRASFVPDAQTQEMRNLLRTRKQLVREQSSHVLRVQKTLEDANIKLDSVLTDLMGKSGRAMIEALITGETNPVKLASLADRRVKASPEEFREALRGRVTKHHRFLLRLHLNQIDALDAAMATLDAQVAANLGPFRTAVELIMSIPGIKNLGAHVIVSEIGIDMSRFPSDAHLISWACICPRNDESAGKRRSNRLRKGGTWLKTTLVQCAWAAVKKKDSYLQAQFYRIKARRGPKKAIMAVVASILTAIYHMLKDGTMYQDLGSKHFDRRSTDQQKKRLVKRLADLGYAVEIKPLAA

SEQ ID NO: 290449 - protein, 408 aa, unidentified
MPIIRSTAIRIKRFRELKESLRTNRDRLLVGIDIAKAQHVAQVRWTHTRVLDTQVTIPNTQAGFETFWGHLEQQRAATGLREIVCALEPTGTYHEALAQFLEAQGADVVLVCNHVAALNRRTLDRTWGKSDPKDAHKLGDLLGRGRVLFYSLPDAPVATLRRLVRLLRRARTELAACKARFRNTLLPSLGPAGEALPAPVVARLPAPLHRLLPPAQRGSAAEPDGDLPPALAFELADLAARVVSVRARIAQIETELVHVATPLPAYRLLLSLPGVGLTLAAILLAELGDVAWYTEFSQLRMLAGLDIQRVASGQWAGTARISRCGRPLLRWALYQAALGAARTPAGRARREALRAKRAGDPHAFFKATTELGAKLLRLVWGVWRSGRPYEPSRLARAHAGGRERVPPR

SEQ ID NO: 290450 - protein, 355 aa, unidentified
MIVIGVDPHKQSHSAGAVEAGSGELVGERTVRARGVGHEQLLAWARSFGEERLWALEDCRHVSVALERFLLGRGERVVRVPPKLMAGARRSSRARGKSDTIDALAVARACLREPSLPVARLAGVEREIRLLCDHREDLVGERTRIQQRLRWHLHELDPELELPVGCLDRYVWLDRLAHRIAEREQTIQLRICAELVARCRELTERANELERELGRIMRAQAAPLLALPGCGVLTAAKLIGETAGAGRFADEARLAMHAGAAPLPASSGNKHRHRLNRSGNRQLNCALHRIAVSQGQHHPPARDYLTRKQNEGKNRKEALRCLKRHLARTVYRLLRALDEENTTSVNTTAPTLALT

SEQ ID NO: 290451 - protein, 316 aa, unidentified
MQSPLDIGVDIAKDELVVACAANTFAPHTIANRRPELRTWLKSLPPGSRIGLESTGTYHQLLADLAYKLRLAVFVLNPRDIRHYAKGVSTRAKTDRVDAQIIARYLSREYLNLHPYQPPTADQRRIDQLLKRRAKLTAIRATLHQSLNTLDSCRSEVRAMFSKFDALIKKIDLMLARVSAACPERLQSEQRLQSIIGVGPIVGMSLFNLLQRVPFRNADALVAFIGYDTRPDDSGQRRGRRRLSKRGPGELRRLLFNAAMSASQCEPWIPIYRHYRDKGLSSTAAFCIIARKIARAAWSIFKYKTTFDPKRLTCQP

SEQ ID NO: 290452 - protein, 452 aa, unidentified
MATKRKKRVQDLPVLHPDGAGIDVGASEVYVAVPADRDTEPVRSFATFTRDLHTLADWLQRCGIKSIAMESTSVYWIPLHQILEERGFEVCLVNAQHVKNVPGRKTDVSDCQWLQYLHSVGLLRSSFRPSAEICAIRSLWRHRASLIQMAAEHVMHIQKALDQMNLQVHRVLSDITGLSGLRILDAILAGERDPFTLARLCHSRVKTSHDTVAKSLEGDYRSEHVFALRQSLAGYRYYQGLIADVDKEIQRHLADLKTVADTDAEPPQRTKKAAYQRRHYEPKTFDLRSELYRIFGVDLTDIPGISAVTAHTILCEIGTDVSQFRNASAFASWMGLCPDRQISGGRVLYTKSRRVRNRIALALRMGANSLHHAHNYLGEFFRRISRRLGKPQAITATAHKLARIVFHLLSVREPYNESVFHQCDQDAQRRAEIRLRKHAAQLGFQVVPATNT

SEQ ID NO: 290453 - protein, 375 aa, unidentified
MEGAPMLDTTTFVGLDVHARSIKAVSLDVMTGEVRCATFGYDAGAVAEWVRSVDPKAKCVYESGVTGFDLQKRLSGLGVDCVVGAVSKMIKPSADRRRKNDRNDAEFLARMLSVGNVVEVWVPDDECEAARDLTRALEDARDDLSRSKQRLSKFLLRHGLVFDERTPTGRRKGNWTRAHWSWIESIRFAEGADNDVLAYYVDAVRRAAEEKARLEGLVEAEARKPRWRRRVDSLRCLKGVDTATAADLVFEAGEFSRFRNARSFAAWVGLTPSEHSSGESDRRGAITKAGNKHLRKALVEAAWHYLTCSGRPKEPARGQAPDRVARRHAAKGVRRLVERREALLARGVHNNKANVATARELACWVWAVGLMAEEA

SEQ ID NO: 290454 - protein, 372 aa, unidentified
MKQNIVHIGLDVDDTQYHGAAFNKETGEVIEFKSRPTLKGLLQQLDRMERHFKGHKIKLCYEASYVGYCLQRDLISNGIHCDIVSPSSIPSPRGKAVKTDRIDAGYLAQFYANDLLTIVQPPDEEQEQDRDLLRSRQKVMQQRNQLRKHLQAVLRRNGLHYKAQTQYKSHWTKHHYFWLVRTIDGLSGSLKVNLELLLRQLKAFNEILTEYGQQIDVLASSPRYQSAVQSLTCYKGIKNFFALTMITEIGDIKRFSHPRKLVSWIGMDIREYSSGGKYNRFGITKHGNRYIRTAFVEANQRGYRTAKIGQDLKSRRKHIAPELVNIADRCLRRLNKKGNRLLMAGKHPNKVKVACAREMVGFVWESLNKAAA

SEQ ID NO: 290455 - protein, 331 aa, unidentified
MRQPVVIGIDVSKASVTIAVHPSGERWTSETTPTAIDSLVARLQTSHPELIVMEATAGYELPLAAACAAVTLPVAIVNPRQVRAFAQAAGRTAKTDEIDASVLALFGARMHPTPRAIPDAETQALSGLVTRRRQLLEMLGAERRRLEQAPPTGPITRDLRHHIRWLERRVSDVDEEIGTAVQQSAIWRVHEDLLRSVPGIGPTTARTLIAELPELGRLDRRAIAALVGVAPFNCDSGQFRGRRRIWGGRASVRASLYMAALVASRHNLVLAAFYRRLREAGKPAKVALVAVMRKLLTILNAMIKHQCRWNSKAASTPASTRRPARGVAVLA

SEQ ID NO: 290456 - protein, 428 aa, unidentified
MAEDTTLTSQTWLVAIDIGKAFHAVLVEGGDGTRQQFRMANHVEDYDRLVVFLRGLPGPARIALEPTGDFHRTLAHRLLREGFSVVSVSSVAGARYREALFNSWDKNDPKDAYVILQLLKHGLVQHYHDPLLAGDHDLQELAKTYHQIVLARKRLADSLLNHYLPLYFPEMGRYWESTRVEWFVAFLEQFPTPAAVQALPKEAFVRAAWSVVGRKVNKQAKLEELYELAQRSIALPVAVDSVAIETFRLQLAQLRRLAELRQTLEARAHALLKDRADFQRLCSLPGVAAILALVILAEGGDLRRFPHHRQFLKYCGLDLAKCQSGQFRGRERLSKRGNARLRMAFWMAAQRAVRMNENSFRDKYERYTRHDSGNPDVRRKALTAVAAKRARVAYAVVKHDQPYRGYHEQALPSGSIPLKRAVGARATP

SEQ ID NO: 290457 - protein, 457 aa, unidentified
MNLRLGVDVACRAARQASCTDDTGKFLWAGHRFRTDPGDLDALWAKLPAGAREVTVIMEPTRNAWVPLAAWFRRHGATVVMVPPEQSADLRDYYNKHAKSDRLDSKVLARLPLLHPEGLTAETGIGPGDALKRAVKIRSGLVHRRTTSMQRLDCPRADGPSLGWRDRVGHVQDSIPVAVPLRQPAHRPQLGKRRLTDFLHRSSRGAWAEERATEIIAAATTTIELWGDEFDFDELAADIATEARLALSLCEEISMMDKRIGALYAKADPAGIVRSAPGVGVVGAPQIHGRLGDAKRFRNLAGVRSFSGLVPRRDDSGHTATAGGPTKAGDACLSEALFTSADHARKIDPRLAQRYHRLMTVEGKHHTSALCHIATVLLTRIAACLRADQPYQLRDIDGTPITETEGRVIVADRYTVPKATRTARRAATTTSRQPRRNERAEKGVAERSEAPPVPTPA

SEQ ID NO: 290458 - protein, 321 aa, unidentified
MSHFYLGIDVAKAKLDCALRLPNSKFRAKVIPNSPEGFAQLLRWLNGHHAPQPHVCMEATGIYWEDVAQFLATAGLTVSVVNPAQIKAYGSSRLTRSKTDAVDARLIADFCAERQPPPWQARSEAEVALRALVLRLDALQTMRTQESNRLETSRNAVRQDIQQHLDWLDADIKQLVKTINEHIDKHPDLKQKRDLLDSIPGIGERTSAIILAFYADTTRFANSRQAAAFAGLDPRQYESGSSVKGKPRLSKVGHAFVRKALYMPAMVTLYKTAWGKQFKERLALAGKPPKLIIGAMMRKLIHVAFGVLRSGKTFDPALHGA

SEQ ID NO: 290459 - protein, 405 aa, unidentified
MWYAGIDWADDHHDVVVIDAAGKRVTSLRVPHTAEGLAKLVAFLLGLGDVRDYPEHLACIIETNHGLLISGLLEAGVAVYPVNPKTVDRHRNPAGAKTDAIDAYLLARTGRSDLADLRRLQPDSPLIAEVKLLTRDQDSLIQSQTRLVNQLTACLKAYYPGAVTLFGKLHQPTTLVFLQAFPTLQAGQAAAVEQIGEVLQAAGHSHATSKAHEVWQQLHQPQLVASAEVTRAKSRLMLALVGQLAVLLPQIAAYDEEIGRLFLLHADSKVFASLPRAKKRLAPRLLAEWGDDRGRYAAVASIQALAGTSPVPYASGKFSLVHRRHACSKPLRNALQQFAWQSTQKEPWALAYYHRKRDEGKSHSMAVRALANQWVRIIFALWRKHAAYDATIFLAAQQAHGARAA

SEQ ID NO: 290460 - protein, 366 aa, unidentified
MKKISTVATNRNEIFKEPKLTIGLDLGDRSSHYCILDEAGEVILEHGLPTTPKGIHQVFSRIPRSRIALETGTHSPWVSRQLTQLGHEVIVAHARNVRLIGESSRKDDQLDARTLARLARIDPELLGPVRHRSAKAQIHLTVIRARAGLVSARTALVNTARGLTKSYGERLRKCGTGQMNREIAKGLSQELRDALEPLLGEIESLNERIAEYDGRIEQIAKEVHPEVAVLKQVKGVGTLIALTYVLTLDDPQRFRRSRDAGCFLGLRPGRRNSGMSEPQLHISKEGDRYLRTLMVQGAHYILGPFGQDSDLRRWGLKLAERGGKNAKKRAVVAVARKLAVLLHKLWVSGEVYEPLRNNHKVVSAVA

SEQ ID NO: 290461 - protein, 460 aa, unidentified
MSKKRPTGKQAQPVPKVDWKALEIVHPDAAGIDVGGSEHWVAISPDRDPEPVRSFGCFTADLREMAAWLVEKGVRSVAMQSTGVYWMPVFEVLEQHGLEVYLVNAQHTKNVPGRKSDIQECQWLLKLHAFGLLNNSFQPTDEIRVARTLWRHRGNLVAEASSTIQRMQKALIEMNVQLSNVLSDLSGVSGMRIIGAILKGQRDPAQLAAMVEPEVKATPEDIAKSLEGNWRDELLFVLKQQVELYRVYQDKIGDCDLQLRQHLESLGSKVDLKTQPIGPKPKGKKGSRNAPEFDLRTELYRITGIDWAQVNGIDVLTAHTVMAEAGDDLEAFANEKHFTSWLGLCPTNERSGGKILNRRTRKVVNRAAVAFRNAASTLLRSDSYLGAQYRRLRTRLGAPKAITAMARKLACLYYRLIKHGQQYVDKGTAYYESKYREQQIRALAKKAKKLGFQLVIQQTA

SEQ ID NO: 290462 - protein, 316 aa, unidentified
MAKQVKEITLGIDVCKAELVVCDWHSREIITLENNVSTTKDWLKSLHGPVRIAIEPTSNYHLEFVEQAHALGFAVYLINPRQLAHYRQAVDIRNKTDPLDAWLLARYLARESDSLRPFKPQCAKAKQLWSLLKRRATAVRARTQFKQSFAEIKLPIKALFSEIQRVLERIDQRILVLIRQLGWWPDYQRCLSIPGIGKLNAAALVTVFHRGAFAGADAFISFIGLDISVRESGKFKGKSKLSKRGEAEIRRLLYCATQSARSYPPFDAFYQKQLDKGLTKIATKVTLARKLARIAFALMTKQQSFKKPTIASSISP

SEQ ID NO: 290463 - protein, 318 aa, unidentified
MQPAAVIVGVDVAKLCLVSAFLGQPGAARTVDNRSSAIAAWLAELPKGSIVAMEATGAHHRLLAHMAHAAGMQVYVLNARDVYFYAKALGGRAKTDRLDATVIARYAAEHHTRLHVWQPVAGVEQQLHELLQRRACITRLRVSLRQTLADVATLQVARRQLDDGFERFFEQLDAQLQLLVASDAELGCGIARLRAITGFGPQASVAVGALLKRIEFANADALVAYSGLDPRPCDSGQHRGQRRLSKRGPAWLRRQMYLVAFAASHSKALKPLYESIKARGFAPTQALVILARKLLRVAFVVWNDRTTFDASRLQPNSA

SEQ ID NO: 290464 - protein, 343 aa, unidentified
MNIQLKTNDVQVNSIHQAGIDVGAEELVMVIRKNGKLFNPQTFTNTRADRARLVMKLVKLPGVIVCMEATGVYHFDLAVALHDAGVLVMVINPKSSHNFAKVLMKNSKTDAVDANTLAEYAARMDFAAWTRPSDETIAVRCFSRRITALTTQKAAAKNHLHALTATQETPKAVLRDAKLAITQLQKRIDRLTIEALLLIGKHPKLERTLALLISIKGIAQTSAISLMGELLLLPPDLTHREWVKFAGLDPKAFDSGKSVHKKSRISKAGNRNIRAALYMPALSAKQHDPHVRAYFQHLVANGKKPLQAVCAIMRKLIHAIHGMLKNDEPFDNTRFYKIPVSAV

SEQ ID NO: 290465 - protein, 318 aa, unidentified
MTQNLFIGVDVSKAKLDLAVLPGEQAWSVSNTEEGIRELIARIRQLGTPKIVLMEASGGFERRPLALLAADGLPVVAINPRNARDFAKSIGLLAKTDRVDAKALALFAQKIQPPCRPLPDAQTRALQDLVVRRRQMVDMLTAEQSRLAIADNPRVRRELSQHITWLKKRIHIADHDLDQTIKNTPAWQPKADLLKTVPGVGPVTSSTLLALLPELGTLSHKQIAALAGLAPFARDSGTMQGRRCIWGGRAAVRGVLYMATLTATRFNPTIRAFYQRLCRLGKLKRVALVASMRKLLTILNALVRDKSPWRPANVEISS

SEQ ID NO: 290466 - protein, 427 aa, unidentified
MAYKIAGIDVHKRMLHVVVSDVEVDGEYDFTRRIFYTYPEALRSLAAWLVEQQVEEVVMESTAQYWKPVWGALERHWKPICQTRKGALATSGKLHLAQALSNRGRRGRKKDFLDAERLVKRLVAKELTLSFVPDAEQRLWRTVMRTKYQLTRNRVQLQNRLEALLEEAHIKLSSLVSDLLGASARRMLKAVADGETNPETVAALADRGLRVTQEQLQDVLGVCRELNPVYRRLIKMALEEVASIGKRIDQLKQEMADLLRAHEDQIKRLAEVPGLGVDSAQQIIAEVGATAATFPSEQHLSSWVGTCPGDEESAEVNYSSRSPHGNRHMRRILNQAANAAVKHKGSIYDILYRRYVPRLGHNQTIGIIARKLCRLVWKILQLGIRYEERGPHVSKACKQKRTRKMIRELRKLGYRIEMPTPQPAVST

SEQ ID NO: 290467 - protein, 399 aa, unidentified
MDHVIIGVDPHKLSATIEVVDQNEQLLGSGRFTTDQAGYTAMRRYAKTWPDRVWAVEGANGAGRPLAQRLLENGERVVDVPAKLAARVRLFDTGHNRKTDALDAHSIAIVAVRTEGLRVLKVDDELEALRILTDRREALTRRRVQTVNRLQALLAELLPGQAKKDITPLQAKTMLASVRPRDIAGKTRRRVAAEELAELIAVDAKIKKATAELKAMVVARGSRLMDLHGVGPVVAARILADVGDVHRFVDRNRFASWTGTAPLDASSGEQNRHRLSRAGNRRVNHMIHIAAVTQLRHDPTGQAYYRRKRSENKKPMEAMRCLKRRISDAIYRQLVADAQRGAGAGPGGHCGASQESSAADLPPHIDTSDQPLPGPAKPTLQRTRHPRKTSPKKTPQMTS

SEQ ID NO: 290468 - protein, 355 aa, unidentified
MKYYTSTTEFNCGIDLHAHQMYVCLMDRDGKKLVHTNIRNNDFDYFLKLVEPYRHDLTVCAECMFGWYWLADACQAAGLTFVLAHALYLKAIHGGKNKNDRIDSEKIAHLLRTNFIPPSYVYPADKRPLRALLRQRLFFVWQRSDLLARIQSVQLAHNRPPIRQTRPNRDPWEQQLLAHEDHPLRQLALKNELAMIRSYDAQITAIEEQLHRLTKESAPREYALLQTVPGIGEHLGMTILYEIGDITRFPTVKNFLSYCRLVKGTVASAGKIKGLRGAKLGNPYLRWAFGESAVIAKRDHYLIAPMAQRLQVLMGGNKFKANTVLAIKLARAVYFMLKNKTVFDPERLAAVMMKH

SEQ ID NO: 290469 - protein, 408 aa, unidentified
MEKFLKLCVGADVSKDTLDVCLSGLREDLSVREVERKSFSNNADGIKKLMKWASQKTEGNPYQIVMEATGVYHEKLAFTLSKNGVEAVVVLPKLMSNYFKSHNLRVVNDEICAEHIAMFGLSRKLDVWKEPEPVYMALRALCRHRYQLAKLTTQCTNQIHAQKHSETSLQEMIDMSEDMVKLAEKQIKEIDKKLRAILKENDWLKAKVDKVCTVIGLGWITVVKIIAETSGFNLIRNSRQLVAYAGYDVLSKESGTSVHTKSKMSKKGNKYIRAAMYMPALSAIRSDEQMAAFYSRLFHRHFIPKKSNVAVQKKLLVLIYTLWKNDCTYDPDYRHPASQSQNQEDHQTNDPQCDQESDQPSKMIEKAINKNREAIRRSLHRLDQVRLQDFDETKIKKNPQNEHRQRIE

SEQ ID NO: 290470 - protein, 428 aa, unidentified
MDGDVMISVDPHKASNTAAVMDPVSKIVIVSQRFANTAAGYRALLEFSRRWEQRRWAVEGCHGAGRSLAQRLVTDGELVLDVPAKLAARVRVYSQGHGRKTDADDAVSIGLAALNSASVMPVRLDDVLVSLRLLSDRRDELGAMRTQAVCRFHRLLAELTPGGTHRGLKASRAQQLLDKLRPEEPVALVRLQLAHQHLDDIRALDAKMKTVRGQIDALVVSTGTHLAELYGIGPIIAGRILAEVETIDRFPSKDHFASYNGTAPIDASSGEQVRHRLSRAGNRRLNHALHMMAVTQIRNPGTPGRTYYERKRLEGKTPKEALRCLKRRLSDVVYRALVAEHTGTIEPCGSPTTGAPTRPTSTSPTAGLRPAATPSASNSRPGSQASSRSTGKTDTSSASRSSTPTRHSTTTSSTKPTTSPRNSRRANA

SEQ ID NO: 290471 - protein, 343 aa, unidentified
MKLTPVGIDIAKNMMQVHYVDANTGEIVNRSVKRAKFLEHFANRAPCLIGMEACGGAHHWARQLTKMGHQVKLMPAEFVKAFNIRNKNDSADARAIWLAVQQPSKPVAVKTESQQAMLALHRAREQLVAFRTMQINGLRGMLTEYGEVMNKGRAALIEAIPQVLARVAARLPAVLIDTIREQWSRIAELDEQIARIERRMRDWRKDDPAVKAICEIPGVGLLTGTAAVAMMGDVKAFKSGREFAAWIGLVPKQTGSGGRVQLHGISKRGNGYLRMLLVHGARSVLNNAKDPGLWVEQLKKRRPTNVVVVALANKLARTIWAVLAHGHPYEKGYVSEKPIVKVV

SEQ ID NO: 290472 - protein, 413 aa, unidentified
MSSTLIVGIDISSELNAASFIDEAGNRLVKKALFFPNDLDGAQQLIDFTISLAQQFNISSIKFGMEATSHYAWHLHTFLASSPELAPFNPLFYVINPSIIKSFKGAYIHLPKTDSVDATVIAECVRFGQVKPTPLPDLRYAALQRLTRMRYHIVRSLVREKNRALNLISFKFSTYPSECPFSNIFGKASLAIIENFTPDDIASMPLDNLIDFIVKNGNNRLSDPTQIAKTLKAAANRAYRLHPDLAEANDLALSMTLENIRFLESQLKKLDGEISRQLKAFNQTLTTIPGIGDVLAAGIIAEIGDIKRFNNEAALAKYAGLIWNKYQSGNFNAQDTSLVKCGDQYLRYYLVEAANCVRVHTVRFKEYYNKKYREVPKHQHKRALVLTARRLIPLIFAMLSKGQIYQERGVVSI

SEQ ID NO: 290473 - protein, 366 aa, unidentified
MEKVYHVGMDVHKETVEISIFRGWDAEPYLEKSMEADVAEIVKLLQRLGETGKVKACYEAGCMGFVLYRALEAAGIECVVVAPGKLPRRVTDRVKTDRRDARNLAKLYRAGEVTAIRIPTVSEEAARDYIRLREDMKKDIQRTKRRLLNFLLRLGFRYEGGVYWTKKHREWIKSITFADALQKETCEEYYSHLKELEERVVGIDKKIDEIAQSDRFREAVNRLRCFKGIDNLTALACVCEVGDFMRFPSAGSFMSYLGLVPREHSSGDKKRQGGITKAGNGHLRRLLIEASWHYRYPSPVGSRLQARRIGQPAEVIAYANKSMRRLQKKYLKLVIKRGKKSTVAVTAVARELAGFIWGAMNNKMTA

SEQ ID NO: 290474 - protein, 328 aa, unidentified
MKLQHIIGADLSKESIDLFSHEFQAHLKIENSFKGFRQMLKWLRDQKISCSNVMIVMEHTGLYSYHMEAFLHKHQISFTKVSALAIKRSLGLVRGKNDKIDARRIARYGFEKKDVLVVTSKPDKAIERLRMLHSTRNRLVRHRASLICAIKEYKNILKQSDLIIKSQLSLVKSFTGQIKKIEAEISQLITKEQLVNQNFQLLKTIKGVGKVVATAAIIKTRNFTQFSNARKFACYCGTAPFEHSSGKTIRRKTRISHLADKEMKTLLDQSAKSAIQYDKELKSFYQRRIAIGKSKKSTINIVRNKILYRMFAVIKRQTPFIENYSQTA

SEQ ID NO: 290475 - protein, 431 aa, unidentified
MSERDYSEQVAKRQRIRSATLVVGVDVGKTYNAVGFMNQEGKILGSCAKVYNSHEGFEQFLKVVEELKGRYGLKDVLIGMEPTGHYWRKLAYFAREHGYEVRFIRTTALKHHRELDESASAKSDRRDALTITNITREGKYLDTVIEDGPRRQLRTLAKARERLLRYSVSAKNSLHAALDDYFPELHELFWSMGTRSLWATLERCPFPEDVLSMKVSTLRDLIAQSSRRKAGALRKATALYQAATKSIGLRQIGRADRYRVQMCLEEVKRTVRTLQGIDQQMKSMLKEISGAPYLLSIPGIGVLSAAVFLGELGDPAHFHNARQIVKYAGYDPQESDSGSWVGRRFISKKGRWLMRKYLFFMSMRVVVLTNYFKTYYERKLETKNRVGQLPRRKEILCAVAIKLIKVIFALLRDQRSFVDTRGTLTPRSQAA

SEQ ID NO: 290476 - protein, 353 aa, unidentified
MTKSAASKATKTYAGLDVSLKETAICIVDDAGKIVFERMIPTDPEVIAKYLCKHAPRLERFGLESGSTSAWLWREFRGMGLPVICLDSRHAHRVLSMKRNKNDRNDARGLAELVRMGWYREARVRSLDAQFVRSLLLSRQQLLQSRRAIENQIRGALKALGVMTGPTKGRAFMPRVVELRVDNEWLGPMLDPLLAARASIAKQLKIVSANVLNTAREDPDVRRMMTVPGIGAMTALAFKAAIDDPKRFSSSAKVGPYLGLTPRQYQSGESEWIGGIGKANDPLLRSYLYEAAGVLMTRVRRACPLKAWALRLAKRVGWKRASIAVARKLAVILHAIWRNGTEFEWQTADEPIA

SEQ ID NO: 290477 - protein, 428 aa, unidentified
MSYRIAGIDVHKKMLAVVVSDVEIESDYQFERRLFSSNPEQLRSLAAWLVEQKAEEIVMESTAQYWKPVWETLERYWKPLCEKREGARRRSGTLHLAQALSNRGRRGRKRDFVDAERLVKRLVARELTLSFVPDPEQRLWRTVTRKKYQLRRDVVRLNNQLEALLEEAHIKLSSLVSDLLGVSARRMLKALADGETNPAALAALAHERLRATPEQLCDALGACTELKPVYRRLLKMALEQLQLLEQQIGQLDQELATLLHPHQDAVQRLAEVPGFAVDSAQQIIAEVGPAAATFPSEKCLSSWVGACPGEEESAGVNYSHRSPKGNRHMRRLLNQAANAAIKVKGSIFEIIYRRCVPRLGHNQAIGVIAHRQCRLIWLILHQGTRYEERGPAVTIRSRYQRTWRMIRQLRQLGYRIESPSPQPSQAQA

SEQ ID NO: 290478 - protein, 372 aa, unidentified
MNYNTVYVGMDVHKESFTLCSCKYEDEKASHYQRTPASYKNVLRYLAFLRTIYGEDTRFVCGYEAGCLGYSLYHQLENFNVECVILAPTTMLEQRSKRRIKTDKRDAEIITKSLAQHNYSPVHIPTKMDNQTKEFIRMRDDHKAELKKIKQQILAFCLRQGYQYDGSGNWTAKHVKWLRSLKTEGLYKEILDEYLLTYTILTDKLNRLDQRIEELASEEEYKEPVSKLTCFLGIKTHTALSVIVEVGDFQRFASARKFAGYLGLVPGQHSSGDDRNGLGITKAGNTHVRRLLVESAQSYTRGKIGYKSRVLRSRQAGNSPQIINYADRANERLRRRYYQMVLKDGKKYNIAKIAVARELACFIWGMMTDNIY

SEQ ID NO: 290479 - protein, 468 aa, unidentified
MGKGSGNGTTRGDRKRNARRERLRGLLPRDGAVIGIDLAEDKQALAVVDHDVRVLARKTVKVKAFRLGAAVAQAKVKGFTRVTVACEPTGPRWLQVQRLCAERGLPLACIQPLVSHIAREQQDYTAHKTDEADCVLIARLATELHCYIPEELDETWAHLRHLGRRRAQLITTATAPAQRIRDFLSVAWPTVTETCAQPLESKTWLAAMQVVTSRCGGQPGRLAAMGLEAFTALVRGAVAGWGGQKAWGTISRRIFAALTDTEGVVVSSRRGLLRRCADELGDLQRTRAQLRAVEADMAAVLGELGLSRLADIPALTVVGAAAILAETGDPRRYDSSSSLVKHAGLSPSDNASGAFYGEAHISRRGRPGLRLTVWRAVWPMLRFNPVLAAKYAAMTKAADGAAEVAAIQAGTGSRQATAAAAAARARHAKARVACAASLLRWIYSLVVHGTSWDPDIASGPSTCPAEAA

SEQ ID NO: 290480 - protein, 369 aa, unidentified
MVEHTLFLGLDVHKKTISVATVEGTAGGEVRFYGTIENTPDALRKLGKKLSQDGRQLHACYEAGPCGYNVQRHLTRLGHRCDVVAPSLIPRKAGERVKTDRRDAMMLAQTLRAGQLTEVWVPDQAHEAMRDLVRLRSQAMRDLRKTRQHLLSFLLRHERISPYGHWTKMHRRWLGELTFAHPAQHLALEEMLQRIQRAEELCDRLKQAIVELVPQWSLAPVVQALQALRGVSLITAAVLVAEIGNFQRFDSPRQLMAYLGLNPSEHSSGATVRRGAITKTGNGLARTSLVEAAWTYRFPARITQIIRDRMKELPEPIRAVAWKAQVRLSARYRSLIARGKSAPIAVVAIARELVGFIWAIARMVEPKFA

SEQ ID NO: 290481 - protein, 391 aa, unidentified
MICVGIDVAKDKHDCCILDSEGTTLADCFTIPNNMDGFKQLLQTIRNCTKKSDKIKVGLEATGHYSCNILGFLLDNDLPVYVMNPLHTNLYRKSLSLRKTKTDRVDAKTIATMLLSDVDLKSYTDTAYHNEELKSLTRYRFDKVQERAKLKQSVSRLVTILFPELEQLVSSIHGTSIYALLSEYPGAKQISEAHLTRLANILVKTSRGHYRKDKATHIRDAARTSIGSVMPAKSLELKHTIKLIQELTSEINEIEDAIRKIMDELKPPILSIPGMGFHSAAMILAEVGDFSNFNSPDKVLAYAGCSPSTYQSGKLTNCYAHMEKRGSRYLRYALYTATKYVCYWNPVFTEYLTKKQAEGKHYNVALSHATKKLVRLIYALQKSGKAYLAIT

SEQ ID NO: 290482 - protein, 342 aa, unidentified
MDQVSIIGLDLAKRVFQAHGARADGRVAFRRKLGRSQVLAFLAKQPRCIVAMEACASAHHWGRAIRDLGHEVRLIPPVYVKPFVKRQKNDAADAEAIAEATTRPTMRFVAVKTEEQQARAMVFRTRDLFVRQRTQLINALRGHLAEHGVVAPQGPANVKALAEVVEDVETSLDLLVIELARLYLAQIDLLSAKIADLETVLKREAKRGKATSRLLTMPGIGPVTAMAIETFAPPMETFKRGRDFAAWLGLVPVQRSTGGKQVLGRTSKMGQRDIRRLLIIGAMAVVRWACRKGAREGTWLARMLARKPRMLIAIALANKMARALWAMLTKAENYRDSAVAAT

SEQ ID NO: 290483 - protein, 348 aa, unidentified
MRCYTGQHQFYAGIDLHARTMYTHVLDQKGKTVFEKDLAAQPEVFLDAVKPFRDGLVVGCECMFAWYWLADLCEDHSIPFVLGHALYMRMIHGGKAKTDRIDAAKLASMLRGGLFPMAYVYPRAKRQTRDLLRRRSFFVRQRAQLITHIQNTNTQFNLPPLSKKLTYAANRSPEIAERFAHPSTKLSITADLGLIDAYDEQIAELERHLVKYAKVDDPVTFGLLRTTPGIGPILGLILLYEIDQIARFPEAGNFLSYSRLVRCSHVSAGKVKGSGGKKIGNAHLKWAFSEAACLLLRALPAAKAWMQRQEKKRGKKKALSILEAKLERTVYHLWRKQVPFDAKRFLAS

SEQ ID NO: 290484 - protein, 344 aa, unidentified
MLHAGLDLSRRRLDVCLVDDTGELVAQIAAAPDADGLRHLAQRVQATRVRAVIESMNGARFVHDTLEALGWEVLVADAQKVKGLAPLACKTDKIDARVLAELSWRDLVPAIWLPDPAIRRERELARFRLHLVRHRTTLKNRIHATLITFGHPCPVSDLFGHAGRELLDRLAIPDPWRGTVDVSLGLIDDLELQIANLTCELKREGADHRYIPLLVTAPGFGWINAYTIASEIGDIERFPSPAKLVGYTGLCPRVIQSGASDRRGPISKHGPRYLRWSLFEAAMNACKHPIYAERYQHTKRRLGRQRGPKVAQIELSRKLTEAIWHMLTRNQPFAPAGAGFRLAA

SEQ ID NO: 290485 - protein, 346 aa, unidentified
MLHAGLDLSRKRIDVCLLSDQGELVEELACPPDRDGLRGLARCAGAHGEPVVGVIESMTGARFVHDTLESLGWAVEIADAAKVKGLAPLAAKTDRIDARVLALLSQRDLVPAIWLPDPRVREERELARFRLHLVKHRSQLKHRIHSTLMSFGRPCPVSDLFGVKGRELLAKLEVPEPWAGNVLASVCLIDGLEEQISEINARLQAGGADHPYVPKLLSVPGVGSVLAFTIAAEIGDISRFPSATKLTGYTGLCPRVVQSGESDRRGPLTKQGPRYLRWALLEATMHALRHPAYAERYQRNKRRLGKQRGAKVAQVDIARKLTVAIWHMLTRNESFAPKGAACRLAA

SEQ ID NO: 290486 - protein, 345 aa, unidentified
MDNVSIIGIDISKRSFQVHGAAASGEPVLRKKLSRGKVLEFLASQPPCLVVMETCGGAHHWGREIQQLGHEVRLIAPIYVKAFTRPHKGDARDAAAIVEAAQRPTMRFVAVKTKEAQARSMVFRTRGLLVRQRTQTVNAVRGHLAEFGLVAPRGVANVEQLWEAFAECAETLPELVVSTAGLLFDRIDELNAQLDEVDKQMRSIVREDEELRRLMTIPGVGEVGAMAVHAFASAMESFARGRDFAAWIGLTPREISTGGRQRLGRIIKMGQRDLRQLLVLGETSVIRHARRRKEIEDPWLRRMLAEKPPKLVAVALANKMARIIWALMVKRESYRAPKVIGAVSG

SEQ ID NO: 290487 - protein, 350 aa, unidentified
MNCCGIDVSARDLVVALRLPDHDLAPQTFPNHPAGHRRLLHWLHRHSASVRVTLEATGVYSLDLALFLAAAEGVELAVVNPKLIRRFAQSLDERSKDDPRDAQVLLEYAARMPFHAWQPPSPAVLELRAITRHMLALTELRTATTNRLHAAHGSATTPACLRQELQRSLRHIQASLRRLQHQARQRVSQHPALQAQFQLLLTVPGIAELSALQLLAEVGTLGDRNVRQWVKHAGLDVRHYCSGSSVRRPPHLSKCGNRYLRRALFMPALVAARCDPALRACYQQLLARGKAKRQALTALMRKLLHAIYGMFRHHQPYRGTALDPGWEGAACAPPKERFSCTSPEKKTLDS

SEQ ID NO: 290488 - protein, 422 aa, unidentified
MFAQSEDDEQIIQRVAALDIGKAEVVCCVRLPAPADGKRRVQEVTTHSTMTRSLTELANRLVELGIERVVMEATSDYWRPPFYLLEAHGLEPWLVNAKDVKHLPGRPKTDVLDAVWLCKVAERQMLRPSFVPPRPIRRLRDLTRYRIALVGSRNAEKNRVEKLLEDACIKLSVVASDIFGVSGREMMAALIAGEQDPRVLAQMARSSMRRKIPQLEEAFTGHFDEHHRFLLERMLGRIDQIDGDIAAVDEQIDEHMVPFGDAAARLDEIPGIGATAAAAIIAEIGVDMTRFPTPGHLTSWARFAPGMNSSAGKDKGNGATGHGNRYLARALGEAVVGASKTNTFLGARYRRLVRRRGKKKALVAVGRSILVIIWHLLSDPDARYQDLGPDHHDRHANTETIKRAHVRQLEALGYHVTLQPAA

SEQ ID NO: 290489 - protein, 338 aa, unidentified
MYYTGIDLHKKTSFITTIDATGKIVKKANIHNAEEAILDYFLSLEEETKIVIESMASWYWLYDLLTEKGFDVVISNPVKTKAIASAKIKNDKIDSHMLAQLLRADLISPVYVSGLQTRKLKELLRHRSRLVRDATRMKNRIHILLMKNNYRSPYSDLFGVLGLRYLQEIGLPDYHRHQVETYLFLYKELREQIEPLTQKILALAKHDHTAQLLMTIPGIGPITAMFIVAEIEDISRFRSPRNLASYAGLVPSLDASAGKEKRGRITKQGSVYLRTALVEAAQTIPRIKNCRLNIFFRKRIVKSGYQRAIVATAHKILQYAYYIMKNQTPYRETSPASA

SEQ ID NO: 290490 - protein, 343 aa, unidentified
MEQITTVGIDLAKNIFQVHAIDAAGRVVLQKAFRRPQLAAFFQKLPACLIGLEACSSAHHWGRLLTQFGREVRLIPPAYVKPYVRRQKKDVADAAAICEAVTRPSMRFVPVKTEEQQAALMLHRARSLLMSQRTALICALRGHMAELGLTAPREVRNFRPLLEVLIDEADDSLPALARAALRPLANQLTTMGNRIAELDRQLLAWHRANPVSQRLATIPGVGPVTASALAATVADPAMFASGREFSAFLGLVPKQSSSGGKVKLGGISKMGDRYLRHLLVSGAAALLSHAKTRRGPLDIWAKTLVEKNKPIKLVAVALANKMVRIAWALMIRGETFRLTTHAA

SEQ ID NO: 290491 - protein, 417 aa, unidentified
MSEYAALVAIDWADQQHAVCLSAAGSKEREQTIVKHTPQALQEWALGLRQRFAGQPIAVCLEQSRGPLIYALLQYDFFVLYPINPATLAKYRQAFSTAGGKDDPSDADYLLDLLEHHRDRLRVWRPDDEKTRTLSLLMEQRRRLVNDRTRLSNRLTALLKGYFPQVLDWFEDIRTQLVCDFLARWPQLSLLQRARPATINQFLRSHHSTSKATNARRLAEIKSALPLTNDAAVMTSSVLNVKVLVAQMKTVLAAISEYDRHIEALCLTHEDYQLFAALPGAGLIHAARLTAALGSDRSRWQSPDELLRFSGIAPIIERSGKQFRIRWRYFCPKFFRQTFHEFAAQSIQGSFWARAYYYSQRAKGKDHHAAVRALAFKWIRIIWRCWQSRTPYNEVIYLESLRKKGSSLLKFAADYQQ

SEQ ID NO: 290492 - protein, 353 aa, unidentified
MNQIYIGMDLHKNTSSFSVKNKEGNVIDECKISTEPSAIKGYLKRFPDSSLAVEPVSQWYFYGDLIQSLGIDVHLANPLKVKAIASARVKTDKIDASVLCDLLRSNLLPEAYFASPNARYFKEMVRYRASLIHLRTQIKNKIHSILFRNGLRHAFTDLFGVAGRKWLGSLNLAEPFAFNLKHYLGLIDAFGQLIREADERIEKAVGDNQQAKLLTSIPGVSYITALTIMAEIGTIERFVSAKKLQGYAGLVPSTYASGERMVHGRLTKTGSRWLRWTMIEIAQRQLLCKRKPGFGWYYQRIKQRKGSGAATAATARKLLAVVWRILKDNRPFEIVPPAKSGAKDAHRKFIVSH

SEQ ID NO: 290493 - protein, 415 aa, unidentified
MNRLIERCAMLDIHKSQITACVRVPDGDGGRRQEIREFAATTSALVTLADWLRSYAVTVVGMESTGVYWRAVFYLLEDEFECQLFNARHLRHVPGRKSDVQDAEWGCQLVEHGLVRPSFVPPRPLRELRDLVRYRKAKIQERTREVQRVEKTLQDAGIKLSSVASEVLGVSARRMLEALCSGTNDPDVLAELAKGALRKKIPALREALQGRFTGHHALLIGQMLAQIDFLDETIATLSERIEELTGPFSRELELLDTIPGIDRRAAEMLLAEIGPDMSIFPTDAHLASWAGMCPGQHESAGKQRSGKTRKGSKWLRGTLTESAKAVVRTKGTYLSARYHRIKSRRGHAKATIATAHKILTAAYHVLQRGVPYDELGEEFFYRRDTEATERYRRRLVRQLERLGHKVTLEALPEAA

SEQ ID NO: 290494 - protein, 377 aa, unidentified
MTQFPVSTSSEQSIYAALELSKNSWLLAIQVPGRDNPSLYPIKGGNAEGLMAKLDAARKRVAKVTGQTPKVTLCYEAGYDGFWLARFLEQRGIECLVMEPASLQVNRRARRVKTDRIDVENILHTLIAWCRGERHVCSMVVIPSVEEEDLRRSHRERVRLVRERTAHINRIKGLLFGQGIRGINVMKNYKTLAPAELVTGDGRPLPKRLGQEITREIERLALVQEQLVETEHERDQAPTPCAATERKRHDLLRLNGIGPTFAAILARELYYRRFANRRQVASYIGLAPSPYDSGDGRRSQGISKAGNSLVRYSLIQAAWLWLRHQPDSALTQWFHRRTEGQSKRVRCIMIVALARKLAIALWRYVELGLIPEGAVVK

SEQ ID NO: 290495 - protein, 412 aa, unidentified
MRVIVERCCGLDVHQETVVACLLIGAPGDRPTKETRTFRTVTRDLEALRDWLAAAGVTHVGMESTGVYWRPVYAVLEGHFDLTVGNARHIRNVPGRKTDVKDAEWIADLVRHGLIAKSFVPPRPLREMRELLRYRRKLTESQAAERNRLLKLLETANIKLASIMSDVFGVSGRAMLRALIDGQASVEAMADLARGQLRRKRSDLILALEGRMEEHHRFLLATQLRRLEAIEQDIAALDLRINERLEPYRMPHALLTQIPGVDWLVAAVIIAEIGVDMSVFLSVYHLSAWAGVCPGSHESAGRQKSGRARKGNVHLRTMLVGAAISAARKRGSYLKDKFHRLKARRGAMRAALAIAHKILVSAYHMLAKGLAYHDLGEAYLDQIGQSRTVANLKRRLERLGYHVTLERTTQAA

SEQ ID NO: 290496 - protein, 400 aa, unidentified
MLSIGIDVSKGKSTVCGMKPGGEIVYTPFEVQHTREGMSELVSLLRGSGEEVRVVLESTGSYHCPVVAALLENGIFVSVVNSLRMKRFCSQSIRKVKTDRIDAMQIALYGLAYWQELQPTRLPEDTYRELQLLARQYYQMTSMLIKAKVDFNALCDQVLPGMQELMNDHAGRHKLSDFVLRYRHTAHILKMGETRFRKDYCKWAEKKGYRNHERMAALIFATAQNGIPVLPNAPSTQIVITEAIRVLHTVEASRDAILTQMQALAKTLPEYSLVREMPCIGDTLAPRLIAEIGDVRRFHSKRALIAYAGIDAPPYQSGKFSANNRHISKRGNRYLRKTGYEVMQSYVMHKPANDPIFTFIEKKRGEGKSGKLAMVAGLNKFLRVYYGKVTELYRSLPAIE

SEQ ID NO: 290497 - protein, 378 aa, unidentified
MDRATNSTAHADRLFCAVELSKNSWLLGIQFPDHQKASVYPLKGGDSEGLMTKLVAASDRWSKVSGKKPLIILCYEAGYDAFWLARFLKARGIECLVVDSASMQVNRRSRRAKTDRIDLGKLLRALIAWCGGERHVWSVVRIPSVDEEDLRRSHRERSRLICERTAHINRIKGLLFAQGIRGINIKARYKTLQIDKLVTGEGRPLPPRLAREITREIDRLGLVQQQIAAIEHERDESPTTCKETEKKRAQLLLLKGIGPTGSAVMAREVYYRQFSNRRQIAGFLGLATSPYDSGQMERSQGISRAGSGPVRAAMIQMAWLWIKHQPKSAIAQWFVQRTEGQNGRIKRIMIVAVARKLAIALWRYLEQGLVPQGATLTR

SEQ ID NO: 290498 - protein, 412 aa, unidentified
MSSTLYCGVDVSYKTNRVRFCDSEGNEPHTRLTFPNDGPNAMAFLKQLLGIASKAGFDEIRVGLEATGTLAWHLAMLFGRSSSAALPLKVYVFNPKIIRNFKDTYPDRRKDDWFDARVIADRLRFGEPLPKPFDPDDRYMPLGRLTRHRFHLVHQLVREKNYFLSYLMLKCHTLAQGGPLSSPFSTTISDLVTEFRSPEEIANAPLADLARFVAEKSHNKIQEPLCVARELQKAAHHAHRLPENLKDPVNRIMASTLRNIRHLEKEIKLTSQEIEREMSGIDAPLLSVPGIGPVFAAGIIAEIGDIRHFSHDDKLAKFAGLTWRSRQSGDFQGEDSSLSRTGNPYLRYYLVEAANQVRMHDLEYAAYYQKKCAEAKIHKHKRALALTARKLVRLVFILLRENRPYIKPEKRG

SEQ ID NO: 290499 - protein, 350 aa, unidentified
MLIIGCDYHPGFQQIALVDTETGELEERRLAHREEAEQFYQELKQRNVAVRVGMESSGHSRWFERLLRQLEFELWIGDAAEIRTKRVRKQKTDRQDAQLLLRLMMEDRFPRIWVPDAANRDMRQLLWHRHRLVQMRTRVMNQLHVVALNEGLRRKKALWRASGRQELESIALPPWATRRRQDLLDLLDQLTPKIQELTRLLEEEVEKRPVTRRLMTHPGVGPLTALAYELVIGTPERFHCGKQIASYLGLVPEEKSSGDRRRLGHISKQGNVLLRFLLVEAAQVTVRSQAEWRSKFFHLAMRRGRKIAKVAMARKLAVHLYWMWRQGRDYGQLQKLGSHAGEPGHRDGVQ

SEQ ID NO: 290500 - protein, 409 aa, unidentified
MRYYLGVDWADQIQAVWVVDERGAKVAMRTVPHTAEGLSEWGRELDEWRAQGTELWAAIERPEGRVVDFLLDHGVLVYPVNPKALDRARDRFRQSGAKSDPFDARVLADFLRTDHAHLQALQPSSDAAQELKLLTEDCQRHIRQQTRLVNQLTATLKAYYPRALEVAELTTALAREFLQAYPTPEALTALTQRQWQRWARGRRLSEARIGALWAVLQQPQLPVPAHVVRAKARLMQSLVEQLTPVVAAIAQYRTVIDDFFARMPAAQWARTLPIGKRGITAPTLWARLGDAPGRWESFRHLQAQAGAVPVTKRSGKQRVIHFRFACDKSLRHVVDQVAFLSLLSSDWARAYYDRQRARGHSHYQALRALGAKWLKIIFVMWHRHVPYDEQYHLATMTRQQLQQRQKTIA

SEQ ID NO: 290501 - protein, 385 aa, unidentified
MSQFSGFPQAAVDYNSTIIGALELSAKKWVLAVQLPGVSRHSRHVLDALGDSLVSFIERLKARCAAAGRKITRVILTHEAGRDGFWLARFLARLGIEVHVMQPSSLPVDRRARRAKTDMIDVEMLLRTLMAWLRGEPRVCSMVPIPSEADEEARRAYREREDLTGERRSIVNKIDGILATLGVKGYKALRRDRREQLNGVRQPNGEPIPPQAKARIERLLDRLELVMKLIEQVESERDAVLKKDAPADEAEGMIRSLTELRSIGPDFATLLVREAFVRRFRNRRALGGYVGLGGTPFSSGGSEREQGIGKDGNRRVRAAMVELAWMWLRWQPDSALSVWFRARVGAMGGRVRKIMIVALARKLLVALWRYVTDGVVPEGAKLKAA

SEQ ID NO: 290502 - protein, 417 aa, unidentified
MLGVGIDWAEDSNQVTLGRPGDGIIEEFSIAHRPEAVSRLIERIGALEPDPAEVRVALETKHGHLVEALVEAGYSVVPVNPDLVARRRGPARKKDDGEDSRILCLLALDRHSVLRPLIPHGEAAAELRAIARDDERASRDERRLLNRLRADLIAAFPEALAFAGEDLGAPTFLQVLARYPVAEAARAATDSELEALFRRAKHGWPDRAVRRLREALESSQFTPKPYLVRAKADTMRLAAMQLLAIGAQRRAWERRMGQLLAELPATGGQDQGQAAPDGEIYLSFPGLGRRLAARVAGEIGDHPEQFSTPNSLQCYGGKAPVTRRSGKSEFVVSCRLACNRHLANAVQQWAFCSLRFSGWAREFYDAQRTRGKTHHAALRALGNRWLEVLWHCLRKGVLYDEETHAENRRRALEPLAA

SEQ ID NO: 290503 - protein, 414 aa, unidentified
MELLHPRCAGIDISKRDAKVCVRIAGSGRRRAVETVTTWSSMTNQVLALREHLIQEQVTCVVLEATGDYWKPFYYLLEDAGFEVMLVNPRHVKNLPGRKSDVSDCAWLAQLCAHGLVRGSFVPPEPIRELRDLTRTRTAITRERAREAQRLEKLLEDSGIKLSSVASEILGVSGRAMLEALIAGQRDPAQLAELAKRRLRSKIPALTEALTGRFRAHHAFLARMHLDLIDKHTEAIDKLTARIEVVIEPFRGFRELICTIPGISTGVADVVTAETGADMSRFPTPGHLASWAGTCPGSNESAGRVKSTKTRPGNPYLKAALGTAALSVSQSKGTYLAARYRRIASRRAPIKAVVAIEHTMLVTIWHMATTGALYDDPGGDFYTRRHPEKAKRRAIEQLRAMGYQVTLEPLQEPA

SEQ ID NO: 290504 - protein, 363 aa, unidentified
MEEQKRRYVGIDLGKREYTMAIIGRNKKMSIHQGKTSIQGRQALYEKLEADDKVALEAGNLAFIMAREITEKKGCEVRVLNSAKLPFIWDAPTKTDKEDAMKLAHLIEERRDEKLPLVPLPSEKELARRKVLAAYGREMRSRTRHLNTLHAIFVHQGHTTIVKKNLATAERRQEAIKILSGLEREEAQWILRYLELHEQRIKELKVKIQNEAKEDEGMKILQTIPGIGPIVAYAFTAHVGDGSRFSKGAQVSNYIGFVPRLDYSGTIQRNGHITKQGNSYLRGLLVQAAWITVRSKQGGALRARYTHYTSCQGASKKKTVVSIARKLTEHMYSVLRNKTTYEPRRWKGPQDKKTALSDLINSA

SEQ ID NO: 290505 - protein, 484 aa, unidentified
MVLGHVSDIGEPVTAGIPFERVSTTTNPYRRGIPTKMMEDAVARRKREFELAYPNAAGIDIGSASHYVAVPPDRADDPVREFKSFTEDLEALADWLSACDVDTVAMESTSVYWIPLYELLESRGFVVYLVNARHVKNVSGRKSDVLDCQWLQQLMSYGLLSGAFRPRDEICALRCLTRQRDMLIKCQSQHVHHMQKALAQMNVQLTNVISDISGLTGQNIIRAIIAGERDPVKLAKLRHERVRASEADIAKSLKGNWRDEHLFALKQAMTLCDTYSAAIADCDRQIQGQLERLYQHEASAQPECKRGRRCDPMKFDLRTALQRTCGVDLTRINGVETATALKVIAEVGPDLSRFKSAKHFASWLGLCPGTKISGGKVLSGATKRTANRLAQALRMAAFALSRSKSALGAYYRRLSGRLDKAKAITATAHKLARLIYTMLTKGTEYVDRGQDYYEERYRQRVIHHLNRRATALGFALTPVESTVV

SEQ ID NO: 290506 - protein, 457 aa, unidentified
MKWYLGIDVSKGYADFALVSELLIQVEETFQLDDTRSGHEQLKIWLDALFRRHPHLEIDCGLESTGGFENNWYALLIKLSSSLPIRAARLNPSVVKNASKALLNANKTDAESAKEIAGYLKRYEDQIDFAVRDNQYASFRSLQNHLELVTKQKTQLINELKQILYSSFPELQRFCKQGIPAWVLELLMQYPSPEKLVKQKPVKLARIKGVTEEKAKSLIEKAQATIASRSNSTYEYLTVQLASEVKHKQEKIKQLKQYLDDHCKGKEKEWLESIKGIGSYSAAAIMIQIEDIHRFASPKELASYFGLHPLIKMSGDKRMVSRMSKQGRPAMRALLFMCANSAVRCDDHMRIIYARHRAKGKNHKQALGAIMHKMTRVIWGVLIHEKPYDSRIDLANQSKNIQNPVQDELKETENKRRMQQFDSDAPISRIASKKRKVHAASQVGEAELVRDLEHEPG

SEQ ID NO: 290507 - protein, 305 aa, unidentified
MWDRCPQKKLIVATIKGAGLKEETRSYDGFTESLEQLRDWLKESGVTHVAMESTGVYWKPVYNVLEEDFEVILVNARHIKNVPGHKTDKKDSKWIAKLLLCGLLKGSFIPPKPIREMRDVTRYKRKVIDQVASEKNRIQKILEDANIKLSSVVSDMSGAVATKIIKALIDGEENVDELVNFHHGKMHCTKEELAASLRGKLTDHHRFMLQMVKESIAEKERLITKLDEQIEKMLKANELELDAKLLETIPGVGKDGAAYILAEIGNDMSRFPNEQHLASWAGVSPGSNESGGKKKVHGPPTGINI

SEQ ID NO: 290508 - protein, 322 aa, unidentified
MSGAVVGIDIAKRKFDVALFLKGKFKHKACMNNKQGFEDLSRWLKKQGVEHVRVCMEATGTYGDELATYLYDAGHLVSIVNPVRIKGFAQSELLRTKNDKVDAGLIARFCVAMNPGTWTPPPPEIRRLQSLVRRADTLIDMRTQEQNRLGTTHETIEPSIKEHIGYLDQEIEKLKRQIAEVIDHDPNLRGKRDLLDSIPGLGETTIAVILSALHVFEGVKCVQKTVAFIGLAPKETLSGSSLKGKSRICKIGHARLRKALFMPALVAMRYNPVMIDFYRRLKEKGKNGKVILCAIMRKLVYLIYGILKSGKPFDQNYKQNFA

SEQ ID NO: 290509 - protein, 394 aa, unidentified
MKEDSANQTSAPIVTERYAAYVGLDVHKDTIAVAVALPGRDEPLYRGEIAHEPKKVSRWLDRLSAEFEGALLQFCYEAGPCGYGLYRRLVAAGHDCQVVAPSLIPKKAGERVKTDRRDALKLARLLRAGELTPVWVPEAEQEAMRDLTRARDDMKGQERKARQQLNGFLLRHGHHWPTGKTRWTATHFNWMASIRFDQPWLQVVLQEYIDAVKAASRRVADLTAQLMQALPNWSLAPVVDALVALRGIDTLAAIVLLAELGDISRFESPKQLMAYLGRVPSEHSSGGRRRQGAITLTGNAHARRMLVECAWSYRFPARQTMHLKRKAKAAPEQAKAIAWRAQKRLCGRYRTLTQAGKNVKRVCVAIARELAGFIWDIVRQEMPRLGAGNGMVAR

SEQ ID NO: 290510 - protein, 453 aa, unidentified
MPNKPAPAFDETRRNVAGIDIAGHADHYVCGPRREDGGHDVAHFGTTTAELHKLLAWLKERGVESAAMESTSVYWMPAADLLEANGIEVVLVDTREVRMVPGRKSDVKDCQWLQRLHSCGLLRGGFRPPESVAAVRTVLRERESLTGMRTQCLQQMQKSLDQMNVRVHHAVSDIDGKTGMAIVGAVVAGERDPAALARLRDPRCGKSEEEIAERLTGVWREEHLFNLGQAYRTLRFIDERIAEYDAKAAAMLRALAGATGKPPPPPPADGEARTRKDARDAEGKSDLQRIMGFDMTRLPGIGYDTAAVVASEIGPDFARFPTERHFASYIGLAPSLGKSAGKNVRQRKRCRNTSRAGRALRMAASSLYRSKTELGAFFRSVARRADRKTAVKATARRMAHMIYRAVRYGAAYLDRGAEAYEKRMRERTLRTVRLLIKSHKINELELSTAFAAV

SEQ ID NO: 290511 - protein, 427 aa, unidentified
MAYQIAAVDVHKRMLAVMVADVAGQGEYQFERRKFGATGESLRALAEWLLQQEVEEVVMESTAQYWKPVWLPWSSIAEAAAPAAGGAPKMSGTLHLCQAKSNRGRRGRKGDFVDGERMVKRLVAQELVLSFVPDPEQRLCRTVTRRKHQLTRDKVRFQNQLESLLEQMHIKLSSLVSDLLGLSARRMLKALAEGKTDPAAIAALADFRLRATPAQVQDALGACTQLHAVYRRLLKMALQELELLEEQIEQLDREASELLQEHQNAVQRLAEVPGLGVSSSVQIIAEVGPEAENFESAKALSSWVGVCPGSEESAGESQSTRSPKGNQNMRRLLNQAAQSAVKVKGSIFEITFSKLLPRLGYKAAIWAIAHRLCRLLWILLRKGVRYQERGPAVSAKSQRTRTTRMIKELRKLGYRVEGGPLPAGIPA

SEQ ID NO: 290512 - protein, 350 aa, unidentified
MIIIGCDYHPGFQQIAYVNTKTGELSEARLGHKEQAEHFYRELRKRSLTVRVGMEASGHARWFECLLAELQFELWIGDAAAVRAKRVRKQKTDRQDAQLLLQLLLEDRFPKIWVPDAENRDLRQLLWHRHRLVQMRTRVINQLHVVALNEGLRRKKALWRPAGRAELERLSLAPWASRRRQDLLDLLDRLTPKIHELNGKLEQIVERRPVTRQLSTHPGVGPLTALAFELVIGTPERFACAKQIASYVGLVPAEESSGDRRRLGHISKQGNVLLRFLLVEAAQVTVRSDAQWRSQFFHLAMRRGRKIAKVAMARKLAVELYWMWRRGWNYAEMQKLGSHAGEPGNRHGVQ

SEQ ID NO: 290513 - protein, 369 aa, unidentified
MRKSIMYVGMDQHKESIEIATADEGRDGEVRRYGRIDGELDSLDRLVRKLVATGKELRFVYEAGPCGYHLYRHLKARGLECKVVAPSLIPKKSSDRVKTDRRDAVNLARLERAGELTAVYVPQVEDEAMRDLSRAREDAKRAETRARQQLLALLLRHGLKYSGKTAWSQPHLRWLARIKLPQPAQQIAFQEYVEAISEAAARVERLTTQIRMLLPQWRMAPMVEALQALRGVSLVTSVITVAEIGDLTRFTNPRQLMAYLGLVPSEHSSGPHRRLGAITKAGNSHLRRVLVESAWAYRLPARVTPIIRRRQEQLPKAVCEIAWRAQLRLCARYRRLTLKGKTKQVVVTAIARELVAFMWAIAVTVQSHQ

SEQ ID NO: 290514 - protein, 310 aa, unidentified
MELFIGIDVSKDRLDICVRPSGETFVVTRDDEGLERLVERLRALAPALVTLEATGGYETVVASALAAEHLPLAVVNPRQIRDFARSTGKLAKTDRLDAAAIAHFAEAVRPAARRLADGEAQALGELVARRRQVIEMIVAEKNRRRLAAQPRVLKAIDRHVDLLQAELSELDREIDGAIRNSPAWQADADLLASVPGIGKATLRTLIAELPELGRLDRRKIAALVAVAPINRDSGVWRRRKAIAGGRAPVRTALYMAALVASRANPVIAPYYQKLRASGKAAKQALTACIRKLLVILNAILRDRKPWTLPA

SEQ ID NO: 290515 - protein, 418 aa, unidentified
MNQQNNTQTINVVNPVCCGLDVHKKVILACLIVTDAQGNEHITIREFSTFYNSLIKLRDWLIENDCPIVAMESTGIYWRPIHNILEDYIQVVLVNARHVKNLPGRKTDTSDSCWLAGLLKHGLLKGSFIPPKNIRTWRDLTRTRQKHVQNVGEYKQRTQKLLESANIKIDCVISDLFGASGTGLLNLLAEGKEISLEDINQVVHWSVRHKSEELLISIEGHFTEHHVFLLGAHLETIKFHQSQIKAIDERLKSMMTDIEPLIKELDRIPGIDEVAARAILAEIGISLDEFESSDNLCSWSGLCPGNNETAGKRKSGKSSVKKHLLKTIMVEVAWAAIKKKNSYYKEKYHRLKSRRGPKKAIIAIAHKILKVIYNIVKHGCEYQDLGEEYLNKINKQTKIRNLNKQAAALGMKLVPIGS

SEQ ID NO: 290516 - protein, 311 aa, unidentified
MKSSELFVGIDVSKETLDVAIRPRGEGRSFTHNEEGLSQMAEWIQAASPQLIVLEATGGLEVEPIRALISRGLLPVRMNPRQIRDFAKATGTLAKTDKIDAQIIARFAEAVRPEVRPLPTPEAQELEALNTRRRQLVEMLTAEKNRLGMAPPAIRKEIQAHILWLEKNLEKANKALSDRIQANPIWRAKDEILRSAVGVGPKTSTTLLSDLPELGTVNGKKISALVGLAPLNRDSGKFRGRRMIWGGRAVVRSALYMSALAAKRFNPVIRNFYERLRAAGKPFKVAMTACMRKLLIILNTMLKNRTPWQTA

SEQ ID NO: 290517 - protein, 353 aa, unidentified
METAYDGRQVVGMDLHRRRSVLVRMTEDGRRLGVARITSSPAGLRREIAKAGKSPRVVLEGTYGWCWAADTLAAAGAEVHLAHPLGVKAFTCRRVKNDERDAADLADLLRMGRLPEAWIAPPGVRELRELTRYRCRLVSLRTSCRNQVHGVLGKRGIPVTGTGVFGVAGSAWLDHLGLPQPYAGKVTSLRQLAGELTTEITMLSEVIADLLAGHRGYQVIQQLPGIGPVLAAVIVAEIGDVSRFRTAAQLCSWAGLTPRHRESDTKITRGHITKQGSRLLRWALIEAIQHAPAGSLPGAVRQRIIARRGKQAKHIAKVAAARRLLTLVYYGMRDGQIRCLSQPPASPAPAQAA

SEQ ID NO: 290518 - protein, 379 aa, unidentified
MEESNLYLGLDVHSREIMAAVVEEDGTERYLGVIPNRPESVRKLVNKLGAKERIRAVYEAGPTGYGLYWQLEGMGVSCGVAAPTLIPTKAGDRVKTNRRDARKLARYHRSGDLSYVWIPDEDLEALRDLIRAREAAKRDEKRARLRLKSFLLRHGLRAPQGARAWTAKYRAWLQAMTFERAALTGTYQEYLHEVDHHELRVKRLEAAIEEAVEQAPEQFREVVGALQSLRGVGKTTAIGVTAEVGSFSRFPHPQQLMGYSGTVPSEQSTGDNHRRGAITKTGNSHLRRLVGESAWSYRHRPSLRHALKKRQEGQSAEVVEISWKAQVRLCGRFHRLVARGKTKQKVVTAIARELLGFMWAIGVEVERRRTNATAQEKLG

SEQ ID NO: 290519 - protein, 345 aa, unidentified
MDVAAIGIDLGKSSFHLVALDQAGQIVLRRKLTRRKLVDLTATLPSTLIGMEACGGAHFLARLLREQGHDARIIPAQFVKPFVKSQKNDFLDAEAIAEAVQRPTMRFVPVKTEEQLDMQTLHRVRDRLVGCRTALINQVRAVLLERGLTFARGRASMARVVAELVAADTDEVTSATRELLALMWQEWQELQTRVDDLTARIEQAAAQDEVCRKLTAVPGIGPLTATALVSAVADGSMFRRARDLSAWLGLVPQQRSTGGRTKLLGISKRGNSYLRRLLVVGAQSARLHLNRERHARLGGWLTRLEQRAHRNTVVVALANKLARTAWVILRQGGDYDPAFGLPAEA

SEQ ID NO: 290520 - protein, 469 aa, unidentified
MYGAIGIAVTSLGFAPVVKSATQLLIRSIRFMQVEPMRVRVIPQYIEQAMSKTGIDHCYHSEKEHCIMNAVGIDVSKGKSTVTIRQPGNVVVLPPCDIRHTKSGIDSLINQIKALDGETKVCMEHTGRYYEPMALWLSSAGISVSAVNPVLVKNFDTDESLRSPKTDKADSRKLARYTLDKWDSLPQYGLMDKTRNQLKTMNRQFSFYMDQKTAMKNNLISLLDQTFPGANDFFSSPARPDGSQKWVDFVYTYWHVDCVRSKSPDMFTQHYRNWCSRNNYNFSADKAAYIYETAKDLIAVFPKNPDTRLLIRQAVRLLNTASKTVETLRIQMNDTASKLPEYPVVMAMNGVGPALGPQLMAEIGDMARFVKKSAITAFAGVDPGVNESGSHKQQSVPATKKGSPHLRRTLFQVMDGLIKRAPLDDPVYAFMAKKRSEGKPYYVYMTAGANKFLRIYYGRVKEYLASLEQ

SEQ ID NO: 290521 - protein, 337 aa, unidentified
MDMHVGLDVSQRTTSISIIDASGQRTWQGTAPTEPAAIVQTLRAHGAGDARVGMETGPLAVWLYHAIRQKGVNIDCIHARHVHAALTVQLNKTDRNDAFGIAQLVRSGWYRATHVRSLECHHVRLMLTVREKLISLRTATNNQIRGLLKTFGVVLGAGKNRVFETSVQGADPLRDGIKPVIGILLDTWRHLTTKIRELDRSIQRQVNQDPVCRLLMTVPGVGVITAASFRTAVDDPSRFKHVSDIGPFLGLTPRKYQSGEVDRNGTISKQGNRQTRSMLYEAALALLKRYGKETSLGQWGAKLESRLGLRKAVVALARKLATVLLSMWRSGEQFRCA

SEQ ID NO: 290522 - protein, 387 aa, unidentified
MSQTVAALIPAAVNYERTLVLAIEVSNKSWVLAAQVPGLPHTKAKRTIDPEAEALLAAISGYRARTTATGRSIERVIAVYEAGWSGFWLARWLMRHGVEVYVVQPSSVPVDRRMRRAKSDGIDAELLLRTLLAWLRGEPRVCSMVPVPDEADEDARRCVRERTELISERVGLTNRIGAVLATLGVSDYNPLLRNRSRRLAELRTALGEPLPANAHAKIKRLLARLELVLAQVAELERERDAVVETEASDKASKMIQQLTGLRGIGVQSATVLVREAFVRRFANGKALGSYAGLASSPYSSGGINREQGIGKAGNRRVRTVMVELAWLWTRYQPGAAQVCWFRERVGSTGRRVRKIMVVTLARKLLIALWRFVTDGVVPEGAVLKPAA

SEQ ID NO: 290523 - protein, 383 aa, unidentified
MSDHSEAFVAFDTSKLRNAVAIADGGRGDEPRFLGEIDNTPTATAKLVRKLAGKYQRVTFCYEAGPTGYGMHRQITNLGHECIVAAPSLIPKKAGDRVKTNRRDAISLAKLLRSGDLTAVWVPDRQHEAMRDLTRARETAMLDLRAKRQQISAFLLRQGLHYPEDKRTWSKSHLNWLSSQKFEIAEQRIVFEELMEAMRQAQGRLERLEAAIRAAVPDWSLGKLVTALIAMRGLDMISASTIVAEIGDMSRFRTPRELMAYVGIVPSENSTGDKVKRGPITKTGNRRVRRMLVECAWSYQFPPQLSKDKQVKVEAAPQAVREIAWKAQSRLNQRYRALLRKGKLKNVAITAVAREFVGFIWAVAQAVGAAPAANNRTAPAAPR

SEQ ID NO: 290524 - protein, 427 aa, unidentified
MAYRVAAVDVHKKMLAVVVADVAGNGDYEFERRKYGATPGELQRLAQWLVEQEVEEVVMESTAQYWKPVWAALELEWKPATEKRGGASKMSGKLHLCQAKSNRGPRGRKSDFADGERMVKRLVSQELILSYVPDPEQRLWRTVTRRRYQLTRHKVRFQNQLESLLEQGHIKLSSLVSDLLGVSARRMLKAIGEGEKDPEVLAGMADRNLRATPAQLRDALGGCAHLSAVFRQLLKMSLEELQLVEKQIEQLDKAAMELMQEHDDVVKRVADVPGFGVASALQMIAEVGPKAAAFRSAKALASWVGVCPGNEESAGESQSTRSPKGNRHMRRLLNQAAQSAVKTKGSIFEATFQRMLPRLGYKRAIWVIAHRLCKLLWLILRKEVRYEERGPAVSAKSKQRRAARLIRQLKQLGYRIEGEVLTAPTGA

SEQ ID NO: 290525 - protein, 369 aa, unidentified
MKQRKKTKKGMPMKTKVKISYVGKKVFIGIDVHRLSYAVTAVCEQVVVLKCSVPGEPHKMVQFIANKFPGAEVSSAYEAGFSGLVLHRALTAAGVSNLVVNAASIEMRVNDKVKTDKRDSLKIAIHLSQGRLEGIRIVSEEEELTRLIARTRDQLVKSRGMLMNSVRMKLLQFGKLPIEYRKVLHLKSVEAWIAEKDFPGLLKIAIRYLVECWKSINIQLKAIKQELRLQAKSDPREAIYRSVPGIGPISARVLSNELGDMKQFRNERRLFSFSGMTPSEHSTGEPKNQRRGHITHQGSARIRKILTEAAWVAIKRDPALRAVHQRISVKSGAKKAIVAVARKLLGRIRALFMKGEFYVNGKGLPPSAA

SEQ ID NO: 290526 - protein, 414 aa, unidentified
MDVVHPRCAGVDIAKRDAKVCVRIAGAGRAKAKSTVTTWGAVTNQVLALRDHLVAEQVTLVVMEATSDYWKPFYYLLEDGPFDVMLVNARHVKNLPGRKTDVSDAAWLAQLGAHGLVRGSFVPPEPIRQLRDLTRTRTTLVRARAKEIQRLEKLLEDAGIKLSSVASDITGVSGRAMLAALIDGQRDAEVLAGLAKRRLRSKIPELTEALTGRFSEHHGFLAQLHLDLIDNHTQAIDDLTERIEVVVEPFRHVRDLLVTIPGISTLVADVIIAETGGDMSRFPTAGHLASWAGTCPGSNESAGRIKSTQTRPGNPYLKGALGIAAMSASRSKDTYLAAKFRRIASRRGPIKAIVALEHAMLVAIWHMITTDVPYSDPGGDYFTRLDPDKAKHRALNQLHKMGYSVTLEPLAVAG

SEQ ID NO: 290527 - protein, 396 aa, unidentified
MKHYVGLDVSNIETSICIVDQEGNIVKEAKVASDPMSIDAYLRKTKMEFESIGLEAGALSHWLVNGLRTNGWSVVCIDTRFMAAILSTNVNKTDRNDARSIANAIRCKNYREVHVKSIESVVTNCLLTARKMLVHQKMQVSGTIRGLLKTFGIKLPKGGKSLRESIKEAISSDINSGKYTLAPHIDLSVIETLLVCYEKASEQLGILDDKLESLAKTDLVIKRLMTHPGVGPVTATAYKAEIDDPKRFKKSRSVGAYLGMTPRQFSSGEIVRQGRVSKNGSREVRALLHEAGVVVVTKVKAKSRLKKWGLKKKVKLKTQKAGMAVGRKIAINLHQMWIKGKDFDPQMDVEDFDYGKESQQNTNSKTRKSRKNIPHVDKKDSVRGAGEKIKKARKVA

SEQ ID NO: 290528 - protein, 401 aa, unidentified
MATMRDNVQRVKRFRELKATLRSNRSRLLVGLDVAQAEHVVHLRHAHTRVVVPTLTIPNTTQGFAALWARIQQAQRATGCREVVCGLEPTGTYHQAVATFLEAHGVDVVLISSSVAYWNRRTQDGTWDKNDRKDAANCADLLEQGKVLFYSQPTGPLAELRRLVKCLRRARAELAACKARWRTTLRPALGPMGEPLPNRLRAELPGVLQAWEPTAPGHPAQPKGRLPLGLATACADLGAQIASVQARITTIEQACTPLAERLPAYGLLRTIPGVGPTVGAILLAEIGDIAWYTQFSQLRKLAGLDIVRVQTGTFAGQWRISKCGRGLLRWALYHAAVGVARTAAGRARLAALKAKRHGDRFAGFKAIVELAAKVLRIVWGVWRSGTPYDPRRAGGLRRQPR

SEQ ID NO: 290529 - protein, 371 aa, unidentified
MAKRLKYIGLDVHKETIAVAVAEGERGGEVRFHGTIPNEDDAVRGMVKRLAGPGITLDFCYEAGPCGYGLQRLLTRQGQPCIVISPSMMPRRPGDQIKTDRRDAMTLARLLRAGELAPIWVPDEAHEAIRDLIRARRSAQEDTSAAKQSVRSFLLRHDRRFSGKSAWTKTYWRWLSEQRFDFAHQQLAFEEAKRRVLEAQARTARIEAALVEAVDGWRFAPLVRSLQAIRGVRLIVAATLVAEVGDLTRFQNPKQLMAYLGLVPSEYSSGARVQRGRITRAGNAHARTMLVEAGWTYRLPAREERRYRDRVADLPEDIQAIGWKAQVRLCQRFRRLSATGKPQPKVNTAIARELVGFAWDIARRVQPVVAV

SEQ ID NO: 290530 - protein, 323 aa, unidentified
MREFTGIDISKKTFDIYFEQNGQGTHVCFNQNKQDYKRFINLIGNERICIMEATGNYHVKLSRFLYENKLKVLVENPLKIKRFSQMRLQRNKTDKADSKMIYEYGKMVFIEKEIVGWKPDSNEIAELKQYDTVRQQFTKQLTALTNTQEAMGQLSDLQEQVDGALKLMIKHLKDALNQLDMQMQQIVETHHKDSYKLLTSIPGVGPKTATMMICLTDGFRKFDAKQVKPFISYIGMSPRTYESGTSVKGAGHITNVGNGRLRTLLYLCSWTAKRVNPQCAELHKRLFEKGKPEKVIKIAIAHKLVRQMFGVIKSGSSFSTVRA

SEQ ID NO: 290531 - protein, 338 aa, unidentified
MSLYAAIDLHSNNGVLAILDETDQVIRLKRLPNDLPTVLSELAPYRDQLAGVAVESTFNWYWLVDGLMDHGYRAQLVHAAAVPQYAGLKHGNDDTDACHLATLMRLGILPLGHIYPRTQRPTRDLLRRRSQLVRIAVSMMLSMLSTWSRHTGQCLSMKAFLHLTPEQIEQGLPDPTTHLGVQMQFKLWHAIQDQIEQIEVWVGDQLGHAPALEAVRSVPGIGKILGLTIVLETGAIDRFASVGDYASYCRMVKSERLSNGKKKGEGNRRSGNRYLAWSYIEAANFAIRWSPEIRRWYDRKRAKRHRMIAIKAVAHKIARACYYLLRDGTRFEVQRAFA

SEQ ID NO: 290532 - protein, 417 aa, unidentified
MKDGEKSSTCRYIALDIHKHYSVVAGVDRDGQEILPPCRVEHLNLEDWLAKHLLPTDQVVIESTTNAWHVYDLLEPLVAQVLVANPIKVKQIACARVKTDKKDTLILARLLAANLVPTVWVPPKHVRELRQFISHRRRLANMHTQVVNRMHSVAHRHHLNHPKGKDFQPKNTGWQRDESLSSLEKLQLELDMATRAHLEEQMERMTRELGRMSHEEPWASQMLYLMQVPGCGVVTGMTILAAIGDITRFENPKALASYSGLTPGLEQSGVKVRGKGITKEGRRELRWALVEVAWRAVKADPHWKRHFEELKKRMHTNQAIVTIAHHLLVVVWYVLTRHEPYRHYSPERIAYKYLTWSWALDEEQRQGMTRPQFARYYLMRLGIGDELKRVALNPQFPYRLASVEEVLALRPELRPPE

SEQ ID NO: 290533 - protein, 409 aa, unidentified
MHQQYAVFCGIDVGKTNHHAVGLGADGKRLYDKALPNDEAQLREVFGKLANRGPLLIVVDQPNTIGALPVTVARACGHDVAYLPGLSMRRIADLYPGHAKTDARDAFIIADAARTMPHTLRRTDAGDDALAELELLVGYDDDLAVEATRTSNRIRGLLTGIHPALERVLGPRVAHPAVQEILARFGGPAGIAKTGRKRVTAVAVKHAPRMGARLADDIFTALAAQTVTVPGTAAADLVLPRLAESLKSVVQQRKDIATDVERMLDAHPLSRVLTSMPGIGVRTGARILLEIGDVSDFASPGHLAAYAGIAPVTHQSGTSIGGEHLSRSGNRKLKRALFLSAFASLSDPVSRAYYAKKRGEGKKHNAALICLARRRCDVLYAMLKTGQFYRQPGEPRPDATESREAATAA

SEQ ID NO: 290534 - protein, 497 aa, unidentified
MSTKSTIYSRCNPQLLKLFETAGHPAKVLCVALDYAKAQHTALLCNGLGELLKPSFAIDNTPQGAAKLLSEVRACVKPRKIRPEHVFFGGEDYPSYAENFLRHLRQEKFLVVRVNAWEAKQQRDNFQASSDSLDLLGIARCCLNRRGESVRDLPAAYPNLRIATRDRDKLVRMRTAISNRIHSYVDRLFPGFLSEGKSALEPFSKASLELMEDRFSPAQLRRRPRQALAQWLGRRGVTQPRDTADQLKGFAKNVLAPAPEQTLMLQQTLAQLVGLYRNLEQSIARIDREVAHWLARTPGAWLTSIPGFGITLSAGWTAELGPPSQWRSVRQLCSYSGVVPKSKQTGGPQKEPVVGAVQQRCNKRLKNVVLQAVQKVIQHGPEELRRTAQELQARGAHTEFALAKRLVRLAKYLALTGTVYRPKGMMDPATPKAALATHYQTVWEKLLSKWRDKADLREVFAPEQPLGQWRKMVQQLYALELRLPQQKAAQKSSALAP

SEQ ID NO: 290535 - protein, 413 aa, unidentified
MVKCPVATKWRQILDNMSRQQAALAAKLPALMKNKQIEIRRENGSDQARVEQDGKRVLKLGLDLHYRQVTVALQEDGGQIKVAGKMSHEVFAGWIGKKLSQGWSISSCYEAGASGYWLHRELAALGIDNLVVAPQPMGRGAKKQKTDKRDSVQLVDCLDRYLRGQKKALSPVTVPSLEGEQQRALIRYHRQIMADRGRYQARGKSLLCAQGIQVSGKWWQVRGWITLNSDGRCQDWMREQLKAWREKILSTEAQQQGLRQQVQALAPTTSRPKGMGSYSAAVLEYEMKGWHRFHNRRQVSSYTGLCPGVHLSDGRGKEGAINRCGNRMVRWTLVEMIWRLAKWQPDYQPVRLLAQGLIKSSRAKKRLAVKAARCFAIDLWRLQTGQTTAQKLGLVLQQDLENKTPPAAPAASV

SEQ ID NO: 290536 - protein, 331 aa, unidentified
MDENITGFVGLDAHAESTVIGLAEAGRPAPRFIGKASARVPEIKRALSKLGEPASLLIVYEAGPCGYGLARELRSAGYRCEVIAPSKIPKKSGDRIKTDRRDALKLASLARAGELVSVVIPDERDEAIRDLSRARVDAVRARLKARQQLKALLLRHGRRYSGKSSWTAAHERYLAEVSFKYPAQDIAYAEYRHAVGEGEVRVQRLSQSLSQEVEGWRMRPVVNALMSLRGLDLIGASTVVAELGDLRRFAHPRELMGYLGLVPSEHSTGSSRRQGAITKTGNSHLRRVLIEAAWTYRHRPRIYGALRARQEGIEEPVKEGSRDGLVGVESA

SEQ ID NO: 290537 - protein, 348 aa, unidentified
MRKPKVPVRSARCKSLPTEEYDHLVAIDWSKATMAIARLTKQMREPVVIETRADLEELKVYLATLRGRTLLTFEETTTAHWLYVELHDSVERILICDPYRNRLLVEGPKTDKIDARKLCLLLKAGLLKEVYHSLEEDYHLRKIVSAYDDVVKAGVRLLNQRSAFSLADGGASETEEAHFVCKHLETGIAWYEETKLAYAALFAQLRRNDVRIRRLTALPGIADIFATKIVARVIDARRFPNAAHYLSYCGLIKHARTSGGRLYGRKSPRYCRTLKAVYKSAAMAALQGNNPMREYYNHLTGKGVAEHNARHAVARMLARISYGILKTATPYQPYLWRDRTKRAEIQCV

SEQ ID NO: 290538 - protein, 355 aa, unidentified
MKSCYENKEIYVGIDVHKKRWVVTVRTYDLELKTFSMLAVAEELEKFLVDNYKDALLHIVYECCFSGFWIYDYFHQRGYNIIVTPTNRIYRDGSIVKTDKIDSRKLAFQHSRGLLRAVKVPVEKVREYRSIFRIYDKEKMREGQLLRQFRCILEVKNHPLKWEKWNKQFIERLKELRFQEDIFNRKFEQFIREYEYIKEQIRDSEKRIKEISEDREFGPKIKRIEKINGIGIISSVRLVVYLFDLKRRFESGEKLVHYVGLTPGEHSSGEKIVRSRTGLVGNKQLRSIIIQLAWVAVRKDGNLLNKFERVFKKSGSKQKAIVAVARKLMMKVYTITEKEEEYEINKPACRSGRAA

SEQ ID NO: 290539 - protein, 370 aa, unidentified
MGKHRLAFVAFDSAKNKHAVAIADGGRGAEVRYLGEIDNSPDAVRKLVAKLTRQYERLHFCYEAGPTGYGLHRQLAELGHVCDVVAPTMIPKRSGDRVKTNRRDSVALVKLLRAGELRAIWVPDNVHEAVRDLTRARETAMVDLKTKRQQLLSFLLRHGRSFPDRNWTKTYERWLAKQTFAHPAQQIVFQDQLEAITTAQARLAALEQQLREIVPTWTMAPVVAAYQALRGVSFLVAITFVAEVGDVRRFATPQQLMAFLGLVPSERTTGDTVRRGSITKTGNHRARRVLIEGAWTYRFSARVGETLRTRLKDLPLSVRAIAWKAQVRLCARYRRLTARGKKSPVVTTAIARELSAFLWAIGQQVAPKAS

SEQ ID NO: 290540 - protein, 382 aa, unidentified
MQASTLVTPTVGHCGTIFVAIELSQKTWLVTLHSPDRDRISRHKLEGSDHAGLQALIEQVRDRVARKLGSVPEIRSCYEAGYDGFWLHRLLEAAGIRNLVFDPASIAVEQRARRAKTDRIDGELLLRTLMAHLRGEPRVVRIVRVPSVAEEDARRASRERDRLITEQTAHTNRIKALLRLVGMAVGNPRRGDWLGWLDRQRDWQGQPPSPQLLAEVTREHARLMLVREQLAALEQAQAARALPMPEPMAERQDDLLRLKALGPAFSATLVNELFYKNFRNRREVASYCGLTPSPWRSGGIDREQGISKAGNHRARHKAIELAWLWLRHQPDSALSRWFRTRTANAGKRARRIAIVALARKLIVALWRYLTTGLVPELAVMKA

SEQ ID NO: 290541 - protein, 503 aa, unidentified
MGTLAYVRGVEASVSLRSELRGRLWSNHFGWQSLFDVGHAPVGEHWTKSRPADQSLTGHPMSFDRLKRTQRRKRLPGHKLKPSRCHLIVQNSKPHLSMKPTYFLGIDAAKHKMRATLSNRSEHVLFEKDLSVEATGLRQLLAAIKRQVKDPEQLLVLIEATGLLHLNWSAALTKAGYAVAVINPLIARRLYTLQNSIRDNKSDPIDARGLCTIGLLHGEKLLVHYRFSLRPEQFTLQRAQSVRKALRSALTNLKKTYQSLMDLSFPELGGLLQLDGVGIRQLLIQAPTPAAIAGKRLSTLENNWMVRPKAAALKALAADSMADPDLAAASGPALVALLQSVAAMEGRLHALDQQIAKLACTSVDPQTKALIETIPGFGPVNAAKTLAWLPTEILHSGSNRKVAARLQAFMGNDPRLRQSGQWKGHTKMSKRGVEMLRTAFFQSAFSAAHNDPELRAYYQCKRAQGKTHQVALSHLMRILTRRLVAVLRSGKPYQSHYNLKNAA

SEQ ID NO: 290542 - protein, 461 aa, unidentified
MQGDPLQSSAWQGLKIVHPNAAGLDISSTEVWAAVSPERNREPLRRFGTYTPDLHELADWLQASGVDSIAMEATGIYWIPVYEVLEARGFEVYVVNARHIKNVPGRKSDIQDCQWIQGLHSVGLLRGSFRPAAEIATLRAYLRHRAALIEHRAAHILHMQKALGQMNVQLTQAVKDITGVTGLAIIRAIVAGERNPHKLAALRQPGVKKTEQEIAKALTGNYRPEHLFALKQALALYDTYTGQLRECDAEIERQFANLKPTVPPDDLPPLDSSDKPETNSKNGPNYDARTLLYQWAGVDLVAIRGLNASTVQIILSETGIDLSAWPSEKHFCSWLGLAPHNDISGGKVLRSRTLKTHNRAGQAFRMAAQSVSRSPNSAFGVFYRRMRARLGSRQAIVATAHKIARAFYYMLKHRTPFHDMGGEEYERRARERELHNLQRRAAKLGLALIAAPVASTADAVS

SEQ ID NO: 290543 - protein, 434 aa, unidentified
MICAAVERCAGIDVGKKVLAVCVMVGPLEGEPEVERRQFQTIRADLDRLRAWLRFRGVTHVVMESTGSYWKPVFNVLEGTVQVYLANPQEVKNRRGHKTDDKDGWWLAHLLRHAMIHPSFIPPRPIRELRDLTRRRKRLLSNATSEKNRVQKILEDANVKLGNVLTDVFGVSGQLMLDKLTEGKATAAEIAALAKARAKKKIPAIIAALEGHQMSAHHRRMIGYSLEHLRFLEEQLAELDRDIAEQIQQAGLSQRWEDLRSIPGIQQTSAAAILAETGQNMNQFPSEKHFSSWAGVCPGNNQSGGKKNKGGPTTGGNPWLRCALTECAWAAANKKDCFIKDRFWRIASKHGGKKGPAIVAVAHTLLILVYEVLRTGKPYQERAQPIMSEVQRQRLIRHHARRLGKLGLATSSCRPATRIPKLPRSSKAAKPEPA

SEQ ID NO: 290544 - protein, 337 aa, unidentified
MKNASSEKVFKDCLGIGIDVSKADLAIVGMTPSESYFKPVSNDMKAIKVFMQRLHKGGYRGKLICESTGHYHLKLALVCHGIGLELIVLNPLQSSKHSKAKIRKTKTDPQDAYMLAKMCITEPDLPQAAQLTIPKVLIRLKMGQLASIEKHLQQLQQSLAQYEETYGGLGLALSDYQKALRDHCSSLKRLRKQLETELENLFSQAVADDESLDDLRGLPGFSKIVAGLVGTFDRQVKGARSWTAYVGLDVSVRQSGTWKGRGRLTKRGNAYMRKRLFQAAWGACLNYDYVRAYYDKLKRQGRKHVEAVCIIARKLLQIAYHVVVNKVKFDPNIAFAD

SEQ ID NO: 290545 - protein, 365 aa, unidentified
MDKNSRKPDGEAGRYVGIDLGDKKSRVCIVDEQGQVVSQEWVVTTPEALLKRFHGDPAMRIAMEVGTHSRWASELLGKCGHDVRVADARQLALITNSNAKSDKRDARTLAQLLRADPRLLSPIEHRAENLQMDLTVIRMRDNLIETRTRLVSSIRGVVKATGARLPKCETASFPQQVGGVIPEPLRPALAPVLEVIDRLNEELYEYDCLLEHWARTRYQESSRLTQVKGVGTLTALTFMLTVGDKERFSRTRDIGSFLGLRPRLDQSGDSHPQLRITKAGDGLLRKTLVECGQYMLGPFGQDSDLRRWGLKMIEDGNGSKRARQRAVVGVARRLAVLLMSLWKSGQTYDPLRHSRAQESSQEAVA

SEQ ID NO: 290546 - protein, 345 aa, unidentified
MELHTIGIDLGKTVFHLVGVNLRGEVVVRKKFSRKQLLHFTANLRIELIGMEACGGAHFLGRALQEQGHEVRLMPAQYVKPYVKTNKSDYIDAEAIAEAVGRPKMRFVPIKSDDQLDLQSLHRVRERWVMRRTAVINQIRGLLLERGVTLRKGRGHVDAALPGILEDASAKLSGALRGLLAQLKLELDHLQMRIDEADAVIKKTAGENEACRRLVAIPGIGPITATAIIAAIGNGAAFKKGREFAAWLGIVPGEYTTGGKQKLLGISKRGNSYLRRLFVHGARAVLQQSAKQSSGLSAWLAQLTTRTHRNVAAVALANKLARMAWAVLAKNEAYRPPILAGAATA

SEQ ID NO: 290547 - protein, 461 aa, unidentified
MGKGSESGMTRGDRRRNARREVLRGLVPRDGAVVGIDLGEDKQALAVVDHDVRVVARRTVRVKAFRLGPALDWAVGQARAAGFGAVAVACEPTGARWLQVQRLCAERGLALVCIQPLVSHVAREQQDLTGHKTDEADCVMIARLAFELHCYVPEELDQAWAELRHLGRRREQLVTAATASVLRVRDFLSVAWPVAAEACAQPFESVTWLAAVQVVTGREGSGPEELAAGGLAEFTAAVRGALPGWGGQRVSGRVCRAVFAVLASTEGVVTAHRRGLFRRIADELGDLQRTRAQLRAAGAGMAAVLAELGLSRLGDIPGLTAVGAAAILAETGDPRRYDSSSSLVKHAGLAPAGNASGAFEGQAHISRRGRPGLRLAVWRAVWPMLAHNPVLAAKHAGLTAPAPAGAGARPAGPGAVRAQRARARVACAASLLRWIYSMTVHGTSWDPAVAAGAASCPAQGA

SEQ ID NO: 290548 - protein, 361 aa, unidentified
MKKVSRQLPKMEAVFTKPEMTVGLDLGDRYSHYCLLNADGIVVEEGRIQSTEAALRRHFEGEPEMRIALECGTHSPWVSRLLTGLGHQAIVANARKIPAITGSESKNDRNDAKKLARFAAYDPKLLSPLEHRSPERQLDLNLIHARATLVRARTMIVNALRGLVKSAGARLPACSTESLPDRVAAAIPPALVPVATPLAEQIALLNRQIDGMDKQVEKLAAKYPEIALLRTVPGVGPIVAAAYVLTLDTPDAASNRSAGAYLGLRPGQSQSGDADPQRRISKTGDSCLRSLLVQSAQYILGRFGPDSELRRWGLKLAASGGKRGKKRAIVAVARKLAVVLHAMWRSGQRFQPFPQQAAVAA

SEQ ID NO: 290549 - protein, 469 aa, unidentified
MNNAKKKKRKNNGKQHNSLSQLEQINLHAAGIDIGAEEHYVAVPQGRDTEGEDIRHFNTFTVDLLSLADWLKKCKVDTVAMESTSVYWIPLFEILDSQGFDVKLVNPRFIKNAPGRKTDVLDCQWIQQLHTYGLLQGSFRPDDQICELRSYLRQRSMLISYASHHIQHMQKALEQMNIKLNHVITDITGATGIAIIRAIIAGERNPVKLARMRDPRCKNDESTIAKSLQGNWRSEHIFALRQAVELYDFYKNQIIACESRIQQHLETFDDRSDGKPLPKSPVKSGGCRNKFHFDAKTYLYRMTGVDVTRIEGIDTPTALTIISETGIGMNKWPTDKHFASWLALCPGSKISGGKVLSSRSRPCANRAAHAFRLAAYSLHKSNSALGAFLRRKKSHLGSPKAITATAHKIARIFYNMLKNGAEYVDLGQDYYERCYRDRMITNLKRKAKQFGYDLVNVKEHELLTTHLQI

SEQ ID NO: 290550 - protein, 342 aa, unidentified
MLNNVNKLYAGIDLHKTYMFVTVMNKDGYIQRQGRYENRDHTLIPALLQYNIPVEATVESSYGWYWLADDLDKAQIPFLLAHPKKVNAIVGKKKTDKEDSKALADLLRTNLLPQAYIPTKMERNLKELLRFRLHLVEQRSTIKRRIHDILAKQNIGFEHSDVLGKKAQDWLSHLNCPSPYREEIDTCLLLANNLTIQIEQFTNRVKYQVQKDPNAQLLLTIPGIGDILALTLSVEIGDVYRFANDRALASYAGVVPSVHSSGDKTHYGPVSKHGNKYIRWALAEALVHVTGEGKPLHEFYQRLKEKKGSPTARVAVMNKMMRIIYAILTKKKPYYREQEKTN

SEQ ID NO: 290551 - protein, 408 aa, unidentified
MQVVHSMCAGLDVHKKSVYACVSCCNDDGEKRQEVRTFSTMTQDLLALGDWLKESGVTHVAMEATGVYWRPVWAVLEGQFELMLVNPHHIKAIPGRKTDVRDCEWIADLLQHGLLRGSFVPPTEIQDLRDLTRYRVELTQAQNRVGNRIQKLLEQANVKLGSVASDALGVSGRQMIEAIIAGENDPERLANMARLKLRAKIPELRLALNGKVRDHHRFMLKEFLDEWKALKERIRRVEQEIERRIVPFEQAVTLWQTIPGVDRVTACNLAAEIGVNMNQFPTAHHLASWAGLCPGSNESAGKRLSGKTRDGNKWLRRTVCQAAWAVTRKKDCYLASQFRRLAARRGMKRAVMAVGHSMLVIAYTMLKTNRSYAELGGSYLEQINKDQLQRYYVKRLQRLGLTITVSPT

SEQ ID NO: 290552 - protein, 413 aa, unidentified
MISDNPSEQEANVAAAGSRAWIGVDIGKTHHWVCAVDKAGKRLLSRKVLNDEAEIDEVIAAVNGLAADRVWAIDILGTPSALLVALLARSGEQVRYASGRVVAAMSAAYTGEGKTDAKDAYVIAETARIRTDLAVIDAESDLVRTLGLLTGHRADLVADRVRMINRLRDLLTSVFPALEREFDFASCKGALVLLSGYATPESIRRMGEARLSRWLRQRRVRGYADVAARAVAAAQTQQTVLAGQDVAASIVAELAEAVLAQHARLKLLDQQIQDAFAQHPQADVIQSMPGFGPVLGASLLVAAGDLAAFPTAGHLAAAAGLVPVPNDSGRRTGNLHKPRRYSRPLRHALYLSAQTSMMRAGPNRDYYLKKREQGHTHSQAVIALARRRTDVLWALLRDNRTWTPTPPPRAQAA

SEQ ID NO: 290553 - protein, 374 aa, unidentified
MSRTIIYLGLDVHKDSITIAVLPEGAPAPSRVERLLNDLAKLRRFCERLAAQGELRACCEASGAGYVLQRALREWGYHCDVIAPSLIPTKPGQQRKHDKYDAAQLARLYRAGELTCVRIPSEAEERVRDLVRCRETLQREVLKSRHYILKFLARRGFVYREGTNWSTPHYNWLRRLAAASSPLAAEDQIVYGEYLGLLEYKLSRRDELDRRIGELALTPALAPAVNRLQCFRGVQRHVAMVLTTEIGDWRRFTSPRQLMAYLGLVPKERSSGDRERRGSLTKAGNSHCRHVLVQAAWAYRFQPKVGIALQARQRGQSPVVIAHAWKAQHRLHTLYRKLAFRTMPQIAVVAVARELVGFLWAVMQGENLSTSAAA

SEQ ID NO: 290554 - protein, 479 aa, unidentified
MTPSKDAFPEPCPPVPTIPEPSVLRPSFALPLYNPHAAGIDIGEAEHWVAVPPDRAPQPVRRFGTFTADLDALADWLLDCGITTVAMESTGVYWIPLFELLEARGLQVFLIDPRQAKRAPGRPKTDRLDCQWLQRLHAYGLLAAAFRPDDQVCVLRSSLRHRQMLLTYGAHHIQHMHKALQQMHLKLSQVVSDLTGATGMAILKAIIAGERDPLPLAKLRNPHCQHREDEIAKALQGTWRAEHLFALQQAVALSQLYHQQLTVCDQHLQTHLGTFADKSAGQPLPPKPRRHKKANEPHFDARTPLYRLAGVDLTTIEGIEEGTALVILAEIGTDMSRWPSVKHFCSWLGLAPQHKISGGKGLSRHVRPGAHRVAVALRLAARTVHHARTALGAFYRRMRSRLGAPKAITATAHKLARLVYSLLKHGSAYVKQGLDDYESQYRERKVKAMARQAKALGYTLVALGTPEVQSLDAVAAPTS

SEQ ID NO: 290555 - protein, 420 aa, unidentified
MTKKIIGIDWSSNFHVCYDLENKKSFKIGDDYKSFQKLLDDHPDYVFVIEEANNRIGEYITNEGRELFVLPPYRSKKAREYHEGSGGKNDKIDAKIIALTFKEHPEYCIKINYDDFTILLGRLTTSYDALCITHQQLCNRLNSTLKKYFPEFLKEIKEYKNIGSLFLLSEYPTPAHLKRATNKEIREKAKLNGIKISNSMINSINKLREAPSVWIKTPYESEMIAFLSKTLLNIRIQKNKIISDIENNINKSKYKIITTMPGIGPVTGAYILRAYLSHHFTNYRQLQSYCGTSPVIDQSGKRSFCKMRRRCDHDIRDKLHNAANAATICCNWAKKYYARKRKEGKTYGHALRALANTMLKIVFSMLKNLKAYDELLFLSRRGKIPSYENYTPVSHQFSSSDYSQYPSNISNVVIEFEGLT

SEQ ID NO: 290556 - protein, 348 aa, unidentified
MSQSNIHQYVGLDVSLKETSICVVDESGKIVWRGRTDSTPQAIAEAIKKHARHVVRIGLESGQLSTWLFHGLNERSLPVICIDARHAKAALSLKVNKTDANDALGLAQIMRVGWYREVAVKGHDSQAVRALLVARAQLVSQITTLKNCVRGILKTFGFVVRTGSRSQFPKHVREAIHANPALAAIVEPTLRVLEAARAQLLVYDRAVIQRARSDETARQLMSAPGIGAIVVLAYMTGVESPGRFRRSSSVAAYFGMTPARYQSGEVDRAGRVSKCGDGMVRGLLFEAAKVLLSRSARPCALQSWGQALAKRIGTKKATMAVARKLAVILHRMWATGATFRWPTPAPAA

SEQ ID NO: 290557 - protein, 448 aa, unidentified
MSSDQTWMMIGSSELPLSVESAAGVVSEAAGVCVSVLGVLPAHAVRPNSRSTARARARYTDNGRQSNRGYRIQWEATMNSILYVGMDVYKENYTLCCYSFDRDKVEYRQTVPSDYRLILKYLEQVHGKYLEEVEFICGYEAGCLGYSLYHQLTDHGVKCIILAPTTMGITNTNRVKTDRKDASNIARCLAFHTYSAVYVPDGEDNAVKEYLRMRDDQKLALKKIKQQITAFVLRLGKQYTGSKSLWTENHLKWLRGLDLTLLEKETLQEYLITYDYLTDKLERLDARIEELARNERYGERVRRLGCFIGIKPHTALSLLVEVGDFRRFEKAPNFAGFLGLVPGEDSSGGGRNRLAITKAGNSHLRRLLVESSQSYSRGTIGFKSKELKKRQEGNPPEVVAYADRANERLRRRYYRMTLKNGTKRNVAIVAVARELACFIWGMMTDEIA

SEQ ID NO: 290558 - protein, 341 aa, unidentified
MNIKRIGIDLAKQVFQLHGVDSQEKAVLRKQLRRAQMLDYFQKLPPCLIGMEACSSAHYWGRELQKQGHTVKLMAPQFVKPYVKSNKNDANDAEAICEAVARPSMRFVAIKSIAQQDIQAVHRIRSELEQQRTAKVNQTRGLLAEYGIVVGRRVDVLRNALPLLLEDAENGLTIDFRELLQGLQQDLIKLDERVDEMDKKIKLLANSNEEAKRLQQIPGIGPITATALVCAIGDGKQFKRGRDMAAWLGLTPRQHSSGGKDRLLGISKRGYAYLRTLLIHGARAVLKVAVNKDDPRSRWLQNLCDRRNKNIAAVALANKNARIVWALLTKKTDFLPEGKPA

SEQ ID NO: 290559 - protein, 342 aa, unidentified
MEKVSIIGLDLAKRSFQAHGALAEGGVAFRKKLSREKVLAFFAEQPRCIVAMEACGSAHHWGRAIRDLGHEVRLIPPIYVKPFVKRQKNDAADAEAIAEAASRPTMRFVAVKTEEQQARAMLFRTRDVLVRQRTQLINALRGHLSEHGVVAAQGTANVKVLEAAVEDQTTSFPLLVVELARVFLDQIEGLSIKISELEKVTVHEAACGETTRRLQTMPGVGPITALAIETFAPPMDVFKRGRDFAAWLGLVPRQHSTGGKQVLGKTSKMGQRDIRRLLIIGAMAVVRSALRKEPPEGSWLQRMLARKPKMLVAIALANKMARSVWAMLAKGEDFRVPTVAAI

SEQ ID NO: 290560 - protein, 348 aa, unidentified
MGMLADEVDHVIGVDTHRDSLTAAVTDPTGAVQAQVTLATDAFGYRRMLAFARKEAPGRRAWAIEGTGSYGAGFCAYLLEKGEWVVEIDRPARPRGRTGAKSDELDAARAAREALSRTHLAQPRRRGDREALRVLVATRQSAVVGRTKAICLLKALLVSAPGQLRNQFRNVATEEQLIRCSRLRTTATQSEEHRCTVISLRAAARRALALEAEASDLEADIQRIVAKMAPRLLAEPGVGPISAAQILCSWSHPGRLRSDAAFASLAGAAPIPASSGQTVRHRLNRGGDRQLNRALHTVVLCRLARHEETRAYAARRAAEGKTPREIRRCLTRHLARRLFKLLESSAAA

SEQ ID NO: 290561 - protein, 460 aa, unidentified
MNPKRLKSRNDGKMPMVHPNAAAIDVGATMHMAAVRADRAPEPVRSFGTFTADLHRLVYWFTECGVETVVMESTSVYWIPIFELLDARGFTVFLVNARDAKHVPGRKTDVSDAQWLQRLHSFGLLRASFRPKGQIAELRAYVRQRERLLEYAASHIQHMQKALTEMNLQLHHVVADITGATGLRIIRAILAGERDPEALACLRHYSCHSSAETIAKALTGSYRAEHLFALEQALALYDSYHEKASACDVRIEAVLKELSIHRGHGHGSAPRASRRRNRTDQANALAFDVREALFALLGKDITTIDGLGPYLSLKLIAECGDDLSSWPSAKHFTSWLGLAPSNKVSGGKMLSSRTRRSGGRAAALLRLAAVTVGRTDTALGAFYRRLSARIGKAKAVTATARKIAVLFYNAVRYGMDYVDPGASSYETRYRTRVVNNLHRRAKAFGFVLQPLEPKVGAAVS

SEQ ID NO: 290562 - protein, 427 aa, unidentified
MAYRIAGIDVHKKVLAVVVADVECDGEYEFERRRFGSNPEQLQLLSEWLIEQQVEEIVMESTAQYWQPVWGALERYWRPSCQKQEGAGAMSGKLHLAQAQSNRGRRGRKKDFPDAERLVKRLVAQELVLSFVPDPEQRLWRTVTRRKLQMTRLHVRMQNQLESLLEEAHIKLSGFVTDLLGVSARRMLQALADGETDPAALAALADKRLRATPAQLCDALGACTELNPVYRRLIKMALEELQFLEQQMGQLDQEIANLLRPHEDAVKRLAEVPGLGVDSAQQIIAEVGPTVATFPSDKHLCSWVAVCPGDNESGGVNYSHRSPKGNRQMRRLLNQAANAAARTKGSIFEIVYRRQVARMGHNQAIGVIAHRLCQLIWILLHRKVRYEERGPAVTETSKRKRTARMIRELRALGYRVEALNLQTAAST

SEQ ID NO: 290563 - protein, 444 aa, unidentified
MTETLYLGIDVSMAENACSSLLQDGTEARRRFTVPNNLPGAEQLAKEMVKLMESYHLNRLLVGLEATNLYWWHLACFLNSSPQLSPFQPRVYAFNPRLIKSFKKALSDTTKSDINDAYAVAERLRFGRLPAQFIPNQLYQPLQRLTRFRCHLMHQIAREKNYFLSFLFLKFSEYQNLDPFSDIFGATSQAVLTDYLSVDEVATAPLEELAQLLVKEGRNRFSSPETIAAVVKRAARDSYRPHATLNESLNLILGTTLENIRTLSRQTKKLDQAIEREVRKFPNPLISIPGLGPVFAAGIMAEIQDIHRFPDQSALAKFAGLFWRTRESGSFQAEETSMGKSGNAYLRYYLIQAASSVRMHNAEYGSYYRTKYNESTKHKHKRALVLTARKLVRLVDAMLRHNQLYVPPLMNLTEEVNKLATTRARPAKQHHYRQPGSHSLALCA

SEQ ID NO: 290564 - protein, 353 aa, unidentified
MDLNFGWEIDMTINMLGIDIAKNTFQLHGADSSGNAVHKKRLARRELAAHVANLPACTVVMEACGGANYWARVFHRSGHSVKLISPQFVKPFVKTNKNDANDALAIVEAASRPSMHFVPIKQVEQQDIQSIHRIRTRIVKNRTALINEIRGLCLEYGVVLIPGAARVKSSLCVAIADGDNELTPSSRESLQGLYEELVDVEARVKNLNTKIRQLCRQNENCQRILKIPGVGELTATAIVAAVPDPGEFRNGRHMSAWLGLVPRQSSSGDKQTLLGISKRGDRYLRTLLIHGARSVLSHYKDRDNDYTRWVGRKKATLSHNKAAVALANKNARIIWSMLRSGEEFNYGVQTAAA

SEQ ID NO: 290565 - protein, 331 aa, unidentified
MIAVGVDTHKDRHHAVALDQVGRPLGELVPAADAAGYAELQLWAELVFGIEGAGSFGAGLCQYLQHAGHSVVEVERPRRADRRAGKSDRIDALAAARRVLEGSVSTPRRRGVLSAIRALLVARRSVVGERTRVLNQLHALNTTAPITLRERVGGGTGRQIERRILSMRSRSGVDLEERVTFAVMRDLAAHSRALGADAGRYEHELAELVAEVDPTLLRKPGVGPISAAKLLACDPARFKSEAAFARCNGTAPIPASSGKTVRHRLNRGGDRQVNNAIHTIAIVRAKYQPETRAYLDRRIHEGKSKREALRSLKRHISRELYRHLTAVPLTS

SEQ ID NO: 290566 - protein, 403 aa, unidentified
MTYNVVFGIDVSSKSSTVSVLIKRNEFKHFTIANDLVGFNELLEQLQCYKHPVVIFEATGVYSLPLQSFLDHHNYDYTRINPLSAKKLMDNNLRHLKTDRTDAHNLAKIQFDVPQPLTPKQDYRYHEMQNASRFYEELTRDLVKYKNRLHRALQSTFPQIEQISSSRSGEVYWHIVDLFPHAKFVLDSSYDQIASQLVKIKGIGASKANQVACSLQSLAQRTWYYDDCDSITVELIKYCIEHLLQIEQRRKHILAYIKQIAPNPKDVQIYLSVPGIGKKTALRIYAELGDLRRFNNANQVDAFIGIDPGESQSGNTDKHLPITKHGNAIARKIMYRIITQMESAKKTKPCHITDYYEHKKQLSQTKGHKKAAITSMHKLIRTIYALIINDQSYDYHKALRNQR

SEQ ID NO: 290567 - protein, 428 aa, unidentified
MDEINRNRLEEFRQLRQEVRHSEEYLIVGMDIAKDQHHAFFGTATGKTLLRRLVFSNDHEGFRKLLDQAEALRVRHGLKKVVYGMEPTANYHKPLGEYLVTLGRKVVLVSGVTVARNRESLDGRWDKHDVKDSANVADLVSQGKCLYYEHPSAELRGLRGLLSLKRRLKKQEHGYRVRIRNHLIAQYYPEMDRDYEGLGAEGLSIVRWCLPASQMTQLEVEPFIERVTSRRITMEKRRRLEEVWEKAAESIGCEEVPGVDHEAKIMVEGLRQIREMIKETEEKIKELCEQFPEYHCILTIPGFGPDVSAKVLGAIGEPDRFQNGKQVLKMGGLDLSADRSGKDSDKAIPEISKRGKADLRYALFQAALIASTKDQNFMRYYTAKLRGREREKGIHMKMRVKLSAKMLLIAWSIMKKKETFDPAYLNAE

SEQ ID NO: 290568 - protein, 356 aa, unidentified
MSRDIKYIGMDVHKEAVVIAVRNSAGQLVMESIVETKASSLLQFIHGLQGELHVTWEEGTWAAWLYDLLKPHVHEVLVCNPRRNALLKEGSKNDRVDARKLSDLLRTGMLRPVYHGEHGLRTLRELARGYQTISQDQSRVMNRVKALYRGWGIGCAGTQVYAPRYRQEWLEKIEHAGVRRRAELLYQQLDSLQALRRTLRSELLAESRKHKASKLLRQIPCIGPIRAARLLALMQTPHRFRSKRQLWTYSGLGIETRASAQYRFVRGQLQLAKKPQQIRGLNQNHNHEMKEIFKGAATRASCGVGPLRDFYVALLAKGMKPEMARVTLARKIAAIALTLWKKEERFDAEQLKTQAA

SEQ ID NO: 290569 - protein, 482 aa, unidentified
MKPKSPLGTNKTNDHAMQGRWQEMNRRQRRETMCKIQSEDLSLEVIHRNAAGIDIGNESHYVAVPPSRDSQPVRCYGCTTGELKAMADWLKQCGIQTVAMQSTGVYWVAVYDILEQVGLEVYLVNARDTKNLPGRKSDVQESQWLMKLHTYGLLRNSFRPVQEIRTMRTYWRQRNDLVQSAGRHIQRIQKTLTQMNIQLANVLSDVSGVTGQAIIKAILEGERDPHKLAAFRDSRVKAREGQIARSLEGNWQPDLLFVLKQEQDGYEFCQKQMAECDQQLKQYLQNREDRSQGAALPEEQRKARRQKKKGNKPQFDLRAELFRLTGTDLTRIDSIDVMTATTIISEAGYDMSKWETENHFVSWLRLCPDNRISGGKIIGKGRLPTNNRATVALKMAASTLRLSDTYLGAQFRRLRTKLGAPCAIKAMAAKLARLVYRMLRYGMKYLDRGAAFYDAEHRRLQIKHLKWKAANLGLQIVEAPAT

SEQ ID NO: 290570 - protein, 390 aa, unidentified
MIYVGIDVAKDKHDCCILDDEGRKMYPIFTISNDKVGFDELFSRIEEVTSDKAEIKVGLEATGHYSNNLLASLVDKGFPTVVINPLHTNLYRKGLSLRKTKTDKVDASAIAMMLVADRTLKPYSETSYHNEELKSLTRYRFDKVHERSKLKAALARLVNILFPELEKLVPTLHQNSVYTLLEEFPGADYIAGCHLTHLKKILEDSSRGHYSRDKAIEIRNAAIDSIGTPMEAKSMELRHTIHLIWILSDEIEEIEAAIKAIMDESQSPIMTIPGISYRMGAMILAEVGDFERFDNADKILAYAGLSPSTYQSGQLDSSHSHMEKRGSRYLRYALFNATKFVCKWDESFGIYLGRKISEGKHYNVAVSHAAKKLIRTIYRMELTGQAYSPS

SEQ ID NO: 290571 - protein, 346 aa, unidentified
MLYAGLDLSRKRLDFCLLDQLGEKVEVGAAPPDADGLRGLTTRIGRFGEPVVAAIESMNGARFVHDQLEQAGWDVAIADAVKVKGLAPLACKTDRIDAWVLAELCRRDLIPAVWLPSFTVRGERERARFRMHLVKHRTALKNRIHQTLVSFGTPCPLSDLFGERGRRLLSQLQLPEPWAGTVAASLRLIDDLEREISTLEAELRRLGADHPYLPLVRTVPGISWILGYTIAAEIGDIARFASPAKLAGYTGLCPRVYQSGDNDRRGPLTKRGPRYLRWALLEASIHACRHPLYAERYHHTKQRLGRQRGPRVAQVDLARRLAEAIWQMLTRNQPFAPAGASQVLAP

SEQ ID NO: 290572 - protein, 427 aa, unidentified
MKKADLLSTLFVGIDISSRENVVAIMDFESTKPIASFAVPNNEPGAEEMVTRIYEYLTPKSGLDRLVIALESTSFYGVHIANYLSTCPRLMPFHTEVYCLNPKSIANYKKSYIGLSKNDYIDAFVIADFARVGRITTRPWRGCQYLALQRLTRHRLHLVKALSREKTYMLSNIFLKFSEFNLLDVEEQPFSNEFGATASAVLTEFLSTEEIVDMPIEKLVEFICEKSRNRFPEPQKTAQLLQAAARNSYRLDKCLYEPLTVAIASSFTMISTYNAEIKKVNKAIENTIKGLNPNAFQSLMSIPGIGPVMAAGIMAEIGDITVFKSQESLAKYAGLVWRETQSGQFRADDTSMSKAGNSYLRYYLLEATSHMKLHCKEYSEFYYKKYAEVKTHQHKRALALTARKAIKLIFGLLAKNQLYSGNRVVQA

SEQ ID NO: 290573 - protein, 363 aa, unidentified
MINPPSVIGGVDTHKYTHHAAVIDDQGRLLGDQGFPATAAGYGELLTWIRSHGRVQAIGVESTGSYGATLTRLLTGAGERVIEVNRPNRQARRADGKSDRLDAEQIARSVLGLTATATPKAKSGSVEVIRTLRVTRSSAVKARTQAFNTLHGIVIGAPSSLRDELVKLSKRTLVNRCSGLRPETESLTELVDHPDRFLLASIKLTLRNLARRWKDLDAEVKALSCQIKALVELAAPELVELFGVSFELAGQFLVTSGDNPQRIRSEAAFAKLCGVAPQPASSGRTTGRHRLSRGGDRNANSALYIVTIVRMRHHEATREYLARRTAEGLSKREIIRCLKRYVAREVYAALPRSSVETTPSLAA

SEQ ID NO: 290574 - protein, 390 aa, unidentified
MSQSFDASRSLTAFEQDSTLVAVIEMSQSKWLVAAVVPGIARQPLKKLDADADALLKLLQRWREEARKAGREVKRIVCAYEAGRDGFWLARWLQAQAIETYVIHAASIAVSREHRRAKSDRIDTELLMRSFLGWLRGEKRHCSMVAIPTMAEEDARRPSRERESLMGEQTRIINRVKAILALFGIGGFNPRLRKAAQKLETLCTADGTSLPENTLAELRRDLERLRMVRDQIRAIEGERLRRLALAPAAASGPHAMVRLIARVFGVGIETADMLVNEALARNLRDRRAVARYAGLTGAPDESGQRRREKGLARAGNGRVRRGMIQLAWRCLIFQKDSRLVQWFRERTADGRSTTRKTMIVALARKLLIALWRLVTTGEMTEGLKLRPAGT

SEQ ID NO: 290575 - protein, 383 aa, unidentified
MRIVCGLDVHKDSIYLCILSSTGEIIEKVFGVLTCQLQEMRDLMLTHHVEEAGMESTSVYWIPVWRVLEPHFKLKLINPYFIRQLPGHKSDVKDARWIAECMMKELVRGSFVPPERIQQLRQYDRRIYDLDDEIVRKLAKLDAVVQRCNIRLGNYVSNTDSKSYKSVIDRICEGVTDPKVLVEEIHGRIINRHGKDTIIPSLTGCVTECDMDILRQLKAEIDMAGQHKQECMDKMQAICEREYSAALQNLQTIPGIKMRAATSLIAEIGTDMGHFQTANHLTSWSGLRPRNDQSNKTIKSRCITHGNRYLRRTLIQCAWGASRTQGCFFNRFSYHQTQVRRKNRMKVQVAIARKMLVCAWHILSRNVQYKDFDNRIGTSDENG

SEQ ID NO: 290576 - protein, 394 aa, unidentified
MKKDNNSRKKSELNSKRAKSGSTEHRGTKEVLAELVGRLREKLNPKVASADPRQEGPRDRGSLRPNLDRLTVGVDLGDQWSNYCILDLEGDTLAEGKLRTTQEEFSEFFQGLNAARVVVEVGTHSAWVREVIVGCGHEVLVANPRLMEGSKRRKRKNDRIDANKLARLGRVDPQSLHPLEHRSTEVRQDLVMLRARDALVSTRTELINTTRGLVKSMGKRLPLLQIADAVSDCIKEYDRRMEEMANQKYGHTKLLRQVKGVGPITALAYALTLENPQRFAKSRDVGPYLGLVPKQEDSGESQPQLGISKAGDSMVRKLLVGSAQYILGPFGPDTDLRRYGLRLCERGGKNAKKRAVVAVARKLAVLLHRLWVTGEVYEPLHHSMSLPTVTATAA

SEQ ID NO: 290577 - protein, 462 aa, unidentified
MKLYLGGDVSKGYADWVILSEKKQAVLDNFQLDDTYAGHCKLYAMLEAYFGKHRDLEIYAAVESTGGYENNWFSTLKSYQKVFNLKVARVNPMGVNFNRRAGLKRNVTDAISALSIAEYLINHPDNIKYDQDDHWKSLCRHWNFVEMQKYQRVQTINQLETILYSANPTLMRFKKDNLPNWLLELIIQCPTAGTLAKSRPEKLAKIPYLSLAKAKTLVEEAKQSIASATDKNAEILVSQIARQIQQFDQNIKSQMQLIERDLTCPEIELLKTFKGIDTISAIGLMLEIETIERFPTVKGFSCYYGLHPKFKQSGDKIIGVRMSKQGSKNMRKILFNIAKGAITYNPLITAVYEKKLSQGMAKMAAIGVCMHKVLRIIYGMLKNKQAYNPLIDKKNSERSKDKQLEKQQQENANIDKSRRYQEFDVKAPISRKQTKKRREHDLSQCEITSQITGSSCSSETKL

SEQ ID NO: 290578 - protein, 420 aa, unidentified
MSLDPHEEPAAIQTHIGAIFISLELSRSKWLITSLVPGGGQRMSKHWVEAGDLAGLLARFWAIRDKVLARTGKSYPIVVIQEAGLDGFWIHRSLVKEGIESHVVDAASIAVSRRRRRAKTDKIDGEGLLRALLAFKRGEPRVCSMVRVPTPQDEDRRRICRERKTLTAERIRHVNRIKGLLFSQGIGDYEPLRRDRRRALEAARTGDGRALGANMKAQIGRELDRLELLLGQIAAIEAERDAMLARQAEAEAVQGAQGAPARVQKPMDLNGPGAETVPEAEAAPGVQKLMELNGLGAETVAMLWTEAFYRSFDNRRQLAAFGGLAGTPWKSGSIDHEQGVSMGNHRLRQTMIQLAWLWPIHQPNSALTRWYRERTKGATKLQKKKMVVALARKLLVALWRYVDAGVVIEGAVLKRAVRAR

SEQ ID NO: 290579 - protein, 402 aa, unidentified
MRNSVFVGLDWAYRSHAVCVVDAQGSVLKHLTVSHDAQGLGELRHALAAFGKALPIAIERPSGLIVDALVEAGHQVFAIHPNAVKASRPRYRSTNAKSDAGDAFMLADLLRTDGHRWHALQPQSAAIRGLRTLVRTRDDLVATRVRLANQLTALLDAYWPGATCIFAAVDSPIALAFIEQWPTARKLTARQIAAFCKRQGYSGRRSPGVLLDRLQAAAPSLCEPMLAQAYATAALALVALLKPLAAQIKSLDGHIALSMAALPQAISVMSLPRAGCICAAQILAELGDVPERFASAEQLCSEAGVVPVTYESGKSRAVTFRWACNHRLRRAITCLADNSRHASPWAASVYQAARKRGCDHPHAVRILARAWTRVLWRIWTDGTEYNPAIHSSACRIENTQAG

SEQ ID NO: 290580 - protein, 397 aa, unidentified
MVNIGVDLHKTQFTVCVRKNGKERFSEYAANSSGYKTFLKEAAKWQESGQEVRVAVESTGNTRYFKSRMEDAGINVTVINTLKMKVINESVKKTDKHDAATIAEFLEKDMLPESQLCSRTSEQLRRLLKARTTLVRAVVVIKNQIHALLTAEGMEDKKSSLQSKRGRKRVLNALEQWEHGLVAQPLVETIEQLEENIKRIEKELRGLIVGDRMVELLLSIPGCGEISAWTIRAYTDDIARFSSAKKYASFAGLVPWVQNSNETIHHGKITKRGPEELRTAIVQVVMGMRRIKKRSKSWRIMERYEAMKKSKGSGRTIIATARKVATIIWHMLNENTEFDIGQMVDRKLAKKSDDMSDSARLVEEAVFEKQNQPISKKIQGKSKKKTGVARKMIKKVG

SEQ ID NO: 290581 - protein, 330 aa, unidentified
MKKPCIDISKKTLDVVIYVPTKKHADETNYERFLNKEEGYKSLLCWLKKKNMAKKRLVISMENTGIYSFDLCLFLEAASIDYCSFNPLHLKRSLGLVRGTNDRVDAERIAYFAYLHRDELSYSKLSGSSIIRLRDFAAERKRFVKQQAEYKGFLTDRKDCEMTSTIERAAHMVKILDEEIASVEEEMLQIINSDPSILRNYELLNSIKGIGTINAMNTIIHTNNFQAFETARQYACYLGIAPFEHSSGTSIKGKTRVYPTGAKLLKADLSQAANSAIVWDKEMKEYYERKRKEGKAYGVVLNAVKFKLVGRMFAVVKRGTPFVELMTYKK

SEQ ID NO: 290582 - protein, 400 aa, unidentified
MVSPQLQVAVDVGCRRHRVAVGDVAGSMLEEFDVEHNAAGLAEFFARIERLRAKLGWPVAVAMEGYNGWARPLDRQVLLRGWRLYNVNNLKLARYKEIFPAPSKSDAVDTRRMLELFRLHGQLRVARNVLQEVAPVPLENDQLKRFTRRRRQLVGEKGRVLNRLQSDLQAVCPGLLSITGEADNLWFLNLLACRDDIRKVAGLRHATLLSLQGVGQKYAAVIQGWQKQACFSAETPWVGPMIVADARRVLELKSQIHALDHAIAGLVQRSEMAGHIDTIPGFGPTCSGELAGEIGTLERFCSEAGLAVYLGMATLDNRSGDSDGVKPPRQINTRAKAAMMVAAARHLEQVPASRAYYEKKRTEGKTHNQAIRALGRQLVRVIWSMLKRGRDYELRAAVPA

SEQ ID NO: 290583 - protein, 347 aa, unidentified
MLTLGIDIHTRSHRIDVLDAEGKAFRAFRVRGGHDQLVEAVAALRQPVRVCFEASIECGVIHDRLSALPNVREIIVAHPAHLRRSHRKNDRIDAKRLAVDAFHGRVDPVHIPSPKVRQWRQLVEFRCRQVQKRTRVKNAIKSLLRSRGIVPPIGLWTKEGRRWLRRAAMPDPTARLRRGMLLQELRLLDAQLRTMRRTLDAIAVKDDRVDLLRTAPSVGRRTAEAVVAWIDDPLRFARTTLVGSYFGIVPSQDQSGERNHLGGITKAGPKVVRWLLVEAAWRAVRKEGPIRDRYLRLLRNDPQRKRRAVVAIARHLALTMQAMLRDNQPWNAQRAAGRAEEVPAATI

SEQ ID NO: 290584 - protein, 332 aa, unidentified
MGVRARTSKEGIGSMPQVTRIVGLDVAKNKVDAFIRSAGLRFSALNSPEGEVELVLWAQTNRVGRAVMEASGGYERSWAEVLRKIGVEVVIVDPKRIRNFARAAGRLAKNDRIDAEVIAWFGETFADSKSPLSEPAREEVDRLVHARLALRDLEDRLKQQGEHDPPPLVARALRAVARTVRGQLASLDAAIAAKIKANPGFARRAEIIKSVPGLADQTVAGVIAWAPELGHVSNKAAAALVGAAPYDDDSGDRKGVRRIKGGRRKLRNLLYMPVMGAATRHNPALKAHYQRLVARGKPAKVAIIACMRKLIVILNTMLARDQTWSPPACATP

SEQ ID NO: 290585 - protein, 322 aa, unidentified
MSVSVLGIDIAKQKFDVALLVDGKTKHKTCKNSVEGFETLMIWLEKQGVQKVHACLEATGNYGEELAIYLHETGHMVSIVNPARIKGFGQSELIRTKTDKIDAALIARFCLAMKPGLWSPPSPKIRSLRALVRRVDSMIDMRTQEKNRISTAYESVIPLIKGHIDYLNKEIEKIRDQIADLIDQDPNLRNKKDLLVSIPAIGTATIPHILAELDDLGKFNNVRELVAFIGLAPRETLSGSSIKGKPRLCKIGHARLRKALYMPALVSIQCNPVMIAFYNRLKEKGKNGKVIVCAIMRKLVHLIFGILKSGKKYDPNYKPALA

SEQ ID NO: 290586 - protein, 441 aa, unidentified
MKNEPTQNNNSIPAAEPIAAWVGLDWADKKHSLFVRPTDGAATTACELEQKPQALDQFFLQLHQKHPQGRIAVCLEQSRGPVLYALMKYDFVVIYPVNPRCLADFRRAFKVSGAKADPTDADLLSELGCKHHQRLRALVPEDLATRQLRFLVEARRDFVNKRTALANELTATLKSYYPLALEVVGENLEGPMGLEFLRRWPNLAKLQGAKPSVVRAFFYAHNSRSEEKIAARLEAINTAMPLTEDPAIVGSLQLQAAGLARQLAAVQKTVAEYDQQIRAVFEGHSEKWLFEKLPGAGPVLAPRVAAAFGTIRTNLGAALDLLCLSGVAPVKRQSGQQETVHFRFARPKFLHQSLVEFAKCSIGQCDWARLLYEKQITQGKSAYAAIRVVAFKWVRILWRCWKDGQAYDEVKYLRSLKKRGIKLYESLYNALPAETGPVNNS

SEQ ID NO: 290587 - protein, 348 aa, unidentified
MHQGILLTVDYHDQNCVIRRRNAGTGEERVVSVPTTEGDLRQVVAQARAEVGRRGRIVWLQESTTGWARVQAALGDQVEFLLANVLQMPRPPKAHRRKTDKVDTARLQREYGNGNLPLAHQPPAWWRQVRRIVACRENLVSRRTALRNWINRYLAHETWADRSGLWSAKGLRRLKALVAELPRRDGLVVSAKLAELEHLGQAVAAVEAELLQVYHECPDAQRVDAVRGIGVTAAVSIVARIGPVSRFGDAEQLIAFAGLAPGVQQSDQTRRDGRIGGGGTDKHLRHYLIEASVWARHVERYRGTYTRTVQRRGVKIGRLVVARMLLRSIYKVLKDGVAFQPAAAAEGG

SEQ ID NO: 290588 - protein, 389 aa, unidentified
MKIYVGIDIAKLNHFAAAISSDGEIIIEPFKFTNDADGFQLLVSKLESFDKNSLIIGLESTAHYGDNLVRYLVTELYQVCVLNPIKTCQMRKNNVRKTKTDKVDTYVIAKTLMMQDNLRFVSFFDLDMMDLKALGRFRQKTIKQRTRLKIQLTTYVDQVFPEIQYFFKSGLHQHAVYALLKEAPSPKEIASMHMTHLANLLKVNSHGHFTKEQAKELRVLAQKSVGANDSAISIQITQTIQQIELLDSQLEKIEVEMTDIMKFNDSVIMTIPGIGYINGGMILGEIGDIHRFSNPNKLLAFAGLDPSVYQSGNFQAKTTRMSKRGSRVLRYALVNAAWNVVRNNATFKAYYDAKRAEGRSHYNALGHCSGKLVRVIWKMLTDEVEFNLE

SEQ ID NO: 290589 - protein, 389 aa, unidentified
MEAQTVTSPPPTVSRDETIRCLLAIELSKKSWIVAVNTPLADKVSRHTLEACDWKGLLELIARMRTRVIQTLDRPVEVVSCYEAGYDGFWLHRLLEAHGVRNYVIDPASVQVNRRARRVKTDNIDVGRLLRSLMAYLRGEPKVWSVVRVPSVTEEDDRRLHRERDRLINERVQHVNRIKGLCAVHGIYDYEPIRPNRLARLEQLRTADGRELQPRVKAEILRELQRLELVLKMIKTIEAERDAIALAGKSATHANANKIQDLIRLKSIGPEIGTTLVGEVFYRQFNNRQQLGSYVGLTPSHFQSGPMSRDQGISKAGNPKARSVMIELAWLWLRHQPNSPLSIWFRERVGTARGRIRRITIVAVARKLLIALWRYLGTGVVPTAAVLKG

SEQ ID NO: 290590 - protein, 413 aa, unidentified
MKLFVGIDVSSEKLDVCFLDSSDTTLKEVTLPNNINGASSIKEDVLQFHQSFNYEKIVIGMESTSIYSFHPATFLSEDLELKSLGLVEVVIQNPKSIHRYKGLFEEDKNDRIDAFRIADFLRIERFNKTVLKEERYVALQRLTRSRYQMVHQLTECKQHFLENLYYKCNTLSKELDTSVFGATMLDLLSDALTLDEMAEMELEDLANLLQEKGRGRFSDPQKLAKTIKKAIRDSYRLGKVVQESVDMVLATYARLIQTLKKQIKDLEKSIVALFEIVTEAQCLKSIPGIGIVYAAGIVAEIGQIERFENEAQLAKYCGLYWKKNQSGNFESERTPLTRTGNQYLRYYMVEAANSIRRHEDTYRLYYQKKYDEVPKFKHKRALVLTARKLVRLVDTLLRNHQLYTPERSVSLKS

SEQ ID NO: 290591 - protein, 344 aa, unidentified
MDYGAIDLHTKHSQVRIVTAEGTVVFERRIVTRADQFAAVFGGRARMRILLESSTESEWVATCLEELGHEVVVADPNYAAMYGTRTRRIKTDRRDVAALAEANRTGVYRPAYRVSPAQRAVRQRLLVRDQLVRMRTQVINLLRSQVRAHGQRVATGAAETFSRRFAALALPAPVREALRPLTDLLEGLASPLREAEAWTRQAATADPVARRLMTAPGVGPVTALSYRATLDRVERFPDAGRATAYLGLVPREDSSAERRHRGSITKAGPGRPRALLVQASWHIWRSGRGGAVALHAWVHRLAARRGRRIALVALARRLARCLYAMWRDGRDFDGTRVRRTPAAA

SEQ ID NO: 290592 - protein, 342 aa, unidentified
MLYVGIDIAKNKHDVTALNVPGKTVLKPLTFSNNKAGFELLDLSLRQLNQDCLIALEDTGHYAFNLLNFLHEQGYKVYTYNPLLINEFAKSLSLRKTKTDKKDAHGIALKLLSDPNREQFQHDNRQVDLKILARHIHRLKKNSLIGKYNTLVVLISSFLSWIKSLESIQNIPTNLLTRYPNPQKRLEARFDKLIEIKRLTASKIQDILSIAPRSIGTTSPAREFEIIEIIKHYKRLIDKAETCVNDLMAEFNSVITTVTGIGGRLGAVILAEIRNIHAFDNPAQLQAFAGLDSSIYQSGQIDLAGRMIKRGSPHLRWALIQAAKACARFSPAFKAYLKTKLE

SEQ ID NO: 290593 - protein, 413 aa, unidentified
MDVLEPRVGACDIGKSVIVACVRIAEPGKKPRSEIRSFGAMTRDLLGLHDWFAEQRVGLVIMEATGDYWKPVFYLLEDHFPKVWLVNARDVAKVPGRKSDVKDAAWLAQLGQHGLVSPSFVPPEPIRQLRDLTRQRTNLVVERTRALNRLEKVLEDAGIKTSAVLSKTLGVSARAMIEALIAGERDPIVLADLALGRARSKIADLRAALVGRFNDHHAFLARQALLHIDTINAQIDAFTVRIEREIAPFRDVIKHLITIPGVSDRVAQIIVAETGADMTRFPTAADLASWAGVSPGLNTSAGKQKSAATTHGNVWLRSALGDAAASAARTKNTFLGGYYRRLAKRRGARRALVATMRKILTAAWHMMTESVDYQDLGADYWHTNPHHTERRKARLIAELTALGVDTSTLRTAA

SEQ ID NO: 290594 - protein, 431 aa, unidentified
MKTGTLGIRQVSKVIVGMDPHKNSATIEVMAGDEAVVGGGRYGTDAAGYAAMLAGVRRWPDRIWAVEGCRGIGRHLASRLVADGEQVVDVPPKLSARTRVFTAGQGRKTDAADAHSVALAATRMRGLHLVTDNAQLEVLRVLAGRRRALGEDHTRMICQLHRLLLELIPGGAKKALSAAQARALLARVRPRTVAGQARRRVAAELIADLERTCQRKKAAGKEPTAAVKATGATLMTLDGIGPSGAARLLVEAGGITRFPDRGHFASGNGTAPIDASSGDHVRHRLSRAGNRQINRVLHIMAVVQLRHATKGRAYYDRKVAAGKTPMEAMRALKRRLSDVVFRQMMADARAARTGPGGHLGAATDSSAAGSDPDAGSSDKSLPGPATSDPTPQSHPIFPATPAAIVQRRTAAAVKRAVLDGGEDRRTLTGRE

SEQ ID NO: 290595 - protein, 415 aa, unidentified
MEKVYDKCCGIDVHKKLIVACFKCGRKQEIREFGATTRELLELADWLSQGGCQMVAMESTASYWKPLYNILESSGLEAMVVNARHLKAVPGRKTDVKDSEWIADLLQHGLLQAGYIPDRAQRELRELVSYRKSLAQDRTRELNRLQKMLEGANIKLSGTVADINGKSARNILDTVLSGTGVDSAKYDEMYSKNVIAHNLKASKEQIIDDLNGVMSPLQRKMMRELLAHVDELDAHIRHLDDDIDGHMKQDEKQAVDAIRPVTGLGAKSAQAVISVIGTDMGRFPTDAHISSWAGLCPGDNESAKKRRSGKTRKGNSLLRSTLIVCAHSAAKVKGSHFHAQFQRVSAHRGSKRAYVAVAHSMLIAIYHILKDGVEFKDLGADYYNQFNKERKINAYLKKLKALGWEAPTAMAGQPA

SEQ ID NO: 290596 - protein, 364 aa, unidentified
MLIIGCDYHPGFQQIAFVDTDTGELKERRLPHSEQAEQFYRELKQQDLTVRVGMESSGHSRWFERLLHELGFELWIGDPAEIRTRRVRKQKTDRQDAQLILQLMLENRFPRVWVPDAENRDLRQLLWHRHRLVQMRTRVMNQLHVVPLNEGLQRKKALWRPAGRKELEAIALAPWASRRRQDLLDLLDQLTPKIQELTRALEEEVEKRPVTRLLMTHPGVGPLTALAYELVIGTPERFHCGKQLASYVGLVPEEESSGDRRRLGHISKQGNVLLRFLLVEAAQVTVRSQPEWRSKFFHLAMRRGRKIAKVAMARKLAVHLYWMWRQGLDYGQTQKLGSHAGEPGNRDGVPSITDGMIGHPAPSQ

SEQ ID NO: 290597 - protein, 402 aa, unidentified
MTSDYGVFLGLDVGKDAHHAVGLDPTGKRLHDAPLPNTEPKLRALFDKLTQHGPLLVVVDQPATIGALPVTVARAGGHRVAYLPGLAMRRIADLYPGRAKTDARDAFVIADAARTLPHTLRPVDVGDDALAELDVLVGFDDDLAGEATRLSNRIRGLLTGIHPALERAIGPRISHPAVLEILSRCGGPTGIRKAGRRTLASIATAHAPRMGDRLVDSIMTALDEQTVTVPGTTAADTVLPRLADSLKTVLQQRKQVAGEVEGILDAHPLAGVLTSMPGIGVRTAARILLEIGDASGFASSGHLAAYAGIAPVTRSSGTSIKGEHPARTGNRKLKRAFFLAAFAALHDPTSRAYYDRKRAEGKKHNAALICLARRRCDVLYAMLRNRTHYRHPAEAVPAFVAA

SEQ ID NO: 290598 - protein, 344 aa, unidentified
MGDCTKPKGGRTMRYIGLDIHKKHTQACVRNEHGNILSSERFRTESEDIAAFFARQEVHGPLSVAMEATGFYFWIHDCIVARGHHVVVVHPARVKPLMKAKTKNDRNDASMLAELLRSGCLEGIYVPPPEIREMRDLTRHRESLVRKKGDLKREIVSSLDQHGVKTPSDYRVNFTKKYIEWLRSLNDFVVSEKLDMLEMTVSKIKNVERLIEERWGEDEDVQIIRSVPGVGLVTATVLKAEIGDVARFPSAENLAAYVGVSPTTFQSGEKEWSGPARHGNNRVKHVLIEAALVHTRSCPDSKISRYHLRKRDSIGRKKANVATGRKLVEAIYFMLVRRQTFHAH

SEQ ID NO: 290599 - protein, 331 aa, unidentified
MTNAAGEAAADTRPLEYIGVDMAKARFEWGVHGARCSQSAGNDPTGFEVLLADLRQRRVGLIVIEATGGLEHALASLLLQLGFPVAVVNPRAAREFTRSMGQLAKTDAIDALALAHYAHTLAHKADQAGVQLTPLPAHLEPLQIMVLRRKQLMDMRTAELNRRSGAMRVLRRSIDAVIKTLDEQIDALDKDIGHHLDEHFRDLDRRFETIKGVGPTTSASMIAFMPELGRISNARAAKLAGLAPLNNDSGNSRGKRSIWGGRKLVRAALYMATLSAMRFNPVINAFYLRLLAAGKCKKAAMTACSHKLLRILNAMARSGKPWNPELHGFTA

SEQ ID NO: 290600 - protein, 413 aa, unidentified
MLFVGDDWAEAHHDVEIQDESGRRLARRRLPEGIAGIGQLHALLAEHLPADAGPDQVVVGIETDRGGWVQALLAAGYQVFAINPLSASRYRDRHVTSRAKSDPGDAHVLADLVRTDRHQHRPIAGDSELAEAVKVLARAHQNLIWTRQRQTNGLRSTLREFYPAALEAFGDDLAGRDALAVLAKAPTPAKGAALRVTQIEAVLRAAGRQRNLHSRAEQIATSLRTEQLAALPLVAEAFGASVSASVAIITEMVRQIGNVEAKLAASFEQHPSAEILCSLPGLGLVLSARVLAEFGDDPHRYADAKARKNYAGTAPITRASGKSRVVLARVARNRRLADALYQWAFCALSSSPGARAYYDTKRASGATHHAALRALANRLVGILHGCLRHQTAYDENTAWSQHVKTSQPEQAAA

SEQ ID NO: 290601 - protein, 451 aa, unidentified
MVPDGRQVEVEEHEQIVERVAAIDVAKAAGMVCTRVPHQTTPGKRITRVWEVAATTNAIIALADQLTRQGIERVVVESTSDYWRGFVYLLEARGLCVWLVNARDVKQVPGRPKTDKLDAVWLAKLNERGMLRSSFIPPAEIRQLRDYTRLRSDLTQERSRHVQRLEKLLEDALIKLSTVATDIVGVSGRAMLEALIVGQRDPKVLAELAKGRMRGKRAALVQALTGRFDDHHAELARLLLDHLDALTTQIDRLTARIEALIAAVPAAQPPQDKAGHTGEGTHQQAAPVGLPAVDRLDEVPGIGGKAAQVIIAEIGLDMGQFPTPAHLVSWAKLSPRTIQSGATHRAGTTGKGNPYLKGVLGEAAAAAAKTNTFLGERYRRLVKRRGKLKALVAVARSILVIIWHLLADPTTRFHDLGADFYTNRTNTDRKTRNHIRQLQALGFTVTLTPAA

SEQ ID NO: 290602 - protein, 433 aa, unidentified
MDEVMDEPLYRDRVCGIDIGKAGMVATIRVPSDKDPARRAQETRTFGTTRREVLALADWLRCWQVPAVVMEATGDYWKGPFYRLEAEGFECVLADAKQVRHLPGRPKRDPADSRWLAACFERGTITACFVAAPEFRIIREHTRYRRDLTEERTREKQRAEKLLESAAIKLSSVVADLHGVTGRDIMDHLIAGERNPKVLAQLARAAARRKIARLEEALEGAEFFTPEHAALLAVMLERIDRVNTETALLSEVIERLLAPYEEQLQQAESMPGWRRRAAQDALAETGTDMSRFPTGAHLASWAGRTPVDNSSGKRAGQARSKKGNRYLAGITGETAVAAGRTQTREGARYRRLARRRGKAKAQVAVGNTQLKVLHKLLSNPGMRYQDLGADYYERQAGVRRQVAHHVGKLGALGFEVTLCRIPDPDPPGQPQAA

SEQ ID NO: 290603 - protein, 353 aa, unidentified
MTDIATHNDRIATIGMDLGKRSFHLIGMDVHGKVIMRQQLSRGRFERHMTNLQPCLVGVEACAGAHHIGRRLSAFGHNVRLIPAQYVKPFRKGQKNDYRDAEAIAEAVQRPTMRFVPIKSAEQLDLQALHRIRSRLVGHRTAVINQLRGFLLECGVVVPQGPAMLRKVLPSVLAQRTDVLSPRMVRLIEELADDWRRLDDRVDAVTGEVQALARQDEGCRRLMSVPGIGALTASAVVATIGNGAAFTKGRDFGAWLGLVPKQLSTGDRTILGRLSKRGNKYMRTLFIIGARAVLAKPGSWAKFGLEGWLAAAAKRLHHNVLAAALANKLARIAWSVLYHGRSFARDFELQSVS

SEQ ID NO: 290604 - protein, 347 aa, unidentified
MRFYNTQHPFYCGIDLHARAMYVCILNQAGETLLHRNMKTTPEAFLNVIAPYRPDIVVAVECMFTWYWLADLCVDEEIPFVLGHALYMKAIHGGKAKNDKIDSQKIAVLLRGGMLPQAYVYPAEMRATRDLLRRRMHLAHKRGELLAHVQNTNSQYNLPAIGKNIAYKANRDGVAERFADPAVQKSIEVDLALVSYYDELLRDVELTIVKTAKQHDANTLYLLQTVPGIGKILSLVLLYEIHHIDRFPRVQEFASYCRLVKCAKESNGKRSGTSGAKIGNAHLKWAFSEAAVLFLRDNPAGQKFLTRLEKKHSKGKALTILAHKLARAVYYMLKQKTAFDISKFLNG

SEQ ID NO: 290605 - protein, 304 aa, unidentified
MDISKAHLDVFRLEDQAAQRFENSSAGFRALRKWLGKVPVARIVFEPTGPYHKAFEAALGEVFLLVKVNPLQARWFAEAHGTRAKTDAVDARMLARMGVAFELVPQAQSSRETRVLSDLHVARTGLIKDRTRLRNRAQTQDIAILKRQTKARLAQIDRQIAELDAEIVELISARETTARSRDILCSMPGIGAVTAAAMLTLLPEIGTLERKQVASLTGLAPITRQSGQWQGKSFIGRGRKPLRDALYMPALVAMRFNPNLKAKYEDLRAAGKPAKVAIVAVMRKLIETANALVKADRAWTPKTA

SEQ ID NO: 290606 - protein, 344 aa, unidentified
MSKHSMRSGDVSALLQHLGRLRDKTQARTGISFPIIVIHEAGLDGFWLHRVLEQESFESHVVDAASVLTSRRRRRAKTDRIDGEALLRTLLAYKRGEPRVCAMVRAPTPEEEDRRRLCRERKTLVAERVEHTNRIKGLLFAQGISAYEPLQRDRRRRLDELTTGDGRTLPPHLKAQISRELDRLELLLGQLKVVEAERDTLLEPANEGALAPAAALAGLRGIGSECAAVLWLEGLYRPFGNRRQLAAYAGLAPTPWQSGSVQHEQGVSKSGNPRLRTTMVQLSWLWLRHQPTSELSLWFKERVQRNDGRGKKTAIIALARKLLIALWKFVNNGVVIEGALMKAS

SEQ ID NO: 290607 - protein, 368 aa, unidentified
MIKRFHGIDRHKLSSTVSILNRKGIEEKLVTIKGNLKNYIKELGSCDAVAIETGIGCFYWANRIESRGAKCFIIDPYRFRIIKDSWKKTDKNDCRNIAKALWVYLITGEFGLPEVYKPQRDVIELRKLYSQYRNMNKYLNMLKNNIQSVLLDDGIVLTSKDKKRLLSEKEGEELLECLDITDASRICIKASLDILWKAINQKEILTREIMRAGVPFQDKVKILISIKGITPLSALAFLADVGDIKRFKSVRKMNSYLGLVPKVKESANKGKSCHINKASRNLTRTILTQSIIQAMDASTYLRHSYEDTKFRRGSGRARIGLIRKLCGIMRRMLLNGELFRSVKMPLYEKKMKQFDKLLKEFEEERKSA

SEQ ID NO: 290608 - protein, 421 aa, unidentified
MKNALDKKLDMITHATLIVGVDIAKKVQWARFCDYTGREISKPLQFENNTDGFESLREIIERLRVERSLFRVLVGMESTGHYQRTLIHYLTRHGYTVVGVNPHHTKRAKELDDNSQTKHDQKDALTIARLVKDGRFYESYQPEGCWAELRILTTTRLDVKRQENACKNRIIGVLDEYFPEFETVFKVLTGKTSLHLLKMCPFPTDIIELGADGVLAEVKKAVKKTVGAKKVGQLIGAAKKSVGVTYGIEAVRLRLRILLSELEIYRLRLDEIEIAMERELEKTGLKERMLSVPGVGVVTLAGFLGETGDLSRFTHGQQIVRLAGYNLTENSSGKSKSQRGISKRGRKTLRSILYQMAVVMAAKNAEMKRVYEHLKNREANPLKRKQALIAIACRIARMLFSIAKHGENYNPARIVVEKKAA

SEQ ID NO: 290609 - protein, 350 aa, unidentified
MIIIGADYHPGFQQIAFVDTDTGEVQERRLEHREEAERFYRELEAQGLKVRVGMEASGQARWFERLLGELRFELWIGDAAEIRAKRVRKQKTDRQDAELILRLLLEDRFPKVWVPTGENRDLRQLLWHRHRMVQARTRIMNQLQAVALNEGVRCKKRLWRDAGREQLESFRLAPWASRRRRDLLELLDRLTPTIAELTQAIEQEVDQCPEAQRLQTHPGVGALTALAYVLIIGRADRFQCGKQIASYLGLVPSEESSGQRRRLGQITKQGNSLLRFLLVEAAQVTVRSDQEWRNKYFHLTIRRGRKIAKVAMARRLAVRLYWMWRKGWDYEQLKKFGSHAGQPGNPHGVR

SEQ ID NO: 290610 - protein, 331 aa, unidentified
MFPVGIDVSKNTLDLCMLYDGIKGRIKTRNIQNNRHSVENILRWLRLQHCGPEDVHVVMEATGVYHERLATELHDAGFRVSLANPHRSREFARGMGIMTKTDKVDAYMLACYAFLKKPHRWEPPAPEIRYLGALLRRRDVLLGDALREENRLEKYLSTDTPADIISSCRRMAQLLREEVSNIERQIKAHIKASPALRRDYTLLNSIKSVGPQLGMHMLVVLRSHNFASAEQAAAFLGVVPIEKRSGTSVRSRPRMSKIGPPQLRAKLYMSALCGKIYNKRMRNIYDEMCLRGKPKMVAIGALMRKLVHWCYGVLKTGTVFNDEDLKPVLST

SEQ ID NO: 290611 - protein, 325 aa, unidentified
MPDTAYLGIDIAKRKFDVALARPDGKVRVKACPNTPAGYTELVAWIARQHPGAVHVCLEATGPYGEPVAEALADAGYTVSVVNPAMIEAYARSRLTRTKTDRVDARLIAQFCATQQPPPWVPLPREVRTLQAVVRRLDALEGMRTQERNRLVAEPADAVIRASIQHVIDLLEDEMATLRARIHDHLDQHPDLRAQRDLLTSIPGIGEATAAVLLAEFGPLTRFRQAPACAAFAGLVPRLGESGTSVRRKPVLSKLGVPALRKALFYPAMVALRHNPIIAAFGQRLRATGKHKMVVIAAAMRKLAHLAFGVIKTGQPFNPDHVVRR

SEQ ID NO: 290612 - protein, 408 aa, unidentified
MNVLHARCCGIDVHQASLAVCVSIREEGRQEKHRLRCGTKTAELLRLMDWLHEHRVTHVALEATGVYWKPVWHVLEGQFELLLANPTQVKALRGRKTDLKDGERIADFLQHGLLQGSFVPPREIQDLRDLTRSRTKLKQEQVRVGNRILKVLEDANLKLSTVMSDVMGISGREMLRAIIQGKSDPAELAQLARGKLRGKIPLLQQAARGSLREHHRFLLEQWMGIWDELGVRITKFEERIAEQIGPFQAAVEAWASLPGIDRVTGWTMVAEMGTDMTQFPTAAHAASWAALCPGEDESAEKRHSGRTRKGNVWLRRALTQAAWGASITKGSYYKAFYHRLAPRKGKKRAIVTVAHALLVTGYILQVSGKKYQDLGVDYFDRLNRERLTKRLVKRLEKLGHKVSLEPAV

SEQ ID NO: 290613 - protein, 354 aa, unidentified
MKYYTSTTQFNCGIDLHARQMYVCVMNREGKKLVHTNIKNNDFDYFLKLVAPYRHDLTVCAECMFGWYWLADACQAAGLHFVLAHALYLKAIHGGKNKNDRIDSEKIAHLLRSNLIPPGYVYPAEKRSLRALLRQRLLYVWNRSELLARIQSHQLAYNRPTSRQNIYNRESWTEQLLASETDPVRQLALQNDLALIGHYDAQLASLEKELLKLTKRTAHRDFTLLQTAPGIGDYLGLTILHEIGDLARFPTVKDFLSYCRLVKGTVASAGKIKGLRGARLGNPYLRWAFGEAAVVAKRDSMLSSLAQRLETRMGGNKFKANTVLAIKLARAVYFMLKNKTAFDSDRLVAALSQN

SEQ ID NO: 290614 - protein, 316 aa, unidentified
MEVFKTHVAGVDVHKEVLAITVVIGEPDSKPQEHQFACLTFTEDLIKAGLKLIEMGVRDIAMESTGVYWKPIYNTWNPMGIRITLGQAAHMKNVPGRKTDMSDSRWIAELHRFGLIKASYIPEDVFQRMRLLSRHRTNLVDDLSRVKNRVQRILEDGNIKFGSIVSDVFGKSGLQVLDLIADGVIDAGTLASQVTTKIKRKEEARKALTNCLTKEHCFVISRLMKQFYEIKDHMREIENQLFDKVQPYRHLIDNLKEIPGIDEILAIGVLAEATADMTRFEDERKFAAWAGVAAGNNESAGKKKDQGVDKATRTSH

SEQ ID NO: 290615 - protein, 345 aa, unidentified
MSKVSVVGLDLAKNVFQVHGVDEAGEVALRKQLKRSQVQRFFARLSPCLVGMEACGGAHYWARVLTELGHTARLMAPAFVKPYLKSNKNDRNDAEAICEAVQRPTMRFVAAKTPEQQSVLHLHHGRQLLVRQRVALSNHMRGILLEYGMSLPRGVKAVSRRLPALLEDGENALPMLTRHLLSALKEQHDQLVERIKFLETQLKAWHGDDAPSKRVEAIPGVGVLTATALAAQVGDGQSFRNGRQLAAYLGLVPRQASSGGKDRLLGVSKRGDGYLRSLLIHGARAVIHHVQRRLKAGQPGGNLWVEQLLKRCHINEVAVALANKTARTAWVLLARGETYRAIRAV

SEQ ID NO: 290616 - protein, 424 aa, unidentified
MNFKMQDKQNQLIERISDTHLIVGIDIAQQFHVARAVNFRGIVVGDPLTFVNNEEGFVKLQNWIEKLKRLKNLDTTIVGMEPTGHYWKNLSKWLVKQKIEVVTVNPHLVKRNKENRDNTQSKSDKKDALVIADMVKNGYYSFVRPSSESFEKLRVLISNRDVIVKRLVSSTNQIHRWVDIVFPELRQVFKDVTCKGAIATLRLFPTPNEIASFEPLDVMRGWKSLMQRQPGPKKAQLLINLAKSSIGTGQGLDAYKLHLEQLLEEYDLAIKQLERVEQQVKEVLNKIPFARKLLMIKGISEISLAGILGEAGDLSGFSHGNSLLRHAGLHLAEASSGKWKGQIVLSKRGRSRLRRFLYLATMSLVMNNPEFKAIHAYNVKVKKMKKMKSIMKLVGKLARIFVGIAKRNESYCANKLQETIPLAA

SEQ ID NO: 290617 - protein, 385 aa, unidentified
MTAREQFSTFVPRDYDIFIGLDVDKKKMAITCIDHGTMRRSLSMAYSASQLLNYTRKHFPEQRIAFVYEAGPTGFGLHDELTAAQHPCLVVSPSMVPSAPRNRVKTNRLDSKKLSEGLRGGQLRGIHVPPPIYRELRHLVQLRDTQVAQLKATKCRIKSLLLYEGIPFPAANGKWSARVLQKLEAIPCNASVRFKLDRLIDALQFHFQTAAQVQKEIRRFCKNEPGLQQSITFLSSLPGVGTITATHAVARLGDWRQIQNVRQIAGFLGLVSKEHSTGDKENRGEITRIGDPRLRNKLIQCAWTAIRKDPELRAFYRQVYERQPKKVAARKAIVAVARKLTTRMYAVLKEQRPYALRADSSIAPLTVEETAGLRERLDTAQNDEP

SEQ ID NO: 290618 - protein, 337 aa, unidentified
MKLYCGIDLHSSNNVVAVMDEQDRPLYEKRLNNDLEAILAVLRPFKGELVGCVVESTYNWYWLVDGLMEAGFPVRLAHPGAMAQYAGLKYTNDFSDARYLAHLLRLGILPTGYIYPKEERGLRDLLRRRLLLVRQKTLHHLSLQSLIARHSGQRLTANEIKKLETRQLAAYLESPILLGGQITHQARCWLDEAIRRIEQELQRQVQPRADYQLLQSIPGVGPVLGTTIALETGTIARFPGPGNYASYARCVKSEKISNGKRKGQGNKRNGNKYLAWAFMEAAHYAAIWSPPIKRYYQRKQAKSHIMVAKKAVANKLARACYHMLKRGEVFDVTRAFG

SEQ ID NO: 290619 - protein, 364 aa, unidentified
MVVVGTDAHKYSHTFVATDEVGRQLGEKTVKATTAGHATAIMWAREQFGLELIWGIEDCRNMSARLERDLLAAGQQVVRVPTKLMAQTRKSARSRGKSDPIDALAVARAVLRETDLPLATHDETSRELKLLTDRRDVLVAQRTSAINRLRWLVHELDPERAPAARSLDAAKHQQALRTWLDTQPGLVAELARAELTDIIRLTGEINTLAQRISARVHQVAPALLEIPGCAELTAAKIVGEAAGVTRFKSEAAFACHAAVAPIPVWSGNTAGQMRLSRSGNRQLNAALHRIALTQIRMTDSRGQGYYQRLQDAGKTKRAALRCLKRRLARTVFQALRTVHQPSSEHTQPAAACHRSYCSRSCLSG

SEQ ID NO: 290620 - protein, 401 aa, unidentified
MSKKNTRNALDTSLSYAVIGLDLAKADCAVAAVPCSDDDLGLIDRMDYESLFEQAEKLKPTLFAMEPCCGYSQISLRLQNMGHEVKVISGHAVKNWIATHKSNQKTDLNDATALAKLALYDHDLQPIRVKNVEECRIASVQAIRIQLRTQATKSLVCFKSLCQCWGIVIRRGSLNTKKMAEAVAAVEKLLGVEVASSLMILRDAYKFTMKQINALDKLLDALVEANEQARTMKTVLGIGTQTAARLAVTTGDIKRFPMPRSYVAYFGLAPRNIITGHSGTPSPSKRGALKPVSSRGQGKVSRRGDRVARSFIIQGAATIYMLYCKDMLPECQLRRWLHEQIKRGKPYGKIIVSLAAKLLRIVWALLTYGEKFDSHKAGVPRSVLAAMEKPLKHDAAAESAA

SEQ ID NO: 290621 - protein, 499 aa, unidentified
MPSTNVAAAPILGAMKRKSIFRNESQKLDAAFIEAGLPERVLLVPLDFAKVTHYACFCDGRGTYIRKAFTVKNNQEGIDYLVDQIERTRVARSIKSKRHVIIGGEDSASYTRNFMDRLFELGYLTVRLDSKEVHRQAESVDSSTDKTAVRAIAKTMLNRDARQVGGSDPYAQLRGLTRQRRRLVHLSTAVKNRIHTHADCLFPGFLSKDSAVAAFSMASLELMANKFSAATLARKSEKTITRTLSRQGVRSAPEVAAKLKEQARNAICADDASVQLSSQLIESELRLFQTLQSSLSQLDRESARILLQLPEAFAVSIKGIGITLASSIFAETGSLSQIQRCDQINAYAGIAPRVKQTGGPESPARIGGKRRNFNRILKDYTLQAGNHLYLHGPEELLHDAARRKLAGKAVDTAMARRFLRIARALAKSHSIYLPSHLRTAQAGTDVEAQTRAQYIVKTWSDFLLKWKRLGLHEEAFAPETPLGDWRIIVQEIYEIDLPI

SEQ ID NO: 290622 - protein, 355 aa, unidentified
MDHYAGLDISLEETSVCIVNNDGKVIRETKVATDPDALAKELADSKVTLKRVGLEASSLGGWLHAELTRRGFPAIVVEARHMRSSLNAQRNKTDRNDARGIAHMMRMGWFRAVHVKSPEAQRLRLLIANRRLLKRKLIDIENHVRGALRAFGLLVGTVARGGYEARVLVLIADTDAALKTFIMTMLEVRKAVMSGYNSLHKALIDIVAADPLCRRFMTVPGVGPIAALSFRAGVDDPLRFTSSRAVGAHFGLTPRKWQSGTIDIDGKITKQGDGDVRTALCEAAGSMLMRSKKWTALRAWGLRIAKRTSMKNAMIAVARKLAVILHRMWIDGSEFMFAKGAAVIEKRLLIGTMPE

SEQ ID NO: 290623 - protein, 337 aa, unidentified
MEYFAGLDVSMEETHVSVVDRDGKVILEARTPTAPKTIAAALAKGPAVERVLFETGRMAPMLFHGLTALGLPVVCVESRQAYQALRSLAAHKTDRNDARGLAHLARTGFFKPVHVKSLPSHAVRALLIARKKLVGQRATLENQIRGLAVAFGVRLPRGLSSGFAEKAMAAGCGIPGLDGAMRGLLAARDAILKAIVAINTDMKSLERSSSACRRLMTIPGVGRLTALAFAAAIDDPDRFRRSRDVGAYLGLVPRRYQSGEIDYTGSISKCGDARLRTLLYEAANVMLTRYRGSLALKTWALDIARRSTMRKARVALARRLAVIMFAMLKHGTEFQPA

SEQ ID NO: 290624 - protein, 343 aa, unidentified
MDYHAGIDVSLKDSSVCIMDAAGKIVREAKVPSEPEALARFFAQLTWPVVRIGLEAGPLSQWLHAGLVAAGHEVALLETRHVKAALSAMTIKTDRKDARGIAQLLRLGWFRPVHAKSADARAVRALLAGRKLLQSTLLDVELSIRGLLRGFGLKVGEVSRGRFEARVRELIPGHAMLAAVIGAMLQARAAMWREFTALHRQMLAIARQDPVCHRLMSVPGVGALVALTYRAAVDDPGRFRSSKAVGAHFGLTPKKYQSGETDLDGGISKVGDEMVRTALYEAAHIMLTRTTRFSGLKAWAMGIAKRRGTKKAKVALARKLAVILHRMWVDATDFRWTKAPGVV

SEQ ID NO: 290625 - protein, 351 aa, unidentified
MPRTTTVHAVTTIGIDMGKNTLHMIGLDSRGAIVLREKVSRGRITSRLANLPCCLIGIEAGMATHYVARELAALGHDVKQVPPTYAKPFRQGHKNDFRDAHAVAEAVQRPTTRFVPAKTDEQLDLQALHRVRSRLVSERTAVINQIRGFLLERGIIVRQGLRFLRQLLPDILAKRTDVLSPRMVRIVADLASDWRQLDERIETVTDEIETLAKSDDSCRRVMTVPGIGPIISSAMVAAIGSGGAFARGRDFSAWIGLVPKQMSTGDRTILGRITKRGNGYLRMLFMQAARVILLRPANWSKHGFGVWLARAAQRLHPNVLAAALANKLARIAWTVLAQERSYEVRITKAVA

SEQ ID NO: 290626 - protein, 316 aa, unidentified
MAHPKEKTINVGIDVGKHQLDAFILERDIQISVANDASGIRTLIGRLARYKLDRVIVEATGRRETNLVLAAAERGLPIIVCQPLKVRRYAGAKGILAKTDQIDARVLAEYAAVMKPEVRAIPAGNLRRIRDLCVRRRQLIDMRTMEKNRLDVMPKSFHPGIRKLIRQFDSHLVALETKIDQLIESVDEWRQLRERLVTAPGVGEQLANTLVADLPELGSLNHKQIAALVGVAPFNRDSGTLRGKRRIRGGRATVRTVLFMATMTAVRFNPRIRAMYQRLLDAGKMKKVALIACMRKLIVMLNAMVKNGTDWNENYA

SEQ ID NO: 290627 - protein, 343 aa, unidentified
MEHFAGLDVSVKETSVCIVDDSGRIVREVKVVSEPEALLTVLKNPSYCFKRIGLEAGPLSQWLFSALAEAELPAVCVETRHMQAVLKAQINKTDRNDARGIAQMMRVGLYRPVHVKTLRSQKLRMLLTHRKLLQSKAIAIENDLRGTLRNFGLKVGMVGKVKFEARIKELVENLPDMAMLIQPLLIVRRALREQIVVLHRRLLAIVRDDEVCQRLMTTPGVGPVVSLTYRATVDVPARFRKSKAVGAVFGLTCSKYQSGEVDRSGRISRCGDEMMRVMLYEAAQSMLRSTKWTWLKAWAMQIARRRGMKKAIVALARRLAVIMHRIWVDGTEFRWTREQATAA

SEQ ID NO: 290628 - protein, 450 aa, unidentified
MDKNKKKKKTKKAIQGLPVLKPYAAGADIGDTRHDIAINDGKGGHIVRTFETFTADIEEAINWLKEEGVTTVAMESTGVYYLTFYLMLEEAGIEPYLVNARHVKNVTGRKKDETDAMWIQRLHSCGLLQNSFQPDNDFRTLRTYVRQRKGLVTRSSDEVRRMQKALELMNIKIHIVISDILGKTGMQIIKAIIDGNYDAIELSKLRDPRIKATPEEIIKSLQGIWKEEYLFTLEQAYNTYFFLQQQIKECEEKIQQQLFKQIGKSNQGDITLDQPIKKKGKPKKNQFDTPIGPSLKALTGVDLCKIPGVAEVSVLEFIAETGTDTKKWPGTKCFTAWLNLVPNTKITGGKIISSKMMKKKNKAGQTLRMATTSLASNKTPLGDYYRRMKSKYGGKGAALATAHKLARIIFKMLETKEEFSYDLLIESQKKYREIKIKQLEKQLERLKKVA

SEQ ID NO: 290629 - protein, 363 aa, unidentified
MRFYKNQHQFYIGIDLHARTMYICVINNIGETVFHKNMECSRDNLELVTNTFGKDIVVGVECIFTWYWVADFCAENGIDFALGHAYYMKSIHGGKTKSDKIDSEKISNLLRGGMFPIAYAYPKEKRAVRDLLRRRLFFVRQRAELSVHLQNTNHQYNINEPLTSSRMRSEVYRNTIPQKFTDPATLKMVNADLAMFQAYHDIITKLEFQIEDSMEVQDPVSYSIINSVPGLGFILSLTILYEIDDIHRFSDVGKFISYCRLVKCSHESAGKKEKGGHNKIGNVHLKWAFSEGAVLFLRNNERGQRWHDKLVQRYGKAKAMSIIAQKLGRTVYYMLKRKEAFNPDKFYGDKKIENKDSGGEHLA

SEQ ID NO: 290630 - protein, 397 aa, unidentified
MIAVGIDVSKSKSTVAILNGDGSIRAKPFDVRHTADELKALVSYITETSEAPTILMEPTSHYHYPLLKAFLEANLPVCLINPYQMKKYGDTELRKAKTDKQDSLRIAQYALEKSYSLVPYTPTDQKYEDLRFLSRQYTQRISTLTVAKVQLLNLLDETMPGITTILPLKSRDPDNCVLLRFIKRFKSFDVIRKMGKSRFLDSYQVLVKKTKDYYASVKGLAIYELALNSITTRGENPLSSMAQDQCVDLVSTSQKAADEINLQMRIIAETIPEYKVLRSMAGVGDRLGPIILGEIGDVRRFHSGKALNAYAGNDAPPYQSGQFESRNRHISKRGNPALRKACFEVMQALKLTKPQDDPVYLFLLKKEQEGKPYNVAKMAAVNKFLRIYYARAMELYK

SEQ ID NO: 290631 - protein, 382 aa, unidentified
MRLARAGPMEAPRNDGVDGLTQTASSAKAWSPKRHKEEKPSMKKFIRTAIDLGKTYFQVHGLEIEGGQSISRKMKRSKMREFYQQIAPCRVGMEACGSGHYWARELVAMGHEVVLIPPAYIKPYVKRGKNDAVDAAAICEAMSRPGMRFVPIKSADQQAVLMLHKTREMFVKQRTMSVNALRGHLAEFGIIVAKGIGRVEELLALAQSDAELPQIAKSAVAGLAQHLEGLEQSIEAVDDEIARAHKQNPTSRLLDEIPGIGVLIASVIASSVPDPGVFKTGRDFAAWLGLTPRQNSSGGKEKLGSITKQGNRYIRKMLVVGATSVMRVAGKRQGALADWINALKAKKPQRVVAVALANKLARICWAIMTTGEGFRVDTYLKA

SEQ ID NO: 290632 - protein, 399 aa, unidentified
MVGPVTHAIVGYSGSSWPSEQSQHREDWSMNETTTIRFIGLDVHRDSIAIAVAIRDGKPAESLGSVPNDVPGLIRRLSRLGPAESLWCCYEAGPTGFGLARRLNDVGIACEVIAPSLIPVQPGARVKTDRRDAQKLAQYLRSGDLTPVHVLDPATEAIRDLERARDDAKRAERAARHQLSKFLLRHGRWFEGRSTWGPAHLAWLAKQQFDNKAQQDVMNDYREAVEMATARVSRLTERLVERVAAWDKASLVTALQALRGVDLISAATLVAEVGDFRRFRSASELMSFVGLVPSEHSSGGSRRQGRITRTGNGHVRRTLVESAWHYRRQPRMSKAIRERNDRVSAPVRAIAWKAQHRLHKRLFRLMERGKPATRAVTAVARELAGFVWAIAREEVLLAG

SEQ ID NO: 290633 - protein, 354 aa, unidentified
MIIVGCDYHPSFQQIAYVDTETGEWKEQRLEHRESAEAFYRELASRGVVRLGMEASGHARWFERLLAELGIELWIGDAAVIRAKRGRRKPKTDRQDAQHILQLMLKDDFPKIWVPSWENRDLRQLLWHRHRMVQARTRIMNQLQAVALNEGLRCKKRLWREKGRKQLEAIRLAPWASRRRQDLLQLLDGLNPTIAELTQAIDQEVEESAEARRLMTHPGVGPLTALAFVLIIGKAERFQCGKQIAAYLGLVPLEDSSGERRRLGHITKQGSSMLRFLLVESAQVTARSIPRWRNQYFHLAMRRGRKIAKVAMARKLAIRLFWMMRQGWEYEQMTKFGSHAGQPGNRDGVQSNIE

SEQ ID NO: 290634 - protein, 331 aa, unidentified
MDQRNYVGIDVSARSLEVALVGAERRSATATFANTSTGHRQLIKWATKRGRLAQVCLEATGVYGLAVALALHHHPKTEVMVVNPKAIKNYAGATMQRAKTDAVDAQLILDYGRRMPFARWQPPSDEVLQLQAITRRISQLKVELNREANRLDAEDYKVATTDFIERDIQVNLRHLNRRMVRLEKEAVALVLSVPHLSMLFQRLLSIPGIGETSALRLLAELAVLPEGMKPPQWVAHAGLDPRPHESGQSVHRPRAITKAGNKYLRAALYMPALVAIRHQPNVKAFYDQLIAAGKKPLQAITAVMRKLLHAIWGVWKHDQDFDGQKFYKIVT

SEQ ID NO: 290635 - protein, 398 aa, unidentified
MRVPQLWAGIDAGKNHHHCVVIDADGNKLLSRRFANREPEILTLIGDVTSVQAGAEITWTTDLNHGGVGLLQAVLSAHAQPLHYIPGRAVHHAANTYRGEAKTDAKDAVIIADQARMRHDLEPIRQIDDVSAELRLLSARREDLIHDRTRAANRLRSTLAHYFPALEAAFNYAATKSPLILLTKYQTPAALRRIGQQRLTNWLKKNGARTPAALATTALGAAAEQHTAVHGEAAAARLVSQIAHDLLRLRQELLDLDTEIDARLKDHPHANLLMSVPGFGPRLAADFFAATGADLSYFGTPDRLASFAGLAPSTHDSGKISGNHHRPRRYDRRLLNACFQAAFIASMHCDTSRTFYERKRHEGKSHKQALIALARRRINVIWAIIRDGTPFTAPVLNA

SEQ ID NO: 290636 - protein, 422 aa, unidentified
MLEQTHDEQEIIQRVAALDIGKAELVCCVRVPNPKGGSRRLEEVKTYSTMTRSLQLMADRLLDLGVTRVVMEATSDYWRSPFYLLEAHGFQTWLVNAKDVKHLPGRPKTDRLDAVWLCKVAERQMLRPSFVPPVPIRRLRDVTRYRIALVSDRNREKNRVEKLLEDAQIKLSVVASDIFGMSGRDMMAALIAGERNPHALAQLARSRMRGKIPQLEEAFAGYFTDHHRFLLAKMLTRIDALNADIDELETEIESQLAPFAPVVARLDEIPGVGVTAAAVILAEVGEDMTRFPTPAHLSSWARFAPGVKESAGRKKGNGSTGHGDPYLARVLGEAAVGASRTNTFLGERYRRIARRRGKKKAVVAVGRSILVIVWYLLSDPEVGYHDLGPGFYDSRINPERKKRNHIRELEALGYKVTLQPAA

SEQ ID NO: 290637 - protein, 398 aa, unidentified
MLSIGIDVSKGKSTVCGMKPGGEIVYAPFEVQHTREGMSELVLLLHNSGEEVRAVLESTGSYHCPVVAALLENGIFVSVVNSLRMKRFCSQSIRKVKTDRIDAMQIALYGLAYWQELQPTKLPEDTYRELQLLARQYYQMTSLLIKAKVDFNAICDQVLPGMQELMNDHAGRHKLSDFVLRYRHTTHILEMGETRFRKDYCKWAEKKGYRNHERMAALIFATAQNGIPVLPDAPSTQIVITEAIRVLHTVEASRDAILTQMQALAKTLPEYSLVREMPCIGDTLAPRLIAEIGDVRRFHSKRALIAYAGIDAPPYQSGKFSANNRHISKRGNRYLRKTGYEVMQSYVMHKPANDPIFTFIEKKRSEGKSGKLAMVAGLNKFLRVYYGKVTELYRSLPQ

SEQ ID NO: 290638 - protein, 463 aa, unidentified
MGHEPEAEHNPDAFRNNQLSPPTGMSTRECFGFSHPASIACLTEEEFTLQILYPQCCGLDIHKKSITGCCLWFDAKGQRQQEIRKFGTHTTELRQLAVWLRRHQVKHLAMEATGSYWRPIWNVLEGEGFEQTLANPQHMKAVPGRKTDPHDAHWIADLFQHGLIAASFVPNQQMRHLRDLTRMRTKVTQDRARVVNRIEAVLEDANIKLSCVATDIMGVSAQAMVKGLLQGERDTAKLAELAQGRMRSKRPQLQTALEGNLQPHHVFVLQRLLMQARFLQQQRAAMDRQIGRRLDPEMRQAIALWDSIPGVDEDIATIMVAEMGIRSEQFADGAHAASWTAICLGNHESAGKRKSGKMREGNRWLRGALTQAAWAATHTNGSYLSALYRRIARRRGSKRAIVAVGHAILISAYYMWKKKQAYQELGDNFLDTLKPEKTAERLMKRLLKLGYTVTVTQFPSPAA

SEQ ID NO: 290639 - protein, 350 aa, unidentified
MLIIGCDYHPGFQQIALVETDTGELGERRLAHREHAEQFYRELKQQNLCVRVGMESSGHSRWFERLLDELGFELWVGDPAEIRTKRVRKQKTDRQDAQLILQLMLENRFPRIWVPDAENRDLRQLLWHRHRLVQMRTRVMNQLHVVPLNEGLRRKKALWRPAGRKELESIALAPWASRRRQDLLDLLDQLTPKIQELTHALEEEVEKRPVTRRLMTHPGVGPLTALAYELVIGTPERFHCSKQLASYVGLVPEEKSSGDRRRQGHISKQGNVLLRFLLVEAAQVTVRSQQEWRNKFFHLAMRRGRKIAKVAMARKLAVHLYWMWRQGRDYGQWRKLGSHAGEPGNPDGVQ

SEQ ID NO: 290640 - protein, 443 aa, unidentified
MPVLRTDVAGIDVGSEQHWVCAPALAGGGREVAVFGATTPELQRLAAWLQARGVTAVALESTGVYWIAPHEVLEAAGFDVCLVDTRALARVPGRSKSDGQDCQWLQRLHRCGLLRGAFRPPDQVCVLRTLVRDRATLIAERSDWVRRMQKSLDQMNVRVHRAVADLDGVTGLAIVRAIVAGERDPQRLAALRDPRCRKSEAEIAEHLSGHWRADHLFSLQQALHLYDAIVARVAAYDQEILRQLAVMTPEARRGDDAPPPSKPDKAKDFRKRGVNPLRHALYRLSGIDLTTIDALGPETVSVVLSEYGADLSRFATEKQFVQHVGLAPHRAISGGKPIKRRKKPGSASARVGAALRMAATSLRRSRSALGAYYRRIAQRAGRDVAVFATARKLAQYIYRLLRWGQPYVDAGAAVYEQRYHDARVRRLSSTAKQLGYTLVAADA

SEQ ID NO: 290641 - protein, 369 aa, unidentified
MNDLVKYVGLDVHKDTIAIAVAEADKRDEVREHGEISNTPAALKKLLGKLGGPGVELQICYEAGPCGYGIQRQVTSAGHNCAVVAPSLIPRRPGDRIKTERRAAAMLARLHRAGELTAVWVPDIAHEAIRDLVRARLAAVRSLRHARQQLSGFLLRYGHHYNRSAWTQMHRRWLSGLSFAEEAHHIVLEDYIATVDAAQDRRDRLTAQIEKRLVDWTLGPVVQALQALRGMALVAAATVVAELGDISRFSKAEQFMSYLGLVPSEHSSGSRRRQGGITKAGNGAARRMLIEAAWSYRFPARISREQLLRQELLTAPIRAIAWKAQERLCFQYRKLSRAGKPITIVTTAIARQLAGFVWAIAHEVCTPTA

SEQ ID NO: 290642 - protein, 370 aa, unidentified
MSEGTTRYLGLDVHKATITVAVAEESGPPTAFGTIANEVGAVRRLVRQLGREAKLVAAYEAGPTGYALHRELTRLGVECMVVAPGLIPIRPGDRRVKTDTRDALGLARLLRSGDLTPIWVPDSEHEALRDLVRARYDAKDDLRRTRHRLSKFLLRQGICSPAGIKAWSVRYYTWLRQLSLGQPAAQVVFEDYRAVEQAAQERLRRLEAALRQCAEQSPQLPLMAALQVLRGIAFLSAVTIVAEVGDFRRFTNAPGFMCFTGLVASEYSSGTSRRQGGITRAGNRYLRHVLVQAAHNARYAPNPRGAVKQRLDGAPPDLVELALEAQRRLHARYRHLDRRIGRPKAVTAVARELAGFVWAVGQRMTEAAAA

SEQ ID NO: 290643 - protein, 411 aa, unidentified
MDVVHARCAGLDVHKATVVAGVRMPSPRCGERCGETMTFATTTRGLRELREWLIAHGVTHVALESTGVYWRPVYAVLEGVVEMILVNARHVKMVPGRKTDVRDCEWLAQLLECGLLRGSFVPPAGVRDLRDLTRLRKTLIRERSQHVNRVAKTLELAQLKLGCVVTDIMGKTGRAILQALSTGIDDPVRLADCAQGNLRKKRAALREALVGGLTPHYAFLLQQHLSLIDALDVHIATLDARIAGAMAPFAEAATLVQSMPGIAARAAQAIIAETGIDMSQFPTAAHFASWARLCPGNNESAGKRRPTTTGKGATWLRATLQEAAWAAVRSRKSYYRALYHRLRARRGPKKAIVAVQHAMVVALWHMLKHRVSHRDLGADYFDRQNTDRIRRHHVRRLERLGYDVVLVEKAA

SEQ ID NO: 290644 - protein, 363 aa, unidentified
MHSINNTELSSHEETHCQFNGGKACIKLGIDVHQDFYVVVEQVGGSNPKPPQRFRKEAFLHWAARLARSGTEVHAVYEACGFGFTLKRQLSALGIHCYVVCPQKLDERNKRVKTDGLDAKALCLKLDRFVEGNRDALALIRVPTEQEEQQRAIHRQREQLVKARKQLEAQGRSLLVNHGFEPVKSWWKPRTFAALDVPQWMRELLQNSQPILLALQQKIGVLTIQLQSAADPKQPRGLGLMTSVIIDREIGDWRRFSNRRQIASYTGLCPGEYSSGNTRLQSCVTKHGNPRLRAALVELAWRLVRFQPNYKPIVKWRQILAKGALATGAARKKAIVAVARQLAVDLWRIKTDRLRTEELGLIN

SEQ ID NO: 290645 - protein, 341 aa, unidentified
MKKFIRIGVDLAKNYFQIHGLETEGGCAVTRKLTRRKMREFFSRIEPCLVGMEACGSAHYWARELEAMGHEVRLMPPSYTKPYVKRGKNDAVDAAACCEAVSRPGMRFVPVKSAEQQAALMLHKTRELLIKQRTMSVNALRAHLSEFGIVVAKGIGRVDQLLALAEHDATLPDAARAVVKVLAQQLEGLDTSIDEIEGEIVRVHRRSEMSQLIDGIPGIGEIIASVITASVPDPNVFKSGRDFAAWLGLTPLQTSSGGKPTLGAITKKGNRYIRKLLVLGATSLLSHLNKRKGALRDWIVALLARKPARLVTVALANKLARIIWAMMKTGEGFRGEMFAKA

SEQ ID NO: 290646 - protein, 394 aa, unidentified
MFCIGIDVAKRRHRLAAITERGEKVIENYSFENTTGGFKQMVKKLHSSGVTRDNSRVALEATGHYSRALSAHLVAEGFEIAEGNPLQTHNFAKAQSIRKVKNDAVDALALAQWLLSRNPTATKLSSSESACLKSIARFRTFQSQIISDSKRKVIAILDQVFPEYASFFSDIFGAASLAVLSRYPSAQALSRAHLDSLTSLLERSSRGRLGGELALRLREAARSSFATDAALESQVLEVEQLIAQIKFTKKQLATLDKKMENLLAKAGTPIQTIPGIGTVCAATILGEIGDISYFAKPSSLVAFAGLDPSVYESGEFIGTKNHLSKRGSSYLRWALWIAADRAKTFDPAFGAYYFKKRSEGKCHKVALSAVSRKLCNTIFAVLTRNTPYVCHLPG

SEQ ID NO: 290647 - protein, 426 aa, unidentified
MTNSLFIGVDVSLQSNQFCVLNFDQHKFFNLKFPNTPDGCEDAINRIKNIHDKFYFDKIVIVCEATGMYSFHLACYFSSHEYLNNFNTEVYQINAHDFAKYKDSFSDIEKTDPSDAYILADFARVGRTKALHPFRGSQYIALQRLTRQRYHISKNLVKEKLYVMNNIYLSFSGLIIADKKNKPFSNMFGATSCAIFDNFDSPDQIAETPVDNLLDLISKVGKNRTKNPNEKIDLLNKAIRSSYRLEQTAYNGINIAVASSLNTIKFLENQLKQVDKAILDTVSGLDSNAYNSLLSIRGIGKVYAAGILAEIGNINYFKHNSNLAKYAGLYWNRTQSGKFEKEDKNFSQHANKYLRYYLIEATASCVRMNFPFIKNFYDSKYKEVTKHQHKRALVLSARKLVRLIFGLLRKNQYYSPIDSNTQSLVN

SEQ ID NO: 290648 - protein, 434 aa, unidentified
MVDGMSSVGRDTAQTVVCAPFPLGVEPGGIVAGFDVHRRQITFDALDTVTGESWRGQLESSSAAVEDWVGRFPSREIHVAVEACTGWLFVSCALGRTGAVAHLAEPVETSALRGRKRRAKTDRTDAKWLRQLLCEGRLPEAWCPPEHVRQWRSRARLRNTLVAERTGWIQRIRATLYHHGIPGAPDDLRTLAGREFLASLELPVDGAERIRVALEIIDMLEIQLATIEKDLRALARHQPGCQALMTLYGMGELSALVTLVELGDVQRMHASRQAVRMAGLDIGVHRSDRHAQLGKLTRQGSAPLRWALFEAAQSASHQGSPDYQDYHALKDRGLSHNRACMTIARKLARRSYHLLRALGPAALAEPVTPRAKAPTKPTSQRCVPSMRPAPGASEAPTPPRRGGPRKTERPQSIHRNDQSSISSPTATAGSRGPR

SEQ ID NO: 290649 - protein, 420 aa, unidentified
MKSARNTLPEEPAGNVTCGIDWARDDHAVSVVDVRGREICRCSVEHSAAGLRELLAVLERTGAREAAIERPDGPVVDTLLEAGITVVVISPNQVKNLRGRYGSAGNKDDRFDACVLADTLRTDRARLAPLTPDSPATVTLRRACRARKDLVGHRVALANQLRAHLRNAFPGAVGLFAEIDSPISLKFLARFESRDRAGWLSPRRLAAWLASVGYCGRVDPAVLHARLIAAPRGAAGDDGTAQACITLALHAVLATLVEQIRALSEQIGEQLALHADAHIFTSLPRSGTVRAARLLAETGDCRARFPAPEALACLAGVAPSTRQSGKMRAVSFRWACDKQLRDAVTDFAGDSRRASPRAADLYNRARGRGHDHPHAVRILARAWLFVIWHCWQDETAYDPARHHALQRLLATRDSTAARAA

SEQ ID NO: 290650 - protein, 356 aa, unidentified
MQTQVTKKIDFKDKDLFIGLDVHKKSWSVTIVIDGMEHRTFTQPPDPRALNNYLQRMFPGGSYNSAYEAGFCGYSIHRELKSLGINNIVINAADTPTSQKDKLHKRDPTDSRKIARELEKGSLRGINIFDRELEELRSLNRTRFYLMRDLRRSKNRIKSFLMYYGVPIPPEFDNNQWPLKFISWLKQVKMKTPGGQDAFSHLIESYEHYRQQLLILSRIVRLRISHYDKELYSLLNTISGIGPLTSSALITELGDINRFTHINHLASYVGLIPRVRESGETTHTGGITFRCNTFLRTLLIESSWQAIRMDPALMQYYHKHVINSKGHKVIIKVARKLLNRIKYVMKNRQPYVTGVA

SEQ ID NO: 290651 - protein, 351 aa, unidentified
MRTSQNTQETISTIGIDVGKNTFHLIGLDIRGAIVLQQKVTRHQLGRRLSNIPRCLIGMETCSGTHFIGRQLTALGHDVRLIPAQYVKPFLKGHKNDYRDAEAIAEAVQRPTMHFVSIKTPEQMDLLALHRVRSRLVGQRTGVTNQIRGFLLERGITVRQGLMPLRKALPEILSSNSDALSPRMINLIGELIQDWRRLDERIAAVSSEIEALAKQDESCQRLMSVPGVGPIISSAVVAAIGNGAGFKQGRDFAAWLGLIPKQESTGDRTILGKISKRGNKYVRTLFVQAAHVVLERRPSTARQSLWPWIEQASKRLHRNMLAIALANKLARIAWAVLARGRAYQPRIPANA

SEQ ID NO: 290652 - protein, 429 aa, unidentified
MQNESTPDARGPVFCGVDTHADSHWLYVLDWRGRKGLSRQFPADAAGYEALAGAIAAAGEPACIAMEGTSSYGAGLTRHLASLGMPVREALSPARTQRRRPGQGKCDEADAERAARAAMSGSRLGTPKSQDGWVDGVRCMLAARSGAVKARTSAINTARSLLTTAPEGLRSRFRGMGGPRLMEELPSVRAEGALGAALGALADLWAAARDAALDMERAIEASLEENCPALLAMYGCGPVSAAKLAVAAGDNPGRLRSEASFAAICGACPIPASSGKTVRHRLNRGGDRQANSALHEIARQRVMRDPETAEYAERARGRGKSDREVMRCLKRYVAREAYRALMRPHEIRRPEDASELVAARRAAKVSQVRAASILGTSEKYISMLERGQRELKPIRRAYEAWVEAGLPLDWDRQAFEAERKMDSKKHLAK

SEQ ID NO: 290653 - protein, 312 aa, unidentified
MANLVYAGIDVGKDKLFVNIHLDSQVRDFPNTHSGLERLSRFLIKNAVNLVVMEASGGYERLPASDLRARGLSVAVVNPTYGRRFAQGMGTLAKTDTIDARLIAHFASVKQPKPQQAKTVEEEELAALVERREQLVSLLSVEKNRLSKASDYSKASLQISIQFLTGQIASIETEIKALVAKSPERLARMRCMCSFIGVGDITAVTLLTEMPELGMESGKHIAALAGVAPINRESGKMKGKRRTYGGRARVRRTLYLAALSASRHNPIIRAFYERLLAAGKEKKVALVACMHKMLTILNAMLKKGELFNPEYS

SEQ ID NO: 290654 - protein, 451 aa, unidentified
MDDKITLDVINKNAAGIDIGSRSHWVAVGQKNSQIKEFGVYNENLYQLADWLNEHGVKTVAMESTGNYWQNLHAVLISRDFEVTLCNGKFTKNIKGKKTDVKDCQWIQKLHSLGLLSSSFLPDKDTETLRTFTRHRHNLIKQAASATKKMQKYLRLMNIRLDVVVKDVVGLTGLKIIRAIALGESDPKKLASLRHYNCKKSEDEISKALHSNGRKDFLYTLKDELDTYDFIQKKIRECDDQIASKLDEIIGKDPEKGEHYIDKKPYKRLNKNTPKNIDINLKSYQMFKGIDLMAIEGMSYNTVLAIMSEVGYDGIKKFKTAKQFTSWLRLAPNNKVSGGKVLSSKIGKGSSRLKIALRNAANSIGNLKGSTPLRDFFHRINFRKGRVSAITATARKLAVIIWNMIVKGVAYHNPEGYLYLDQKRKLGIVKRMRKQIDKYGLTNDDLQLAEN

SEQ ID NO: 290655 - protein, 351 aa, unidentified
MIIGVDPHKSSHTASAVDPATNTVVASLRIDASLAGYRELLRWGRRFGDRRWAIENAHGLGCHLAQWLVARDETVLDVATTATARVRELSRGGRRKNDVIDAAAAASVAALYGDAVEVTPDDETTVFALLEERRANVAAQRVRAVNQLHALLRDLVPGGARTNLTAAEATGLLRSVRPATTVERTRKELARDMVRDIRSLDTALADIASRMAEALDNRDTRLLEVDGVGPVLGVRLIGRTGRASRFPNADAYANYAGVAPVEIASGDHTRHRLSRSGDRQLNSALHLVAVTQIRMTNSAGRRYFDKKIAEGKTHKEAKRCLKRRIAASVWRIMLADERRIHQTTHTQIRAA

SEQ ID NO: 290656 - protein, 419 aa, unidentified
MFKIFRKNCCGLDIHKTWIYACIGITDANGRTEYKQSRFSSFTKGLRELAEWLAKYGCIEVCMESASKYWIPVFNILEKTCLVTLSHPKYTKPQKGNKTDRKDAKFICDLFMCDMIKPSFIPPPDIRHLRDLMRYRGKLTNILTGEKNRAQNCLTVSNLKLDDVFSDVFGKSATSITKYILEHPGEEFDVAPFVDKRCKQPIEEIQAAVDGSISHEQAVKLREILAHIDELNAHREKIETDILRLVAPYQRQLELIRTVPGFSANPMTAIAVLSEIGADMSVFPTAKNLSSWAGCCPRNDSSGGKRKSTRISRAGAYIKPLLVQVANAIVKSDKHPEFKERYRRLKGRRGHKKAIIAICRMILTAIWNILSKMESYSDEGYLVDRKTGESMIITKSQALHLLRMRGFIIKDDVPSEAHA

SEQ ID NO: 290657 - protein, 357 aa, unidentified
MSCDIILAVDYHDENTLIRQFDERRKVESTCTVPSSAAALLQVVQEARKQRWRGGQVVWIQESTSGWARVQALLQDQVKFQLANVVQMPRLPKGHRQKTDRTDTARILREYRNGSLPQAHQPSAWWRQIRRLVCLRENLVNRRTALRNWINRYLAHETWESRVGLWSAKGMVRLRHYAKGLPEWDHIVVGIKLTELEQLEVPLSRVEAQMHEVYRHWPEAQQLDAVKGIGVIAAVAIAARIGPVQRFRNAEALIAFAGLAPGVRQSDATRRTGRIGGGGTDFHLRHYLIEATVWARALPRYRPTYERVAKRRGTKVGRLVVARLLLRSIFKVLRDGQRFNGEASNQAVPIDLTPATP

SEQ ID NO: 290658 - protein, 394 aa, unidentified
MILVGIDIGKNKHFFSMVDKETGEILSKPSDFKNNQEGFQFLTQTLSSYSKSNLLIGMEDTGHYHFALLKHLLDNKYTVALINPTTTDLTRKIQGGITKNDPLDTLTICDVLASSQRIKSYRITKVDRFDLYEQKQLTRHHHNLKEELNIYKNRLQKCIDIVFPEFNSLFRSKYGIVYMNILKTFASAKNIANSDIETIRECFEVVGRGKRISLSAEQLKTAANASVGIPSVAEEIQIRHLVCQIEMIEEQLSEIDKKIEEFSLKNNSPILSIPGISHFSGTSILSELGDICNYTKASQIIKFAGVAPYHYESSQFTAQHTAITKKGSRYLRKTLYQIILPVINYNRVFTAYYNKKLAEGKGHRCAQGHCIRKLLRIIYHLLSTGQNFNSALLI

SEQ ID NO: 290659 - protein, 353 aa, unidentified
MRRPKDKLIAGIDLHSNNVMLGVINQDGKRVAHRKVDCDLAEVVQFLKPFKAQLQSMAVESTFNWYWLVDGLRAQGYPIDLANPAKIEQYSGMKHVDDKDDAFHLADLQRLNILPKAHVYDPELRPVRDLLRRRTNLVHQHTALLLSFSSLHVRTTGQKLDLGDAKKMEPKQAPKLYEHPANQLIAQVQAEHIQALAKSISRIEKAVLACAREIPLYEKLLTLPGIGRILGMTLTMEVGDISRFKTAGDFASYCRMVDAKRLSNGKRKAANNQKCGNKYLAWAFVEAANFARRYDERCRRWYDRKAAKAGKIIATKALGCKLAKAAWHVMAGQCDYDEKRMFPELATQTMKAT

SEQ ID NO: 290660 - protein, 311 aa, unidentified
MKCFVGVDVAKAHLDLYDTVSKHHVRFKNDKVGISACRKRLVGLSPQLIVLESTGGYEHDLTRALETAALPVVVVNPRKVRDFGRAIGRLAKTDQIDAVLLAQYAAKVQPPQRVAREPRHHQMKALVARRRQLVKLRTAELNRREHIHDKVIAQSIKAVIRTIDREIQKVENRLAVIVKEQSDLKQKLQLLLSIPGIAQTTATMLLTELPELGQLNRRQIASLVGVAPINRDSGTFRGKRMTGGGRQTIRTRLYMPTVVACHYNPVLNPFYQRLLKNGKTKMTALVAAMRKLITIANTMLAKEEQWNPNTA

SEQ ID NO: 290661 - protein, 342 aa, unidentified
MSLIKAIGIDLAKLVFSIHGVDEYGKTKLKKIVKRNKLLAKIASIPPCIIGMEACSGAHYWAREFTKHGHDVRIMASKFVIPYRQSEKNDANDAEAICEAVTRPKTRFVSIKSEEQQAVLCLHRIRQGQIKDRTAMINRLRGLLSEFGIIMPKGRYPAQKHIVEILEDASNVLPDLARELLHDLWLSIKQQNQDILKSDRKLYALANQMKDAKRLMTIPGIGEVTATAVVATVNDAKHFATSRQFAAWIGLVPKQYSTGGKPTLGRISKRGEKHIRTSLIHGARAVIANCTNKMDRTSLWVKALIERRGFKRAVIALAAKNARLIWSLLQSGQEYQVNYVKT

SEQ ID NO: 290662 - protein, 318 aa, unidentified
MSDSVFVGIDVSSQTLEVASSDQAKTWQVTNDAAGLEALVSQLSTLAPALTVLEATGGYEFEAACALQAAGLAVAVVNPRTARDFARAMGALAKTDALDARMLAAFARVLHQHPERERFVKPLADAELQRLQALVLRRRQLVQMITAERQRMRISHVAARASIERVIEFLKAELADSDADVAAHVQRHHAELAAALASVPGIGAASVAVLLAELPELGKLDRRRVAALVGVAPLNRDSGQMRGQRSIWGGRAEVRRTLYMATLTAVRHNPILKTYYERLLAAGKRKKVALVACMRKLLTMLNAIAKHGTKWEPTLHHA

SEQ ID NO: 290663 - protein, 431 aa, unidentified
MRVIHEHCAGLDVHKKTVVACVLVTKQDGQVSQEVRTFGTTTGEILALAEWLKSQEVNSVAMESTGVYWVPVYNLLEGALELLVVNAQHMKAVPGRKTDVSDAEWIAQLHRHGLLRGSFVPPKPQRQLREVVRHRTNVVERRSQSVNELQKVLETANIKLASVVSEITGVSAMEMIRGLIEGKNTAEVLAELARGRLQDKKPQLRAALTGRLEKHHRFILSQLLADISFCEEQILELDLEIRIQMKEYEELIKRLDEIPGVNRRIAEVIVAETGADMSRFGDAAHLVSWAGMCPGNNQSGAKRRTSRVRQGNKSLKRVLVEAAHAAGRKKDSYFSAQYRRLSARRGKKRAKVAVGRSILETTFHMIQRGATYKDLGSDYFDRRDPERLAKRLAERIVRLGYKVSFEPTGKPATGYRLNYEPVHSLDQIKAA

SEQ ID NO: 290664 - protein, 415 aa, unidentified
MEVVYERVAAIDVGKKEIAVTVRVPGQTPGTRAQQTRKFRTFYQVLRQMVGWLVDHGVTHVAMEATGVYWKPVFHALCEADTLEVVLVNARHVKNVPGRKTDVKDSEWLAQLLECGLLRGSFIPPREIAAIRELTRYRKKTIQTRTRELQRLSKVLEDAGIKIDSVASSITTLSARDMIEALIAGQRDPRLLANLARGTMRTKIPDLAMACAGRFADHHALLARMHLDHIDHLTSMIDGLDERIEQVLAPFAPQLRLLRTIPGIGERAAQVLISELGIDMSRFPSAAHLASWAGLCPGNNESAGRHMSGRTRKGNAEVRDILTECAWSAGRTGSYIGARFHRLHRRFGKKGGGKAAVAVAHTLIVIVWHVLHDQSEYRELGHDYFTRRDNPEAAKRRLIHNLEALGYHVELTATA

SEQ ID NO: 290665 - protein, 419 aa, unidentified
MKTVPFEQVILRGCGIDVHKDMVVATISGEGLKTETRSYKTFSSSLTELKEWLLSSGITHVAMESTGVYCKPVYKILECPDMKVWIVNARHIKYVPGHKTDKKDSAWICKLLLAGLLKPSYIPEREQRELRDLTRYRNKLIQHVSSEKNRIVRILEDCNIKLSSVVCSLDGVVANKLIDMLIDKGHVTMDDITCIYHKKLEASPELLYQACEGFIEPHHIYMLQTIRKDMEQTKAIIADLTCRIKEVLSPYENVMELLQKIPGLSRKTVEDLIAEIGVDMEAFPTEKHLASWAGVCPGNNESAGKKKSGRTTHGNKQLKAVITEAAWAATRTKNTFYSARYHRLAARRGKKRALVAVGDSILKSVWHVLKEACEYKELGAEYLNQRMEQKRKNYLKKELEALGYKVKISRDDGPIPEVG

SEQ ID NO: 290666 - protein, 344 aa, unidentified
MQITTIGLDLAKNVFQVHGVDATGQVVVRKSLRRSQMLPFFAKLPPCLVGIEACGTSHHWARELIRLGHEVRLMPPAYVKPYVKRGKTDAADAEAVCEAVTRPTMRFVPVKSPDQQAALSMHRTRDLLVKQRTQLINMIRGLLAEFGVDIPKGLERALLVARQIVDGKAPDVPFEAAKIVATLSQQALDTHVRLREIDRDLAVWLRGNEVARRLMTIPGIGPVGATALAASVTDPHQFRSGRQFAAWLGLTPLQKSSGGKERLGHITKMGDKYLRKLLIVGMTSLVRRAKYNPGKIDPRLADLLTRKPTRVATVAMANKTARVIWAIMARDETYRTGHQPALAA

SEQ ID NO: 290667 - protein, 428 aa, unidentified
MNEEDRTRLEEFRQFRKEIRGSAEYLLVGIDVAKEKHYAFFGTATGKTLFKRLVFENNLEGFGKLLVQAEAMKVQHGLKRVVFGMEPTGNYHKPLGEHLIRCGHGVVLVSGVAAHENRKTLDGRWDSNDTRDAANVADLVSQGKCLFYEFPVGALQDLRNLLSLKRRLKRQEHGYRVRIRNHLVAKYFPELDGYFEQSEKTSLAIVRWCLDPSVIAGWGYQKFVETVSSGPRRLSQEKRLRAIWQRAVGSVGCEVGPAVEVEAQVMVEGLRQIRESIQRIEEEIHEACSQFPEYEYLLSIPGFGPDVSSKVLGALGDPFRFQNGRQVLKMAGLDLSAERSGKTSQSAIPVISKKGKADLRYALYQAAFIASIRNQDFIIYYTNKLRGREKEPGIKTKMRVKLSAKLLIIAWTLMKKKEPFNPEYLAIE

SEQ ID NO: 290668 - protein, 314 aa, unidentified
MSNKVVVGIDVSKSRLDCFALPLEQAWSCDNGQVGIEQLVQRVQQLGGELVVMEATGGYETQAATALAAAGLRVAVVNPRQVRHFAKAMNQLAKTDRIDARVLAEFALSINPQVRPLPDEGTRELSDLLARRSQLVAMRTQEKNRMLQAAPALRAGIKTHIKWLEVEIAKLEVDLTAKLRASEAWCDKRDLLLSVPGVGSTTTLALLAELPELGQLNRQRIAALVGVAPLNDDSGKRQGRRFTWGGRAAMRSVLYMAALSAMRHNPVIRVFYQRLRANGKPFKVAIVACMRKLLTILNAMVKQHKPWQPQSKPT

SEQ ID NO: 290669 - protein, 384 aa, unidentified
MVKPAKRSGAGFTTAAGSRSRVFRSSKTVTKQDRCRFFGQSPNSRQSRDGVYAATSSYPQGRDNAMSESITQFVGIDVAKRSFDVCCLPEESRLSLSYDEQGLSQLLCKLPDKGTCLIVVEATGGYQRRLVAELLDAGHYVAVANPRQVRDFAKGMGILAKTDPIDAKAIAHFGQHVRPRTVEKTPEKQVELEQLVTRRRQLVDHRTAESNRLDTISVKSVRKSIQYVINLLNKQIERIEKDILALLESDDDWKDKRKLLDSVPGIGPVTIVSLLAELPELGLLNRQEIAALAGLAPFNRDSGRFRGRRSIWGGRSSVRSALYMAALTARRCNPVIRQFAERLEAEGKLFKVVITACMRKLLVILNTMVKNNTHWNPKLCQINP

SEQ ID NO: 290670 - protein, 343 aa, unidentified
MGTYYYIGLDIHKRTISYCIKAIDGSLIGQGKIEADRKSLGAWAKGLPGPWVGAMEATIFTGWVYDFLKPHAVALKVAHPEMLKAITAAKKKNDRADAEKIADLLRVNLLPECHMLSEEIRELRRVLRYRNHIVRTAVKMQNKISGLLMEVGVSYSKRRIHGRKYFHEILERVEEIPPSVKELLKLSRSGYEMFRTFQKRLVETLRTNNLIHDRVQRLMTIPGIGEITALTWVLEIGDPGRFTSIRQAVSYCGLCSAQRESAGKEQRGPISKKRNKHLQTMLIEAAKLAPHWNEQLAMVHERELKKGNRNRATLAVARRLVAYMLAVDKKQADFKLPAEMQAA

SEQ ID NO: 290671 - protein, 344 aa, unidentified
MDITTVGIDLAKNVFSVHGVDGHGKVVLKKTVSRSKLLECFANLPPCRVAMEACSGAHHWARRLSAMGHDARIIAPRFVIPYRKSGKNDSNDSEAICEAASRPAMRFVPVKSSEQQAVLCLHRIRSERVAERTAQLNQIRGLLSEFGLIMPKGRYPAQHHIPDILEDAENDLPSLARRLLFDVYQRILQLNQQILAYDRELEQLARHSVPAQRLMTAPGIGAITATAVVASINDPRQFHNGRQLAAWLGLVPRQYSTGGKTRLGRITKQGDKYLRMLLIHGARSVLAALGDKRDRVSCWLRELIERRGYKRAAVALAAKNARLIWVLLTRGEDYRVQPAALKAA

SEQ ID NO: 290672 - protein, 337 aa, unidentified
MNKYIGIDVAKATLQVHIPINNKDLEIANSDTGLKQLYAKLKKQYKKDISELVFVYEPTGSYSTRLDRFCMDQKVFTFKVKPSQSSAFAKTLGHRNKSDKIDARLLHRIGILAREKDIVIPAIDEDAHKLTSFFKYARRLMKERVALTNYLEAAIHHQEDTFIIRRIRANIKRLQSEEDEIFQRMLELINANKEYKQSYENITSIKGIGPAGGIALMYLFARYPNASRRGITALCGLDPIISESGTSVQKKARISKQGNRAIRATFFMSSICATIHNDEMKTFYNHLKDRGKHSTVAHIAVMRKLILLAFSLYKNNEQYDPERYLKYHQAKQEKNVA

SEQ ID NO: 290673 - protein, 517 aa, unidentified
MLETMIGVDLAKSVFQVHGASMTGVVKFRKRLTRSQFRRFLAAEPRSVFVLEACGSAHYWAREMVKTGHQVKLIAPQYVRPFVRRQKNDAADAEAIVIAAQRPEMTFVGTKDEDQQASAVLFRSRERLIRQRTVAVNALRSILYEFGHVVPAGIRNLRRIEEILADENSDLPSLVRSEGLDIIAQIREQTVRIEAKTKTAKELASKDDVARRLQTMPGVGPLTALAVETFAPEMSTFKGGRNFAAWLGLVPRQFSSGGREKLGRISKAGQADIRRLLIVGAMSRLNWMGRKTVPEGSWLARMIAKKPRMLVAIALANKMARTIWAMPTEASTVPAKIMEDTHWLEADRTAFAAAWTAELAEVPEFSETTLHIVAGLLLPIWKQLPQDETRVYRLQTDDGQRIIGRRVSPSWVATTLAADAPKLTAAQVHALVLEGKTVVRLAEGMELHRFRVMGVNRIELSGFLGAAKDRLKADGFFSEIIAWKLRLFCPADSSGIAVLDRLLARCPVTGLHARGGC

SEQ ID NO: 290674 - protein, 353 aa, unidentified
MKRTGKYAALDVHQTTTTASVREEGGRVIARAVLPTEEGAIVEFFGGMRGRIQVAFEEGTQAQWLHDLLEPLVDRVVVCDRRGKSRGGNKGDQVDADELSELLRQGALRAVYHGSQDRATLKELARTYQNVVEDATRVMLRLKALFRARAIKAPGKRVYHPKNRAEWVAKLRDRGVRYRAEALYAELDVLRELRPKVKAAMVAEARRDPAWPVLLSIPYLGPVRVTLLLATMRTPWRFRTKRNLWAYSGLAVVTASSSDYVLVDGRPVRRRRAPMTRGLNRNHNRVVKDVFKGAATAATGRPGPLKDLYQGMIARGMREELARVTLTRKLASLTLRLWKTGERYDPTKLRSEG

SEQ ID NO: 290675 - protein, 337 aa, unidentified
MLIIGCDFHPSFQQVAIFDKQTGEYGEKRLGHREQAEGFYRGLAGQEVRVGMEACGHYPWFERLLAECGHQLWLGDAGQVRASVVRQQKTDRRDAEHLLRLLLEERFPRIWVPSLEERDVRQLLLHRHKQVQARTRVKNQLQALALSQGVQRRGKLWSERGRSELQQLPLLPYAAQRREHLLQALEGLNQEIGQLDRRVEEEAQRRPAAARLMTHPGVGPVTALALVLTVGPVKRFAHADQLSSYFGLIPREHSSGGRQQFGRISKQGNPFLRFLLVEAGQSAARSDAELGRFYRRLAVRKHRALAKVAVARKLTTRLYWMLREDWTYAQLSKAVCR

SEQ ID NO: 290676 - protein, 351 aa, unidentified
MMIIGVDYHPSFQTIAFFVEETGEYDEQELNHSDGQAEKFYRDLKQRGMCVRVGMESTGYARWFERLLAELGFELWIGDPAEIKAKRVRKPKTDKEDARLLRKLMLEDRFPKIWVPSPENRDLRQLLWHRHRLVQMRTRIMNQLQALAMNEGRRWKKKLWSAQGRAELEKLGLAPWASRRRKELLELLDRLNPIVEELTAAAEREARKRPDVLRLMTHPGVGALTALAYVLMLGTPERFHRGKQIGTYVGMVPSEDSSAGKQRLGHITKEGNGLLRFLLVEAAQAAVRTNPDWRRRYIHLAMRRHKSIAKVAMGRRMATRLYWMWRNRRDYSPSFEFGSYAGKLETSHGVK

SEQ ID NO: 290677 - protein, 417 aa, unidentified
MAFKIFRKNCCGLDVHKTWIYACIGITDTNGRTEYHQSRFSSFTNGLRDLAKWLDKYACKEVCMESTGKYWIPVFNILEQSCMVTLAHPKYTKPQKGNKTDRKDAKWICDLFMCDMVKPSFIPPPDIRQLRDLMRFRMKLTYQVTGMKNRALNCLTVSNLKLDDVFSDVFGKSSRSIIQQILDHPGETFDVAPFVDKRCKHPIEEIQAAVDGAVSREQAAKLKICLDFIDEQQKRIKEIEAEIFRLAEPYSYALELIRTTPGFNKDPLTAIRILSEIGADMSAFPTSKHLVSWAGCCPRNDKSAKNIKGTRISRAGSYLKPILVQIANALLKSNDHPEFRERYRRIKARRGHKKAIVAICRMLLTSIWNILSKLEPYTAKGYLADKVKDHSVVITKAQGLELLRKRGYIFKEELADA

SEQ ID NO: 290678 - protein, 346 aa, unidentified
MLYAGLDLSRQRLDVHVLDEEGRTLEVMAIHPDADALRTLAAHVLRYGQEVTAAIESMTGARFVHDRLEFAGWDVAIADAAKVKGIAPLAAKTDKIDAWVLAELARRDLVPEIWLPTPGVRAERERARFRLHLVRHRTALKNRIHATLMTFGHSVPVTDLFGTAGRELLASMALPEPWATSLATSLAMVDELDSRIGACERDLVRLGADHPYVCLLLTVPGVGRVLAYTIASEIGDIGRFASPKKLAGYTGLCPFVRQSGNHDLRGPLAKNGPKYLRWALVEAATHAARDAHYRDRYERNKKRLGRQRGAKVARIDIARQLAEAIWHVLTKNEPFSPAGPAITLVA

SEQ ID NO: 290679 - protein, 373 aa, unidentified
MANIQDGFAKCKPVYVGIDVHKRDWVVTVLCQGEELYHATVVPDPAGLVRLLKRFEASEVHTVYEAGPTGYWLHEALAEAGFDSIVTPPSLVPHVGGRVKTDRRDSRKLAAMLAGGFLRRVYVLAPEERAHRQLLRTRNQIEQHRRKAQNQIKSLLLFHGKRAPATLKERWSETHVHWMETTEWEYPLLKISLNAMLTMYRNLTEQYKDLTHEIELLALTEKYRERARLLTQIPGIGMFTAMAILIELQDIERFARADQLASFLGLTPSQHSSGERIRMGHITRCGNYHVRTRLVESSWTLIRYDAGAKATYERIKHQTGSGRKAITAIARRLALRIRRVLLDKAPYRLSDGGRLATGRDKTREAKRFVLRPL

SEQ ID NO: 290680 - protein, 531 aa, unidentified
MAGKLTGSRRRRPSKRRSKNRVHLQKPSGLIGPRVAKVGGDRFAIVCIDPAKHRSEWMMADYFGKLLIAPQTLEHQSGHFKAAIAQIQQSQKQNDIRDLIVVVERTGNYHLAPKHAFSSAGFETRVVHPFATKQYRMPADPGNKTDETDLHAQHRAAVAGFGLCERELQSPYRELQLRVRHRRNLVEKASSLACQVREHLHLSMPGYSVLFDRLLEHRIAMGIGRCCESPAKIVKLGQTGICKRLRKQGIRCQQRTIDKVLAWASQEKNQMVKDGAVHHAIWTDLEELFRQIQRQITSIERVLAGELVQTPYVRLMSIPGINVVSAADLAGEMGPIDAYANANAITGRSGLFPCRHQSDQTDTSGPIIRQANRRLRCALMRIADNLACHCAHYRGLAEQDLARGVAVRASRVKTTKKFTRLAFACLAGDQPMRHPAFRAPDSILEKLREFHRLHETPLDQVLADLSKAVEQLPEYAKGHEAKVVAEVLRQKASRKRREVGLGELLTAVLARLGINDNEIDKTNTIKSGDRP

SEQ ID NO: 290681 - protein, 433 aa, unidentified
MQDVQDEPLFAERVAGLDIAKAEVEVTIRVPSDTQPGRRQQEIRTFATTRRELDALAGWLRSWGVTKAGMEATGDYWKPVFFLLESRGLDCDLYNAAQVKALPGRPKTDRADSIWLAKITERGMISSSFVPPEPIRRLRTCTRYRRHLTQAPAAEKQRVEKLLEDGHLKLSSVISDIHGVSGRDMLDAIAAGQRDPRALAQLARGTMRGKIRRLEEALDCSFFTDEHAAVLAMMLTTIDYYTAQIEQLTAKIEVLIEPYLHQAGQLDEIDGIGAICAQDIIAEIGTDMTVFPTASHLVSWARWSPQVKQSAGKRKGSNATGRGNPYLGAALGESTASAGRTQSFLGAKYRRLSRRMPKKKALVATGNSMLTIMHALLSDPDVRYTDLGADYYEARTHTRRQARNHVNSLERLGYQVTIQALNPDTGEPLAAAT

SEQ ID NO: 290682 - protein, 341 aa, unidentified
MKLKRIGVDLAKRVFQLHGVDSHERVVLRRQLKRSQMLNFFRALEPTLVGMEACGGAHYWARELRKLGHEVKLMAPQFVKPYVKSGKNDAHDAEAICEAVSRASMRFVEVKSAEAQAMQALHRIRAWLVKSRTALVNETRGLLSEFGLAEAKLGVSALRRWIPQVLEDGENGLPGLVRELLHGLYEELRAADERIGAMDACINRQARTDERVQRLLKIEGVGPVTATAVIAGLGDGRQFRSGRDMAAALGIVPRQHSSGGKERLGAISKCGNPYLRTLLIHGARAAVNSSLKPTKTDARSRWIQALVARRNKNIATVALANKNARIMWSMLARAESYRPAH

SEQ ID NO: 290683 - protein, 370 aa, unidentified
MSEFSTKTLWVGLDVHQNSITAAVFQGDEPEPTIQRLSGDLNAARKLFRRLSQQGVPRACYEASGAGYVLQRALDHDGFHCEIIAPSLIPRKPGDRRKTDRLDAVHLARCYRAGQLTPVAVPDTEQEAVRQLLRGRLALQRHLTQLKHRIVRVLATHGYRFTGSKTNWTQSHRAWLATTTRALEGPLALIITHHLEHLEYLESQRNALDAAIERLALRPPWRAGAEALRCFRGIQILTAMTLLTEIGDIRRFASPRQLMAYTGLIPGERSSGDVQRRGPITKSGNAYLRRVLVEAAWHYRHRAGATLILQRQRQGQDPRAVAVAVRAQHRLYKRFWHLRETKHINKAVTAVARELCAFVWEALSALNREA

SEQ ID NO: 290684 - protein, 408 aa, unidentified
MELIYACCCGLDVHKRSIQACMRRLGPDGRIHQETRSFGTMTRDILEMADWLAAEGVTHVVMESTGVYWKPIYNLLEGRFTVLLVNAKHVKHVPGRKTDVKDCQWLAQLLQCGLLKGSFIPSRPQRDLRELTRHRTQLVAEKTRAANRIQKILEDANIKLASVASDILGASGRDMLRALIAGEQAPEKLADLARRQLRSKIAQLRLALQGQVTEHHRFVLGELLDHLEYLEGQIERFTRRIEEVSRPFASAIDLVTQVTGFEQRAAQNVVAEIGATMEPFPSEHHLASWSGVCPGSNESGGKRKSGKTTKGNRWLRTALVQSAWAATRKKDSYFQAQYRRLAARRGKKRAILAVAHSLLTVIYHMLKNGSTYQELGGDYFDKLNKNRLLPYFVRRIKDLGFQVTLEAA

SEQ ID NO: 290685 - protein, 366 aa, unidentified
MRKSLIYVGLDVHKSSIAVAMAKGKGRAEVVETISNDWTRLLKALGELGAVQRLRVCYEAGPTGYGLARRLQASGICCIVIAPSRIPKEPGQRVKTDPRDARKLAELLRAGLLTEVKIPEVETEAMRDLERARDDAKNAERVVRHQLDKFLLRHGRIWSKTKWTRLHWSWIKQQEFPAEASRRVLADHIRAVEEATSRVERLEKDIEELVESWSLAPLVRALQALRGVRLISAVILSAEVGDMAQFATASKTMAFLGQVPSEDSSGQRCRRGRITRTGNGHVRRILTEAAWNYRFRPRPSRTIRKRREGLPKEIVAVAEKAEQRLSRRYQHLINRGKSPPKVATAIARELTGFIWAIAREVRSPAA

SEQ ID NO: 290686 - protein, 427 aa, unidentified
MSETNYNKQVEKRQRIKTTTLMVGVDIGSEFNAVALMDKAGEVIGRYPKVYNSRRGFEYFQEIIKETKRQHGLEAVLVGMEPTGHYWRKIAFFGKEEGFDVKFVRTTAVKYQRELDESSSAKSDIRDAVTIANIIREGKYIDTVIEDSVYRQLRTLGRVRERIKRYHTGTQNALRAVIDDYFPELTKVFWSMRSRGLWALLEQSPFPQDVIAMGVKGLGEIIKKSSRRRKKAEEKAYKIYELAEESIGLKNIGIGDRYRLKMSLEELKRSSAQLEDIEVEMKKLLGEIPLAQYLLSIKGVGQLTAAIFFGELGNPEHFKHFKQIVKYAGYDPMERDSGLSIGRRKISKKGRWLLRKTLFFMGMGAIINNKFFRDYYDKKLETKNLCGQKLCKKEAMCAVIIKLIKVISALFRDRRMFAVNVEILAAA

SEQ ID NO: 290687 - protein, 361 aa, unidentified
MKNIPEIPHDVSTQNPLVWAGLDVAKATFDAAVCLGCPGTYTLRDLPVQTFPRTAQGACACVQWLDHILESADRTAVVRGVMEATGKYSQELAGWLVSQRPALAPAIINPQQASAFTKSLFLRNITDKTAARALACYGMERHPAPYAPPSQEQAVLRDLSRHRETLVAMRVAQENRMEEGSESVHVRQAQKRLLATIERQIKNVDKELRKQATAMANVHRDTRLLQTIYGVGFLTAVTILAELGDLRRFERGRQLSAFAGLSPRNIHSGTSVSKRPRLCKKGAPRLRRTLYLSAMVVIRGDNDLSDTYQHLIAQGKSRMAALGAVMRKLLLVMRAVLLSGKPYDPHYARCGKLSPKTAIST

SEQ ID NO: 290688 - protein, 412 aa, unidentified
MREYMAGVLRQTVPRRILFFGGLPMNNVGIDISKYKHDCFIVTDFGEVLNEGFSFENNAKGFSMLLDELLKSDKENLRIGFESTGNYSINLKLFLEKNGYSFMEINPVLVKEHIKSQSLRRTTTDKLSAMAIANYLISKEYLPHLKSFYHTFSLKQLTRLRSDLVHQRSRYLVQLTNVLDCVFPEFKPFFDGKFSATALFILTNYPSPEKIANMNVKSFDILRRKSRGKFSMDKFVMLKHLAKNTVGMYTDFYGIQMDALLDIYYQIDCKLSEVDAEITKIITEINPPTLSIKGVGEVSAAVIVSEFGDFSRFPNPGKMLAFAGLEPGYFQSGIAEHNGRMVKHGSAHLRCAILNCCRALRLHNEVFAAYYLKKIGEGKEHGVAVSHMAKKLIRLIFTLETKGERFDPAKLR

SEQ ID NO: 290689 - protein, 415 aa, unidentified
MNTGENARAIGRYIALDIHKEYVLAGGMNAAQEWVMPPRKVEMGKFREWSAANLRAGDAVVIETTTNVWDIYDIVAPLVMRAVVAHAGAVRQIAEARVKTDKEDVKRLIRLLIADIVPEVWVPPTQVREMRGMISYRNRLVKTNTMIRNRLHSLLHRHNLMLPEGGLTDKAWWEAQTISALEKIQMRQELAMLEEIGRHKTEVDAELARQSLGEVWGKQAVRLLQLSGFGVIVTMTVLSAIGDVSRFESANKLVGYSGLGAGVHDSGKEHIEKRITKSGRKELRWALVEAAWRAIRISPYWKAQYEKYLRRMRKPNQAIVVIARKLLVAVWHVLTKEETDIHASEEDLAYKMLVLAWDLDEEVRMGLTYKQFAKYALLKLGVENDITRFVRKDVPRRIAPKEEVLARMEELGLTC

SEQ ID NO: 290690 - protein, 314 aa, unidentified
MGMTQLDRIAGVDIAKAKFDVWAGGRHECLPYTDETLEALAQQLAKRGVETVAMEATGGLHRKAANYFCRQGFTVYVLNPRDVYHGNQARGLKAKTDRLDAEAIARHAARFGDELRPYAPPPEHVELLARLTARRRDVVKLISQEKCRLQQAFCDEERASCGRVLAALSDEEAALARRATELVQAHEDLRHRQEIIESMPGVGAVTAATLVAELPELGQEHRIKLAGLVGVAPLPDDSGQREGARHIRGGRAEVRKALWMPAMTAIRRNPVIKALYERLVRKGKPHKVALIACIRKMLTILNAMLRDGTKWKTA

SEQ ID NO: 290691 - protein, 411 aa, unidentified
MSEYAALVAIDWADQQHAVCLLDPSSGKREHSIVKHTPQALQEWALSLRQRFAGPIAVGLEQSRGPLIYALLQYDFFVLYPINPATLAKYRQAFSTAHGKDDYLLDLLEHHRNRLRPWRPDDEKTRTLRLLVEQRRRLVSDQTRFSNRLTALLKGYFPQVLGWFEDIRTVLVCDFLERWPELAALQRARPDTLNKFFRSHHSTSNSTNQRRLAEIKSALPLTNDAAVMTSSVINVKALVAQMKTVIAAISEYDRHIEALCQTHDDYHLFAALPAAGAVHAARLTAALGSDRSRWQSADELVTFAGIAPLIERSGKQFRIRWRYFCPKFFRQTFHEYAAQSIQDSFWARAYYSSQRAKGKDHHAAVRALAFKWMRVIWKCWQTRTPYNEVIYLESLRKKGSSLLKFAADHQA

SEQ ID NO: 290692 - protein, 412 aa, unidentified
MTVTNQFAAHVGLDSADKKHDVCVQFKNGEHVFHVIEHTAEALDVWLTELHEKVKGRIAIALELKKGPVVYALQKYPFITVFPVHALSLARYRQAFSPSGAKDDPQDAELALELMLRYPQKIKAIEPDNADSRLLQQLVEQSRQLVEDKRRFVNRIINTLKQYYPQPLEWFSHRGSLLLCELIIRWPSLQQLKRARRDTIRNFLNAKGGHAMALTEQRVVSIDNAVPLTTDSCVIEANALMATALATQIKVVSEIIKTYDDRIETLFDTLPDAALFKSLPGMGPCMGPRMLAALGDNRDRFNSAEEIQNYAGIAPVTERSGQKSWVHWRWQCAKFVRQTFVEWTAKTVNSSYWARLYYQGLREKGKSHQSAIRALAFKWIRIIYRCWKTRIQYGEAKYLLALEARHSPLLKP

SEQ ID NO: 290693 - protein, 391 aa, unidentified
MTFFIGIDIAKYKHDCFIVNHEGEVIRSSFSFTNDRAGFAYLKEILSTLDSNQTMRIGFEATGHYAMNLKVFLEENGFTYMQFNPFLIKRFTQATTLRKTKTDKVDARVIATYLLSVDYKPYPPQSYHIKNLKSLTRDRDDLIKLRSRQLVKLTNLLDLIFPEFKPFFGHSLTSSTCLYLLDHYLIPSKIARMNLDSYHKMTFELRRTLSYARFCTLKQLARDTIGSEDPTLTYLLKKALELYHTIDDQITEVQRLIEQTYSQLDSHIHTISGIGVQSAACILAEYESIDRFDNSDQMLAFAGLEPSRKQSGESESKGKMVKHGSSLLRQTIMNVAATSIIHNPILYEFYRKKRNEGKLHRVALTHVAKRIVRIIFHLEKHHLDFDLAKMR

SEQ ID NO: 290694 - protein, 336 aa, unidentified
MLIIGCDYHPGFQQIAFVDTETGEADERRLTHREEAEQFYRTLKTGKVRIGMEASGHARWFERLLIELQFELWIGDAAEIRTKRVRKQKTDRQDAQLLLKLLMEDRFPRIWVPDAENRDLRQLLWHRHRLVQMRTRVMNQLHVVALNEGVRRKKALWRPAGRSELESLVLAPWALRRRRDLLDLFDQLTPKIHNLTRALEEEVEKRPIARRLMTHPGVGVLTALAFELVIGTPARFGCGKQIASYVGLVPTEESSGDRRRLGHISKQGNATVRSQPQWRSKFFHLAMRRGRKIAKVAMARKLAVHLYWMWRQDCDYGQFEKLGSHAGEPVHRHGAQ

SEQ ID NO: 290695 - protein, 422 aa, unidentified
MVLKGVPMALKIVYKICCGIDVHKNFVVACIASTDGKGVTTYESHRFSTYTRGLKNLLQWLLKHNCKDVCMESTGKYWIPVYNVLENDCTIVLAHPKYVKAIRGKKTDKKDAKWIADLFKHDLVTGSFMPPADIRQLRDLMRYRFKLTCFKSSEKNRLQNCLTVSNIQLGNVVSDTFGKSAQAILDKLLENPADTSFDLEPLVYKSLKKKLPELRDAIDGYITPEQAGKLKVIKAHYENLESRKAELEELILALAAPYQQELAILQTAPGIRSDFTAIGIISEIGTNMEAFPSAKHLCSWAGLAPTNNESAGKKKSVRVSKAGCYIKPLLVQCANAVIKSNKHPEFRNRYLRIKKRRGHKKAIIAVARMLLTALYHMLKNGENYNAELYRKSEVPPVDREITVEQAIIIARNQGYKIKSATA

SEQ ID NO: 290696 - protein, 424 aa, unidentified
MAGVVIGIDPHKGSHTAVALDVHEKQLGRLRVRASSRQVDGLLEWASGWPRRRWAIEGARGLGQLLAQQLIASGERVLDVPPKLAARVRLLDSGQINKNDPNDARSVAVAALRAHELPELAAEDHAMVMRVWARRYHDLARLRTQVVCRLHAVLCELVPGGVRKYLRASQATDVLDRIVADSPVAQAKLELARELVADLERIDAQRREAKRRTARAVAATRTSINDVYGVGPIVAGTVLGYVRDIRRFPTRDRFASYNGTAPIEVSSGDRKIYRLSRRGNRQLNHAIHMAAISQIRHHDSEGRAYYEKKIAEGMTGKTALRALKRKISDGLYARMIDDARRLAAKDPGGHSGNDSASSAAGSHPEKPALRKSHSRATANSKTGTGQRPLTLRPAPDRRRTSRRAAGVQVEPRPGPHRGRGQDRP

SEQ ID NO: 290697 - protein, 488 aa, unidentified
MQKAITYVGLDVHKDSIVVSLAEAGLRGRLREVREYGKVLNTPAALKAMATKLAAGGNELRFCYEAGPCGYGVQRQLSAMGHHCAVVAPSLVPRKPGERIKTDRRDAAKLAKLHRASELTPVWVPDPAHEAMRDLVRARLAAVRNIREARQQLSGFLLRNGYHYHRHPWTLMHRRWMADLKFDQPLHYIVLQDCIAAVEASEQRRDRLEAGIIAALPEWSLAPLVETLQALRGIALVSATTLVAELGDIARFSNPRQLMAYLGLVPSEHSSGRSRRQGGITKAGNAAARRMLIEAAWSYRFPARISRYQLSQQKRLPKLIRDIAWKAQERLCRRHRKLMRAGKPKTVVCAAIARELTGFVWAIATETSPANGKKGTGKPATMGAVSLDASHQISMSILAGMDKFLSTRAFGPPFGDCGVDRNSPPSWLASISLPEMRASRLTHARGRNFQEEKRNNPQSNAEQGWGHGHGRRTLEGTISRVIRCWILD

SEQ ID NO: 290698 - protein, 389 aa, unidentified
MLARKRFPEGLDGVTRLHALICEHAPSRWELLEPDQAAAMVKVGIETERGPWVAALVAAGYEVFPINPMSVARYRERHSTSGAKSDTADAHLLAEIVRLDRAHHRPVAGDSTQGEAIKLVARAHQSLIWDRTRHVLRLRCALRDFFPAALVAFGDLDAVDTLELLAKAPDPDRAAHLSRATITAALTRANRRGAQAKAIQVQTILGAGELRQPPLVQSAYATIVSAEVALITSLNAQIQELAVVVGAHFGRHPDAEIYTSQPGLGVILAARILGEFGDDPHRYADAKARKNYAGTSPITRASGTRKVVLARYARNRRLGDALQQWAFCCLRGSPGARAYYKELRERRIGHQAALRQVANRLVGILHGCLKTHTPYNEAVAWQHHNTAAA

SEQ ID NO: 290699 - protein, 265 aa, unidentified
MMILGIDIAKDKFDAALYKGKDLVATGQFDNTPAGFKKLSKWLKNKAADQVWACMEATGRYGEALALYLHQADHQVSMVNPSRIKKYAESRLQRNKTDKLDAKVIADFCRTQEPRLWTPPAPEKRQLQEIVRRRSALVKERTREKNRLKSGLESDIVMESIRAHLDFLNEQIAKLDKQIQSHISQHSALKRERKLLTSINGIGIKTAAVILGELPDVECFDNSGQAVAYAGLSPQQHQSGSSVHKKTRLTKIGNQRLKTALYFPA

SEQ ID NO: 290700 - protein, 341 aa, unidentified
MEKTLSVLGIDLAQQVFHLVGMDAHGTIVVRKRLYRAQVMAFIAQLPPTLIGMEACGGAHDWARCLREHGHEVRLMAPQCVTPYRQANKNDRRDAEAIAEAMTRPTMRFVPVTSVAQQDLQALHRVRERLMKARTALINETRGLRHAYGIIVPQGAAPFRQHVLEQLTTEDAKLPPHSLGLFRQLLEELDALEARVATYEAQLAQVAQTHPVCQRLMTIPGLGALTAPALVAAVSETAQCKNGRQCAAWLGLGPRQHSPGGTARLLGISQHGESSLRTLLVHGARSCLRGVGQKRDRRSQWGQSLMDRRGWNKAAVALANKQARGAWVLMGTEQVSRVAEA

SEQ ID NO: 290701 - protein, 323 aa, unidentified
MQGQNSPERSAQPGVYVGVDVCKDWLDVYLHPIGQKFRVANTPEGLKALKRRIAELPVELIVMEATGKFHRQAHRTLHAAGFAVAIVNPLRARLFAEAAGQLAKTDRLDARGLALMGQALEPSAIAPAPEALEALQELARARSAAKADQTALSNRRGASQTAFLKAELGRRLKTLAGHIERLDAEIQRRIGVDPALKRRFDILLTIPGVGPVAALALVIGLPELGACSAKAASLLAGLAPLACDSGEKAGERHIKGGRAFVRTGLYLAAIAAARFNPQLRDDYNRLRDAGKKAKVAITAIMRKLVVLANVLIKEDRPWKPIHA

SEQ ID NO: 290702 - protein, 316 aa, unidentified
MFIGIDVAKAELVIAARPSGERWTVANDERGAKTLVDRLMRDKPALIVLEATGGYELLVVAALAAAALPVVVVNPRQVRDFARATGQLAKTDRIDADVLAFFAERVRPAVRPIADAEARELEALLARRRQLLEMLQAEKNRAGQVFGRGHRVVKKSLKAHIAYLERELRVTDTDLREMVRASPAWRERDDVLQSTPGVGRVVSLTMLADLPELGRLSRREIAKLVGVAPLSRDSGTFRGRRFVQGGRATVRAALYMAALVATRRNTVIKAFYQRLVTAGKPKKLALVACMRKLLTMLNVMVRTNTRWKSLEPCALA

SEQ ID NO: 290703 - protein, 350 aa, unidentified
MLIIGCDFHTRYQQIAMMDTLTGELTEQRLGHESGEARAFYQGLPSPVRVGIEATGPIHWFERLLAEFGHELWIGDSARIRASEVRKQKTDERDAALILELLLANRFPRIWVPTPAERDLRQLLWHRHKLVRMRTMLGNQLQFLAMSQGLCRKKKLFNKKGRSELLQLSLGPWASQRREELLKLLDGLAPVIAELDLAVWQEAQRREDAVLLMTHPGIGPNTALAFVLAIGPVSRFSCSKKVASYFGLNPSEESSGGRRRLGAISKQGNTMVRWLLIETVHHAVRQDPELRQDYQRLKFRRGHAVAKVAIARKLAVRMYWMLRRGAAYAQLVRRQGRPGATLVEATPSLG

SEQ ID NO: 290704 - protein, 411 aa, unidentified
MGKVFCGIDWAERHHDVALVDEHGKLVAKRRIHETREGWQQLLDLLAAAGDSADAPIPVAIETPRGLLVAAMRATGRPVYAINPMSVARYRDRHTVARSKSDHADAVVLANILRTDAHVHRTLPADSDLARAIAVLARAHQDATWRRTKASNELRSLLREYYPAFLDAFASRKDFLVSADARAVLAIAATPATAAKLTKTRIAAVLRRGGRKRGVDDLAGELHAALRVSHLRQQPLVEQAMGTAALALLAALDTACTNVDQLGEACAEAFAQHPDYEIITSFPGLGDLTGARVLAELGADRSRFADARAVKAYAGSAPITRASGRSISITHRRIKNDRLAAAGFVWAFIATNNSPGARAHYDRRRQDHGDRHAAALRNLFNRFLGCLHQCLTTGQTYNEAKAFPNPIEATA

SEQ ID NO: 290705 - protein, 345 aa, unidentified
MIVIGADTHKSSHSFSAVGEHTGRVEAERSFGADERGILGPLRWAKRVGEARVWALEDCGHVSGRRERFLVASGECVIRVPPKLMGQSRRAERDAGKSDVIDARAIARAVLKDGVESFPMAFLDERAMEIRLLGDHRADLVAERTRMQSRLRWHLVELDDAFEATIPAGGLDRGVWLDRVDRRLRRCVQTARVRVARDELRRIRELTRTANALERELKALIAEHRPELLDWEGCGVLSAATLIGRTAGAARFATDGHFARQAGVAPIPASSGRKNRQRLNRGGDRQLNAALHRIAVAQGRCHPPAIAFLARKQGEGKSRIEALRCLKRHLARHARQTLRAPHPDP

SEQ ID NO: 290706 - protein, 379 aa, unidentified
MIGPGCDNNLDRPSLRSGTAVPSLTPLREKGMTMTIVEAARAVTGGVDTHLDVHVAAALDPLGALLGTERFETDPGGYKALLTWLESFGQVTKVGVEGTGSYGAGLARFLRRADVEVIEVDRPNRAERRRSGKSDPLDAVEAARAALGGRATSISKSKDGAVEAIRVLVVAKRSARQARVKAVVQMRHLVITAPDQLRCRLKGLSVAGLVAESARLRPSRSGDPVMAAHKASLCSLARRIQGLKDEIAELDERIERLLVRTAPELLSRFGVGPDTAAALLVSAGDNPERLHSEAAWAHLCGVAPIPASSGKSNRHRLDRGGDRHANSALWRIVMVRIAHDPETTAYFERKVKEGRSKRDVIRLLKRYVARELYRCLPRG

SEQ ID NO: 290707 - protein, 381 aa, unidentified
MQSNHTVPTILVAIELSTATWLVAVRVPGSEKPHLHRVDGGDTAALLALIASVRARAAHQLNAEIGIVCCFEAGRDGFWLHRLLTTRGITNYVLEPTSVLVNRRARRAKTDRLDAEGMLRVLAAYLRGDHQVCSMVRVPTPDEEDAKRMHRARENLVQERLRIENRIEALLFTQGIRKRPSLRSWERDLAILRTGDGREIPRHLLAELDRLRRRLVMTLELIREVEAERDQATKTKPQDQACRKIAALCRIRGISDNFAAVLTREVFYRSFDNRRQIASYVGITPMPYQSGGIDRDRRISRAGNPRARTTMIQLAWLWLRYQPGSELARWFRERVGTLAGRTRRIAIVAMARKLLIALWRYTESGVIPAGAEIRAETPVAA

SEQ ID NO: 290708 - protein, 377 aa, unidentified
MNLVNLIVKKQLLTKNQKLMSSKVKLLDFQGQNIYVGIDAHLKNWRVTILLEDISHKTFCMDSQSDILHKYLIRNFPGGNYFSAYEAGICGFSIHRELEKHGIKNIIVNPADIPTTDKERKQKEDKRDSRKIARSLRNSELEAIYIPSEKTIELRGLVRYRKTVVKEISRNKNRIKTFLYFHGIKVPAELDSASRYWAANFSIWLETLRLTTNFGHTVLSSTLETVRHLRKVLLKVNRALRDLSKTDDYVQMVYYLTSVPGIGLITAMTLLSELENIYRFKSLDKLCSYIGLVPTTNSSSENERVGGITPRSNKALRCALIESAWIAARNDPALALAFSKLCKRMKANKAIIRIAKKLLSRIRFVLINETKYVYSIA

SEQ ID NO: 290709 - protein, 347 aa, unidentified
MSHFVGLDVGKRLTSVCVMDAAGTIVQEAEVETSPKALLAFLRGRGRRYRRIGLEAGDMAPWLYHGLVKAGLPAIPIDALHAHRALSVRRNKTDRNDAQGIAELMRTSSYKSVHVKSDEARSLRALLTARGALLEKRRDLEMVIRSILRGFGLKLPLRAPRTFDADALAFARRDATLWGTLEPLFAARDALGEQARLLERRVHEAARRDPVCRRLMTAPGVGEITALTFRATVDEPRRFSSSRSVGVHFGLTPRTFRSATTETRGGISHWGDAATRKVLFMAALTVFKMKQADTPLHRWARSLAGRMKAKKAVVAVARKLAVVMHRMWVDGTDFGEIGSGGVAMTHP

SEQ ID NO: 290710 - protein, 345 aa, unidentified
MGISTIGLDLAKNVFQVHGVDERGSALLRKQLRRDQVVPFFARLQPCVIGIEACSGAHYWAGKLRELGHTVRMMSPQFVTPYVKTNKNDAIDAEAICEAVARPNMRFVAAKTPERLAVLALHTARAGFVKARTAQANQIRGLLAEFGLVIPQGIRNVYKRVPALIERAETWLPGRFRALLERLLEHLKRLDRQVQELEREIVGWHRESEISRRLEAIPGIGPITASALVASAGDTLNLKNARQFAAWLGLVPRQRSSGGKSQLLGISKRGDVYLRTLLIHGGRTVVRYAAAHTGKASSWLTHLIGRRHANVAAVAVANKNARVAWALLASGRRYDTSGKARAAAA

SEQ ID NO: 290711 - protein, 305 aa, unidentified
MENNEEVYIGIDVSKEFLDIADGVHHYQIVNDAKSVEQFLNKYKQQKVFVCAEYTGPYHYALAEICCKKKVTLFLCDGFKISHAKRAAGWRAKTDKGDADFLRAYAMKNKLKPYVMSKTLDEIKGLINFQSLKIKHLRSLKNLRDSVTSTQLAKDLEKEICATKTLVDRIQEEINKLINEDIELRKKKEILCSVYGIGDRIATELIVSLPELGHCNRRQIASLCGLAPFNNESGKYKGHRCIKGGRFRVREALYMAAIVSVRKESFYTSAYRKMVDDLKKPKKVALIMIARKLVCYLNSLMKRAG

SEQ ID NO: 290712 - protein, 351 aa, unidentified
MYTLGIDLHKKSSVWVLIDEQRTELWKENVPCHPEYISIAVKKIPVSPKEIQVALEPVAGWRWVSRQLEEAGMKVHIAHPRKIYLIAESTKKNDAEDSRTLANLLHSGFFPEAHRSSEEIYQLRLLLRERNFIVRERTSVKNQLQGIATTQGLHLVKSGNPLHKKGKEGIMAGNNFVLKELHHLEEALEKRIVPFDKKLQGEVLKYPIASILRTIPGVGIVTALTVISEVDDFTRFKSGKHLTSFAGLVPRQRSSGDVVRYGAITHAGSAPLRTALVETAMRIRESNALELFAFVKRLTPICGAKKARVALARKLLAIMWKLATTNTVYNPKLLFSSCTTKVSDLDTASGA

SEQ ID NO: 290713 - protein, 444 aa, unidentified
MAGSGMILIREVADAPVIMGISKPAGLKSPCGEVKIVNPLFVGIDVSSKNNVAYLMKPDGSKHSSFSVQNNLGGAKLLSERIVSALGSMQLERVVIGLEATSIYGDSLVYALREDGRLGRFQRKIHVLNPKQVRKFKEAYSDLPKNDWVDAFVIADHLRFGRINREVYMDDYRYKALQTLTRARFDVIQNLTREKQRFANYLFLKCSGMAQDKDIQNTSATTIALMEHFETVDDLANADLEELTAFITETGRGKFADPDATAKAVRAAAKGSYRLPKTVNDTVNQAMAVSIASMRALKGQVKVLDKAIEQQFEIIPNTLTSIPGIGKVYSAGIIAEIGDIHRFDSQASVAKYAGLVWNRSQSGDFEAEHSRMIKSGNRYLRYYLLEAANSVRRCDSEFRRYYDLKFKEVNKYQHKRALALTARKLVRLVFRLLKDNRLYIPPED

SEQ ID NO: 290714 - protein, 315 aa, unidentified
MSHEVFVGIDVSKASLDVAVFSPQRCCRVPNDQAGWDQLIAWLGEPQGCLVVMEATGGYQAAAAAALATAGFDVVVANPRKVRDHARSRGLLAKTDKLDAKMIADFAERNRPPVRALPDEKTRLLQALMARRRQLLEMLTMEKNRLQQAPKALAKQIQKHIRWLEKQLADLDDDLDEQVRQSDIWREKDDILRTAPGVGKATSHTLLADLPELGEVSGKRIASLVGVAPFNRDSGKLQGHRTIWGGRASVRNALYMATVSAIRCNPVIRKHYRHLRDAGKAGKVAIVACMRKLLVILNTMIKEHKPWDPKLPETA

SEQ ID NO: 290715 - protein, 365 aa, unidentified
MQKISTVRANVKNIFKGQLTIGLDLGDRSSAYCILNEAGEIVFEHKLATTPDAMQQVFGSMPRSRMAMETGTHSPWVSRLLAALGHEVIVGHAQKVRLITKSRRKDDRLDARTLARLARIDPELLSPVKHRSAQAQLHLTEIRARAALVSTRTALVNAARGLVKSYGERLRKCHTRQVGREMAGTLSMGLREALEPLLREVESLNERIQEYDRRIEKMAKETYPETALLKQVKGVGDLIATAYVLTIEDPHRFRKSRDAGCFAGLQPGRRNSGKSEPQMRISKEGDEYLRTLLVQGAHYILGPFGEDCDLRRWGQKLSARGGKNAKKRAVVAVARKLAVLLHRLWVSGEVYEPLRNSQKAMSTAA

SEQ ID NO: 290716 - protein, 359 aa, unidentified
MKGKSKELNFEGQKVFVGIDVHLTSWKVTILLEQLTHKTFSQDPRAETLASYLRRTFPGAEYYSAYEAGFCGYSVHRSLEACGIHNIVVNPADIPTADKEKKQKEDSRDSRKIARCLRTGELEAIHVPDRAIEELRGLVRYRKTLVKEISRNKTRVKASLHFYGIEIPAELDSASRHWSANFSKWLATIRLSTDYGHTVIADTVDTVDHLRSTLLKINKQLRTIAKSEAYAHKINCLKSIPGVGLVVSMTLLTELEQINRFKNLDKLCAYIGLIPSTNSSGDKDRTGSITPRSNKPLRGVLIESAWVASRIDPALALAYSNLCKRMKPNRAIIRIAKKLLNRIRFVLKNETEYEYAVVK

SEQ ID NO: 290717 - protein, 312 aa, unidentified
MTNLICGVDVSATTLEARVGRDGPVERFARNVAGIAALAAFCKQYQVALVAMEATGGYERLPFGLLWAAAVPAAIVNPRAVRRFAEAMGILEKTDRIDTGVIAWFAEVKQIAPQPPASDRQQRLAALVTRLRQLTELRTAQANQRRLVTDDAALAAFDELLILITRQSRSLAAHIAQLIDSDPLWHKLDAAFRQIKGVADRTVARIMAEMPEIGTFSNKAAAKLGGLAPIARDSGTLRGKRAVRGGRSGVRAILFVVADVVRRYDPDFADCHRRLTQAGKPKKLIRVALARKLLVRLNAKARDVRRELANAS

SEQ ID NO: 290718 - protein, 312 aa, unidentified
MKITTIGIDLAKSVFQVHGVDARGKTVLKKQLKRDQVATFFINLEPCLIGMEACGSAHHWGRRLQAMGHTVQLMAPQFVKPYVKSNKNDATDAEAICEAVARPNMRFVPLKSIDQQSVLALHRARQGFVKSRTAQANQIRGLLAEFGLILPQGIHHLATRVPQLIEDASNELTDAFRFLTQRLLEQIPGIGPITASALVASMGDAKQFRNGRQVAAWLGLVPKQHSSGGKPVLLGMSKRGDSYLRTLLIHGARAVIVQAQRKAHGDSWLLKLIQRRNTNVAAVALANKNARVIWALLAHDREFRVDYEPVAS

SEQ ID NO: 290719 - protein, 345 aa, unidentified
MKEYAGIDVSLEYSSVCVVDADGRIVREAKVLSEPDALIAWFGEHGVAMERIGLEAGPLSQWLHAGMTKADLAVELIETRHVRTAFKTMPVKTDKKDARGIAQLMRLGWFRAVHCKSLPAQEVRALLTARKLIQGKLHDIEMSIRGILRGFGLKVGPTTRRTYAARIRELIEGHPTLEAIAASLLKVRDALDDEFAGFERKLRTMARQDDNARRLMTTPGVGVVVALTFVSAVDAPERFRSSRAVGPHFGPTPKKYQSGETDYSGRISKIGDVGVRTALYEAANVILTRPVKGSDLKTWALAVARRAGPRKARVALARKLAVVLHHMLRDGTDFIPHRAAPAMAT

SEQ ID NO: 290720 - protein, 497 aa, unidentified
MELTGEPVLQRAAFLLAESDRLLQTAPRPSGSQATMRLVAASSISLARLPIHHEFSLVLTGRYSRSCPLVNAHAIGVRRETTRMSESSFPMPAPAPLAYVVGIDIGMESCMMCCLTMEKRQVIKSSSFTNKAEGFSNLFERLERLGTPADQILVGLEATSRYGENLYHALLSRGYRVCLLHPAQMHAFAQQRGLRAKTDRVDATTIARALLSDDARFGYVPSEQVATYRELVRLQQQLSDDVVRYKNEVHALLVVLFPEFTQVFADPTRPTALAFLKRYPSAQAVAQTEIDTLSQVLRELAPKRYGQRTARKLVDLAKRTISSGVALAARSTSLRILCDQLEHTQANLKQLQQEIEALLDQDPKVKGVLLIPEFGVMTVAVLRAELGDLDRFARMDQVVAYVGLDLQVKQSGKWKGQTKLSKRGSGRVRRILYLAALRSIWLQGSPFGAYYHRLVDRGMKKGMAVVAVMRKLLIVAAHLIQTQQVYEPGKVAAPSVG

SEQ ID NO: 290721 - protein, 404 aa, unidentified
MERVYVGIDWADDHHDIHVTNDSAVALDSFRIPHSYEGMEKLRKQLGKLSSKPEDILVAIESHHGLLIYALLEAGYAVYPVNPKAMDRYRDRYRMSSSKSDPQDAMVLANILRTDLHLYKPLPKEIVADARLRELTRAHKSLMQQRVKLVNQLTTQLKTYYPVSLHLFSRLDQEITLAFLEHYPTPEKAAAASLEELRKFFHQQGYTCPCKVPFIYRSLQQPALRAPTEMEDIHQTIVLSLVPVLRSLVTEIEKLVNEISKEFKQDPACEIFSSLPAGEITAARLNGELGSDGSRYPTHEYLQTAAGTAPVTRRSGKTIVVFFRWQCNKHLRATFQDLARESVKRCAWAKQYFASQMKLGHKPSRAYRALANRWAAIIWKMLQESQRFNQARLEKGLGKTLSAV

SEQ ID NO: 290722 - protein, 342 aa, unidentified
MGGVTTVGLDIGKSVFQVHGVDAEGAVVIQRRLTRARVLPFFEKLAPCIVGIEACATAHYWARQLQGLGHEVRLMPPAYVKPYVKRQKNDAADAEAICEAVTRPSMRFVEVKTPEQQSALVLHRTRQVLIRQRTQITNATRGHMGEFGLVAPLGRRGLQTLIEIIGDEADQRIPEAARGCLAMLLAQLELVNAQILETDRQIIASARATETGRRLMGIPGVGPLLASALVTTIPDPHAFRSGRNLAAWIGLVPKQNSSGGKERLGGISKQGNRYLRQMLVVGAFAVIRYAERHGSRRPWLVQLMARRTAKVAAVALANKTARMIWAIMTSGQPYREPRMARA

SEQ ID NO: 290723 - protein, 354 aa, unidentified
MTSNQNTDTVPGARAGVIKLGLDIHASLIVVVRQVDGQASQPPQRFSEEAFIGFVHRQLAASEAVHSCYEAGPFGYVLHRRLTALGVHNLVVRPRDWSTYGERVKTDARDAGALCSSLDRHLAGNRGALAVVRVPSEAEEAARGVSRQRQSLVCDRVRFTLRGKGIARLRGITLPPEWWRERTFARLDLPADLREQLSALRRVILSIDVEAVALTTQIEAAAPAALPAYLGPLTWEILRREVGDWSRFANRRQVASYTGLCPSEHSSGASRLQGSINRHGNPRLRHILVEAAWRLLRHQPAYRPVTKWREAFMDQGRPGRRKKIVVAIARQLAVDLWRLATGRTTPAQLGLVVT

SEQ ID NO: 290724 - protein, 370 aa, unidentified
MSVRRILAKTINTDLEYEAIGIDLAKNCVSVALLTTDGEVVCIDRLDYSELEKSAQVLCPTTFAMEPCTEMNYLVQKLEAWGHRCLVIGGKNVQNYVENHFSGQKTDLNDAQALAFLAQDTQLRTIKAKDVEQQKYASLTTLREQYIKQYRQTIVSLKGICQAWGLNISKGISGKARLKDLIENHAAFPEELKESLVDMVTHAQTAQKALNKITKTLEELAKNDKLCQLIQTIPGLGPICSCRLRATIGDIKRFKNPKDFPAYYGLVPRSIATGHNEKKGRITHRGDKTMRSLMVQGAGSVINMATRGKLKSKQLTKWILKKQKEKMPWGKLVCAVAAKLLRIVRAVLISNKPYNSKIAGVAKCSLPKGS

SEQ ID NO: 290725 - protein, 357 aa, unidentified
MGKSIIDTSSVTRVGLDLAKRVFRIHAVDATGSVVIARSVNRRTLLKFFDALPRCVVAMEACSSAHHWGRQLLEFGFTVRLIPPAHVKPYVRRSKNDAADAAAICEAAGRPGQRFVPVRSVENQAALMRHRVRELLVGQRTAALNALRGHLGEIGVVAAQGAQNAYALKEVVDEGFDENGEFVVPGCVRLALAPLVRQIDALDEATEAIDKELEASAKAGETARRLMTIPGVGPVTVSALLATVQDFGAFSSGREFAAFLGLTPREHSSGGKPRLGRITKMGDRYLRKLLVVGACSVLGHRKGHSDALRRWASGMLERKTVKYKFKLTAVALANKLARIVYALATKGGHYDDRPVAA

SEQ ID NO: 290726 - protein, 319 aa, unidentified
MLVGIDVAKAELVVAVRPSGERWTVANDERGVRTLVERLRVEAPELIVLEATGGYELLCVAALAALALPVVVVNPRQVRDFAKSTGQLAKTDRIDADILALFAERVRPAVRTLPDTDAQELEALLARRRQLLEMLGAERNRLGQVFGRGKQQVKKSLKGHIAFLERELRIADTDLGDMVRESGAWREKDDLLQSVPGVGRVVSFTLLADLPELGRLSRREIAKLVGVAPMSRDSGTFRGRRFVQGGRASVRAVLYMGALVASKRNAVIRAFYQRLLAAGKPKKLALVACMRKLLTILNTMMRTGQRWSLDQSSPVLISA

SEQ ID NO: 290727 - protein, 352 aa, unidentified
MTMLADLVELVIGVDTHADTHTAAVVTVNTGALVETLTVTADPDGYDDLLAAADRHGGLRAFAIEGAGGYGAGLARHLAAGGEVVVELDRPARPTRRGGRKSDPIDAERAARDALARTHLAVPKSGPQRAALAALQLARRSAVQAAGDAGRQLRALVITAPEAVRARFRGHRSTRALLTVALALRPTASRGDVEVVTTMTVLRELARRVRDLETEAAAHEKTIAQIVRSWRPDLLALPGVGPINAATVLVAWSHPGRCRDDAAFAMLAGVAPIPASSGKTVRHRLNRAGDRQLNRALHNIAVCRQRYHQPTRDYTERRHNQAKTDREIRRCLKRYIARQLYRQLEQHPATTA

SEQ ID NO: 290728 - protein, 465 aa, unidentified
MEKHYELFVGIDVSKGKADAAILQVSNLRSVKPKFLRKKLSFKFTRSDVLSFLSAVRSKYDDNCTHVTFGLEVTGIYSNNVYSFIKSQLNDLEEIRFLNTEFVNKWRKTHNIAKSDPLDAQTISNIIGTDPDVRFVNHVAFDNEKGYQDLKALIHRYYQVKKTYSQEINRLISTCDVYFPELQYVFEPKSAAFPAILSSYPTTQDIINASKSEVFDCAYEATKHRVTLDKIDMLFNYCNDTLTDFNISYTSRSIILDLTASVTRLKSLLKELEKKIKVLASMFDVYELLLTITGCGPITAATVIAETGDISRFHSADKFVSYAGASPRIDRSGKSVETIGRISKKGSKYLRHALYMIAEFARRHNPVLKAQFDRIKNGNKKRHRLAVIAIANKIARYIYSTIKNKSSFIITYESLMRLSEVTRNTFFQNITTKFSKRIRRQIYQYSDVNGEIHQFVYIQNKDIEI

SEQ ID NO: 290729 - protein, 344 aa, unidentified
MKITTIGIDLAKNVFQIHAVDERGKAVLKKQLKRDQVAAFFVNLPPCLVGMEACGSAHHWARKLEGFGHTVKLMAPQFVKPYVKTNKNDAADAEAICEAVARPNMRFVPIKNIGQQSVLALHRVRQGFVKARTAQANQIRGLLGEFGLIIPQGIAHIAKRVPELIEDASNELTGSFRLLVQRLMDHLKELDRQVGELEVQIKTWHRASEASCKLEIIPGIGPITASALVASVGNAKNFDDGRQLAAWLGLVPKQHSSGGKSTLLGISKRGDSYLRTLLIHGARSVIFRAQQKADKSGWLHKLLERRNPNVAAVALASKNARIIWALLANDRNFQADYARPLATA

SEQ ID NO: 290730 - protein, 338 aa, unidentified
MNKLNIIGIDLAKNVIQLHGNDHHGHTRFTRKLKRKEVLAFMVNQPQSLVAIEACGGAHYWARALQAQGHEVKMIHPQYVKPFVQVNKNDARDAQAIAEAAARPAMPTVAIKSIEQQDIQAIHRVRERLVKEKTAISNELRGLLGEYGIVMPQGHKSIRETVLSILENAENGMSMEGRSIINDLREQWLDREERISQYDNKLKIIAKENDVCVRLQTIPGIGPVNATLLYSHTGDHNHFASGRHLSASLGLVPRQHASGGKENLLGISKQGNKHVHKQLVHGARAAYKVLLKEDNTSRLGLWVKRMEGKHPNKIIVALANKMARIVWALMKNETVYQA

SEQ ID NO: 290731 - protein, 366 aa, unidentified
MKKISTMQAFSNEILKEQKLTIGVDLGDRCSFYCVLDEAGKIILEQKVATTPEAMKQSFGKIPRSLIALETGTHSPWVSRLLTELGHEVIVAHAQKVELITKSNRKDDRHDARTLARLARIDPELLGPVRHRSAKAQIHLTVIRARAELVSARTALVNAARGLVKPFGERLPKCGTQQVSRELSAGLSAELRDVLEPLLKEIESLNERIQEYDERMEKMAKEVYPEVSLLKQVKGVGTQIALTYVLTIEDPYRFPKSRAVGCFLGLRPGRRNSGESEPQKKISKEGDRYLRTMMVQGAHYILGPFGEDSDLRRWGLKLTERGGKNAKKRAVVAVARKLAILLHRLWVSGEVYEPLRNSQKAMRVVA

SEQ ID NO: 290732 - protein, 413 aa, unidentified
MLDTTTFIGLDVHARSIKAVSLDVMTGEVRAATFGYDAGAVAEWVRSVDPGARCVYESGVTGFDLQKRLSGLGVDCVVGAVSKMIKPSADRRRKNDRNDAEFLARMLSVGNVVEVWVPDDECEAARDLTRALEDARDDLSRSKQRLSKFLLRHGLVFDERTPTGRRKGNWTRAHWSWIESIRFAERADEEVLAYYVDAVRRAAEDKARLEGLVEAEARKPRWRKRVDSLRCLKGVDTATAADLVFEAGEFSRFGNARSFAAWVGLTPSEHSSGESDRRGAITKAGNKHLRKTLVEAARHYLTCSGRPKDLARGQAPDRVARRHAAKGVRRPVERREALLARGVHGRTSPRRASSPAGYGRSASWPRRRRGGRSPAHKPVTPEAVRSEAVEANLRSLFCERPGRHTRAQTVGST

SEQ ID NO: 290733 - protein, 370 aa, unidentified
MCHATVMSADGTIVSEHRFPTNVKYLETVVLGLPEEAKFAIEAGTPTKKLFWHLKDMGRDVRMAHPVEVRRMMGTKKKTDREDSAFLANLLRMNALPEAYVPDPKADEDRQLLRYRKDLGKKTTVVKNQIHALLARVGFSTHLTDIFGKEGREMLRMLEMDRQQRYLLDCYLKQIDLLTSQIEDVERAIAKMAQDNPAARALVHIKGIDFYSALVILSEIGDITRFPSSKHLTSYAGLVPRIHQSGDVARTGRIHKEGPKLLRATMIQCANAAIRGPGRFQRFYKRLKKRKDRGKAIVAVARKMLATVFVLLTRGCDYVEIDEKNARRKLQRMDRIAKEIPDIDVEDSLENLSARSKEVLKGDDNYTYAG

SEQ ID NO: 290734 - protein, 401 aa, unidentified
MQENQQHDSVDVFVGVDVGKGHHHAVALDRTGKRLYNKALPNDETKLRALITELKEHGQLLFVVDQPATIGALPLAVARDEGVLVAYLPGLAMRRIADLHAGEAKTDARDAAIIAEAARSMPHTLRSLRLADEPLAELTMLCGFDDDLAAQITQTSNRIRGLLTQIHPALERVLGPRLDHPAVLDLLERYPSPAELAATSEKALANRLTKLAPRMGKSLAAEIVQALSEQAVVVPGTQAATIVMPRLAQQLASLRKQRDEVASEVERLVHAHPLWPVLTSMPGVGVRTAARLLTEVAHKAFASAAHLAAYAGLAPVTRRSGSSIRGEHPSRRGNKVLKRALFLSAFAALRDPTSRDYYARKVQQGKRHNQALIALARRRCDVLFAMLRDGTFYHPKSAPNA

SEQ ID NO: 290735 - protein, 367 aa, unidentified
MIVIGVDAHKRTHTLVALDAVSGVSRGETMVQASDDGALNALRFAAGLDSDRVWAVEDCRHVTARLERALLGAGERVIRVPPGLTGESRKATRTPGKSDPIDARAAALAAIREGIENLPVAFLDEQAHEIRVLCDYRDQLMNERVRLINRLRWHLVRIAPHLEAQLGPEALKGPRIRARLARQLGQLPASTELRVAKAQLRRINEITKEQKELLAELTALIQAHAPQLLQQRSIGTVTAAVIIGRTAGAQRFRSEACFARHAGTAPIPASSGKTVRHRLHRGGDRQLNRAIHIIALGRIAWDPETRAYIERRVSDGKTKREAIRCLKRHIARQIWHLLYNTQPTIPAPVQSPMRVRVGAPALMPCTR

SEQ ID NO: 290736 - protein, 398 aa, unidentified
MLSIGIDVSKGKSTVCGMKPGGEIVYTPFEVQHTREGMSELLSLLRGSGEEVRVVLESTGSYHCPVVAALLENGIFVSVVNSLRMKRFCSQSIRRVKTDQIDAMQIALYGLAYWQELQPTRLPENTYRELQLLARQYYQMTSLLIKAKVDFNALCDQVLPGMQELMSDHAGRHKLSDFVLRYHHTAHILKMGETRFRKDYCKWAEKKGYRNHERMAALIFATAQNGIPVLPDAPSTQIVITEAIRVLHTVEASRDAILTQMQALAKTLPEYSLVREMPCIGDTLAPRLIAEIGDVRRFHSKRALIAYAGIDAPPYQSGKFSANNRHISKRGNRYLRKTGYEVMQSYVMHKPANDPIFTFIEKKRSEGKSGKLAMVAGLNKFLRVYYGKVTELYRSLPQ

SEQ ID NO: 290737 - protein, 388 aa, unidentified
MPAAETPVAYLGIDVGKSSHSACALDAGGGVAFRAELANRPDDIDRLLERAGSGALVVVDQKRNIGALVLARAHAHGNPCAYLPGYAEKQARGMFPGIAKTDAIDAEVIARTALGVPRALRPAPEEPEGTASLRILSSQREFASSARTRAKNRLRATLLEADPALEGAVDPSSRWQVSVLAEFGGAAGCSAAGWRRFSSAARRAGAPAAGARRLWEALLASSRSGRRLPAGEDVAVRILAREIASLDADIEELDSLVADSLAGDEVYECLLTVPGIGPKPAAALVPSIDISAFRGHDELASYCGVAPSDRRSGSSIRSTSPQHGGNRQLKNLLIFSCNSLIGTDNRFGRYYGECRARGMRHSKALKAVARKRLKVIYAVMRDKAPYAA

SEQ ID NO: 290738 - protein, 415 aa, unidentified
MALKIVYKICCGIDVHKTFVVACIASTDKHGVTSYERHRFSTYTKGLKNLLQWLLEHNCKDVCMESTGKYWIPVYNILEKDCSIVLAHPKYVKAIRGKKTDKKDAKWIADLFKHDLVAGSFMPPAGIRQLRDLMRYRFKLTCFKSSEKNRLQNCLTVSNIQLGNVVSDTFGKSAQAILDKILENPADTSFDLEPLVFKSLKKKLPELRDAIDGYITPEQAGKLKIIKAHYESLESRKAELEELILALAAPYQQELAILQTAPGISSDFTAIGIISEIGTNMEAFPSAKHLCSWAGLTPTNNESAGKKKSVRVSKAGCYIKPLLVQCANAVVKSSKHPEMRNRYLRLKKRRGHKKAIIAIARMLLTALYHMLKNGENYNAELYRKSDLPPVDREITVEQAILIARNQGYKIKSATA

SEQ ID NO: 290739 - protein, 408 aa, unidentified
MNTLYVGIDVSSKSNVVYLMLPNGDKHSNFSVANSHEGSTLLVKKIYSALTSHSLDTVLIGLEATSVYGDNLVYFLREDATLAPFNRKIHVLNPKQVKKFHDTYNDLPKNDYVDSFVIADCLRFGRINKEVYMGDYRYKALQNLTRARFFAVQNLVKEKQRFMNVLFKKYSTMTQEKVFSDAFSTTALAVYDEFESAEALANMDLHELTDFIIEKGKNRFPDPVAVAKAIQKAARSSYRLPKTVNDSVNQVLSISITSMKALESQIKEFDKAIKALMELLPNVLISIPGIGPVYSAGIMAEIGDINRFDNQASLAKYAGLAWKQHQSGGFEAEVTRLIPLGNRFLKYYLCEAAFSLVRCDKEYSDFYHLKYKEVNRCQHKRALALTARKFVRLVFRLLKDNRLYCPAK

SEQ ID NO: 290740 - protein, 342 aa, unidentified
MFYAALDVSLRSVAICIIDHDGKICLERSVRSDVPDVLLCLAGFDQPIHQVGFEAGALTQPITYGLTEAGYDVVCMEARQVAAALSAMRNKTDKHDARGIAQILRSGWYSRVHVKSVESHHMRALLTSRKVMQRKCIDLENEIRGLLRIFGVVLPLRLSRGAFDVAVRETIETDPALSHALLPMLEARAMLFETFTELDRRVKRAAREDAICRRFMTVPGVGEITALSFKAAVDDPARFKSSRTVGAHFGLTPRRFQSGETDNPGRISHAGDIDVRAALYAAANAMLMRSITWSSLKAWGVRLMKTKGRRRAIVAVARKIAVVLHRMWADGTDFRLGSEAAA

SEQ ID NO: 290741 - protein, 365 aa, unidentified
MNNAYYTIIGMDVGDRKTQVCVMARAAGAPKVVMETAIPTTREGLAKFLATQDRASAVAFEAGTHCRWMDEVARGMGFRVYVANPCRLRMITESKTKNDVNDARALARIALADPVLLHPVKLRGPEHQRMLNLHEMRNLLVKQRTGTVVQLRAIAKSMGFRIAKCSAASFHRLDRGAWPEGLRDIAWPMMKNLEQLAVTIRTYEKQIRELAGTPTFRAQVERLMEIHYVGLYVATGFVAVTGGDMDRFGKPRDVGAWLGMVPKQDQSGDTDRQCHITKAGSGLMRRLLVESAQMILRDCSADTDLKAKGLRICARGAKIARRKAVTAVARSLAVLMAAMLKKPDAPYVPLSERCEKELLATRATA

SEQ ID NO: 290742 - protein, 416 aa, unidentified
MNSPPKSTAPRFLALDLHKHYLVVGGVDPHQEIVLNPRRISLEKWPAWAKANLRPTDAVVLEATTNAWDIYDQIVPLVGRVVVAHPPHVKWIAEARVKTDRHDVLRLAHLLAANLIPEVWVPPVAVRELRALMAYRHRLVQTGTRARNRLHSLLHRHNLKPPPGKIFARKHRDWWLALDLSPTQRMHIRHDLATIDQVDQQLADIQQELSRLSTTQPWADQVPLLLQLPGFGLIVTLTVLAAIGDISRFPHPKKLVGYAGLGASIHDSGDKRRTGRITKHGRKELRWVLVEAAWRAAESHPYWKAQYSRLERRLGSNKAAVAIARKLLVAVWYILTERTADRHADPDKVAFKYIMWSWKLDDAKRKGMSTRQWARYQLMRLQLGEDLTHIMRGGHRYPIAPAEELQALLPELPSVD

SEQ ID NO: 290743 - protein, 387 aa, unidentified
MNHLYSNVACGGMDVHYKFSNVTFRDKDGCVVRRERLSHPRRDQLRERLSRWPRGIPITLEASFGWGWLSDLLSEAGLDPHLSNCYKLEQMRKARGWVKTNKKDADMLSLLPFETTNWWEVWRAPPEVRDRREQMRFRADLVGSQTAVKSRIHAIFHRHGLFHEFSDLFGAQGRRFLGELCIGGSEYLSPQALQVLRGQIKLLDHLRSQLADIAHILHRQLLNTPLIRLLKKIDGFGLILSNVLEAEIGRIERFRNHKALASYSLLAPRSNDTGQDDPDHSPRGRHLGRRGNRTLKWAFIEAAHGAVRSGGRWREMFDRVTCGGRKDRNRGYIKVARELVKVVYVVWSKGLDYQQNPPAQPGSGKNKKKSRSGTGQLCHPMVHASTA

SEQ ID NO: 290744 - protein, 347 aa, unidentified
MKFYTGNHKFYCGIDLHARKMYVCILNNSGKIVLHKNIKTDPEIFFELIFPYLEDIVVGVECMFSWYWIADLCHEHHIPFILGHALYMKAVHGGKTKNDKIDSRKIAALIRGGNFPLAYAYPKRMRSTRDLLRRRMHLMRKRAELLAHIHNTNTQYNLPVIGEKIAYKANRKGIAERFQDPSVNKSIQIDLAMIDTYDKLLQDVELYILKHAKAHDANTLYLLQTIPGVGKILALVMLYEIHDIGRFPLVQDFSSYCHLIRPEKESNGKKTGKGNKKIGNPNLKWAICEATIILLRESEQAKKLHQKLIKKNGEGKALGILSNKLGRAIYYMLKNKKAFDMNKFFSL

SEQ ID NO: 290745 - protein, 368 aa, unidentified
MNNYTLEVARTAGAKELKNQKAAKAKRIVMGTDVHSRSYQAARKIDNGPIGAVAKFRSQEELLLYVEKQKEQAEEVVVVYEAGPLGYVLYRALKARGLRCYVCAPDSREQKRKRRKNNTIDTRTLTSNLFNYLHGNERALQLVRVPTEEQEQARWQSRQHDQLVEERKRLGAKGNALLLSRGFGSWKNWWRPKAFSRLSQLVPGWLLELLETWVDLLRKLDEKIRRAKVALAKRCSGLRPKGVGAPSLVQLQSEVLDWGRYSNRRKIGCLAGMVPSEWSTGDTQRRGSITKVGVGAIRRIITEMVWRIILFQPQYKAVQKWQEVLRGSNRGLKKKAVVAIGRQLMVDLWRLQTGRISAQELNLVMIGG

SEQ ID NO: 290746 - protein, 369 aa, unidentified
MTENTLFVGLDVHKKTIAVAIAASGPGAEVRFYGTIENTPEALWALCRKLAKEGQRLHYCYEAGPCGYGVRRRLTELGHRCDVVAPSLIPRRAGDRVKTDRRDALMLVQTLRAGQLTEVWVPDEAHEAMRDLVRLRAQAMRDLRRARQYLLSFLLRHGRNSPYRHWTKMHRRWLGELTFAHPAQHLALEEMLQRIERAETLCDRLKQAIAELVPSWSLAPVVQAIQALRGVSLTTAAVLVAEIGSFARFTNPRQLMAYLGLNPSEHSSGATVRRGGITKSGNGLARTCLVEAAWTYRFPARVTQIIRDRLQTLPEPIRAVAWKAQVRLAARYRKLVAAGKPAPTAIVAVARELVGFIWAIARMVEPKFA

SEQ ID NO: 290747 - protein, 413 aa, unidentified
MDMFCGIDWAEGHHDVAIIDNTGKQLAKCRIDDDLDGYQLLLDLLAEHGDSAETPIPIAIETSRGLLVATLRTGTRQVFAVNPMAASRYRDRHGVSRKKSDPGDALVLANIIRTDMHMHRSLPADSDLAQAIGVLARAHQDAIWNRQQLANQLRSLLREYYPAAIEAWRDKAGALTRPDARKVLGAAPTPTLAAQLPTWKLRLMLTNAGRKRGITEDAERLHTLFRQPAARLAPAVEGAMGIQAKALLTQLNAVCKAVDELAKAVERTFRTHPDAPIMLSFPGVGPGVGARLLAEIGDDRTRFATAGGLKAYAGSAPITRASGKRKYVGRRFVKNNRLNHAGYLWAFATLSHSPGANAHYRRRREAGDWHAQALRHLFNRMLGQLHHCLQNRVPFDATIAFPQSAGPSEAVVT

SEQ ID NO: 290748 - protein, 367 aa, unidentified
MYVGMELSDKIWKLAFSSGWEQRPRLRDVTAGDVEKLAEEISRALKLFKLAADTPVCFCYEAGRDGFWVHRALEARGWRCLVVDSSSIEVPRRKRRAKTDRLDASKLVTQLIRYCQGEKTALKVVRVPSEAEEDRRHWRRELKTLKEDRARISARLRSLLKLHGIRHGRSLQGLEKELKGMRTWSGGPIPAVLLGRLQREARRWEELTERIDELDRCRREWARRQDNPIWQMVCQLMRIKGIGIETAWYLTLELFGWRRFANRKQVAGVAGITPTPYGTGGDFREQGISQASNSALRAILIEMAWSWVRYQPNSALTLWWKRRFSEGGGRARKIGIVAVARKLLIGLWKYLKWGEIPEGASLKQVKA

SEQ ID NO: 290749 - protein, 350 aa, unidentified
MRFTGLDVHKAFIYANVVDEKGKTVIERKLMNTTQALDYFLESVPEGTQFVLETCGMYEPVYDRIEQQGFKVKVAHPLKTRAIASARIKTDAIDAKVLANLLRVDMIAESHVPNKEVRELRSLVRRRTGLVRQQSQLKNQAHSILLKNGINAPITDIFGKGGKKFLAQVELPYAERLALDNILAIADSYDERISLSDAAIEGVAKNNPEIKLLTTIPGIGDFSALLIYADIDDVKRFQDAKHLCSYAGIVPSVYQSGDTVRRGRITKTGSRLLRWVLVQAAHKAVVTDPHLNRFYEHLKGKKGSQKAIVAVARKILTYIYVMLTKGIEYQALSFNRKVQADMPVEPLSSS

SEQ ID NO: 290750 - protein, 380 aa, unidentified
MKHTQMILHEAITNNRLLYIAFELSETKWKLMFSNGVKRRQRTIESRDLNRLLIEIRQTQEKFQMGEEVTMMSCYEAGRDGFWLHRFLTGRGINNLVVDSASIEVNRRQRRAKTDRVDAEKLLNMLVRHVHGERKHWSVVRVPEEAAEDARRLSRELERLKKERTAHTNRIKSLLVLHGVTGVMISSSFQGQLEGVRLWDGKLMPEQLKQELLREYERYCLIQTQIRQLTLQQREQLKTDCAQAVQVRTLGRLRGIGPVGSWKLVYEFFSWRRFANGKQVGAAAGLTPTPYASGTMNRELGISKAGNRRIRHVMIEMAWQWVRWQPDSELSKWFEQRFGSGTARMRKTGIVAVARKLLIALWKYLEQGCVPEGALVMGKA

SEQ ID NO: 290751 - protein, 405 aa, unidentified
MKLYIGIDWSQSKHDICFVNTKGAIQSQLVIPHSQTGFWEFEQRRKRLGVPAKDCLVGLETSHSILVDFLWDRGYANLFVLPPTLVKGSRTRMRSSAAKDDPGDAYLIADILRTDHGRLQAWQPDSGLTRQIRTKVRFISFLTRNIVRMTNRQRAVLLRYYPVAAELFSSLSTLISQHFILAYPTPQAAAALDLDSFRKFARQHRYTHKSKLANILAKLDQDDPQADMDIIDACQDEAQGLAHVLLDMIRLKRDNLKQLQELLDLHPDQNIFASLPGTGVYLQAALISKFGDDRGRFPVPGRVQAIAGTSPVTIRSGKSKYVRFRKSCDYEFRHIVQQWAKQSLRSSVWANAYYARVRPNCDSESHAFRCVANRWLAILWRLWQDHNPYDEMHHLKQRALRSQPR

SEQ ID NO: 290752 - protein, 379 aa, unidentified
MQASTVGTLTAGHCGTVFVAIELSQKTWLVTLHSPDRDRISRLKLEGGDHAGLVALIERVRARAAEKLGSVPRVVSCYEAGYDGFWLHRLLEAGGIRNLVFDAASIAVEQRARRAKTDRIDGELLLRTLMAYLRGEPRVVRIVHVPSVEEEDARRVSRERDRLVTEQTGHTNRIKSLLRLLGMAVGNPRRGDWLTWLQQQRDRQGQKLPPQLMAEVTREHARLILVREQLAALEQTQSAEAPAPMRERGDLLQRLKALGPAFTATLVNEVFYKDFRNRREVASYCGLTPSPWKSGGIDREQGISKSGNRRARQKAIELAWLWLRHQPDSALSRWFHTRTANAGKRTRRIAIVALARKLIVALWRYLTTGLVPDGAIMKA

SEQ ID NO: 290753 - protein, 387 aa, unidentified
MRRQSRIRRRPVVATNTITWVGMDAHKNSIKVAAWLPEQAEPVEWTEDTTAEAIRRLARRLRRLAPGEVRACYEAGPTGYGLQRLLGVEGVICEVVAPSLTPVKPGSRIKTDRRDARKLGELLRAGLLTEVHPPSETDEALRDLCRCRDDVRVDLLRARHRLSKFLLRRHRIYRQTKHHWGSRHMQWLAELRFDDPMSQATFDSYQLIVHQLDERLGQLDAQLAEFGTQEPYREKVAALRCFKGIDTVTAVCLVAELHDFQRFRSPRQLAAYVGLVPSEDSSGERERRGPITKSGNRHVRRLLVEASWHHRHRPALSRPLRARREGQPARVIAIADRAQERLAARFRRMSEAGKVHPKTIVAMAREMCGYLWAVLHPAALPTRSKSA

SEQ ID NO: 290754 - protein, 407 aa, unidentified
MSNSRKVCCGLDVHKETIFAAINANGKAGEVKEYSTLTCQIRALSDWLKANEVTDVAMESTGIYWIPVWNILEDLGFRLTLVNPYFIKQMPGRKSDVKDSQWIAQLLAKDMLKSSLIPCKQIRTLRAYSREYVKRQQAITRIVVGMERTLETANIRITSMTSKIESKTVLNIIELLIKGETDIDKLLEKVHGRTKNRKGERVAQSLEGFILPEHRFLLSQQLEEYRLYYKQADELQRQMSAICKEHYAGEMELLKTMPGTDDQSVMQLIAETGGDMNAFETSNRLSNWAGLCPRNDESAGKIKSKATTKGNKYLRRIIVQIAWAASRTKSSSYYNKYNQLAMRKGRKKALVAVARKQLTVVWNILKYEQPYDINKQPVITAEQILAKRKYYQKELDKLNVIAITAAG

SEQ ID NO: 290755 - protein, 354 aa, unidentified
MSKVKELDFTGKVIYCGLDVHKTNWKVNARMEGVEIAAFSQNPDNVSLKKHFEKNYPGAALKVAYEAGFCGFEIQRSLKSSGIECIVVNAADIPSSDKDRKRKDDKRDARKLSIELSKGNLESIYIPDKEMQAARTLVRQRYRLVQDQTRCKNRIKHLLMSNGISIADANQHWSLKSISKIQQSKFESSLLKASVDFAIEQYLQIRRILKEITMAIRNISKEEPFLKVQKFLQSVGGIGMITGMVIQTEIGDINRFKRFDSLCDYVGFVPDIYSSNDKTIVRGMSQRGNSFLKETIIESSWVLIRKDPAMLMKYNEYRSRMSANKAIIRIAKHLLSRIRFLWKNEQLYVKGLVK

SEQ ID NO: 290756 - protein, 390 aa, unidentified
MEVRLMLVNNSNTLSLDLQASKHISLGIDQGDSQWVMTAFDRSSGKKSRHCFKGATKELDCYRKVSDLSKTGKPVSVCYEAGRSGFTPARVFSSLGCECRVLPYGKLQIISSGKKAKTDNIDSVFLSELNPLDKSIPSVWLPEVKQECLRVIPREEQRLKRDISRNNNRIISILQRWPVQKVVTHLRAAEWRVRIREWKNCAAVPGLLPVSELKRIEMMTDELELLEKHLLEWGCYMDEQEKKERSIAEQTGEKFTIDILREYRGIGEVIARTFSWEIGDFNRFRNGKHFSSYLGLTPTPFASGKMFREQGISKQGNPELRRLAIQLAWLWKHWQPDSKIARKWKEQLKNKGRQRKTAIVAMARQLMVAIYRRIVRGEEIEGAVKNRPMQ

SEQ ID NO: 290757 - protein, 347 aa, unidentified
MKFYTEEHEHYCGIDLHARTMYVCILNQAGAIVVHRNLKASPEAFLETVGPYRSGLAVAVECIFTWYWLADLCARENIAFVLGHALYMKAIHGGKAKNDKIDAHKIAALLRGGMIPEAYVYPQPMRSTRDLLRRRMHLMRQRSERLAHIQNTNHQYNLPPIGKKIAYKSNRGGVAERFADAGVREIVRLDLELIGQYDRLLTDLELQIVKRAKQHDAQAFHRLRTVPGIGKILALVILYEVHDIRRFPSVQNFVSYARLVKPKKESAGKVSGSGGAKIGNANLKWAFSEAAVLFLKGNPRGQAMVARIEHRHGKGKALSILAHKLARAVYAMLRRQEAFDVNKFFKS

SEQ ID NO: 290758 - protein, 361 aa, unidentified
MAQIRTWAAFDVHVSGVVAATLDRDSGQLAVRRLPGGSEEVAAFAVGLPGPVRATYEAGPTGFVLARRLEAAGIDCLVCAPGLIPRGPSDRVKTDRRDAERLVRLLAAGELHRVAVPSVAEEALRDLVRAREDLRGDLMRARHRLAKLLLRHEVRFEGPQANWTQAHLGWLAQVQMPEPASQTALEDYRGAVGALMIRREGLETEIARALPDSPWAQTAARLVCMRGIDTLTAAGLCAEIGDFTRFRHPAQLASYLGVVPSEHSSGQMRRQGPITRSGSRHARRLLVEAAWHYRRPPRVAGSLARRQQGAEPQVIALGWKAQRRLHHLWGRMERRSKRRTVIAVAAARELSGFCWAVATAD

SEQ ID NO: 290759 - protein, 342 aa, unidentified
MNQYAGIDVSLECSSVCVVDANGKILREARVASEPEALIAWFRSCGFELERIGLEAGPLSQWLFAAMRQAGLAVELLETRHVRKAFEAMPVKSDRNDARGIAQLMRLGWFRPVHCKSMSAQETRTLLTARKLVQSKLRDVENSLRGILRGFGLKVGKTTELGFAGRIEELVAGHPHLQVIAKSLLSVRTVLRSEFAAFQKRTRKMAQSDARTRLLMSTPAVGPIVALTYASAIDDPARFSSSKQAGAHFGLTPKKHQSGETDYSGRISKIGDSSVRTALYEAAHIMLTKPLKGCSQLKSWAMRIARRAGMSKAKVALARRLAVIMHRMLADGTPFNPAAGAA

SEQ ID NO: 290760 - protein, 317 aa, unidentified
MRFYNVTHKHYCGIDLHARNMYTCVLDQEGKTLLHRDLPTVPDVFLKAIAPFRESLVVAVECIFTWYWLADLCAREGIDFVLGHALYMKAIHGGKAKNDRIDALKIATLLRGGMIPQAYVYPPEMRSTRDLLRRRLTLVRQRGQLLAHIQNTHHQYNLPTPKARINYRCNREGIAEQFSDPSVFESVSSDIELAGHYDSLIKDLELFLTRKAKIHDPGNFFRLRSIPGVGKILAMTMLYEIHEIERFERVQNFASYSRLVKCEKSSSGKRLGTGGAKVGNVHLKWAFSEAAVLFLRANPPAQKFVEKLRKKHGKAKA

SEQ ID NO: 290761 - protein, 399 aa, unidentified
MPEPKGIEQGGTQHGQKAFVPQEYDVFAGLDVDKKSIAVTFSNHQQGFVRSLHMPYSVENLLKHVRKHFPDQKVAFVYEAGPTGYGLYDGLEAQGYNCLVAAPSMIPRAPGQRVKTNRLDSRALSENLRGGQLKSIHVPSPIYRELRHLTQLRDTLVSEVAGMKQRIQSLLLFEGIAFPSAPAGSRWSLKVKAQLRKLECSKSVRFKLDQLLDNEEFSEKQVVKVTKEIRQLCQNDPELAQCIKYMMSVCGIGWIVASQLLARIGDWRELKNVRQLAGFLGVVPSENSTGEKTDRGSITRTGHGRLRSKLIQAAWSAIRQDGELREFYSSVCRRHPRQVGPRVAIVAVARKLSARIAAVLMEQRPYVVRQKVHSAPLTQEETSPQGTTRRLGEPGEENS

SEQ ID NO: 290762 - protein, 312 aa, unidentified
MGPVPVTVGIDVAKATLVIAVRPTGECWETPNDPRALSRLARRLRALGPARIIVEATGRYHVPVHRALAEADLPVAVVNPRQTRAFAKTLNRLAKTDSIDAHVLAHYGAVIPVRLTPAPDAATVALHDLVVRRRQLIEMRTAESNRLDGASDAIRRLIRAQLRSFARQLALVERELAQILQAPRFRDRVAILQSVPGIGAQSAATLVTELPELGELSHKRLASVAPLNRDSGSFRGRRTTWGGRRTVRSALYMPTLAAIRFNHDIRTFYQRLVANGRPKQLAVIACQHKLLTILYALTKQHRLWEATYVPAA

SEQ ID NO: 290763 - protein, 406 aa, unidentified
MKPTYFLGIDAAKHKMRATLSNRSEHVLFEKDLSVEATGLRQLLAAIKRQVNDPEQLLVLIEATGLLHLNWSAALTKAGYAVAVINPLIARRLYTLQNSIRDNKSDPIDARGLCTIGLLHGEKLLVHYRFSLRPEQFTLQRAQSVRKALRSALTNLKKTYQSLMDLSFPELGGLLQLDGVGIRQLLIQAPTPATIAGKRLSTLENNWMVRPKAAALKALAADSMADPDLAAASGPALVALLQSVAAMEGRLHALDQQIAKLACTSVDPQTKALIETIPGFGPVNAAKTLAWLPTEILHSGSNRKVAARLQAFMGNDPRLRQSGQWKGHTKMSKRGVEMLRTAFFQSAFSAAHNDPELRAYYQCKRAQGKTHQVALSHLMRILTRRLVAVLRSGKPYQSHYNLKNAA

SEQ ID NO: 290764 - protein, 316 aa, unidentified
MTVYLGIDIASKKFDVAELCDGNYRCKAFENTSAGFLALYKWLGQSTMPDIHACLEATGDYGTSLATFLYENKIKVSVVNPARIKGFGASELSRTKTDKADSKLIARFCKAAVPDGWKPTPAPLRKLQALVRRISALNGMLRMECNRRENADANIQASLDRIISLLKTEIEVVRQEIKDHVRSDDELKKQDALIQSIPGIGAVSSNLILSFMSGKGFRKAKEVTAYLGLNPRHHQSGSSVRGKTRMSKMGDARLRSALYMPALVALRYNPDIKAFGQRLLLAGKPRMLVVGAVMRKLIHIVFGVLKSGTAFSSRIA

SEQ ID NO: 290765 - protein, 312 aa, unidentified
MKQQHQDSEVTIGLDLGERRHRFCALDGRGEVVEEGSLLNDRASLARLTARYPGALAVMEAGTHSPWVSRYLEGLGWEVIVSNPRKVRAIYQHERKSDQRDALMLARIGRMDRALLYPVRHGSEQAQQDLLRIKLRDSLVRARVALINSVRFSLKSLGYAVCNPSSERFHKVAMERLPERVQQMIAPSVQALAELSTRIAVLEREINVVARTKYPQTLWLQQVPGVGVLTALYFVLKIEDPQRFENVRDVGAYAGLCPRRDQSGQSDPQLRISKRGDPYLRRLLVSAAQYILGPFGPQSALRGYGLMLAARW

SEQ ID NO: 290766 - protein, 436 aa, unidentified
MASHCQFYNYKFQEVILLSFKILKFKCCGLDVHKTWIYACIGITDSNNRTEYKQARFSSFTKGLNELCDWLAKYNCTDVCMESTGKYWIPVFNILEQHNLWVTLSHPKYTKPMKGNKTDRKDAKWICDLYMCGMVKPSFIPPADIRELRDLVRYRYKLTCMITGEKNRAQNCLTVSNLKLDDVFSDVFGKSSRSITEQILQHPGEKFDVAPFVHGRCKTPIEEIQAAVDGAISKEQAVKLRQCLDHIDELNKHISELEQEILRLSDKYEAALNLIRTVPGFDKNPMTAVQMLSEIGGDMSVFPTAKHLVSWAGCCPRNDQSNQKIKSTRISRAGSYFKPVLVQVANALIKSKKHLEFTNRYKRIKARRGHKKAIIAICRMILTAIWHILSDLKPYTPEGFLESHPVKEGKVLSSSQALNFFKQRGYIIKDEPLSVS

SEQ ID NO: 290767 - protein, 406 aa, unidentified
MDVVYTHVCGLDVHKKNVVACVITPETKEIRTFSTMTDDLILLVDWIKNNGCTHVAMESTASFWKPIYNLLELEDIQTLVVNAKNIKNVPGRKTDVKDAEWIASLLRHGLLQGSFIPNRDQRELRELIRYRRSLIDERAREVNRIQKVLEGANIKLSSVASDVLGKSGRAMIEAMIAGEENPELLSELAQRRLKNKKEDLKRALNGLMGNHQKLMLAAQLRHIDYLDEEIGRLDEEIKRRMLPFEEDLELLDTIPGVARRTAETIAAEIGTNMDQFPSAAHLSSWAGLCPGQNESAGKRKSGKTRKGNKKLRSALVEAARAAGRTKNTYLSSQYHRIAARRGANRAAVAVAHSILMIAYYILKRRQPYIELGPTYYEERKRDTIIRQSIKKLESLGLKVTVESVAS

SEQ ID NO: 290768 - protein, 490 aa, unidentified
MAVRSRLGECPYSRLGRSASESHNREAEMAHYRKHKTVRATLPVLHPDAAGIDIGATEIFVAVPADRDSEPVRAFHTFTQDLMSVADWLQRCGIRTVAMESTGVYWIPLMQLLESRGLEVYLVNARYAKNVPGRKTDVADCQWLQYLHSVGLLKASFRPGADVCAVRTLIRHRESLVGLASQHVQHMQKALDQMNLQLHHVISDVTGTTGLAIIDAVLSGERDGHKLAKLRDPRIRATPETIAKSLVGDYRPEHLFTLRQSLTLYRQYQTEIAICEAEIQRFTKRLQSKADPIQHPLPAAKDSVRKCKVMAPAQAMSLRDEAYRVLGVDLTTVPGISVLHVQTVLAEVGPDLSRFPTAAAFSSWMGLCPDNNVSGGKILRAGTRRVKNRLAGALRMAAQSLQGSQSALGEFYRRMRTRLGAPKAITATAHKLARILHHMLTTREPYEESVFARLEAAYLQRAENRLKAQARALGFTLSPSSAATVEGSVP

SEQ ID NO: 290769 - protein, 392 aa, unidentified
MIFVGIDVASDKHDCCILGSDGDVLSSFTFANDKHGFDSFLSAVARHCAEHSLADAKVGLESTGHYSINLTNFLLAKHLSVKIYNPLLVNMLRKAQSLRKTKTDKSDARFLAQLLFSDDSKPYSQPLYHITELKTLTRNRYRLVEMRSKLKISVNRLITVLFPELPGVVWSVNQKSCYALLLEFPTARRIAEAHLTKLTNLLSSNSRGKYGRDKALEIRELARQSIGLDSRATGFELKQAIRLVQNLQMEIDELEAEIKTVMLEINSPILTIPGVGFVLGAIILAEIGTIENFDNPAKLLKFAGLEPSVYESGKYKAADTPMVKRGSKYLRWSLIQAARLVAYRDSTFGAYMAKKRGEGKHFNVATSHVAKKLVRVVFHLLNSGESFAPQLA

SEQ ID NO: 290770 - protein, 412 aa, unidentified
MEGETVIAGVDTHKDVHVLCLLDGLGRKIWSGSFRADPEGYDRLAETIGDPGSCMVVGVEGTASYGAGLTRRLAELGYNVVEVLRPKRDKARPGEGKSDPLDAERAARKAASGRGCSVPKSQDGWVEAVRQLYVARRLAVATSTSCVACAKSMLTTAPSALRERFRGCERPKDLMPLLARGRKAGDALEESVLASLRSVAAVWKEARSQVESLDERIRALLEANAPALLGVEGCGTTTAAALVVAAGDNPGRLKGEAAFSMLCGVSPIPASSGKTERHRLNRGGNRQANWALYEIAIKRMAYDERTRRYVARRTSEGKSRREAIRCLKRYIAREVYRVLMDPNPDGAAPEGPELAKMRKAMRVTQKKAAAELGLSAATLGHLERGKRRSTKLERRYYELLCELERTLPQTAS

SEQ ID NO: 290771 - protein, 379 aa, unidentified
MIENITHVALDDHKKRHQVAVLLPGIDREEAVTWRIENTRAGIRKMVRKVLKMAPGDVRFCYEAGPNGYVLLRQISEFDRVSCVVVAPSKTPRRSGDRIKTDRRDAKKLVGLFRAGELKSIVPPLKEEEAVRDLCRCRKAAQKRVTASRHQVDKFLMRNGYVYRDGKNWTRRYREWLRSLKFDDWRRERTFQAYLFGIEQDEDRVKRLDVEIVRAAEEEPYRTLVGFVRCFRGLDTLSAMILTSELYAIGRFTTAPSLMGFVGMVPSEDTTGWDPHRGPITKAGNEHVRRILVEAAKHYRHPARVSKALTQRRKGQPDWVIAIADKAQTRLHQKYWRLVMGKGKHPNVAAIAVARELVGFIWAVLIQAATTTNVEELVA

SEQ ID NO: 290772 - protein, 436 aa, unidentified
MALSAKARSERRKDVNLQQVAPWQQWTHFAGLDWAKDHHDVVVVDRLGQIVLQFRISDDAAGWQQLREKLQDFSTLAVTIETSHGAVVERLLQLRLPVYPVNPKAAKQYRNRKAPSGAKNDFLDAWSLADALRVDGHNWRRLTPEDPLLQELRLLCRDEIHLIEQRTALVNQLQQALAEYYPAALRAFDDWTMPAAWAFVEQFSTPEALVQAGRRRWEKFLHVHKLYRPQTYEKRLEQFAAATQFCGPKAVANAKSRLAVTLAKQLRVLEGQLKEYRARITELFGQHPDHDLFGSLPGVGGKLAPRLLSECGDDRGRFEDAQSLQCYAGTAPVSYQSGQLHKVHFRRACNKYLRSAVHLWANLSRTKCAWAEAYYRQKRQEGKSHACALRCLGQRWLKILWKMWQSRSRYDEQLHACNQVRHGSWIIALANPAATA

SEQ ID NO: 290773 - protein, 344 aa, unidentified
MYHYAGIDVSLECSSVCLVDGTGKILREAKVASEPEALIAWFRSLGLELGRVGLEAGPLSQWLYAALRAAGLAVELLETRHVRDAFKSMPVKSDRNDARGIAQLMRLGWFRPVHCKSIEAQETRAILTARKLLQSKLRDIENSLRGVLRGFGLKVGTTTERTFAERIRELVSGHPGLEIVADALLEAHAVLRREFNSLDKHTQKLAKSHPSARLLMTTPSVGPIVALTYAAAIDDPSRFRSSKATGAHFGLTPKKYQSGETDYTGRISKIGDASVREALYQAAHVMLTKPVRNCSALKGWAMRIARRAGMRKAKVALARKLAVILHRMLADAKPFDPMAKTATT

SEQ ID NO: 290774 - protein, 375 aa, unidentified
MQVIHERCAGLDVHKKTVTACCIYTRPDGRKEQETRTFGTTTPELSELLVWLQEWGCTHAAMESTGEYWRPVWNILEGHLELLLVNARHIKAVPGRKTDVKDAEWLADLLRHGLLRGSFVPPQEQRELRFLTRQRDNLVRERVRVVNRLQKVLEDANLKLAAVATDVTGVSAREMLAAILAGHDDPTALAELAHGQLRNKRAELERALTGFVRASHRFLLTTHLAHLDFLDEQIELFNQEIAARMMPPLPEPGAPPPGHAPEETTTTAAPDAAAPLSRAEAVALLDTVPGVNQRLAEIIVAEVGTDMSRFPSAAHLAAWAGVAPGNNESAGKHYSGRTLPGNPALRKGLVQAAQIIKRLIGLPGLHSIRTSFGEG

SEQ ID NO: 290775 - protein, 366 aa, unidentified
MENVRFVGLDVHADSIAIAVAEPGRGQPAVVAAIPNDITMLLKKVRRLGPVKCCYEAGPTGFGLQRALVAAGIDCVVVAPSLVPTRSGDRVKTDRRDAVKLARFLRSGDLTEVHVPDAATEAMRDLERARDDAKKAERVARHQLSKFLLRHGRRHAGKRNWTKQHFEWIRRQQFEHEAQQRVLEDYLKTVEDLAERTERLTKSIVELLESWSLKPVVTALQALRGISIISAVTLAAEIGDFVRFQTAPEFMSYTGLVPSEQSSGEQRHQGRITRCGNAHVRRTLVESAWAYHFRPRMSQAIRRRSKESSDQVQRIAWRAQTRLCSRFRRLTAAGKPTNKVVVAVARELAGFVWAIAREPNLVTAAA

SEQ ID NO: 290776 - protein, 326 aa, unidentified
MKTNLVLGIDVSKSELDFAEMADSLKQQGCIDNKLRCIKKHLSQYDKDTVRIVFEPTGTYSDKLEQVLIEMGFVYHRVNPSQSHHFALSIGVVNKTDRQAAITLAKMGKALDLPIYHPPSQSVKKRKGLLKALANLVTEQERYKNRLHAEIQLVQPDNDLVSLYQDLIKIYEDKITNLQKKLVDQEDSKFQANKKLGMSVCGIGEVNAVWLLTFTNNLENFDVDKRVVKFLGLAPSSHRSGTSVNKKYGVNKSCAGKIKGNLFMGAKSAIRFNPACKDLYQRLRNKGKNYYQAMIAVMGKLVRQFFAVVKSGVSFDKEYHLKFQKI

SEQ ID NO: 290777 - protein, 349 aa, unidentified
MRKMTLGVDIAKADFAAYAIADGHNLHSLKSCKNHPGSFGAFRDKVMKLAKEWACDTIYLVLEPTGGYELPLARWALEHDWLVSMPNPRRVRDWARGSGMRAKTDAVDAKMLALFGQAMDLLLWKDVPLAVRKMKQHLDSLDHLREDKRREQNRLQAIQARHEPDNVQIPSIQRTIAFLDQEIARIEASLDDFLECHPRIIEEANRLDQVPGVGKQTRLYLLAFLYRWGALTDYQGDRKGITAYAGLDPVSRQSGTSIRGRAAISHQGSRSIRAKLFMAALGGKRGKTVLGRYYNNMVNRGKPKMVALIACEHKILMWAWAVFRDKADFVAAKAEPKTRSASSEMASAV

SEQ ID NO: 290778 - protein, 335 aa, unidentified
MSHSVTESTIFLGFDIGKSEHAFAFVNAVGEVVHRGKLKTDKRSLKSFVSKAQKTHSDLVVGVEATGIYHERLARTFLDAGITVQVLNPQLTTTKAIRSSVRLVKSDAADAMGIAQKLREKRGDIGHPFSWNHERRALQALGRSYDHLLWHRQSLRAHVGMYKERGFAETFAPNPESLEPEISRLRRDLIAEARRVYPVEFEILVAVPGIADETAARMLAETMGIERFRNAHAFAAFVGVDPRVKESGTSVRGKTSMTKNGSPILRYLFGWTGRNVAQWSAPFRQRLDYDIGRGKPAGVAYGSIARRLAVVLYTCLVNKTPFDPSLVGAAAGRLT

SEQ ID NO: 290779 - protein, 326 aa, unidentified
MQYILGIDVSKDKLDLVLITERGKFHKVISNNSEGYKALDKWLVSRQVEQVHACLGATGQYGEEVAEHLYKQGHAVSVVNPARIKHYGESKLHRNKTDKADADLIAEFCLKENPTLWQPLSPEIKHLRALVRRLEDLKTICQQEKNRLSSGEKDEWVVKDLSTHVAYLETCIAATEKEIQNFIKQTPNLKKQQELLNSIPGIADKTSARLLAEIGDISTFESASQLAAYAGLNPKGFSSGSSVHKKTRISKQGRRELRSCLYMPGIVASNHNPVVRSLKVRLHDRRLANKAIIVAAMRKLLHIVYGVLKTQMPFDAEYHKQFNFSA

SEQ ID NO: 290780 - protein, 356 aa, unidentified
MSQKLNSEIAVIGIDIGKNSFHLVGQDRRGALVLRQKWSRGQVEARLANLAPCLIGMEACVGAHHLSRKLQALGHDARLMPAKYVRPYSKGQKNDFRDAEAIAEAVQRPTMKFVATKTADQLDLQALHRVRERLVGQRTAIINQIRAFLLERGIAVRQGLRFLRAEMPTILAKRSDVLSPRMLRIVEDLAGDWRHLDERIEGVSSEITALADQDAACKRLMTVPGVGPIISSAMVAAIGSGDVFGKGRDFGAWLGLVPKQISTGDRTILGKISKRGNRYLRALFVQAAWVVLVKIGPKHWHRYGLETWIGAARKRLHHNVLAIALANKLARIAWAVLHKGRAFECVKTDAMASRPA

SEQ ID NO: 290781 - protein, 331 aa, unidentified
MNYSHFVGLDVGKKTFDASLMSADEKELSHKSFDNTPTGIQSLLDWIAGYHLSLSKLLFCAENMGSYVTELSVSSVSMEFSLALVCPLTIKKSIGLQQGKNDRIDAKRIANYAVLHYRKLELYKLPDKDLVRLRGWIIIRDNLVKQKVSSIKLLETFSRMAKLADVTESISFLEEQLKSIKERILEVEEDMEQLIAASTSLYTNYLLLRSIKGIGIINAIVLLCVTDNFQRFDNPRKFACYCGVAPFEHTSGISIRGKTQTSSLANKEVKVYLTRAAITAISWDPQMKAYYKRKIAEGKHKAAVINAVRAKIIARSFAVIRRQTPFVTLAV

SEQ ID NO: 290782 - protein, 459 aa, unidentified
MTRKKKMELDIINPNAAGIDVGSRSHYAAVGQSLEDVKEFGVYAEDLTALCLWLLSYGITTVAMESTGDYWQNLYAELMKHGIDVILCNGKFTKHPKGKKTDVKDCRHIQKLHALGLLTSSFLPDETTEKLRTYCRQRSNLLSSAAGASRKMQKYLKFLNFRLDVVVKDVCGLTGMAIIEDICKGNLHPESLSKHRHYNCRKSKEEIAKALYGNNREDFLFGLKQEYQAYRFFQKQIDACDKQIDKFIKEELRKSPEKSKLKTTDKPYKRQNKNAISIKNFNQVAYQYFGGVDLMAIEGLSHATVLSIMSEIGPDGFIKFDTSKQFVSWARLAPNNKISGGKVLSSKIPKGSNRLKIALRQAANAIGNLKDTHLSDFFKRVAFRKGRQAAVSATARKLGVIIWTMVTKQVPYNPPEQYLFLDQRRKMGIAKRIKKQMAKFDIKPEEIGIGNSLIPNYNF

SEQ ID NO: 290783 - protein, 385 aa, unidentified
MAQFGDLSRCLAAFDQNSTLVTVVEMSQSSWLVAGLVPGVTRQPLKKLEPDGAALLRLVQRWRSEAVKAGRMIDRIVLAYEAGRDGFWLARWLRSHGIESYVIHPTSIPVSREHRRAKTDRLDAAMLLRALLGWLRGEPKHCAMAAIPTIEEEDAKRPGRERESLVSERTRIVNRMKGALARLGIRGFKPELRKAAQHLGGLRTPESTPIPPNTLGEFRRGMARLAVIHEQIKAIEVARLEHLEQAPDSGPPAMVRLLARVLGIGVETADMLVYEILYRKLRDTKAVARYAGITGSPDESGAKRREKGLAKAGNARVRRGLIQLAWRLLLFQPDSALVQWYRARIAGGARKTSMIVALARKLLIALWRMVNTGEIPDGFVLRPAV

SEQ ID NO: 290784 - protein, 369 aa, unidentified
MNTTTFVGLDVHARSIKAVALDAMTGEVRSATFGYDAAEVAGWVSSVDPSAKCVYESGVTGFDLQKRLSSMGIDCVVGAVSKMIKPSADRRRKNDRNDAEFLARMLSVGNVVEVWVPDDECEAARDLTRALDDAREDLKRRKQRLSKFLLRHGYVFSETTPTGRRKGSWTAAHWAWIKSISFPEKADNDVLAYYVDAVRQAMEDKARLERLVEAEASKPRWKRRIDSIRCLKGIDVTSAADLVFEAGEFSRFKSARSFAAWLGLTPSEHSSGESVRQGGITKAGNKHLRRVLVESAWHYLGCSPHSKDLAKGQVPDPAARRHAAKGVRRLVERRRAMLERGVHKNKANVATARELACWCWAVGRMVENG

SEQ ID NO: 290785 - protein, 347 aa, unidentified
MRFYTKQHLYYCGIDLHARSMYVCILDEDGEVVAHRNMQARPEAFLKAIAPYRKDIVVAVECIFTWYWLADLCAQQGIPFILGHALYMKAIHGGKAKNDKIDAHKIAVLLRGGMIPTAYVYPPEMRATRDLLRRRMHLMHKRSELLAHIQNTNSQYNLPEIGKKIAYKANREGVAERFDEQSVQKSIEMDLLLIDHYDKLLTDVELYITRTAKEHDAQNFFLLRSVYGIGKILSLVILYEIHDIERFPTVQDFASYARLVKCSKESAGKRYGVSGAKIGNVHLKWAFSEASVLFLRGNSKGQRYVEKLTSKHGKAKALSILAHKIGRAVYFMLKRGEAFDLNKFFSS

SEQ ID NO: 290786 - protein, 360 aa, unidentified
MEHTTIAVDLAKSVFQVAVSHKAGRVDVERRLSRERFLEYLAKQPPATVLLEACGSAHYWARRLQPFGHTVRLLPAHDVHRYVRRNKTDRTDTKGLLEAGRNDEIHAVPVKTVDQQAIASLHRLRSTWLATRTARLNTVRGLLREFGLVIPVGSSHVVPQVRALLAESSDVPDLMRPSLASACDEIESIEQHMRAVERQLTTLARDRDDIKLLQTVPGVGLLTATALVALVGDARRFPTSREFASFLGLTPREDSSALRRRLGAISKQGDGYLRMLLIHGARSVLLRAKGAGVPTPFQAWARATQQRRGHNVAAVAVANKLARIVWAVWTHQRPYAADYRPTVTRPTSITSSPQEDCTEL

SEQ ID NO: 290787 - protein, 312 aa, unidentified
MENNKVEFDQVIERVCGIDVHKSLLVATIRGTGIKEETREYSAFTEDIQLLSDWLKEKRITHIAMESTGVYWKPVFNILEEDFEIILVNARHIKNVPGHKTDKKDSRWIAKLLLSGLLKGSFIPKKEIRELRDLTRYKRKLVEQISSEKNRIQKILEDGNIKLSSVVSNMSGAVATRIVEDLIAGEENISKLVSYRHGKMQVSQEDLAKSLVGNLTAHHRGMLGLIKQSIKDKELLISNLDKIIDEHLKANELELDRNLLSTIPGVGKEGAVYILAEIGNDMNVFADEQHLASWAGMAPGNNESAGKKKALE

SEQ ID NO: 290788 - protein, 375 aa, unidentified
MPASTTSHPVVHLAVELSAASWVIAYRFPWSDKVRLQRVSAGDGAALLALVSDLRTKVAARTGQDATLASCFEAGRDGFWLHRLLTDNGVINHVVEPTSILATRGARRAKTDRLDAQGLLRIVAAAFAGDREICRMVRTPSAAEEDDKRPHREREYLVQERVRIENRIAALLATQGVLKRPSLRTWAADLDALRTGDGRPLLPHLKAELDRLRRRLLMTLEMIREVEAAREQDIEARQDPATQTVRALCRLRGIGANFSAVLAKEAFYRTFDNRRQIAAYLGLAPTPFQSGGMDRDRRINRAGNSRARKTMVQLAWLWLRYQPESGLAQWFRRRVGELQGRTRRIAIIAMARKLLIALWRFITAGVVPEGAVLAA

SEQ ID NO: 290789 - protein, 339 aa, unidentified
MQSISTIGLDIAKSVFQVHGADAAGQVVLRRQLKRRHVLAFFEKLPSCLVGIEACASSHHWSRELQAMGHTVRLMPPAYVKPYVKRQKNDTTDAEAICEAVTRPNMRFVPTKTVEQQSCLMLHRARHLFIRQQTAVINSIRAYLAEFGMVAPVGRRGVEQLLEVVADTADRRLPEVARACASQLRALKAQILEFDRRIIAWHRSNATSKRLDAIPGVGPALATALVASIADPVAFRSGRDFSAWVGLVPKQNSSGGKDKLGSISKQGDRYLRSLFTAGALAVIRYAKIHGTGHRPWLTGLLARRPTKIAAIALANKLARMAWAMMARNERYREPAALAA

SEQ ID NO: 290790 - protein, 419 aa, unidentified
MSFKIIKKNCCGLDVHKTWIYACIGIADANDRVEYVQARFSSFTKGLQELCDWLAKYHCSDICMESTGKYWIPVFNILEKNNLWVTLSHPKYTKPMKGNKTDRKDAKWICDLYMCGMVKPSFIPPADIRHLRDLVRYRFKLSCMITGEKNRAQNCLTVSNLKLDDVFSDVFGKSSRSITEHILQHPGETFDVTPFVDKRCKTPIEEIQAAVDGAVSPEQAVKLRQCLDHIDELEKHISEVAQEIFHLSEKYEAALELIRTVPGFDKNNLTAIQILSEIGGDMSVFPTAKNLVSWAGCCPRNDQSDRKIKSTRISRAGSYIKPVLVQIANALIKSKKHPEFTDRYRRIKARRGHKKAIIAICRMLLTAIWHILSDLKPYTADGFLEPRPVNESRVLTTSQALNLLKQRGYTIKDDPAIAS

SEQ ID NO: 290791 - protein, 336 aa, unidentified
MTHYCGIDLHSNNHVVVVIDDEDKRVFAKRLSNDLSATLAVLAPYRETLQSIAVESTFNWYWLVDGLQENGFAVQLVNTAAVKQYDGLKYSGDHQDAFHLAHLMRLGILPTGYIYPKEQRAIRDLLRRRMSLVRSASTQLISVQSQIWRTTGMRIRSGDLRKFDFSPPPMDHYTLQAIHAGLAVYQAIQKEINVLEQSAYQAVRLEPAFEILQTITGIGKILGLTIMLETGDIHRFAAAGNFASYCRCVDSTRISNGKKKGTGNAKAGNKYLSWAYSEAAHFAVRFEPLAQRFYERKKAKTNGIIAIRAVARKLARATWMMLKHQVPYDAKLMFPN

SEQ ID NO: 290792 - protein, 352 aa, unidentified
MMIIGVDYHPGDQYIAFVDTETGECGERRLNHSDGEAEKFYRELRQREVSVRVGMEATGYSRWFERLLAELGIEVWIGDAAKIKTKRVRKQKTDRNDARLLLKLLLENTFPRVWVPSPENRDLRQLLWHRHRLVQMRTRIMNQLQALAMNEGQRRKKKLWSDQGRAQLEKLPLATWASRRRQDLLELLDRMNPPIEELTRAAEQEAKKWPEVLRLMTHPGVGPLTALAFVLIIGTPERFQCGKQIGSYVGLIPSEDSSAGHQRLGHISKQGSSLLRFLLGEAAQAAARCDADWRRRYVHLAMRRQRNIAKVAMARRLAVRLYWMWRNGWEYSQWVEFGSNAGQLATGHGVND

SEQ ID NO: 290793 - protein, 408 aa, unidentified
MTSKLMAGIDLHSNNLFCGIVDAQGKRVFGKKLPCELPTVLKALAPFKKRLDTVAVESTYNWYWLVDGLQDAKYHTVLANPAAMEQYSGIKQTDDQSDAFFVAELLRLKILPTGYICERRLRSVRDLLRRRLMLVRKRTSLILSLESLHARTLGRPIRVGEIKLLNVQQAQKAFTHPADRLISGLDVQLIDQLNQSVKQIEKLVLAMTRSLPCYQVLHSLPGVGTILALTITLETAEVKRFPTAGDYASYCRCVDTRRISNGKKKGENNGKCGNKYLAWAYVEAANFANRYDPQCRRFSDRKAAKTNKIVATKALACKLAKAAWHMMSAQTAYDPRRMFPPAATSNRSDRGFIALKANPAGKPARTEESPVPACGIWAEGGARVASQQSPILRSGKVKYEGKSCARQK

SEQ ID NO: 290794 - protein, 332 aa, unidentified
MLYAGLDVHKDFVQACFVDEEGKIARESKYTTSVAGLHRLCQQAKDAKCVLEASTSCLPVFDALQAQGVSVRVAHPLKVKAIASAKLKTDKVDARMLAQLERADLIPESHVPDKPTRELKQLVRQHMSLTEERTTIKNQVHALLVKNGVHPPFKSLFTKRTRAWLKINTAGVLSLALEQSFERIETLDKQRNVIDSEIIKKAEANPDAMLLKTIPGVGWFSALLLAVEIDGVERFVDEEHLQSYAGLTPSTRQSGNTTRSGHISKQGNPIIRWALVQDAWIAVNHSKRFKKTFTRFKKRHKNVNVAIIAVARKMLRCAYFMLSRRQAFSENA

SEQ ID NO: 290795 - protein, 371 aa, unidentified
MANDSTVFVGLDVHKDSIVAAYSVGFSEVVSLGKVGIRDRDIDRLCSRMQSKASRVMFVYEAGPCGYGLQRYLARKGFECWLCAPSLIARKAGDRVKTDRRDAEHLVRQLRADELSFVHVPDERDEAFRDLVRAWGAAKQDLRRARQRLKSFLLVHGVRYAGTADWRDAHRRWLSEFVFPEPWSQIAFEEHRRAIEDRLERCQRLEALLREAAPQWRFYPAIRALQALRGVQFTVAVGLLAEIGDLSRFDSPRQLMAWLGLVPSESSSGLRIRKGAITRAGNSHARRLLVEAAWSYRYPPKVSRIIQVGTRACRRYVVERAWIAQLRLCKRFRRLIHAGKHPNVAIAAVARELTGFVWDIAQRAQPTAPAA

SEQ ID NO: 290796 - protein, 359 aa, unidentified
MDKKVVLNQSLGVDIAKDSFSYCFCFLNADLSKDFELGEDLQNNKQGFNTLLRKIKKSGMSKEDLTIVMEATGVYHEAIAYYLHDKGYKVCIMQSGRVKKYAQSLDQRSKTDALDSKMLSMLGCERKLTAWEPPSATMEELRFLSRERATIIKERSIEKNRNHAMTAGRFEHKKAIRRFDKRMKLLNIQIEEIEKELHELVSKNVVLKQKLAYLMSIPGVSFVSSITVIAETFGFSLISNSKQLVSYCGYDVVLRESGNYQGKTRISKKGNKHIRAILHMPSMTAVRVNPTLKPFYERLKPKKAKPIVALVAVQRKMLILMYSLWKSNSYYDGKFEIKKAARKQILTAQDSHKNELVTS

SEQ ID NO: 290797 - protein, 465 aa, unidentified
MKKKPTCKKAASRRARKSGLNVQHSINTQTHPDAAGIDVGAEEFVVAVPPGRCEDPVRTYSTFTSGVHALRDWLLACGIETAAMESTGNYWITLYDALTQAGIDVYLVNARHVKGVPGKKTDVCDAQWLQQLHAAGLLRKSFRPALGIVPLRFLMRHRAEMVGDAAKQLQLMQKSLTEMNLKLQHVFSDIDGVSGQAIIDAILAGERDPKKLAALRDKRCRSSAEDIIEALRGDYREEYLFVLGQSQRAYRELREAIAACDEKLGELAARVECEVSSPLPETPKGQRNVGKNSPQFAVFETAWRFYGVDLGGVPGISTGLLCALISEVGTREDLLAAFSTPERFASWMGLCPDNRISGGKVLKAKTRKVVSRLAGAFRLGVFGLQRSQSQMGGYFRRMKGKLGKAEGTTAAAHKLARIVHGMIKSQRPYDEKEAFKLTPQSEARRRKALEKQAAALGLTLQPAAA

SEQ ID NO: 290798 - protein, 349 aa, unidentified
MSQQCNCAIAVIGIDIGKNSFHVVGHDLRGAIVLRQKWSRGQVEARLANQPSCLIGMEACVGAHHLSRKLQLLGHDARLMPAKYVRPYSKGQKAIAEAVQRPTMKFVATKTVDQLDLQALHRVRERLVSQRTSIINQIRAFLLERGVAVRQGPRFLRAELPGILATRTDVLSPGMLRVIEALAGDWRHLDARIEGLSGEIETLAHQDQHCERLMTVPGIGPIISSAMVAAIGTGEVFSKGRDFGAWLGLVPKQISTGDRTILGSISKHGNRYLRALFVQAAWVVLVKLGPKQWERYGLKSWIEAAKKRLHYNVLVIALANKLARVAWAVLNKGRAFTCVKTDAMASRPA

SEQ ID NO: 290799 - protein, 347 aa, unidentified
MSNSLNHHWCVGVDLHKDTLTACVFCGCCGEYSFQKIPCKCRKQIAAYFASLPRPHTVAIESVGFYRWLWEMLEPIVQELVLADATQARALAGRRLKTDREDALNIAQLLAAGRLPTSYAPPMEVQILRDLTRHRNGFSRQHARVLCRVKSIMNANNRPGPARMRSDGLIRYLKAQGPKLPPRHVEMLWQCVDQLALTERQMDQAERTISEMVRRDSFHEVDGILTSFPGVAQLTAATVIAEVGDFRRFRDSKAIGRYAGLNPRVYASGGKQRIGHIAKTGSPDLRWILQQAAWTAIRTDDGVRRIFLRVAKRSGRKAAAVAVARKLLTWMWSAVTKGEPYRTRVAA

SEQ ID NO: 290800 - protein, 402 aa, unidentified
MNAVGIDVSKGKSMVAIMRPFGEIVSTPFEIKHTASDINSLVELINSVEGESRIVMEHTGRYYEALAHQLSEANLFVSAINPKLIKDFDNDSLRKVKSDKADAIKIARYALDKWQNLKQYNVMDELRNQLKTMNRQFGFYMKHKTAMKNNLIGILDQTYPGVNTYFDSPARSDGSQKWVDFASTYWHVDCVRKMSLNAFIVHYQNWCKRKKYNFSQSKAEEIYGKAKELVPVLPKDDITKLIIKQAVNQLNSASTTVESLRTLMNETASKLPEYPIVMAMKGVGASLGPQLMAEIGDVSRFTHKGAITAFAGVDPGVNESGSYEQKSVPTSKRGSSDLRKTLFQVMDVLIKTHPQDDPVYQFLDKKRAQGKPYYVYMTAGANKFLRIYYGRVKEYLSSLPES

SEQ ID NO: 290801 - protein, 355 aa, unidentified
MSKIKHIGLDVHQASISVAVLDESGKLVMQSVIATRAAAVLEFLEGLRGTLHITFEEGTYSAWLHDLLVRRVGKVVVCNPRKNALLKKGNKSDRIDALKLAELLRGGMLSPVYHGENSTRTLQELGRSYMTVTLDATRVMSRLKAIYRGQAITYGGKKLYTRRHRGEWLKQLKQPGLLRRAERLYEELDLLQQLRRQAKQDLMVESQKHPACERLRTIPYLGPIRAAVLAARVQTPHRFRSKRQFWAYCGLGLETRSSGDYQQIEGELKRSRKKVLIRGLNVDHNHDLKNIFKGAAMSASIFSGPLQEFYRERLAAGIKPEMAQLTLARKIAAIALTIWKKGESFDPTKLKAQAA

SEQ ID NO: 290802 - protein, 341 aa, unidentified
MKNKSFIGIDISKNVIDVSIFCEETPIKDFSHDVFNNSRKGFGEMCTWLKKNHVVLSNCLFGMEFTGSYSMELEKFLNTRNYQFCMLSTHVVKHYPMGPKDKSDKIDSAKIADFLYRYNGTECVKPYNMPDKTMQRLKALMNERKFLVEQRTCFMNRRQLCITKEDAQLYDGYIKKFSRDIENIELEEQKLLATDDSLLSTYKNLLTIPGIGFVNAINVIVITRNFTAFETARQYASYVGVAPHFRTSGTSVKWRPRPSARCDGQAKADLSMAATVVVQYDAELQSFYNRKLGGKQDSDTKRKALNAVKFKLVLRMFAIGKQNRKWEPLDSKSSNEKLAIS

SEQ ID NO: 290803 - protein, 442 aa, unidentified
MTNLSSSVAPIEWAAFVAIDWADQKHCWALTPTASEKVERGELNATPEAVEAWAAALNVRFSGRPIAVCLEQKRGALVFMLAKYAHLVIFPVHPKTAAQYRETFCPSGAKSDPADAGWLLDLLLRHRHQLRELRPDTPQTRLLQHLTEYRRRLVDESTRQKNRLTSCLKIYFPQLLHWFDDIGSPVAGALLERWPTLPELQRAHPGTLRRFFHEHNCRSEERIQARITGIAAAVTAVQDAAVVEAESLRARSLVALLTTLRSQIAVFDERIQEVVKNHPEERLFASFPSAGPVLVPRLIAAFGTQRDRYATATDLQSLSGIAPVTESSGKQEWVHFRWACSHFLRQTFHEYAAHSIVKSPWARAYYESQIEAKKTHHAAVRALAFKWIRVMFRCWKDGKTYDEQAYVAALRKRNSPLAALFTTTAIGWQSSAGFQRLSANPS

SEQ ID NO: 290804 - protein, 411 aa, unidentified
MKRIRDRVAGLDVHRDTVVACCRVDPDGEVEVTKQSFATTRKGLGELAVFLSGAAVTTVAMEATGVYWRSPYYALEGMFDELWLCNAQHVKNVPGRKSDLSDAEWLADVAAHGMVRPSFVPPPEIRELRELTRYRKTQVDARAREIQRLEKVLQDAGIKLTSVASAVWSVSSREIIEALISGTADPAVLAQMAKGRMRGKIDRLEEALSGHFGAHHAVVCRQIIDHIDFLDHSIATLTEEVTTRLVPFEAAVTIVTSVPGISRRTAEVIVAETGADMSRFPTPGQLCAWAGVAPASYESAGKRRPSGTRHGSQWLRRALIESARSAARTKASYYSAQYARIARRRGANKAAVAVANSMLFTIWHLLSTGAFYDDPGVDYFLRRHDPAVEAKRLARRIEALGFDVSLIERAA

SEQ ID NO: 290805 - protein, 462 aa, unidentified
MMNIQEQREMVEKANRILSEMRSFTWRDLETQGKFSKNEKLSFISDDMLIVGCDIGSETHYVRAIDTRGRELSKKALAFENDAEGFQKARDWAVQLAAANDKKQIVLGLEPTGHYWFCLAAWMISNGISVVQVNPYAVKQTKELEDNSQQKDDRKDPKLIANLVKDGNYGMPYLPEKVYAELRRLSMFREQLMEDRNRHMNRLHREMKIYFPEYKDAFGKIDGAFCIAVLKEAPFPEDILRLGAEGLRDIWHKAKLRGRGYSRAEEIVKYAETSIGLEEGTAAGKEAVRWFAEKITELDEELAEIENKLEGKCGEIPHAENVLEIPGIGGKILAGILAEMGDITRFDDVKEIQKLSGLGLVSCSSGKHKGETRISHRGRKRLRYWLFQAARSAVAHGEEYKWIHAHYTTRAGNPLQKMQSLVVIACKLLRVIYTMLKTGKKYDPEKLLKDIRYPESVQSAAA

SEQ ID NO: 290806 - protein, 371 aa, unidentified
MKQNNTLERSPKRGAKCPRRRLTIGLDLGDKSSRYCVLDEHGEVLREASAATTKKGLCQAFGAQPQCRMALEVGPHSPWVSRLLSQLGHEVIVANARQVRLISHSSRKDDRLDARLLARLARADPQLLRPIRHRSAQAQQDLTVIRVRAALVEARTALINAARGLPKALGERLPACGADSLRADKMVDLPQSLQHTLQPLLEQVESMTAKIHALDKQLEQIAREQYPETALLQQVHGVGTLIALTFVLTLEDPQRFSNSRDVGCYVGLRPRRSDSGQSQPQLRITKEGDVYLRKMLVQGAHYILGWRGPDTDLRRWGLKLAQRGGKNAKKRALVAVARKLAVLLHRLWVTGEVYEPLRNSPARPRSRHAAA

SEQ ID NO: 290807 - protein, 343 aa, unidentified
MKHYIGLDVSLKETHICIVDYDGQIVWQGECVTSPAAISEALTPYHDTIEVVVLETGGQSSWLQKGLSDLDLPTVIVDARRAKGALSCRLNKTDANDAEGLAQLARTGWYHGVMAKREETRFIRSQLLARHLLIKQRRDIENQIRAILRGFGLQVGSVARNKFEARIHELVDEQPELNSALTALLTARHSIMKQIDRLDGTLNDLYSQSKLCQRFMSVPGVGPLTALTFITAIDDPTRFEKSSSVGAYLGLTPRRYQSGEVDRSGRISKHGDALARHMLYEAASALISRVKRWSSLKAWAMKIVKRSGQRKARVALARKLSLILHRIWMDGTEFCWSKKEVGA

SEQ ID NO: 290808 - protein, 414 aa, unidentified
MDKELISFEQVVERGCGLDVHKETVVATIQGKGIKTITKSYSTFTGSLEKLRDWLKKHGITHIAMESTGVYWKPIYNVLGDDFEILLVNARHVKNIPGHKTDKRDSRWLAKLLLCGLLKGSFIPPRDIRELRDLTRYRRKLIGQVSSEKNRFQKLLEDANIKLSVVLTDVFGVTGMKMIAAILDEDGYRPEDLLQFVHGRVKASRSDIVESLRGHVTPHHRFLLRTILSNMERLETTIAEVTTRIEEVCAPFALAVEQLSEIPGVDHEGAIGIIAEIGLNMEAFPTHRHLASWAGVCPGSNESAGKNKSGRITHGNKNLRALLTQLGWAASRTKGTYFGAKYKSLVGRRGKKKAIIALGHKILVAAYFILKDNMEFKELGPEHLNNFRKDKLIAYYKKQLQHLDPNLELDGNAA

SEQ ID NO: 290809 - protein, 333 aa, unidentified
MCNYSFFIGADISKSVIDVSYRFEGKVIYLGQFPNNQKGFTKVVNKLFKISIVDTAQWFVCFENTGVYSKPLLEFLSSKSIPCKEESALKISRSLGLRRGKDDKVDSMDICQYAYEKKDSLIASKLPSTIILKLRKLLSRRDFLVRQRQSLKVSLKEQKGFIDEELYNELNVGNIILIETYDQQIKGLEESIKVLIKSDSKMATNNELATSVIGIGIITSAYMIAVTENYTTFSDPRKFACYCGVAPFPNRSGTRKGTTRVSHIANKKMKSLFSNCTMSAINFDPEIAKYYKRKKEEGKKAGVVLNAVKNKLIQRVFSVIKRQTPYVKLMTYA

SEQ ID NO: 290810 - protein, 429 aa, unidentified
MNCTQNKKIEQVKETTMIVGIDVGSEKHYFRAFNWRGIELTRKPIAFSNSMEGFNSFYNTIVELMQKSELEEALVGIEPTGHYWFALGQFMGEKDIKFVMVNPHHVHKTKELDDNSPSKNDRKDPRVIAGLVRDGRYFYSYMPTGVYAELRNASNRRFVLVEEQTRAKNRLQKWIAVYFPEYKGIYTHIDAKGGMLVLKKAPTPEEIVRLGVEGIIKIWKDAKLRGNGHKKAMLILNAAMKSIGLKSGLTEARMEIQDLIEDYELQTKRLERVNDLIKGLCQQVRYADKLLEIKGIGITTVAGFIAEVGDITRFDSTKELQKLAGLELVADSSGKHNGKTKISKRGRKRLRYLLFEAAISVVGKNEEFKEIHRYYTTREKNPLKKMQSLIAVACKLIRVFHAILTKGIRYDASKMLKDIRHPGEQLKAA

SEQ ID NO: 290811 - protein, 302 aa, unidentified
MKRKVYVGMDVHKETIQIAYLTSNTKEMVKEQQIKHNEVHIKKFINKLKTEWNEIHCCYEAGVTGYPLYRYLKSLGVNCILVAPGKIPRQSSDKIKTDKRDAIKLARLLRSGDLESIHVPSEEDEAVRDYLRSRDSLRLDLGRNRQRLMKFLLRKGNVYSTTKYWTVSHYKWLNNLHFENEILHETFNDYYSRVRVQEENLKAMDQKIQEIAKSEAFRERVGILRCFRGVDYLTAMFLLSEVNDFRRFKTAGSFMSFLGLVPGEYSSGSKRKQTGITKTGSPRLRRIFDGSCLAASLPRNRK

SEQ ID NO: 290812 - protein, 316 aa, unidentified
MNETIVEKFVGIDVSKSTLDVSIEPSIQMLHVAYDEAGIKQIVVRLKEVNPTLIVMEATGGLEIRIATELASKGLPVAVINPRQVRDFAKATGQLAKTDKVDAAVLAEFAKKIRPHIRPLKDADTRALDDMVSRRRQLVDMRVQETLRLGTAASKPLEKSLNKHIAWLDKRIAEIDTDLTNRLRKSDAWRTKDDLLRSIPGVGPVTTLTMLAKCPELGKLNRREIAALTGVAPLANDSGKHRGKRFVWGGRADVRAVLYMAAISAIRCNDTIKVFAERLKKAGKPPKVVIVACMRKLLIIMNSMLKNNTPWNPKIA

SEQ ID NO: 290813 - protein, 449 aa, unidentified
MSRPQVIDDQEHERVHERVAAVDVAKDTGMVCTRTPHPARPGARRATVWTVKARMGAVRALGRQLKRDGIEVVTLESTSDYWRIWFFVLEACGLAVQLVHAAQAKNLPGRPKTDKLDAMWLARLTELGLLRASFVPPKAIRDLRDYTRARTRLVQERTRCWQRLEKLLEAALVKVSSVASKLTTISAQDMIKAMIAGQRDPQVLAALARTRMKAKHDDLVQALDGMFDDHHGELAGLLLDQIAFLDHRIEVLGARAAELTAAMPAAWGVEPDGTTGPDAGATAGAPVLNAVARLAEIPGISENLARSVIAEVGLDMTRFPTAGHLVSWAGLCPSARQSGPRSRPGKKGQGDTWLRGSLGQAATGASRTATFLGERYSRIVRRRGKAKAQVAVARSILVIIWHLLNNPEARFTDLGYGYYQARTDTDRKLRNHIRQIQALGFDVTITKAA

SEQ ID NO: 290814 - protein, 316 aa, unidentified
MNTSSPFVGIDVAKDELVIALGPSRDLVAGPNDESGIRHVLEHLQAACPELIVLEATGGYETAAVAALAAAGLPVVVANPRQVRAFAKAMGKLAKTDSIDAHVLALFAKRVRPPIRPLPDEALRMLDALLTRRRQLIEMLVAERNRLAHALPPVEKSLKQHIRWLERRLADVDSDLDQAIQQSPVWRAKEDLLRSVPGVGPVVSRTLLADLPELGALNRKQIAALVGVAPLAKDSGTLRGKRMVWGGRAPVRAVLYMGALIASRHNPVIRDFYQRLVAAGKPKKVALTACMRKLLVILNTMVRNNTRWGERYALSA

SEQ ID NO: 290815 - protein, 419 aa, unidentified
MAFKILRKNCCGLDIHKTWIFACIGITDSNGRTEYKQARFSSFSNGLRDLADWLAKCSCSDVCMESTGKYWIPVFNILEKTCWVTLAHPKYTKPQKGNKTDRKDAKWICDLYMCGMVKPSFIPPPDIRQLRDLMRYRVKLTNMLTGEKNRAQNCLTVSNLKLDDVFSDVFGKSSRSIIQYILEHPGEQFDVTPFIHRRCKHPVEEIQAAVDGVVSREQAAKLKECLLHIDQLNAHRERIEAEILRLAEPYPYQLELIRTVPGFAAAPLTAVALISEIGVDMSVFPSAKHLASWAGCCPRNDQSNKKVKSTRISRAGCYLKPLLVQIANAVIKSDRHPECRERYRRIKARRGHKKAIIAVCRMLLTAIWNVLSKLEPYSAKGYLADKLTEHSVVISKAEGLALLRKRGYIFKDELAVESG

SEQ ID NO: 290816 - protein, 357 aa, unidentified
MTRGVIVKARILTTLKEADVRKFIGIDLHSNNCVVVVSDEEDRVLLKQRVPNALSEIVSMLAPHREEAVGVVVESTYNWYWLVDGLMDAGYPVHLANPSAIKKYEGLKYSGDFADAAYLAQVLRLGLLAEGYIYPREERAARDLARKRMQLVRYCTAQILSIEIIVARQTGGRMKNEVIKRLTAEQVEALGFAPDVTLAMESNRAVSQVLQQQIEALEKRLKERVNLRPEYRLLKTAPGIGETLATTIMLETGTVARFAKVGNCSSYCRCVDSLRESNGKKKGEGNTKNGNKYLAWAFVEAANFALRYCPEAKRFYERKKRTTNGIVAIKALAHKLARACYHVLREQKPFEVKRCFA

SEQ ID NO: 290817 - protein, 408 aa, unidentified
MERYYLGVDWADKFHQVWVSDAQGQKVAENKVVENMEGLAEFSRWLNESRARGIELWAAIEKPQGRIVDFLLDHGVVVYPVNPKALDRARDRFRMSQSKSDSFDAHVLAEFLRTDHGHLRALEPNSDDAQELKLLTRDQHRLGRQKTRLLNQIRVTLKEYYPRPLEVFSDLEAQIARDFLKQYPTPRALSDLTQRKWNRFAKREHHLGEGRCKELWEKLNQPQLQVPDHVVRAKAQLLLVLLAQLEASSDAVQTYNERVKHFFASMPAAKLVKTLPGAKTGTIVAMLWAELGDSNNRWESFHHLQAEAGVVPVTKASGKSHVVHFRFSCNKVMRHASYWLAFVSLNQSEWANHYYRDQRAKGHNHHQALRALGAKWLKIIFVMWRDHKPYDENYHLANITRQKMRQAA

SEQ ID NO: 290818 - protein, 431 aa, unidentified
MKCKQSKKQNQRITRISDKTLVVGADIAKETHVARAIDFRWIELGKDCVFSNTRTGLEQLVQWMKELQREHAKSDVLFGIEPTGHYWFALAEYLGREGIPLVIVNPHHVYKSKELEDNSPIKNDYKDAKVIADLVRNGKYSEPKLPTNIYADLRILMNLREKIMVNFGQVQRRVQNWLDRFFPEYAEVFKDWEGKASLITLGEFPTPGEIVELGTEAIVQRWKKDVKRAVGGKRAQHLMETARSSIGLTEGLPVAKIEIKTLLEQYEMFARQLEEILAEVERLLSQIPGTKEMLTVPGVAVVTLAGFLAEVGDLSGYEHGQQIIRLAGLNLKENSSGKKKGKSSITKRGRARLRALLFRAVMPMVAKNAEFKALHQYFTKRSQNPLKKKQSIVALCGKLIRVLHTLGTKQLPYNANDVLGPVRQAQLQMAA

SEQ ID NO: 290819 - protein, 321 aa, unidentified
MKTVLGIDQAKKKFDVALLINGKYKSKVFENNSAGFSVLLTWLAKNDVETVHACMEATGTYGEALARFLYEADHSVSVTNPARIKAFGESELLRTKNDKTDAKLIARFCEKMNPTLWQPSPAEVEYLRGLGRRRDALVSMRTQEINRQETSNETVNSSVQTVLECLNKEIEQISKLIKDHISKHPDLKHKHDLLNSIPGVGPATIEAILSEINAFEGFETVEQVVAYMGLSPKEHTSGTSVKGKSAICKIGNTRLRKALYMPALSAIIHNPIVKALYDRMKAKSKNGMVIACACMKKLIHLIYGVIKTNKPFDPAYTLKTA

SEQ ID NO: 290820 - protein, 411 aa, unidentified
MEVLHERCAGLDVHKAVIFACALVGPGRRCERFKAKFGTFPEELAELRQWLVGLGVTHVVMESTGVYWMPVYDALEGAVEIVVGNAQHIMNVPGRKTDQTDAEWLAKLQRSGLVKPSFVPPREFRELRQLTRYRRAIVRERASEQNRIEKHAQIAGIKLSSVASKVLTVSGTDMLREISEGNTDPKHLASFARSHLRKKIPLLEKAFPTSISPHTQQLLGAQLRQLDRLDRTVAEVELQIAAKIEPWREVIARLDAIPGIDVVSAVDILAEIGTDMSVWPTHRHIAAMAGVCPANFISAGKRLKNRSRPGNPYLKTILVQVSSSAVNVEGSYFRAKYLRIKQRRGHKRAIVAVAHAILITIYYMLKRGEDYHERGGRFVSEEEKHRKKLALVKQLESLGYTVALNESQLTA

SEQ ID NO: 290821 - protein, 346 aa, unidentified
MEHIGVDVHKMQSQICILGDEGEVIEQRIRTDRRRFAAVLGSRSRARVLLEASTESEWVAQSIERLGHEVIVADPNYALMYATRNRRVKTDRRDARVLAEACRLGAYRRAHRRSATRRQVQAALIVREALVRSRSRYISVVRTLVRREGLRVGTGSTAKFLDRLDRVVLPPALAAELAPVRAVLGPLTAEIHTADQRLERLVHADAVMRRLRTVPGVGPITAASFTVVVDDVARFHDAHRVAAYLGLVPSEHSSGERRQRGAITKMGNRRVRWILVQAAWALWRDRTERTAVLRRWAERIAERRGRPVAVVALARRLAGILYAMWRDGTDYEPARVGPHTVTTRAA

SEQ ID NO: 290822 - protein, 357 aa, unidentified
MTWVGMDVHARSTHAAAISSLTGDLERVRFGPGVEAVIEWLVGLSGPVRAVYEAGPTGFGLARAAQRAGVEVMVAAPSKTPRAAGDRVKSDRKDAELLARLLLAGQLKAVWLPPDWLEAVRHLARVREAVRRDLGRARQRVSKLLLVEGRVYPEPTTWNRAHRAWIARQRFGQPATELALVDLLAAVDGLVARRGALDERLSRLAQDPRLWPTVARLRAFRGVDTLTALALHLELGGNWQRFGSPVRLGSWLGLTPSRTQSGESESQGQITKTGSAIARRLLVEAAWHYLRQPAIGATLRNRQLGQPDHVLQIAWRAQHRLHRTHMRLRERAKPGNVATVAVARELAGFLWAAATAP

SEQ ID NO: 290823 - protein, 388 aa, unidentified
MIYVGIDIAKLNHFAAAVSSDGEILIEPFKFTNDYDGFYLLLSKLAPLDQNSIIIGLESTAHYGDNLVRYLVTELYQVCVLNPIKTCQMRKNNVRKTKTDKVDTYVIAKTLMIQDNLRFVSFFDLDMMDLKALGRFRQKTIKQRTRLKIQLTTYVDQVFPEIQYFFKSGLHQNAVYALLKEAPSPKEIASMHMTHLANLLKVNSHGHFTKEQAKELRVLAQKSVGANDSAISIQITQTIQQIELLDSQLEKIEAEMTDIMKFNDSVIMTIPGIGYINGGMILGEIGDIHRFSNPNKLLAFAGLDPSVYQSGNFQAKTTRMSKRGSRVLRYALVNAAWNVVRNNATFKAYYDAKRAEGRSHYNALGHCSGKLVRVIWKMLTDNVEFNLK

SEQ ID NO: 290824 - protein, 385 aa, unidentified
MQKRHDDSKACLTAFVQDNTVIATIEMSLASWLVAGMIPGVNREPLKKIAPDPEVLLRLLYRWRDEAIKAGKEITRIAVAYETGRDSFWLARWLRDRGIDAQVIHATSVAISREHRRAKTDRIDTAMLRRGFLGWLRGERGHCSMAVVPTIAEEDAKRPHRERESLIKERTSTINRMKSILVQFGVRNFKPTLHKAVEKIDAVRTPEGIPLPPNASAALRRHIERFRLLNEQIKTIEKTRLQRLREHPAGKFNAMVFLLVRIIGLGVETAEQLVQEILSRNLHDRKAVACYAGVTGSPDESGASRREKGLSRSGNGRVRKILIQLSWRMLQFQPDSGLVRWFENRTANSPRSRKPMIVALARKLIMALWNYVNTGVAPDGFKLAK

SEQ ID NO: 290825 - protein, 409 aa, unidentified
MEGLIERGAGLDIHQATIVATVRVPDEAGGRRVVTHTFGTMTVELLALREWLQAYGVTHVAMESTGVYWKPIYYLLEETVTLLLVNMQHLKQVPGRKSDVQDSEWLAQLLECGLLRGSLVPPPPIRDLRDLTRYRKKQIEDRTAEINRLYRVLEEAGVKLSSVMSDIMGRSGRAMLEALLAGTTDPTVLAELARGRLRPKIPALRAALQGQFRPHHAFLIGQILTKIDFLEEAIASLSEEIDRQLAPFVATVERLTTIPGWGRRTATTVFVETGGDMTRFATAARLCSWGAMCPGLDESAGKRRRGKTRDGNRFLRGALIESALAATRANGTALQARYRRVKRHRGHKKAIVAVGHQMLEIAYYIMRDATTYQELGADYFARRDRDRTIRRSVKQLEALGYRVTLEEAA

SEQ ID NO: 290826 - protein, 422 aa, unidentified
MKKVTEFTKKVKGRVNNPVLTKAIWVVGIDIGKKKISCALMKKDQTVLCRFNAKASIDGYKKMLDRVKEKTKGRGKVVYAMEPTGHYWMVLGQFFEDHNRQYVLIHPLAVARSREVVRLNRSKTDPMDARLIGELACRGIATRTQIPKDYWATLRFLAREYMDREKDIVREKLRINSYVETTLPGFLGVFPKPLCLAGRACLRTLADFKEAIKGDFPSFEKKVRKHYTGKRLLVSRVRQVYDTLRQSDTMGLRAGRYAMFGRIINSLERLEVAEKQQETAKESLVSYYNQSEYKKYLNSVQGTTSTTNALVLGFMGNPASYDNPKTLIKLAGCDPVLNESGKYRGKTSISHRGRSLLRKAADRTAFTIEKRNVVFRNFFHNLITRQKNKLTKRQARIACINKYFRIIWVLCNHRVTFNPSLA

SEQ ID NO: 290827 - protein, 303 aa, unidentified
MGSHEAALSCPSVYLTRMPLWIGIDVAKDTLAVHVLPQDQLLSFPNTAHGHQRLCDHLAGQCVGNALLEATGGYERAVMTALATAGIAVTRINPRRARAFATALGTIAKTDRLDAALLARMAQLVQAPAPVPDPLREQLRMLVQRREQLVQQRDDERRRLHQATLAVVRACLIEQIGDLRRRIQRMNQAIKQVRCQLDDALAHALSTVPGIGVVTTASLMAYLPELGTLDRRQIAALVGLAPYNVDSGQHRGKRRIRGGRASIRRVLYMACWSVVRTQASFKERYQQLRARGKPAKVAIEPAP

SEQ ID NO: 290828 - protein, 429 aa, unidentified
MTVSNDTPQRVTLVAVDIAKNSHDVLIESPARGRRRRLRLANNLEDFEQLAGYLRSLKSPVLIGFEATGNYHRPLAYFLHRQGFELRLIPTLALARTREAMHNSWDKNDPKDAQVILHLLKTGLAQTWHDPVVKGINDLQELSKTHFQVTLARVRVWHTLRNHYFALYFPEIDRFIRSDHSVWLVQMLASFPTPASITALSEAEFQKQAWNLVGRKVSKRALLAEIYAASKRSIGVPVELDSAAIAMFRLVLGEYLELHRLRERIAERAAIMLGDNPDSRRLMTVPGIGPANALTILAEAGDLRRFRHHRQFLNFCGLNLSTLQSGKSRSQSHISKYGNARLRTALWMAAQTAVRMRENSFRRKFDNYVRGNPLDADLRRKAYTAIAAKLARVIFGLIKSGADYRPFFEHKFQVEEPSRAGAVGAISTP

SEQ ID NO: 290829 - protein, 407 aa, unidentified
MDRIFVGIDVGSRDNAVYIMLPDGSKHSSFGVQNNLGGAQTISQRVVAVLTGKGFSAVSIGIEATSVYGDSLMCFLREDGALGRFDRKLFILNPKQVSKFKAMYSDLPKNDPVDAFVIADSLRFGRIGSPIYMDDYRYKALQNLTRARFHAVQNLTREKQRFMNYLFMKCSGLAQEKIFSDNYGAAALAFFEEFETPDDIADMDVEQLTAFIAEKGKNRSPRPDEIAKEVQAAARGSYRLPKTVNDSVNQVLSISISSMRAMQAQIKALDKEIERQFQNIPNTLISVRGIGPVFSAGIIAEVGDVNRFASQARLAKYAGLAWTQHQSGQFEGQHTRLIKSGNRFLKYYLCEAANSLVRCDTEYRRYYDLKYKEVNKFQHKRALALTARKLVRLVFRLLKDNRLYIPA

SEQ ID NO: 290830 - protein, 272 aa, unidentified
MENIALIGIDLGKNSFHIHCQDHRGKAVYRKKFTRPKLIEFLATCPATTIAMEACGGSHFMARKLAELGHFPKLISPQFVRPFVKSNKNDFVDAEAICEAASRPSMRFVQPRTESQQAMRALHRVRESLVQDKVKTTNQMHAFLLEFGISVPRGAAVISRLSTLLEDSSLPLYLSQLLLKLQQHYHYLVEQIKDLESQLKRKLDEDEVGQRLLSIPCVGTLTASTISTEIGDGKQYASSRDFAAATGLVPRQYSTGGRTTLLGISKRGNKKI

SEQ ID NO: 290831 - protein, 354 aa, unidentified
MIIIGADYHPGFQQIAFVDTDTGELQERRLEHREEAEAFYRELEAQGLKVRVGMEASGHARWFERLLGELRFELWIGDAAEIRTKRVRKQKTDRQDAQLILRLLLENRFPQVWVPSWENRDLRQLLWHRHRMVQARTRIMNQLQAVALNEGVRCKKRLWRDAGREQLQSFKLAPWASRRRRDLLELLDRLTPTIAELTQAIEQEADKWPEARRLQTHPGVGALTALAFVLIIGRADRFECGKQIASYLGLVPLEDSSGQRRRLGHITKQGNSLLRFLLVEAAQVTVRGDQEWRNRYFHLVLRRGRKIAKVAMARRLAVRLYWMWRKRWDYEKLKNFGSHAGQPGHPDGVHSSTE

SEQ ID NO: 290832 - protein, 345 aa, unidentified
MHYCGLDIATKSSYMYVTDELGKKSTAGEISTSKQGLERRLRPYVRRGLKVAIEAGNQTVWIYEVLVGMGAEVTVVNPAKVKAIAESRRKTDKIDAKILCDLLRLDGLPQPVHMPGRQTRELRGILVARRQLISARTKLCNVIRGMLRQEGIRLPMRALSSQVGWDRLLKRKYCLEHIRPAIESYARSFTALSESIKELDRQLQEREKSDERVERLKTIPNVGSISSLTLVAALDDVHRFSSSRKVVSYSGLAPTVNASGERVVYGPISREGRSEIRAVWVQVAHRMAHDRRAEARPLRRWFNRVARRRGKKTATVALARKILTIAYQMLKEGEGYNAARIGAAG

SEQ ID NO: 290833 - protein, 361 aa, unidentified
MGRTKWTVSSLGDYAPRESLVASSFGPGPEQMKGSKSRMQGKELSEQVPSAEAYIGIDVCKSHLDIHVHPSNLAYRVSNDRRGVDAMLRQLANSRIALVVVEATGKWHRLAHRRLHEAGHDVAVVNPYRSRKLADAMGHLAKTDAIDARTLALFAQALRPRVTPPPPVAVESLREMVVARRAAVAELTALNNRIKTTEHRLVARQQRARIAMLQRHIEALGTAIADAVKADTALAGLFRIITSIPGLGPVAATTMIAELTELGACSRTQIAALLGVAPMNRDSGLLRGRRIIKGGRAPLRAVLYMAAIAAIRSNPDIKAFYKRLRGKGKEAKLALTAVMRKLVILANTLVKENRTWTPIAP

SEQ ID NO: 290834 - protein, 345 aa, unidentified
MKKVMAGIDLHSNNVVIGIMDTDGKRVTSGKLPCDLKEIAKFLAPFKKRLEQVAVESTYNWYWLVDGLQALKYPVVLANPAAMQQYSGIKHADDTNDAFFLAELLRLKILPTGHIYEAQLRPVRDLLRRRMTLVHQRTALMLSFKSLYTRTTGQEMTLSQLKELEIKEAQDLYAHPANQMIAGMQIKHIEQLTESIDKIEKVVMASARELPSYGKLTTLPGVGIILGMTMTMEVGDIKRFASPGDFASYCRTVQAQRTSNSKKKGENNSKCGNKYLAWAFIEAANFARRYDPQCRKWYDRKAAQTSKVIATKALACKLAKAAWFLMSQGSDYDTQRMFGQPATVK

SEQ ID NO: 290835 - protein, 351 aa, unidentified
MDVHKDSISIGILRPDDSMDVERIFHDEESVRRFIARMGKPRQLVACYEAGPTGYELHRLLQRLQVPCHVVAPSLIPKAPGDRVKTDRRDCRRLARLHRAGELIAIRVPSPEEEAVRDLCRARGDVVIDLDRARRRLGAFLLRHGQIWRGGSNWTLKHEQWLLGLRFEDAALASTFAHYRSIVEERRLRLQALESDLVPYCEQDPYAEGVHRLCCYRGVDTIGALTLVSEVCDWRRFAKASSFMGFVGLVASESSSGGHTHRGHITKAGNVHLRTQLVESAWAYQRGPYVGERIRRAQERCSPATRERAWAAQVRLCGRFRRLATRKNVKSVVAAAVARELAGFLWGEMTA

SEQ ID NO: 290836 - protein, 348 aa, unidentified
MAHFVGLDVSVEETSVCVVDDVGKVLCERKVRTEPEDIAVLLTSIGGDYIRIGIEAGPLSQWLVNGLTEADLPVVCVETRHMKALLKAQQINKSDRNDARGIAQMMRVGLFKPVHVKTLIAQEQRMLLTSRKLVQRKLMDIESDMRGTLRNFGLKVGAVSSIRYEARIRNLVEGFPRLAAIIEPLLTVRRVMRQQLATLHKLLLNAVRVDPVCRRFMTVPGVGPIVALTYRASVDQPHRFIHSRAVGAHVGLTPKRHQSGEIDYDGGVSKCGDSMLRAMLYEAAQSMLTHSKKWSWLKAWGMRVAQRRGMGRAIVAVARRLAVILHRMWVDGTDFRWRNGSTAVVQVA

SEQ ID NO: 290837 - protein, 345 aa, unidentified
MTIVEARAITGGVDTHADVHVAAALDPIGGLLGVQEFPATAGGYARLLGWLGGFGTVALVGIEGTGSYGAGLARHVTAAGVRVVEVDRSDRQDRRRQGKSDPLDAVSAARAAQSGRARGAPKGRDGAVEAIRALMVARRSAAGERTRTINQARALILTGPDDLRARFAKHTAAALIAGLASLRPRPGDVAGHATRVALRELGRRAVFLDGQLGRLDELIVPLVSARAPGLLALYGIGPHTAALLLIAAGDHPGRLRSEAAWAHLCGAAPISASSGKVTRYRLNPGGDRQANHALWRIAFTRMGSDPATRAYAERRTAEGKSKAEIIRCLKRYVAREVYPYLRPAS

SEQ ID NO: 290838 - protein, 347 aa, unidentified
MTLTIVETRAITGGVDTHADVHVAAALDPIGGLLGVGEFPATPAGYARLLAWLGGFGTVCLVGIEGTGSYGAGLARHVTAAGVRVVEVDRSDRQDRRRQGKSDPLDAVSAARAAQSGRARGAPRGRDGTVEAIRALMVAKRSAAGERTQTINQARALVLTGPDDLRARFAEHTAAALVAGTASLRPRPGSTLGYATRIALRELGRRAEFPGGQLERLDELIAPLVTAHAPGLLALRGIGPNTAALLLIAAGDHPERLRSEAAWAHLCAAAPIPASSGKTIRYRLNPGGDRQANHALWRIVFTRMGSDPATRAYVERRTKEGKTKAEIIRCLKRYVAREVYSHIRPAG

SEQ ID NO: 290839 - protein, 412 aa, unidentified
MDVLYRCCCGLDVHAKTVVACLIKGGQKQTRTFATMTEDLLVLADWLGAHGCTHVAIESTGVYWRPVFNLLEGLFVVILVNARHMKAVPGRKTDVRDSEWLADLLRHGLLKASFIPPHEIREVRELTRYRQTLVKSPAAVTNRIQRILECGNIKLGQVASDVMGVSGQLMLRALAAGETNGQTLAALARGQLKRKTDELRRALTGRLSAAQRFVLQELLDRYDELGKALDRVNVQIEREIAISPEPLLGPAVELVQTIPGVGRQVAEVVVAEIGVDMARFPTAKHLASWAGMCPGSHESAGKSKSGKTRQGSKNLRTALVQAAWAATHTKGTYLAAQYRRLVKRKGRKKALVAVAHSLLVSLFHMLARKVTYRELGGDYFERQPTATHCRRLLRQLEALGMKVTVETQPATA

SEQ ID NO: 290840 - protein, 467 aa, unidentified
MTESSDYESVQVFIGVDVGKDTHHAVAINRSGKRLFDKALPNDENKLRSLISDLKQHGQILLVVDQPATIGALPVAVARSEGVLVGYLPGLAMRRIADLHAGEAKTDARDAAIIAEAARTLPHALRTLKLADEQIAELSMLCGFDDDLAAQTTQASNRIRGLLTQIHPALERVLGPRLEHPAVLDLLQRYPSPEKLASLGEKKLAAQLCKLAPRLGKRLAADIAQALAEQTVVVPGTNAAAVVLPRLALQLITLRKQRDEVALEVELRVLAHPLYPVLTSMPGVGVRTAARLLTEVACRDFTSAAHLAAYAGLAPVTRRSGSSIRGEHPSRRGNKALKRALFLSAFAALRDPLSRAYYTRKMSQGKRHNQALIALARRRCDVLFAMMRDGTFYTPQGHNMLDNLIGPPPKPSMGRSLLLFQRMVIQSYISPSMTCQYHPDICGSAIYSTKRYLRSLRPCTRIMVKKA

SEQ ID NO: 290841 - protein, 407 aa, unidentified
MIFVGVDWAEAHHDVHVADGEGKRLAKVRLPEGVEGIARFHELVGGHAEEPDGVVIGIETDRGLFVAALVAAGYQVYAVNPMSTSRYRDRHSASGAKSDAGDAQVLSDMVRTDRHNHRLMAGDSEGVEAIKILARAHQSMVWSRGRQTNLLRSTLREFYPAALVAFDDLASPDALEVLRIAPTPTLGAGLSRSKIAAALRRGGRQRRVDERAAEIQTALRTEQLQAPARVATAMGASVAASVAVIAEMVAQTALLAEELSAGFEQHPDAEVVRSLPGLGTILGARVLGEFGDEPNRYATPKSRKNYAGTSPITRASGTKKAVLARHVRNRRLADAIYLWAFASLSASPGARAYYDARRAGGDGHHQALRALGNRFVGILHGCLASHTIYDENTAWAHRPENDLEEAA

SEQ ID NO: 290842 - protein, 344 aa, unidentified
MNITRVGVDIAKSVFHVHAVDRHEKIQWQAKHTRNQWLEALCERVSLGAEIGMEACASAHYWGRELQKRGYHVKLIAAQFVKPYVKSNKNDRVDAEAICEAMSRPGMRFVAVKSVKQQDAQAVHRIREELVGQRTAKANQIRGLVGEYGIVAPAGIQKLRFSLPQWLEDAENGLTDEFRGLLADLAEDLRHLDRRIGDLDERIKQCVMNDPVARRLLELRGVGPLTASALAGALGDGKGFRKGREFAASLGLTPRQHSTGGKDKLLGISKRGDSYLRKLLVHGARAVLRYSKARDDGLSRWLNELTARKHVNVATVALANKTARIAWAIVHNDTAYDPALVAAQ

SEQ ID NO: 290843 - protein, 373 aa, unidentified
MGAFRRIRQFDQKGGDNMISIGIDVHKNRCVATIKQESRRKLEQSSFDNTTHGITSFILHIKRTYGKNVQAVCESTANYWIRLHDALEDNGIDTVLAHPAKTKIIAQAKLKNDKLDSDVLADLLRSDMVYESFVPEKYYRDLRSLVRTRLNRIQSRTKHKNMIYAILAKYDYTQPTIKTFSQKGIQWLHEINLTEVDRMAMDAYLENIEITQKQIDTFETKIAAISNEDTRTRLLMSMPGINYVTALTILSEIVDIKRFATAEKLVSYAGLAPSHRDSDQTQKGGGITKRGSAWLRNAMVEAANTTIRFDPRMESFYSRIAKRRGKQKAKVAAARQMLEIIWHMLSNSEEYRTQNHELTLRKYKKMKLRSKLS

SEQ ID NO: 290844 - protein, 418 aa, unidentified
MFKILKNNCCGLDVHKTWIYACIGITDSNKRTEYKQARFSSFTKGLNELCDWLAKYNCNDVCMESTGKFWIPVFNILEKNNIWVTLSHPKYTKPQKGNKTDRKDAKWICDLYMCGMVKPSFIPPADTRELRDLVRYRFKLTCMITGEKNRAHNSLTVSNLKLDDVFSDVFGKSSRSITEQILQHPGETFDVAPFVDGRCKTPIEEIQAAVDGAISTEQAVKLKQCLNHIDELEMHKAEIEREIFRLSDKYESVLNLIRTVPGFDKNPLTAIQVLSEIGGDMSVFPTAKNLVSWAGCCPRNDQSNHKIKSTRISRAGSYFKPVLVQVANALIKSRKHPEFTTRYRRIKARRGHKKAIIAICRMILTAIWHILTDLKPYTPEGFLESRPVNKSKVLTTSQALNLMKQRGYIIKDDVVSVT

SEQ ID NO: 290845 - protein, 401 aa, unidentified
MIGVDPHKGSHTAVAIGPGEEPLGELRVRACLAQAGQLMVWAQAWPERTWAVEGAAGLGHLLAQQLVAAGERVLDVPPKLAARVRLLEAGDTSKNDPNDALSVAVAALRTRARRPVRAEDHAAVLKVWAKRHRDLARARNQVTCRLHAVLCELVPGGVSKEITAGQAARVLDQLTPSGAVAQARCELAAAFLEDLRRLDAQLRDTKKKLAAAVRASATTLTQLFGVGPVVAGTVIGDVRHVSRFPSRDHFAAYNGTAPVEVSSGNRKIYRLSLRGNRRLNHAIHMAAITQIRHKHSDGRAYYDKKIAEGKTHKEALRCLKRRISDAIYARLLADARQGAAASTKDPGGQPGNDSDASVAGSHPEHRLFGQATPESSPILRPVTQSDPTAAKRNLKKRRKTP

SEQ ID NO: 290846 - protein, 338 aa, unidentified
METYAGIDLHSSNNYIGIINEQNQRLYGKRIPNELNRVLMALEPFKDTLKGVVVESTYNWYWLVDGLQEHGYKLHLANPSAIKQYEGLKHTDDKWDAFWLAHMKRLDILPEGYIYPKEERPVRDLLRRRLLFVRHRTSHILSLQSMITRNLGLKMSGNAIKKLKEEEVEEMFDSSNLVFMAKNNIATIQFLKKIIKDIEKEVKSQVKLRKEFKMLLTITGIGNILGLTIMLEVGDPNRFAKVGDYSSYCRCVKSERLSNGKKKGENNKKNGNKYLSWAYVEAANFAIRHSVKAHSFYQRKKAERNGIVAIKALSNKICRASYYIMRDRVPFNEKMLFR

SEQ ID NO: 290847 - protein, 405 aa, unidentified
MEIVIEKGCGLDVHKGTVVACIMGTGIKKEVRTYTAMTHDLLRVKGWLQEAGITHVAMESTGVYWKPVFNILEDHFEVILVNARHVKNVPGRKTDVQDSEWLCRLLRSGLLKGSFIPPKRIRELRDLTRYKRKLIQTIVSEKQRVEKVLEDANIKLSSIASDTFGASGKKIIEELMRGKLEPEEMAELSKGRLRQKREHLKQALVGEVREHHKFMIKASLKHIRAMEKILLGIERKIREKIGRDYKEEDELLQTIPGVKENASTVIAEIGVDMDIFPNEMHLSSWSGMSPGNNESAGKKKPGSTTYGNKCLKAMLIEFAWVASRTRDTYLRSKYHSLVGRRGKKRALVALGHKILIMCYHILKYKRPYKELGGDYLDKRRKDRITRSYIKRLNHLGYEVTLREAA

SEQ ID NO: 290848 - protein, 343 aa, unidentified
MKEVCIIGVDLAKNVFQLHGAAADGAVLFRKKLSRPQFQRFMSEHPQCLVAMEACGGAHHWAREMERAGHEVKLIAPRYVKPFIKRQKNDAADAEAIVEAALRPTMRYVEPKSGEQQARSILFRTREQFVKQRTEAINALRSHLYEFGYVAPEGIGYLPRLEVVVEDPGSDLPPLAREICRELLDQIAHLTNRINAMKKRIDAIAREGETSRRLQTMPGVGPISALAVETFAPPMEQFKRGRDFAAWLGLVPRQASTGGKQRLGKTSKMGQRDIRRLLITGAMAVIRWALRHGAPQNPWLARLLERKPPMVAASALANKMARGIWAMMTRGEDYRGPEIGSAA

SEQ ID NO: 290849 - protein, 347 aa, unidentified
MLIIGCDFHPGFQQIAIFDNRTGEIEEKRLQHRAEAEQFYRSLAEQEVRVGMEACGHYPWFERLLAELGFDLWFGDAARVRASVVRRQKTDRRDAEHLLHLLIEDRFPRIWVPSLEVRDVRQLLVHRHKQVQARTRTKNQLQAMALSHGVQKKYKLWTQTGRAELEQLPLLPYAAERRQKLLEELDGLETEIRQLDRRVAEEAGQRPEAVRLMTHPGVGPVTALAMVLTLGPAERFESAKQVGSYFGLIPSEASSGGKQRLGRISKQGSSFLRFLLVEAGQTAARYDPQLKRFYRRLATRKNRGVAKVAVARKLATRMYLMLREGWTYAQLNQAVMSVSPSHSVAGE

SEQ ID NO: 290850 - protein, 358 aa, unidentified
MVQRKELNFEGQNIYIGIDVHLKTWHVSILTESGCLKKHSQQSSAQALFEHLKKHYPNGNYLSAYEAGFSGFSTYYSLLDFGIECLPVHAADIPTGQYESVMKTDAIDSTKIARALKSGLLRGIYIPKKEVLDDRNVMRLRITLKRQLSGYKSRVKHLLYNNGVIYPECFQNSKSHWSKRYLKWVHEDVQLLSESRNSLDLLLRQVELFRKSLLEITRLVRTLSRNGRYGEAYENIVSIPGIGMITGMCLLTEIGDIHRFRNERQFASYLGLVPTSHSSGEKTSHGEMTFRGNKRLGPLLVESALLAIRQDRALAAAYREYCKRMLPQEAIIRITRKLSNRILIILKSGKKYEHDRCY

SEQ ID NO: 290851 - protein, 413 aa, unidentified
MDVLHSRCCGLDVHKSSISACVLLREAGRVQKHQRRFGAMTQELQELAEWLRQFGVTQVAMESSGVYWKPVWNILEGQFTVVLANAQHIKNVPGRKTDQKDAEWIAQLLQYGLLRASYIPCEIIRDLRDLTRMRASLSQEASRISSRIQKVLEDANVKLASVATNVLGKSGRAMLEDIITGEDDPEHLASLALGHLRVKIPQLRLALQGKIRSHHRFLLRRLLDQIQFLEHEIALLDERLEDIGRQRPDLAQAVARWDTIPGIEQVAAWALLAEIGNNMAQFPTADHLASWAALCPGNHESAGKRLRGTTRQGSTWLCRMACQCAWAAARTKNTYLSSQFRRLAARRGKKRAIIAVAHTLIVIGYHLQKNQSNYEDLGGDYFDRIHSDGLKRYLVKRLQQLGHKVTLEPMEAA

SEQ ID NO: 290852 - protein, 445 aa, unidentified
MKHARKRYVGLDVHKDVVEYCILDAAGKKIDGGRILCEQSVLQRFATQTLSPKDHVALEATTNTWSVVDIIEPHVAKIVVGNPLKTKAIAEAKVKTDKIDAMILAQLLRCDFLPTVWIPDAKTRVLRRLSSFRKSLVQDSTATKNRIKGILNHLLIKHAVVWSKDGLDELKKLDIPVHERIILDCEIAVLEHLRTQIDQVELEIKKLAYEEENVRLLMTLPGVDYHTAVAVIAAFGDISRFKDADHAASYLGLVPRTKQSANSCRHGSITKAGSSLARSLLCEGAQYLSRSESPLGVFVRRLLQTKTWNKAIVAGARKLATIAYHMLKNKEPYRYAAVVRTQAKLGNLRKSVTGKKIEPQRYRYDEKLTEHVKNRGDVSVRFIPPLSEVYAKEGLPPTRSFDKLSIGEQRTIKEMGLMVHVRKSETVQVIVKPKKQKQATCEKVV

SEQ ID NO: 290853 - protein, 521 aa, unidentified
MESVAAIFSLVARKRFGVFEDPVCETASIFRRLSQAASLSQGNQTMKKHKKTKPNPEAAKPLHEPKPDAAGIDLGATEIWVAVAPDRCQMPVRRFGAFTQDLLAILQWLLECGIRTVAMEATGVYWIPLYQLVADAGIEVCLVNARHVKNVPGRKSDVRDCQWLQYLHSVGLLMASFRPAQIICQTRSIYRFRQNLLTQVGQHLQHMQAALDQMNIKLHHVINDLSGQTGMAIIEAILNGERDPLRLAQYRDRRIKATQETIAKSLEGDWRSEHLFVLRLAWENGKQVQEQIKKCDQELMQYTRQLEAKTMVAQPIVPVKIMSLNVEPGVPELTPAPAVRPAKPRKKTSKNEPDGPWRENLHRFFGVDLTLIPAISVLTGITLMTELGNDLSAFKSVHHFCSWLCLCPDNETSAGKVLHKSTRRSQNRVRQALRMAASSLHHDKSYLGDKYRRLRAKLGAPKAITAMAHQIARIIWYLITHQVAFDMSIFAELEKAHQKRHLNRLNSAAHQMGYQLTPIAA

SEQ ID NO: 290854 - protein, 351 aa, unidentified
MYQHYLGVDLHKRRSYVVLMDGQGHISEHRRLSNDAMADYAAQIPEHTLAVVEATGNWSYMYDVLKPHVDEVVLVHPKQVRAIAAAKVKTDKIDATTLAHLARADLLPTAYAPPLAIRQLREMVRHRAKLVRERTRHKNQIHRLLSVYNLHPPCKDVFGKQGRSFLATVRGQLSSVHQQLLDDHLFLIDVLDERIQAINQTITTWVSQDPRARLLITMPGIGEYSAAVIIAEIGDIDRFPDAKHLCSYAGLVPSVRNSDRKVHHGHITKEGSPWLRWIMVSAAQRAPCASPRLGSFFERIAQQHDRKTARVALAPKMLTIVYVMLRRSEPFREMIQPGQLGKPVFSTDPHP

SEQ ID NO: 290855 - protein, 316 aa, unidentified
MSTEPVCVGIDVAKASLEVAVHPPADRWAVDYTDPAVATLVTRLTALAPALIVLEATGGLEVPLVGALAAAGLPVVVVNPRQVRDFAKATGQLAKTDTLDAAVLAHFAAVVRPRLRPLPDPATQALAALVTRRRQLIGMLTAERNRLGCAPKVLHKELQTHIRWLERRIASLDTDLDQAIRTSPVWRAQADLLRSVPGVGPVVARTLLAQLPELGTLSPKTLAALVGVAPLNRDSGLLRGRRTVWGGRATVRAVLYMGTLTAVRFNPVLRAFYLRLRAAGKLPKVALTACMHKLLTILNALLKHQRRWDPTYATTR

SEQ ID NO: 290856 - protein, 324 aa, unidentified
MNYAALDLHERTVQCVLKDQDGRIVKESKTVKDEGRILAFLDGTDASVVMESGRNHQHIYDVLKERGYDVTVAHPLMVKAIAYAKVKTDRVDARVLADLLRADMIPESYVPGRDIREIRDLVRRRHYMVKLRTMQKNKVHAELATRWLKYEGDPFTEDGKIYLRSLAIDAVNDYLETIEFLNRKIHQLDEKVRRVVESDKSAKLLMTVPGISYYSALLISSEIADIDRFPDHEHLCSYAKLSPGVRQSGETRHTSKSMGNSMMNWIMIQCTRVHVRKYDSAITRFYQQVSKRRGEKVAIVAAARKLMRAIYIMLKEEQAFRLDG

SEQ ID NO: 290857 - protein, 387 aa, unidentified
MEVRMENTPPAGTNNDPVRCFVAIELSKSSWVLGFQTLLTKQTSRYQVKACDAKALLELIERVRSRVVRELGRPVEVMSCYEAGYDGFWLHRVLEAHGVHNHVLDPASLQVNRRARRPKTDRIDADRMVRALIRHLRGEPEACSVIRVPSPEQEDARRLHRERDRLIAERVAHVNRVKGLCATQGIYDYQPLRKDRLKRLDSLRTGDGRALGPRLKAEIVREIKRLEVVLEMIATVEAERDAILKEKKSTHLNADKIKMLAKLKAIGAEFSTTLVGEVFYREFANRRQLGSYVGLASSPFCSGSLDRDQGISKAGNPKARTMMIELAWTWLRYQPESALSRWFRERVGNLKGRPRRIAIVAMARKLLVALWRYLQTGVVPIGAELKA

SEQ ID NO: 290858 - protein, 387 aa, unidentified
MIYIGIDIAKQTHYAAIINSDGEVLVKPFAFSNDHSGFQKLLKHLDSYSKEELYIGMESTAHYAENLTSFLFTRGFQVCIINPIQTSSLRKSNIRKTKTDSVDTYLIIKALTLNHYHLYSERDYNSLQLKNLCRFRQKLMKARTKVKIQLVTYVDLLFPELQYFFKSGIHGKACYTLLKEQPNPDRIAKMHLTRLTNLLSKSSHGHFKQSKAVHLKELASQSVGIKNDTLSLQILQSIKQIEMYTEQLAEVDQSIHEIMDKMDSVIKTIPGVGAINGAMIIGEIGDISRFDKPCQLLAYAGLDPSVYQSGNFTAARTRMSKRGSKLLRYALINAAWQTTLVNKTFKEYYDLKVSQGRRHYNALGHVAHKLVRVIHKMMSSNVEFNLA

SEQ ID NO: 290859 - protein, 413 aa, unidentified
MSSTLIVGIDISSELNATSFIDEAGNRLVKKALFFPNDLDGAQQLVDFTISLAQQFNISSIKFGMEATSHYAWHLHTFLASSPELAPFNPLFYVINPSIIKSFKGAYIHLPKTDSVDATVIAECVRFGQVKPTPLPDLRYAALQRLTRMRYHIVRSLVREKNRALSLISFKFSTYPSECPFSNIFGKASLAIIENFTPDDIASMPLDDLIDFIVKNGNNRLSDPTQIAKTLKAAANRAYRLHPDLAEANDLALSMTLENIRFLESQLKKLDGEISRQLKAFNQTLTTIPGIGDVLAAGIIAEIGDIKRFNNEAALAKYAGLIWNKYQSGNFNAQDTSLVKCGDQYLRYYLVEAANCVRVHTVRFKEYYNKKYREVPKHQHKRALVLTARRLIPLIFAMLSKGQIYQERGVVSI

SEQ ID NO: 290860 - protein, 369 aa, unidentified
MAKNGTLAKSQDLQPSFQTTTEQITIGIDLGDRFSHCCVLGPDGKILTEGRLRSTPETMARHFQDLPPSRIAIEVGTHSRWLSQLLTKWGHEVIVANPRNLRMIADSIRKSDRVDAHMLARLARVDPKLLSPIMHRKQESYPDIIQLKARDLLVKNRTRLMNAVRGVLKSAGLRLSPCGTSCFPSKAAMCIPDELKLSLTPLLETISHLNKQIYSLDKAIESTAQNRYPETNRLRQVSGVGPITALQYVLTVGEPGRFTHSRDVPAYLGLTPRRHQSGSIEQQLRISKAGNKQLRSLLVQCAQYLLGRFGPDSDLKRWGTRMFERGGKNSKKRAIVAVARKLAVLLHRLWITGDTYHPLYNVAATSVAS

SEQ ID NO: 290861 - protein, 371 aa, unidentified
MRSVINPYTKGALMSTYYIGADVHSNSTELAIEKRGQIVASYSVPTSIPAIVNVLDSIQGKKHFAVEEGPMSGWLYRNLAGKVDQFISCDPRRNKLIASDGDKDDKIDAAKLASLLRGGFLRAVYHSDDESRAELKHWVSLYHDRVRDAVRGINKIRARCRMHGVKISRSALRDPAKRMNWLLKTNHTVLANQLKMLWIGYDATVQQVKFAKRQLSTLSKKHNIIHQWSLLPGIGLIRATTVFAYLDTPYRFKKKNKLWKYCGVGLQRTTSGTDKKGKPKPSRLQLPWSVNRTLKNAVLGAALSAINQKDNVFRDYYQRMVKDGIITSNARHAVARKMLTVLWAMWKTNSRFDEKIVHNELNSQTASALSR

SEQ ID NO: 290862 - protein, 401 aa, unidentified
MFYIGIDIGKRNHEVGLIDDKGKPIGKTLRFTNSKKGSEKMLEFINQYNLTPDNSVVGIEATGHYWLSVFSFLHKLGFKTTVFNPLQSDALRNFYIRKTKTDTKDAHLIAQVIRIDSPAETPFIKEDLLRLRNLERLRYTFVDQSSDIKRKVISLLDQIFPEYEKIFSDTFGKSSTEVLLHSPLPEDLLEIDTEKLASLLNTVSKGRYGETRAMNKATQIKESASDTFGISIATDVFKMQIQLLLEQISLLENHLQQIETVMIEISNRQEHFLATITGIGDVTACVILGEIGDIKRFERPEQLVAFTGLDASVHQSGDFNSSKTRISKRGSPYLRRAIWQAAFVASFHDPALSLHYQKLRKRGKAHGTAVGAVARKLTHIIFAVLRDNKPYEVRLSPDPNS

SEQ ID NO: 290863 - protein, 431 aa, unidentified
MNRSVEFLSVGIDVGADFSLMAFALPSQELLGKPYKIIHSSQRSLNGAVEKIKTLSQKYQLPARVFMESTGIYHYPLYHKMKDAGFDVFVLNPLVTHAGRDLNVRNIHNDKYDSQKIALLGLRPGLKTSLIPSDQVISMKVILREYYAVKKEISMYICRLKNQLRQAFPQFLPLFSKVNGVTAMAILCEYSNPESLLNAGEHAVADFMKSVSHNGPLKVQKKAAALIQAAQDARSFGHWNHGISILIRHYIEMIRLLDVRAKTLLAQAKALLAEQDSKTLAHQTELLQTIPGIGFLSALTLICELGDFSAFKRPKQLFSYFGLDPIVRQSGNYNGTNLKLSKRGSPFARRCIFVIALQSISLNIHKEPKNPVLRTFYEEKCMCKAKMTAIGAVMHKICNLIFAVLRNDAPFVLQTPEQHNAAYLSKTHSVA

SEQ ID NO: 290864 - protein, 341 aa, unidentified
MKQYAGIDVSLECSSVCVVDANGKILREAKVASEPAPLIGWFRLSGFELERIGLEAGPLSQWLFAAMREAGLAVELLETRHVRDAFKAMPVKSDRNDARGIAQLMRLGWFRPVHCKSMDAQETRSLLTARKLVQSKLRDVENSLRGILRGFGLKVGKTTELKFAGRIEELVSGHPHLEMIARALLAVHAVLRKEFATFEKQTRKLARSDTRTRLLMSTPAVGPIVALTYASAIDDPGRFKSSKQVGAHFGLTPKKYQSGETDYTGRISKIGDGSVRAALYEAAHIMLTKPLKGCSALKSWAMRIARRAGMNKAKVALARRLAVIMHRMLVDGTEFNAAAAA

SEQ ID NO: 290865 - protein, 343 aa, unidentified
MQAVKTIGLDIAKSGFQVHGVDADGQVVFRRQLKRRNVLAFFQKVPSCLVGMEACATSHHWSRELQALGHTVRLMPPAYVKPYVKRQKNDATDAEAICEAVTRANMRFVATKTPEQQSGLMLHRTRHLFIRQQTAVINAIRAHLAEFGIVAAVGRNGLEQLLNVVADAGDKRLPEVARTCLMALGSQLQALKAKLLELDRMITAWHRSNETSKRLDAIPGVGHVLATALVASIADPKVFRSGRDFSAWIGLVPKQHSSGGKDRLGSISKQGDRYLRSLFTAGALAVIRYAKIYGTKHRPWLTALLARRPTKVAAIALANKLARMAWAMMSRGERYKEPVALAA

SEQ ID NO: 290866 - protein, 348 aa, unidentified
MHIAVLGIDLGKNSCSVAGLDASGQVVLRRRMCRDAVAKLASGLAPCVMAMEACCGAHHLGRVLQQQGHQVRLMSPEYVRPYVKAQKNDDRDAEAIAEAATRPTMRFVELKTEEQLDMQSLHRARSRLVGERTALINQLRAVLLERGITVAQGRRKLEQYLAPLLGEEDPQPLPLSPRTRALIQDMRLQWNELDRRIAALDTEFIAAARNDDAARRLASIPGIGVMNATALVAAVGDARTFARARDLAAWLGLVPRQATTGGKPRLLGITKRGNKYLRTLLIHGARAALPSLMTRSGVLGDWLRGLHARAHRNIVIVALANKLARIAWAVLRSTSNYDANTGRHPVAA

SEQ ID NO: 290867 - protein, 467 aa, unidentified
MVCFNPSTKLIRVRPAELIVAMPQGMSTRRKFVSYFAPLVGRGSDEECVSREVGTDMQVVHERCCGLDVHKKTVVACILITLANGEVQRHIRTFSTMTAGLLALSDWLESLAVTVIAMESTGIYWRPVFNLLEEGRSVILVNAQHMKAIPGRKTDIKDSEWLADLLRHGLLKASFIPPAPVRELRDLTRYRKTLVQERAQEVNRLHKVLETANVKLTAVATDVLGKSGRAMLEALVKGATDPEILAELARGRLRQKLPQLQEALDGRVEPHHRLLLKHILAHIAFLEETLEQLQRDIEERLHPFEEAMTLLMSIPGIQALAAATIVGEIGDDMTRFPSAKHLVSWAGVCPGNKQSGGKRLSGKTTRGNATLRAILAEVVWVLSHMKDNYLSAQYHRLARRLGKKKAVMAVSHSLLVIIYQILSTKQPYSDLGADYFEQRDSARLTQRSVRQLEALGYAVTLVPKEVA

SEQ ID NO: 290868 - protein, 398 aa, unidentified
MTESSDYESVQVFIGVDVGKDTHHAVAINRSGKRLFDKALPNDENKLRSLISDLKQHGQILLVVDQPATIGALPVAVARSEGVLVGYLPGLAMRRTADLHAGEAKTDARDAAIIAEAARTLPHALRTLKLADEQIAELSMLCGFDDDLAAQTTQASNRIRGLLTQIHPALERVLGPRLEHPAVLDLLQRYPSPEKLASLGEKKLAAQLCKLAPRLGKRLAADIAQALAEQTVVVPGTNAAAVVLPRLALQLITLRKQRDEVALEVEQRVLAHPLYPVLTSMPGVGVRTAARLLTEVACRAFASAAHLAAYAGLAPVTRRSGSSIRGEHPSRRGNKALKRALFLSAFAALRDPLSRAYYTRKMSQGKRHNQALIALARRRCDVLFAMMRDGTFYTPQGS

SEQ ID NO: 290869 - protein, 340 aa, unidentified
MEKRYIGVDLHRNRFTCCIRLENERTYVTDWELADLGKFVKKLRRTDEVAVEITGNTRLFHDAVAGHVARIVVVNTSQFRVIRQSVKKTDPHDARTLALYLSKNMLPEVRMKDKERGQLASLTQTRDTLVKLRTALKNKINNILSARGLNLPKEALSSEKKLAEVLGLPFDEIVQIELRVIVGQIRSLNQSIAELEKTIGEEGSKLDGHRNLTSIKGIGKITGAILLSVIGDVKDFADEGHLASYFGIVPRVSNSNETEHSGRIHKRGTKLGRTALVQSALIAARYSPYLKRFYEQVKGRRGAGKAIIALARKFLGVIYRTLKNGWVFEDFPNFILAEAS

SEQ ID NO: 290870 - protein, 355 aa, unidentified
MNDTKYIGLDVHQATISAAVLDSTGKLLMESVVETRASTILQFIHGLRGSVQVTFEEGTCAAWLHDLLQPHVANVLVCDPRKNALLKSGNKNDRIDARKLADLFRSGLLCPVYHGENGVRALQELARGYLALNRDVTRVMNRVKAIYRSWAIPCAGQRVYAPRYRSEWLGKITEVAVRRRAEIYYQQLDGLRSLRQQVRHDLLAESGKQGATKLLRQIPSIGSIRAALLIALMQTPHRFRTKRQLWAYSGLALKTSASGEYRFEEGQLKRSKKFLAIRGLNVNHNPDLKNIFKGAAIRAAAVPGPFQQFYAALVATGMKPTMARLTLARKIAAITLIVWKKGVRFDAQYLKQQAA

SEQ ID NO: 290871 - protein, 426 aa, unidentified
MTAGIDISQSKLDICVKNHGGVLANADFSNDMAGAKFTLELLAKHGCLDVAMESTGPYWYGIFDYLTAHGVRAILVNPAKAKAHLLNKTDKLDSNVLATLHMINQLKPSYVPDHEIRRLRRLTRFRAWLMDVKTGIKNQVTATVSKYSSNLMPVFSDAFGVSGKRFLEMLTEGKGQDELIMELDGLQLSEEKRCRIMEAIGNAFKPNLDPWIIQFSSSMISEIESRIKTLDDAIAKAIDSIPRIKGYVNRLLTIKGVGLETAQAIAAEIADIRRFELSGSLVKYSGINPTVEQSGKMLKYGPLEKAGPPYLRRALYQAANTIAFLGPDNFRRHYDAVRARYGRRKGHGVGVVSTARKLTRLIWAMLTNETDFIDSPRLLTEMKRARLRKRVKRFDSNRENDDATFKHLLINLHKLDPEVMQMLADL

SEQ ID NO: 290872 - protein, 370 aa, unidentified
MPKTKLRYVGLDVHKDSIVIAVADEGRGAAREIGTFASDWQSLHKQLKRLAKGFTLTMCYEAGPTGFELHRRLVEAGYKCHVVAPSLIPRKPGERIKTDRRDAAKLARCLRAGDLTPVYVPDEETEALRDLERARTAAKTAETTAKHQLAKFLLRHGRRFEGGSNWTQRHLAWIRGQQFAHEAQRRVHRDYLKALEDASERVERLTADIAELVETTALAPLVTALQAMRGVATISSVVVAAEIGDLRRFDSAGAFMSFVGLVPSESSSGQRTQRGSITKTGNKHVRKILVEAAWHYYRPAQMSRTLRARNAKVSDEVRQIAWKAQKRLHRKFHHLVYEKGKAPQVAVVAVARELAGFLWAIGQQRELLAA

SEQ ID NO: 290873 - protein, 397 aa, unidentified
MIAVGIDISKAKSTVAVIDSDGTVLASPFTMAHTQPEMEAFVTYLKGLGEPTTILMEYTGHYHYPVLKKLQDEGFPVCIVNPYQMKKYGDVEIHKAKTDKKDALRIAAYALEKSYKLVPYSSMEQKYEDLKFLSRQYSQRITYVAKLKVQLIALLDQTMPGITRILPLNSRNPEKCALLLFIKRFKSFDEIHRIGKARFLASYDILAKKVSERSASSKGLSIYELAVDSITTRGEDPYIWLSQNQCVDLLSTTQNAADEIISQMRNIAETIPEYKVLRAMHGVGDRLGPIILAEIGDVHRFHSGKALNSYAGNDAPPYQSGQFESRNRHISKRGSSALRKACYEVMQALKLTKPQDDPVYLFMLKKEQEGKPFNVAKMAGVNKFLRIYYARAMELYK

SEQ ID NO: 290874 - protein, 356 aa, unidentified
MTSTKYIGLDVHKESISIAVLNFAGKVVMECVIETKASMLLQFIDGLRGDVRVTFEEGTWAAWLYDLLKPHVSEVLVCNPRKNALLKNGSKSDRIDARKLAELLRGNQLKPVYHGEQGLRTLKELARSYLTISKDVTRVMNRLKALYRSWGIACAGTHVYAPRHRSEWLGRIREAGVRRRAEHCYQQVDVLRLLRQQIRRDLLLESKKHQAWKLLGLIPGIGPIRAALLIALIQTPHRFRTKRQLWTYSGLGLETHDSAQYRVVEGQLQRSKKPVTLRGLNQDHNHDLKDIFKGAATRVSSSSHGPLHDFYEHLLAQGRKPTMARLTLARKIAAITLIIWKKEVHFDASYLTSQAA

SEQ ID NO: 290875 - protein, 448 aa, unidentified
MSNGSGVSRGDRNRNARLARLREAVPVMNAIVGIDLADAKQMVVVTDHESRVLARRTFRRRAWELGAALDWAAARAAAAGFTGVSVAAGPAGHRWRVAGQLAAGRGMAFVCVQPLMSAWARRAEDLTFDKTDDKDAVLIARLAAQLRCYLPEPADETWGRLRHLGIRRARLVADSVSQVQQMRDLLECVWPAVLDAARQPFKSTTWRAALTVALERAEGDLGRVTLLGRRRFGAAVRRQVARWDAVHPWQKIIDAVFGACADPAGVPALRRGALERVALLLAGWRDTQARLAGTGTRMIAVLAELGLTGLVTSVTGLSTAGAASILAETGGPSRFTSGRALVKHAGLAPGEKNSGTCTGRSRTTGHGRPALRLAAWRAVWGALKSNPVYAARFTHLTSREHNQLSTGQAHAALAAALLRHLHAVITTGQRWDPAIAAGGRPGPALIAA

SEQ ID NO: 290876 - protein, 340 aa, unidentified
MKLKTLAIDLAKNTFCLVGFDRDNQPVWRKKQSRRQLEIFIAKQEPHLIAMEACASAHHWARRFSQLGHQVKLLPPQHVKAYLRGQKNDYNDAQAIGEASLHGVTRSVPVKTVEQQDKQAFHRIRRQLMGEQTRIINQLRGLLGEYGIIIDTGIHQANKAIPLILEDAENGLMPKLRELVCRQYQRYLVLREELAWYEQQLEQVAKTDPDVKRLQDVPGFGPVNANVLCSWLGDGTQFSRARDASAALGVVPRQHTTGGHDRLFGITKRGDSYVRSMVVHGARAVVSRAKGKTDALSRWINQLVARRGFNKAAIALTNKMIRIAWVLVTRGERYKPSLSM

SEQ ID NO: 290877 - protein, 317 aa, unidentified
MTFAGIDVSKTHLDLALVSNSPKPTRLRFPNSPEGRQALLAALAHHNPAWVALEPTSAYHLPLLKLLAENRLQVALVNPYHLAAFRKAKGERQKTDRQDALLLARYAQVYHEDLRAYTLPPETLRELKALVGYREDLAGRERTILNQMEAAEWAGSKEVLALLQKELACVKGLLGEVEARIQALLATLHEAEVLMALPGVGPQVAAAVLALLPPELWGRAKRAASYAGLIPEREESGKSVERSRLSKKGPPLLRRKLYMGALVAVRHDPEMRAFYHRLLSRGKRKKQALVAVAHKLLRRMMGRLREYYATQLDQGVA

SEQ ID NO: 290878 - protein, 412 aa, unidentified
MTQSSEYLVRVGIDWASESHQICILDQDGRRTEHTVPHTSAGLAALATELVALSPEDPGRVAVAIEVPRGAVVDTLLERGLHVFALNPKQLDRFRDRHTVAGAKDDRRDAFVLADSLRTDRPAFRRVHLDDPVLVELRELSRLDDDLREELSRLSNRLREQLHRFCPDTLALCPAADEPWFWALLDRALTPPRPKPLSIKAVTAVLKVHRIRRLTVDTVHAALQVPPLRVAPGTLEAACAHIALLLPRLRLVHDQRTRTVGARIETLLAALAKEDVTGEHRDVTILRSLPGVGRLVAATVLAEASRPLAERDYQTLRAHAGAAPVTRQSGKKAIVSMRLACNARLRNAVYHWARVSAQVDPRCRAHYDRLRQAGHEHARALRGVADRSLDVLMAMLTSRTLYDPERRCPKAA

SEQ ID NO: 290879 - protein, 354 aa, unidentified
MSQTPNTAIAVIGIDIGKNSFHVVGHDARGGIVLRQKWSRGQVEARLANIPPCLIGMEACVGAHHLSRKLASLGHDARLMPAKYVRPYSKGQKNDFNDAEAIAEAVQRPTMKFVATKTAEQLDLQALHRVRERLVSQRTGIINQIRAFMLERGIAVRQGIGFLRTELPTILATRTDALSPRLLRVIEELAVDWRRLDQRIDGLSGEIEALARQDQACSRLMTVPGIGPIISSAMVAAIGTGEVFSKGRDFGAWLGLVPKQISTGDRTILGKISRRGNRYLRVLFVQAAWVVLVRIKDWERYGLKSWIEAAKRRLHHNVLAIALANKLARIAWAVLAKGRAFELTRTDDAGVRPA

SEQ ID NO: 290880 - protein, 388 aa, unidentified
MHVYVGVDIAKELHYAAIMDSDGVVSKPFSFENNDKGFNLLLSHLAPYDKESILIGYESTAHYQENLAYFLKSLGYRTAEINPLQTAALRKANIRNTKTDSVDARLICLALMNHHIQGDQRDSVRLDDLYQLCKMRMDTMKKRTTCKIQFVAIMDRIFPELASFFDNNLHINTIYRLIESFPLPSQIKKTRIDILTKLLHKASRGHFKKEKAQKLKDLADISVGIPSDIFAFQAQQLVHQIEFYTDQIQTIEERINTNPDVMSSPLMTIPGIGTFCVACILSAIKNINDFGAPCKILAYAGLDPVIRQSGKFNASHTRMSKRGNSLLRYALVWSAGNVVKNNHTFAEYYRHKTEDQGKSHYQALGHCAKKLVKSIYHMLKYNESFNLD

SEQ ID NO: 290881 - protein, 363 aa, unidentified
MTHLTASTTTIQLPTTMGLDISDQVSHYLVQRGDGAELAAGKVKMTREHLRVLFVGHAGCRLVIEAGGHSPWVSRLAEECGMEVIVANPRKVELISKNDRKTDRVDAGLLTELGRTNPALLSPVTHRSERAQMDLSVLRARDELVRARTGLVNHVRGVLKSNGHRAPSCATSCFARKSAASIPDDLRPALDPILEVITSMTERIHGMDMQVERLCSERYPVTNLLRQIKGVGPVVALSFVLTIDDPERFRSGRDVGAYLGLVPRKKSSGKSDPQLRITKAGDRDLRRLLVNAASYVLGHFGPDCDLRRFGERLAGGDGNKSARKRARVAVARKLAVLMHHLWRTGVVYDPLHRAKARGELAPA

SEQ ID NO: 290882 - protein, 449 aa, unidentified
MKVVNPHAAGIDIGSKTHWVAVDQIPVNVREFGVYTRDHQRLIDHLKFHQISTVAMESTGSYWQTLFHALQKAGFEVVLVQGSQTKNVKGKKTDILDCMWIQKLHTLGLLSSSFLLSDYLQTLRTHYAHREHLQEQTAMYINKMQKALRLMNIRLDVAIRDITGKSGRAIVEAILAGHRDPDYLASLAHFRVKKSQQEIAAALHGNWREDLLFELRSCLKFYDAYKKEILVCDQEIQSLLSDFVQEADLSALENRSPDKLNHKQVNRNSPSFNVRQLAFAHLKTDLFQIPGVSHSTVLCLLCNMGNDIKRFSSAKRFASWLRLVPNNKLSGGRLISSRTPKGKNAIALALRQAANSIGNQKEHPLTPFFKRIAYRKGRHAAVTATARKLAVIIWNMITKAQSFFKPSPELLIEKRKHAQVKNIKLRLFRLNLSEIEMAELFQKTSYPST

SEQ ID NO: 290883 - protein, 416 aa, unidentified
MKYAPPVLAAEPVNGLTCGIDWAGRDHAISIVDARGREIHRSTVEHSDAGLRTLLVLLTRRGVSEVAIERPDGPLVDTLLAAGITVTVISPNQLKNLRSRYGSAGNKDDRFDAFVLADTLRTDRTRLRPLVPDTPATTALRTACRARKDLIGHRVALANQLREHLNRVFPGAVGLFADLDSPTSLAFLNRFNCQDRADWLTPKRLSTWLASIGYTGGTDPAVLQARLQTAPRGVTGEEGRTHAGITGALVATLKTLVAQIKALSEQISNQLADHTDAHIFTSLPRSGTIRAAKLLAEIGDCRSRFPTPESLACLAGVAPSTRQSGTMRSVSFRWSCDKHLRDAVTDFAADSRRANPWADNLYRRARANKHDHSHATRILARAWLYIIWHCWQDNTAYDPTKHRALQTLLRDQQPAA

SEQ ID NO: 290884 - protein, 351 aa, unidentified
MAKLTISSIGRFVEGFQGQRFFVGIDVHKRSFSIALLRPDGVIKDWTTPADVEAVTNRLTSLKIHIASVCYEAGPTGFDLARSLRSAGIKVLLAAPSRIPRPIAATNKTDSLDCIKLAELAASGLVRSIAIPSEREEAFRALSRRRHQLTDSLRRVKQRIRSLLLTLGVTEPAGIDHWGKAAVLALETLVLPAGATETRDSLLDELKYFITAQKQDEVKRITAMRSVPGVGKVVATTFAADIFNPKRFRRSEEVTAYLGLAPVIRQSGGSKGKAYLRPVGQRRLRSLLIEAAWIWKQKDEWAHNFYNRILGKHGVPQKAIAALARKLAALLWRLSPAIGNSITGRGGILVA

SEQ ID NO: 290885 - protein, 342 aa, unidentified
MHYVGIDLHKRESQICIVDASGTVVDEQRIKTTKEAFEAMFRARARSRIVIESSCESEWVARVLENCGHEVVVADPSYAAMYGHRNRNVKTDKRDARALADAARTGLYRHAHRKSDEQRHRSSLLAVRAGLVRSRAKLITLARALVRRTGQRIRRGAVERFSFFVKELELADDVATELAPILAVLPALDAQIESLDAELEKVATQDPRTVAAQSMQCIGPVTSVAFVAHIDDARRFKTARQVSSYIGLVPREYSSGEKKRRGRITKAGNSQLRSLLVQAALRIRRSRSMSLAHLRAWSERIAARRGKKVAVVALARKLAMILFAIIRDGTLFHAPQLMSEVA

SEQ ID NO: 290886 - protein, 345 aa, unidentified
MDTIGLDLHKRESQLCIIGSRGEMTEKRILTTRERFTAALSGRGRCRILLESSTGSEWVARHLESLGHEVIVADPRFAPMYATRSKKVKTDKRDARTLAEACVLGAYRVTHRVSAEQRHVRNELAVRDSLVRTRTRYVALIKAAVRREGLRLSQGDAERTASKLGAIELREEVLQELRPILALLSPLNREIETADRRIEQLGKEDPVVRRLMTAPGVGPVTALAFVAALDEVTRFPGAHQVEAYLGLVPSEYSSGERQHRGPITKRGNARMRWLLVEAGWRIMRSRRSECAALRTWASQIALRRGRRIAVVALARRLSGILYAMWRDGNEYRAPIARVEDRTVAA

SEQ ID NO: 290887 - protein, 344 aa, unidentified
MSEAIIIGLDIAKYVFHAHGVDGRGRAIFSKRITRRKLLDFFVAQPSCTVALEACGGGHHWARLLTQLGHEVRLIPPAYVKPFVKRQKNDAIDAEAICEAAQRPSMRFVAVKSEQQQAAGLVFRTRDLLVRQRTQLINAIRGHLTEYGWIAPKGPSHVAMLAELLEEEEMASSLPEAARAMFRLMLDTLAGLGSKIADLDKEIARRAREDEVSRRLMTVPGIGPISATAIAALAPPAETFAKGRDFATWLGLTPLQRSTGGKQKLGATSKMGERTLRRLLIIGSSAIVLQASKRGAPKGSWLEQMLARKPRMLVTVALANKMARIVWALLVKQENYRALVAAKA

SEQ ID NO: 290888 - protein, 386 aa, unidentified
MRGEMFVPADYHVFAGLDVDKRSISVTFTNHQGFIRSLRMPYSAEYLLNYVRKHFPDQKVAFAYEAGPTGYGLYDGIVSQDYRCSIASPSMIPKAPGQRVKTNRLDSRGLAENLRGGQLKSIHVPSALYRELRHLTQLRDTAVSEMVATKQRIKSLLLLEGIEFPPAPPGSQWTFMVKAKLRKLPCSLVVRFKLDQLLDRLEFSEKQVLKTTQEIRRFCQNDPELSQCIKYMMTVSGIGWIVASQLLARIGDWRQIRNIRQLGAFLGLVPTENSTGDRTDRGSITHSGDGRLRSKLIQASWSAIRKDGELREFFRSVCQTHARHLASRVAIVAVARKLSVRISVVLMQQRPYEVREKVHSAPLTQEETSPQGTTRRLGEPGEVKNS

SEQ ID NO: 290889 - protein, 327 aa, unidentified
MKYPIGIDISYQTLDYHIQPICGEVTKAVIENSINSITQFLGSYSAANYFLVIEPTGTYGDKLVELAHQHGFEIRLANPKRSSKFMEVLDLLHKTDENAAMALCLMGQSKEFQLPRYMPQSETMKQRRQVQMTVNALAKQQRMLQNQIHAMEQRFRSSDISLTALKTTLQTVEHQLEILQQELQQLSDDEIEEFNYYAQSVKGIGEKSASLLMLYTNGLKYFEKKGQLSRFVGIVPSSHKSGTSVNKKGHITKSGPSILRACLYNAAKSAKQYNHACKALYERLRKNGKSHKVAMIAVINKLLHQVFAVVKSKTLFDNDQYLNLISK

SEQ ID NO: 290890 - protein, 385 aa, unidentified
MGTAVGKLAKRSGARFPTATGDRSSGPRSNKTVGELDRRRFHEISPNSRKSRSGAPGRASSHSQGRDIVMDVAFKSVVGIDIAKRTLDVHVLPERTSLKQQNDSKGRGQLREKLPPPGECLIVVEATGGYERALVAELIDAGYQVTVVNPRQVRDFAKACGTLAKTDRVDAAVLALFGQRMGELRIQAKIPEKQLELQDLVARRRQLVELRTAEMNRKEHVGSKFVKKSLQESVDALNKQIRRFEKRIAALVQSDDDWKLKLEIVQSAPGIGPGTSATLIAEVPELGQLSRRKISALVGLAPFNRDSGEFRGRRAIRGGRSSVRCSLYMATLSARRSNPVIRAFADRLEALGKKPKVIITACMRKLLVILNTMVKNKTHWNPATT

SEQ ID NO: 290891 - protein, 343 aa, unidentified
MSEVSIIGLDLAKHVFQAHVAGKDGGVLLRKRLRRDEVLAFFSRQPLCRVVMEACGGSHYWARQIEQLGHDVKLIPPAHVKPFVKRNKTDAADAEAICEAAVRPNARFVPIKSEEAQAGATLLRTRHLLERQRTQAINALRGHMAEYGFIVAQGRWHVDRLIAMIEDKEVALREEARVGLRALAATIANLTQHLNSLDRQIRASVKQNETARRLMTIPGVGPMTAAAVVALISDPSVFRCGRDLSAWVGLTPREHSSGGKQRLGHISKQGDKTLRRLLVLGATAVVRQALLRPLNPDTWLGSMLARKPRMLVITALANKIARVVWALMAKGGVYGERAEVLAK

SEQ ID NO: 290892 - protein, 340 aa, unidentified
MGDITTIGLDLAKNVFRVHAVDEAGNVVVRKRLRRGQVLGFFAGIPSCLVGLEACATAHHWARELIALGHEARLMPPNYVKAYVKRNKHDVADAEAICEAVRRPSMRFVPLKTAEQQSALMMHRARDLLIRQRTMLVNALRGHLAEFGLIEAQGLHKVARLITIVMDEMDGRVPDIARQVLKVIVNQIKDIQTGIAELETQILAWHKNNPVSQRLATIPGIGPIIATAIAATVADPNTFRSGREFAAWLGLVPRQSSTGGKARLGGISKRGDSYLRRLLVNSAHTVLLCSKAAKTDPWLTSLLSRKPRLVAAVALANKTSRMAWAIMSRQDTYRHAATPA

SEQ ID NO: 290893 - protein, 406 aa, unidentified
MKHVVAFDVSMGKSTMVIYDRYRQCEYEGEITHNRYSFEKLNETLISLTQKDGQAPDIVFEATGVYSKPLERFLGDQGYMYYRVNPLEANIQMASMRRQKTDKSDAHELAKTHFRAEREQTYQEEEYYKQMRAMTRYYDELSSEMTHLYSRLHAILQLSFPELEKLFSKRSALFLNVVQLYPHPDHVLVCSKTVIRNRLKANTRKNLSLARAEEKGIALIEAAKEAYPAISKDDIRCEQVRDYAKRIADLKEKRDQLVQKMVKLSKDKQEYQILISFPGIGETTAVRLIGELGDIRRFKNHKQLNAYVGIDIMRYQSGNTFYKDKINKRGNNKLRKILFYMIQTMIQLRKNTQNHIVDYYDKLKTQPQRKPHKVASIACVNKFLKSAYHLITHNLKYDYEKATMHQ

SEQ ID NO: 290894 - protein, 357 aa, unidentified
MNKIIAINAVVKTFSIDLAKSKLQVHGFDANGQRCFARALSRTQTTALFRDLGRPVKVVMEACSSGHYWGRQLLALGHEVALIPPQFVTPLRIGNKTDGNDADAIYEASLRPKCRPVPVKSIEQQDLMLTQLERDRLVKQRTALTNQLRAVLAERGRVFGKGLKALREGLREVLAREPDQEVTAPCLDWLQAQLFDWQRLDERLKDCDTRMRHDLRDHPRCQQLMEVDGIGLQTALFFFALVGDGSQFASGRACGSWVGLTPLEASSGERRFLGAITKRGDRTLRWLLVNGGRTLAAQAQRKAKNGLPLNERDTWLLGLIQRGGFNKAAVAMANKNARILWAMLRTGEAFRSPLMAA

SEQ ID NO: 290895 - protein, 316 aa, unidentified
MPYQVFVGIDVSKAHLDVAVLPDRRHRRVSNDASGWQQLIAWLGLPAETLVVLEATGGYQNAAAWALQQAGFGVVVMNPRPIRDHARSYNVLAKTDRIDAAIIADFAQEKQPPVRPLPDEQAQLLAALMDRRRQLVQMLTMEKNRQAQAPPALARELATHIQWLTKRLRKLDDDLDDQIRRSPLWHETAQIVQSVPGIGAVTTRTLVAELPELGQVNHKEIAALVGVAPFNRDSGQFRGQRAIWGGRAHVRSVLYMATVVAVRCNPVIRTFYLRLKAAGKKSKVALVACLRKLLTILNTMVKQRQRWQPPAASAPG

SEQ ID NO: 290896 - protein, 392 aa, unidentified
MYIIGIDIGKNHHEASIVSPEGKQIGHSLRFATTHKGADSLMSFIFNNIGNSSCIFGMEATGHYWYPIYSFLKARGYTIYVINPIQSDSLRKMYIRQTKNDSIDSFLIAEVIRFGQFTTTSMADENTLAMRQLCRYRDSVISSRTEIKLRISTIMEQIFPEYEKQFSSLWLSTSMGILEKYLTPENIENAPIDELFEIIKDKSHNKLTMKKAFSIREAAADTFGIKIAQDAFSFQLKQLIDRMNFLDKQIEALDCQILEYYEKFDCYLHTIPGIGMIAAATILAEIGDINRFKSSSALVAFAGIDPTVRQSGEFSSTHNHMSKRGSPYLRHAIFLAATTCSFHNSPLNAYYKKKRDQGKHHLTATGAVARKLTTVIYAVLQDSKPYEPKSFC

SEQ ID NO: 290897 - protein, 339 aa, unidentified
MKIVNAKRLFVGLDYHQDFVQVCVLDESGKVLRNSRVENCRSKIVRAVPSGALVHSALEACCGAADLADELAERADWSVSLAHPGFVSRMKQNPDKTDYSDARLLADLLRVGYLPKVWLAPAELRELRRLVRFRQQKVNERRDVKLRLRALLRDHRIQDLDGNPWTQKWLTSLAALGELGQDTAWIMQQHLASLARLNTEIREIEKRLEERVANDAVVQKLRKFKGIGLVTAATMRAEIGRFDRFRTGKQLARFCGLTPRNCSSGNRQADAGVIQAGNPQLRAVLVEAAHRIMRSDERWLKLAQQLKARGKHVCLVVAAVANRFVRWLHHQLLPEALAI

SEQ ID NO: 290898 - protein, 342 aa, unidentified
MSQTSIIGIDIAKYVFQLHGADESGAIVFRKKLTRAKLLPFLAQQPPCVIALEACGGAHFWGREIARLGHQLRLIPPSYVKPFVKRQKNDAADAEAICEAAQRPTMRFVAVKSEAAQASALVFRARDLLVRQRTQIVNASRGHVTEFGWVIPKGIGHVTRLLELVEDEGSPLPDAGQATLRTLITCFKDLDQQIEHLDQGIARRAKEDPVSCRLISVPGVGPVTAAAVAALAPPAESFRKGRDFAAWVGLTPLQKSTGGKQKLGATSKMGERTLRRLLILGASAVIRQAVARGAPPGSWLAGMLARKPRMLVAVALANKTARIIWALLTKGGIYKAPVMSAA

SEQ ID NO: 290899 - protein, 348 aa, unidentified
MNLKRIGLDTSKAVFTLHGVGQDEKAVLRRDMRRAEMEAFFAKLPPTHVALKACGGSHHWGRRLAAMGHTVQLIPPQYVKPFVRRGKNDRNDAEAISEAAARPDMPSVAVRSAEQQAEAIVLSARELLVRQRTQLVNAVRGHAAEFGIVAAKGTSQLPALLEVVAAEEAVPDAAQQMLAFLGTQVAQLDGQIAELERRMKQQHKANPVSQLLAEVPGIGPISALSLALTIDPGRFTSGRHFAAWLGLVPKQHSTGGRQHLGGISRAGNERLRQLLVVGAMAVIRYAKPGSKTASAWLLALLERKPRKVAAVALANKMARIVWAMMATGKAYRGSRKVATPAAEAAAAA

SEQ ID NO: 290900 - protein, 449 aa, unidentified
MSDRSGVSRGDRNRNARLARLREAVPLCNAIAGIDLADSKQMVVVTDHESRVLARRTFRRRAWELGVALDWAAARAAAAGFAGLTVAAEPTGHRWRVLGQLAAERGMPLVCVQPLMSAWARRAEDLTFDKTDDKDAVLIARLAAQLRCYLPEPADETWARLRHLGIRRARLVAEQTAQVQQMRDLLECALPAVLDAARQPFKSTTWRAALAVALGRAADGDLSHVTRLGHRRFDAAVRRQVARWDAVHPWQKIIDAVFTACADPAGVPALRHGTLERVALLLADWRDTQARLADTETRMVTVLGELGLTELATSITGLSAVGAASILAETGDPARFTSGRALVKHAGLAPRQKSSGSYTGRTRTTGQGRPALRLAAWRAVWGALKSNPVYAARLAHLTSRGHNKLSTGQAHAALAAALLRHLHAIITTGQRWDPAVAAGGRPGQILIAA

SEQ ID NO: 290901 - protein, 352 aa, unidentified
MEYIIGCDAHKHYSQFAVINSKGELCTQTRINHEQGALYRYLSRFPRGTPVALESIGNWYWIVDEIESSGCKPVMAHAVKAKVMMGHVDKTDKLDARGLATLLHNGALPIVWIAPAELRDERQLHRTRMWLCKQRTALKNRIHATLAKYNLLLPTKSNIFAPKWRTLLDECITLLPPETARCLRQELELLENLQAHIRHLEDRMHERLEETQDMQLLKSMPGIGEILALVIEREVGDIKRFPSAPRFASYAGTVPTTSSCGGKTRHGRMRKQANQYLKWAFIEAANVIVLNHARPTWRSKHVVKLYKRIRSRKGHAVAIGAVARHLSEAAYWILRRKEVYRDPTMEKVSQSG

SEQ ID NO: 290902 - protein, 465 aa, unidentified
MKIPPSVGKAAKGQTRKAGASPQPAINTQTHPDAAGIDVGAEEFVVAVPPGRCEEVVRTYSSFTSGVYALRDWLLECGIKTAAMESTGNYWITLFDVLTAAGIDVYLVNARHVKGVPGKKTDVCDAQWLQQLHAAGLLRKSYRPALEIVPLRFLMRHRSAMVEDSAKQLHLMQKSLTEMNLKLQHVFSDIDGTSAQAIIVAIVAGERDPHKLAALRDKRCRSSLNDIIEALRGDYREEYLFVLEQSQKTWLHLREQIRECDEKIAVLAASVKCEVVGEMPEAAKVQRVTGKNSLQFPVFEIGWRFYGVDLSAVPGVSSGLIGTLMSEIGTRDQILAAFSSPEKLVSWMGLCPDNRISGGKVLKAKTRKIPNRLAKAFRLGVFGLQKSQSQMGLYFRRMKGRLGKAEGITAAAHKLARIVYGMIKSQRPYDEKEAFKITPQNEARRRKNLEKQAAALGFILQPIAA

SEQ ID NO: 290903 - protein, 471 aa, unidentified
MRCADRKQGRTARIRAAAHTRPGGKPPARKQGVQTRGERWKFSAWSGTGLELEVEVEEADSELGCTKLPRKRTQKVQKGRNRPMKKNSKNETMKSKRETKKVAELEAGWTRLDEREANTLVIGIDLGDRTSAYCVRTLGQQIVKEATVATTATAMREAFQGLRRQRVVIETGTHSRWVAQLLELMGHEVIVANARKLKLISENNQKSDKVDARLLSELGCMNVEWLHPVYQRSQAAHSDLLLARARQALVDARTALINHVRGSVKSFGSRVEKCASERFVEVARGALPEALKPALSGVLATLEELNEQIYGYDCQIEHLCHTKYREAAKCLLQVNGVGPVTTLTFVLTIENKDRFEQSRDVGPYLGLIPKKRQSGQRDPQLGISKEGDEMLRKLLVNCAHHILGAKGQDSDLRRWGLELVRAVERKGKKGARKLAAAAVARKLAVLLHRLWVTGAAYEPLRNRGAQQAPAA

SEQ ID NO: 290904 - protein, 366 aa, unidentified
MLQEAELSGQADSENNLGGSSETMYFIGLDVHKKTISFCVKDAAGRVHQEGKIGSTRRELDGWIQTMPRPRTIAMEATIFTGWIYDYLLPHAEKIKVAHPLMLRAIAAAKKKNDRIDAGKIADCLRCDFLPECHMASTEIRDRRRTLRYRSLVVKQMVQMKNRVSGLLMETGVSYNKQRLHKVGYFAELMTTNEDMHESIRPLLKLSRDMISRSQKLDYTLISSLERDPLLKERLRRLRTVPGVGPITALTWALEIGDYTRFSSIKQAISYCGLCGDENSSADKVMRMPISKQRNKHIQRVLIEAAKLATRESPELAMIRARELERGNPNRATLAVARKMVTYMLAVERRQQDFVPAEQFSRTAAA

SEQ ID NO: 290905 - protein, 384 aa, unidentified
MKKTQETLRIKDSINDAILYTAFELSHKKWKLGFSNAEKMRTVTIAARDLDQLQKEIEKAKQRFGLEGQIRMVSCYEAGRDGFWLHRYLWSCGIENVVVDSSSIEVNRRKRRAKTDRIDVRKLMHMLLRYHGGEQLVWSVVNVPSEQAEDGRHLHRELEALKKERTMHRNRLKSLLIQQGIVVSNPSSRKFLIQLETFRTWDGKELPTDLKSRIILEHGRLRMVEEQIYALGKEREKRVAAADTDAMKQVEQLMTLVGIGMNSSWKFVMEFFAWREFKNGKQIGALSGLTPTPYDSGASQREQGISKAGNKRIRTLAVEMAWVWLRFQPQSKLSQWYQKRFAEGGKRMRRIGIVAMARRLLIDLWRYLEHGQVPEGARLANIVK

SEQ ID NO: 290906 - protein, 336 aa, unidentified
MTITTIGIDLAKNVFAVHGVDQNGKTVLVKSRVTRAALPGLIASLPPCVIGMEACSGAYYWARLFLQYGHEPRLMAAKFVSPYRMAGKSGKNDAADAQAICEAVRRPHMRFVPVKDESQQAMQCLHRNRQGFIEEKTATYNRLRGLISEFGVIAPQSTDALRHMVSAQKSSLPLQVQQCVDDLLEHVDRIEANITEYDRILSRIAKTDHRSQRLMKLKGVGPTTACALVACIGNAHDFKNGRQLAAWLGLTPSQYSSGGKSKLGRITKAGDSYLRTLLVQGARSVLIGAEKRTDLFSRWVCSLVERRGYWRAVVAIAAKNARLCWASLHYGALLQS

SEQ ID NO: 290907 - protein, 344 aa, unidentified
MDYYAGIDVSLELSSVCIVDAAGKVVKESKVETHPDALVKFFKNLGLPLTRIGLEAGPLSQWLHGGLIAAGFETVLMETRHVKKALSASMVKTDRRDARGIAQLLRLGWFRPVHAKSLGSQEVRALLVARKQLQHKLTDIELSIRGILRGFGLKVGKVTDSTFEGRIGQLVTGHKTLEEIAAAMLSARATLLTEFTKLHKAVLDIVRGDEVCRRFMTTPSVGAIVAITYKSALDDPHRITKSKNAGPLFGLTPSRYQSGETDVSGGITRVGDEMVRTALYEAANVLLSPRTRFSPLKRWGLEVAKRRGSKRAKVAVARKLAVILHRMWIDGTTFRWTKTEGAQA

SEQ ID NO: 290908 - protein, 418 aa, unidentified
MVRENDNGIVSVVHPICCGLDVHKEKISACVIISSFWGGQRTEVEEFGTFTDDLIRMRSWLLEHDCPILAMESTGIYWRPVHNVLEGYMEVILVNARHIKNVPGRKTDISDSKWLAGLLRHGLLKGSFIPPKEVREWRELTRLRRTYVESLGDYKRRTHKLFESANIKIDSVVSDLFGMTGRNLMKLLADGSSPITLEQIEACLRGKLKGKRDELFRSIQGFFTDHHRYLLSSLTRTIAGFEREIEAINDRLRKVMQTREPLLEKLMEVSGISEVSARAILAEIGPTMDPFRSSAALCSWSGLCPGNNESAGKRHSGRSPVRKHHLKTIMIEVAWAAIKVKGSYYRDKYYRLKARRGAKRAIVAVAHRLLKAIYHIIRDGVSFRDLGEDFLNQNNRQATLRRLNQQAQKIGYQLVPQE

SEQ ID NO: 290909 - protein, 337 aa, unidentified
MMYSGIDLHSNNSVVAVIDDGDRVVAQKRLPNDIGKITGFLARWQDELAGVVVESTYNWYWLVDGLQDAGLHVHLANTAAIKQYEGLKHSGDGTDAQHLAHLLRLGILPTGTILPREHRVVRDLARKRMQLVQSCTTHVLAVENIMARQLGGRMTSNQIKRLTDDTIDNLPLAADVGLAIKANVAVIATLQSQIEVLEKRLQERVRPRPQYALLTTVPGVGQTLATVIVLETGPIDRFAEVGNFASYARCVDSVHTSNRKKKGEGNVKNGNKYLAWAFVEAANFARRFCPEAKRFHERKKAKTNNIVATKALAHKLARACYHILKEGKPFDVTRCFA

SEQ ID NO: 290910 - protein, 337 aa, unidentified
MKIYFIGIDVSKEKLDLCLHSSGKILKEWILSNTVSAIKSSFKSLPKEYVVETSVFLVCAEHTGQYTYPLACACDELGFDLWLENPAQIKHRSGIKRGSNDRLAARDIADYASRFQDKVRLFLLPQKNIASLRQLVSERDTYVTDKGKFQGQLTDQKRFMSDYDYAKKSERLKSLIESLDEAISGVEQEMEQLIKSDVTLSNQHALLCSIDGIGKQIAVKMIVETNAFNDFDNGRNFCCHAGVAPFCYTSGTSKHTRYKVSNRADKSIKALLHMAALVVATRKKDGELRDYYLRKVAEGKNKMSVLNAIRAKLVLRMFAVVKNNKQYDKNWNEKKVT

SEQ ID NO: 290911 - protein, 410 aa, unidentified
MKVLHPCCCGLDVHKETVVACVRLVIDGKPVKEVRTFSTTTADLIALSEWLAETKCTHVAMEATGVYWKPVWHILSDDGFELVLANAAHIKNVPGRKSDVKDADWISDLLAHGLIRASFVPDGPTQEMRTFLRTRKQFVREKGSHILRIQKTLEDANIKLDSVITDIIGVSGRKMIEALIAGESDPAKLARLADPRVKASQQTLRQALRGRVTGHHRFLLRLHLDQIDALDVAIAKIDQEVEAGIAPFRTAVEQVSSTPGVKTLAAMQILSEVGTDMSRFGSDANLVSWACICPRSDESAGKRRSTRIRKGSPWLKTTLVQCAWAAVRKKDTYLHAQFHRIKARRGPKKAIVAVAASILTAIYHMLKDGTMYQDLGPNHFDARNKERQKNRLVKRLADLGYAVELAPLPN

SEQ ID NO: 290912 - protein, 320 aa, unidentified
MQTPAVVLNIGVDVAKDEIVVACSESSFPVRQIANQRVALLAFLKNLPTGSRIGVESTGSYHELFAEAAHQLGFAVFLLNPKDTRHYAKAVGLRGKTDRVDAELIARMIAHEHTKLHPWVPPTPQQREMDRLIKRRATLVALREAVEMSLHELDGFAVDLKALRTRFNQLIARLDLRVKALVEADPERKQNFARLCTISGVGPVIGTALVNTLERVPLKSADAFVAFTGLDPRADDSGRHRGKRRLSKRGPAELRRLLYMAAMSAINTKTWRPLYEHYRAKGLSSTATLVILARRIARTAWSIYTHKTEFDPGRLVKPLT

SEQ ID NO: 290913 - protein, 347 aa, unidentified
MSNTHVATIGIDLGKNIFHVVGLDATGAIALRKKRSRNQLEQSLANISPCLIGMEACAGAHHLGRKLEKLGHKVRLLPAQYVKPYLKGHKNDFRDAEAIAEAVQRPTMRFVPLKSAEQLDLQALHRARSRLVTQRTAVINQIRGFLLERGLPVRQGAAALRLALPRLLSMLTDDLSPRIVRLIHDLAEDWRYLDWRVACITKEIDELADQDAHCRRLMSAPGVGPIISSAMVAAIGTGDAFAKGRDFAAWLGLVPKQISTGDRTILGRISRRGNRYLRTLFIQGARSVLLRRQSWPKHGFGAWLEAASKRLHSNVLVVALAAKLARMAWSMLAKGHDYDANFLGHAA

SEQ ID NO: 290914 - protein, 355 aa, unidentified
MIGEKYIGLDVHQATISVAVMDSKGKVVMESILETQAATILEFFAGLRGTLWVTFEEGTWAAWLYDLLTPHVAKLVVCNPRKNALLKDGNKSDRIDARKLDELLRLDNLEPVYHGETGVRMLRELARSYLTIVKDLSRVMNRLKALYRSWAIPCAGRDVYYTRHRSEWLGKIPEAGTRRRAEQLYQQLDMLQHLRQQARRELLAESRKHTITAKLRQIPSLGPIRSALAVALIQTPHRFRTKRQLWTYSGLGLETRDSGEYHYVQGQLRRRKKQVSIRGLNKDHNHDLKGLFKAAATRASVQPGPFQDFYQRSLAKGIKPTMARLTLARKIAAITLTLWKKGENFDVAKLKSQAA

SEQ ID NO: 290915 - protein, 354 aa, unidentified
MKEYSMIVGLDLSDKTSRYCTLDADGEVLGEGSIRNTEKGVRGHFGHLEPCLVAIETGTHSWWMGRLLAELGHEVVVANTRKVRAISHNDKKSDKADAQMLARLARSDRELLCPVKLRRARAQTDLAMLKARDALVGARTKLVNTVRGLLKSFGEAPPACSTESFAKKVRPCVPEEHKEALLGLLDTIEVITQRIRDYDQKLESMVKEQYPQAALLQDIAGVGPLTSLGFVLVVDDPSRFARSRDVGPYLGLTPRRDQSGQRDPQLRITKAGDGLLRRLLVNAAQYIMAHETADSQLRRWAWKLAGGEECKDKRRKKRAVVALARKLAVVMLSLWKTGSCYEPFPGAPVKEGAS

SEQ ID NO: 290916 - protein, 406 aa, unidentified
MDVVYSHVCGLDVHKKNIVACAITPEGKEIRTFGTMTDDLILLVDWLKVKECTHVAMESTGAYWKPIYNLLELEEIETLVVNAQHIKNVPGRKTDVKDTEWIAGLLRHGLLKGSFIPNREQRELRELIRYRRSLIEERAREVSRIQKVLEGANIKLSSVASNVLGKSGRAMIEAMIAGETDPEALSDLAKRKLKSKKADLKRALNGLMGPHQKLMLGAQLRHVDYLDEEIGRLDEEIKKRMLPFDEDLELLDTIPGVARRTAETILAEIGSNMNQYPSAAHLCSWAGLCPGQNESAGKRLSGKTRKGNKKLRSTLVEAAKAAARTKETYLSSQYHRISARRGANRATVAVAHSILSMVYYILKRKQPYIELGPTYYEKRKRDVIIKHSIKKLESLGVSITVNTAAS

SEQ ID NO: 290917 - protein, 355 aa, unidentified
MDNTKYIGMDVHKETTSIAVLSSAGKAVMESIIETKASTIVEFVQGLRGELHVTLEEGTWAAWLYDLLKPHVTNVVVCDPRKNALLKAGNKSDRIDARKLAELLRSNLLRPVYHGEHGVRTLKELSRSYLAISGDLARVMTRLKAVYRSWAIACAGKQVYAPRYRAQWLGKITEVGVHRRAEIYYQQLDALRSLRQQVRRELLAESGKHKASKLLCQIPSIGPIRAALLIAIMQTPHRFRTKRQLWSYGGLAIQTHSSADHRYVEGQLRPSKKQVSLRGLNRNHNHELKNIFKGAAIIAATKAGPFQEFYAALVAKGIRPEMARLTLARKIAAITLIVWKKGVSFDAQHLKPQTA

SEQ ID NO: 290918 - protein, 395 aa, unidentified
MRHILSFDIAKGKSVYCFIDELRNVIIDATLIEHKKDVFDLLFNKVKNYSNLIVIMESTSIYHLPVETYFRSKGIDTIVMNPKLVKQFKDTLNKSKTDKLDCFKIARCFLGTIDNFYQKQDEYFMYNPLARQYWSLVEGQTRLKNRYRQLIDIVFPEFTLIFNDLYDDLALNFIHDFPHPVLFVNRRIDYLMNYLKEKNGTTHAYRFKNKVLKMKELASNSLCFVAFDSYQVQNLVQVIEMIQYHKSEINKIKNQLINEMKDKKLFKIINSIPGFGEFSTALFLAEVGDITRFDNKYQFISFIGIDSVTSQSGVSAYHGPISKTGCKFGRTILFNIATTILQISAHTDKTNPIYLFFRKKQSEGKHHYKCIIACETKLCKIIYKLCSSNCLYTKK

SEQ ID NO: 290919 - protein, 373 aa, unidentified
MPRYSTAFGMDVHLRSTTVCALDAETGEAVTRRFRGNPWGEVAEWMSGFPGPSLAAYESGYLGFAPQRELSGLGVDCVVAAVSKVPRSAADLSSKNDRNDAARMAKAILSHDVTPVWVPSPEIEGLRDLAAAHDAATARLAAAKQRLLAFLARRGYVYGGTTPAGNPRKYWTYGFLRWLDGIHPADDGGIRALAALRNEVEAADETREAILAEYRAAVAAGPLSAEVEALQSIKGCGFALAAAFASEVGDFSRFRSGRQVTAYFGLAPKQRSSADSVRLGGISGAGNALVRKLAVEGSWCYAQAGHQPKLMPKGSGVPLEIRMHGRKGSERLLRRREEMLERGMPQAKANAATAAELVRWLWALGTMCREAGE

SEQ ID NO: 290920 - protein, 350 aa, unidentified
MKKICIGIDVSKETLDVTVIHIESYELVEKLGYSKFDNRPSGFRSMTAWVRKVIKSRGQMDEALFCMETTGSYDLPLCHWLHKNGLNVWRESALQIHCSKGFQRGKSDKEDSEVIAQYAARHQSRYTAFVPDAEAIADLKELICYRDSLVERRKECKVRLANKKETLVNRNSKAWKCIERLSKAEIKRLDKVIGECDEEIRNLMKEDEEMEKNYQHLTSIVGIGLINGAALIAYTGNFKKITTPNKMSCYCGCFTFYEDSGTSVHRKSPYRNACSKMLKGYLRMAAKSAMLANTELRKYSERLREKGKPYAVILNNVANKLLHIMFSLVKHDYDYEYNHEMVRRMEREIA

SEQ ID NO: 290921 - protein, 465 aa, unidentified
MQEKQSDQKVVALPVIRPNAAGIDIGDTMHVVAVPPGRSNEPVRKFGAFTCDLLEIVKWLKLCKIDSVAMESTGVYWIALFALLIQHGFEVYLVNSRHTKNVSGKKTDMEDAAWIQQLHSCGLLTRSFLPDDLTETLRTLVRQRKALIQDSSRCIQRIQKNLEMMNIKVHTVIRDITGKTGKAIVEAMINGEREAKNFLPLVDARIQASEEDIVKSLEGNWRKECLFLIKQCYAQYQQLQEHIRECEKEIETILQQMVAVQNEGVIEPPKDEPQQQQQNCETMTAGKKASNKKRKSKNTPRYDVRQYLQQIHGVDVLEIFGINEISALEILAETGTDLSKWETDTRFVKWLNLCPNNKITGGKLISSRLMSKKPNHASQAFRAAANGLKRTDNWLGDYFRRMRAKGGHKFAIVATGRKLALIYFRMVKNKEAFTPMDINEYREKHKKSKIAFYEKKLAELRKEAT

SEQ ID NO: 290922 - protein, 397 aa, unidentified
MYIVGIDIAKRKHEAAVIDGDGAVIIKPFSFTNNCSGYNRLLAMLAKAKLPLDEVSFAMEATGHYWLALFTRLQKEGFRVQVINPVQTNSIRSFYIRQAKTDPRDALLIAEVIRFGHFSESTLHPENIYELRELCRGRHAIVSMQADVKRKVVALLDQVFPEYETAFTNLFGDTSMAILQTCPTPKELSEMPLEELCHLIEVSSHKRFRMAKARELQELARNSFGFAMAGDVFSTMIRLYAKHLDFLKQQVREMDRKIAEIMDTLDTPITTITGIGPTLGAYILSEIGDISRFSSAAKLAAYAGIDPTMRQSGEYNGVRNRMSKRGSPYLRHAIWLATSSAVLHDPALKLYFQKKRDEGKPYMASVGHACRKMVSIIYAVMRDNKAYTPYIPNEISA

SEQ ID NO: 290923 - protein, 394 aa, unidentified
MDRALVGVDISKDTFSAAGLDAEGNECFCGSYSMDSEGFGKFLEIVTTHCPDRQKVLVGMESTGCYHINLFSFLTSRGIQAVVINPLLIANFAKRSLRKTKTDKKDAKTIAKFLMENREEISQLSISEDLQDLRDLARERESISHLITATKVEIKRVLRTTFPELESVGDLFTRSMLRFLKEYPSARRVKMARLKDLAKVLNQPQVGNKLSFSVEDILRAAHSSIATVSPAKEVILQGKIATLVHLQGRLAELTKLLTDFCKATRVEDWKILRSIKGVGPKTAVPFLAEMGSIENFSSHKKLIAFAGMDPSVCQSGKYIGKSKLSKRGNRHLRRAIYLMASAVVSQNAFFKAYFLKRKREGLTPQRVLLATAHKLIRVIFAMLSQRTYFQAKMA

SEQ ID NO: 290924 - protein, 372 aa, unidentified
MIVIGADVHKSTHALAAVDANTGQLLGEKEIPAREQGHLDALRWAHELDTEIVWAIEDCRDLSHHLENALISAGERVIRVAPKLMGVSRRGEREPGKSDQIDARAIARAVLREGIERFPAAFLDADAVEIRLLCDHREALVNERTRLINRLRINLVILDPELEATIPARKLDYPGQLQRVTRRLRAMPQTARVRIAREQAKRIGALTRDAEHLKRDLRDLVRVHRPEMLAETGCGPLTAAILIGQTAGAERFKSDAHFARLAGVAPIPVSSGRTDRHRLDRGGNRQLNRALHVIAITRGRLDPGTRAYLQRKEAEGKTRIEAMRCLKRHLARHYHSLLSQPSTLAAAPAASPDRNYDEKRYTMRTKNSTAAQ

SEQ ID NO: 290925 - protein, 311 aa, unidentified
MNNTIGIDISKDTLDAHRLADGQHKQFLNGKTGHAQLVKWIGKQSDPLIIFEATGAYHRQLERVLGTHIIPFVKVNPKQARRFAQACGKLAKTDRVDCEMLAKMGAALQLVPKPFTTENLYDLKELLSARRALIKDRTAAKARKATVINALIKQQLEKRLRQIKNDIAKIDALMLDVAREDQYMSERLDILFSIPGIGVITALMILVDMPEIGALNNKQVASLAGLAPMSQSSGKWIGKARIQGGRPNLRNAIFMPALVAIRHNADLKTKYDQLVAAGKEKKVAITAVMRKLLVLANALLRDNRKWAEKAA

SEQ ID NO: 290926 - protein, 375 aa, unidentified
MIATTRPEMSVSEPTLYVAFELGKKDWKLAMTSGFGVTAWLRTVASGDLGGVERALRQGRQRLGLSAHAPVVSCYEAGRDGFWIHRALTQRGIANRVVDSASIEVSRRARRAKTDRLDALKLVQMLVRVCLGERHVWHEVRVPTVADEAARQVSRERTDLVQAQTRVINQMRGWLATWGATLPSRRRGNWWTTAQDWAGATLPAALQTRLARAEARLAMIAGQIGELEAQQAAAVTTAAPTRALRQLVQLKGVAPTSASVLLDEGLVWRAFRNRRQIGGLLGFAPTPYDSGESTQEQGISGAGNKRLQSISLQLAWNWVRWQPQSALTQWYHARFGTGKRARRIGIVAVARRLLIALWRYVTTGVIPAGAILKIA

SEQ ID NO: 290927 - protein, 339 aa, unidentified
MRLYSAFDLHSSNAYLGIIDEDGKRVFRRKLQNDEGLMVKVLNPFKSDIEGIVVESTFNWYWAVDLLMEEGYKVHLANPSKIQKYSGLKYADDEDDALWLAEMLRLGILPEGYIYPKEDRPIRDLLRKRGHLVKLRTSLIVSLQNIISRSLGGKMKTSDIKVLAEDRVTPLLAYNEDLALTGKVSKEAIDSLTRQITTIEGAVEKKIDLRKPYDYLLSMPGVGRILALTMMLETGPIGRFEHVGNYASYCRKVPTTWTSNDKRKGKGNKKNGNKYLAWAYSEAAQLARRFDDTARAYFDRKRKRTNAPIAHSALAHKLSRAAYYIMRDGVPFMAEKTFG

SEQ ID NO: 290928 - protein, 348 aa, unidentified
MLYAGLDLSRRRLDVCILDEEGDRLLEIGVRPDADALRTLTARVARLRPEPVSAAIESMTGARFVHDSLERLGWEVDIADAQRAKGLAPLVAKTDRIDAWVLAELARRELVPAIWLPDPGVRAERERARFRLHLVHHRTALKNRIHATLMSFGHPVPVSDLFGRAGRERLERMALPAAWASSVATSVALIDDLDRQIATAEAELRQLGAEHRYVPLLCSVPGISWVLASTIAAEIGDIGRFSRAKALVGYTGLVPFVMQSGERDRRGPLTKHGPRYLRWALIEATIHAARHPAYRDRYERTRRRLGKQRGPRVARIEVARQLATAIWHMLSNGEPFAPPAGPAIYLVA

SEQ ID NO: 290929 - protein, 394 aa, unidentified
MKLVGIDVGKNSHHFCVMDKETGEFNVTPSSFSNNKEGFDFLINSLKPYSKKSILLGMEDTGHYHVALLKFLLSNGYTVALINPKTTDLTRKMEGGITKNDKLDTITICDVLDTPERKKQYRITKVDRFDLYEQRQLTRHHHNLKEELNIYCNRLQKSIDLVFPEFNTLFGSKYGVVYMNLLKTFGSAEAIASTDIRTIRKCFEIKGRGGRISLTAEKLKECAKNSIGISSEVETIQIKHLVSQIMLIKEQIAEIDKKIEEFSIINNSPILSIPGISHFSGTSILAELGDIGNYSKPSQIIKFAGVAPYHYESSQYNAQHTAITKKGSKYLRKTLYQIILTVINNNPVFKKYYRLKISQGKGHRCAQGHCIRKLLRIIYHLLETGQSFDPALLR

SEQ ID NO: 290930 - protein, 413 aa, unidentified
MDVLVERVAGLDVSKGDVKVCVRGPVSQGSRRYRDEVRTFSTMTRSVLLLSDWLAEEGVELVVMEATADYWKPVFYLLEEQFEVWLVNARDIKRVPGRKTDVSDARWIAQVAQHGLVSPSFVPPPRIRRLRDLTRQRTNLVRERSRALNRLEKVLEDAGIKTSLVLTKTLSMSSRAMIEALIAGERDPVVLADLAIGKARSKMTDLREALTGRFEDHHAFLASQALAHIDSIDAQTAAFDRRIETETAPMRRQHDLLTTIPGISTRLAQVVIAETGVDMTRFPTAAALASWSGVAPGNNQSAGRSYSGATTHGNVWLKGGLGDAAAAAARTKGTYLNAHYRRLIRRMGKKRALVAVMHKIVIAMWHMLTNDARYQDLGPNHWQQDPHQAKRRQQRLIAELSALGVDTSGLEPA

SEQ ID NO: 290931 - protein, 339 aa, unidentified
MELYAGLDLHSRNTYIGIMDKAFNRVFKKRVPNHLEHILQTLDPFRDQIKGFVVESTYNWYWLVDGLMDAGYSSAHLANPSAIKQYEGLKHSDDQHDAFFLAQLLILGILPQGYIYPKKDRPVRDLARKRMFLVQHKTAHILSLQSLIQRCCAMKVRANDMRHLTVEELEMWLEEEHLVLSAQANLDSVNFLKQKIKQLEKAIIQKVKLNKAFKYLLTVPGIGNILAMTIMLEVGDIKRFPKVGNFTSYCRCVPSRRLSDGKTKGYGNRKNGNRYLSWAFTEAAQLGRRHNQRFRAYYNRKVAQANTSLATKALGNKLARICYYIMRDQVPFLEELFCH

SEQ ID NO: 290932 - protein, 388 aa, unidentified
MNKIIYIGMDVHSTNFTLCSFEPGYGFEADKIFGQTRIKEDIFNSTVKYINKLKSMRPDVDVVCGYEAGCLGYNLHRKLNAKEIESVILAPTTMAVARNSSKKKNDYRDAITIAKCLASSAYKAVYIPDEKDEDVRDFIRMRDDHKTALKQIKQQLNAFCLRHGHHYDKTKWTGLHLNWLRKLELSKLQRETVEEYLATYEALTSKIAALDIRIEDIASEERYAEKVNKLKCIKGIKTHTALSFVCEIGDFNRFKSADKFAGFIGLVPGECSSGNTERMLGITKAGNRHLRRLVVEISNTYRRGTVGRKSAALKERQKDMPKDVVAYADKATNRCQRKYQRMMFKGKNSNQAVAAVARELCCFIWGMMTGHHSRTAQAEVPVYRSELD

SEQ ID NO: 290933 - protein, 334 aa, unidentified
MSKIAVSVGLDYHPGSVQICVLDEHGAVLTNGTRENSSQELNRVARLYGEQIQAAIEVSPGAANLADELVTRFGWSVDLAHPGYVARIKQSPDKTDFGDARLLADLTRVGYLPKVWLAPLDVRELRELVRYRQQLVRERRSTKLRVRALLRNQRLNGPGNAWTKAWLEWVRNEAALPDHSRWVMTQQLSNLERLQREIRQAEQRLEEVTQEDVIFQKLLEQEEVGLVTAVTLRAEIGRFDRFRSGKQLCRFCGLSPRNASSGVRQADAGLIKASNPELRCVLIELGQRLMNHSDKWSERSAEMRARGKPRSLIAAAVANRWLRKLYHEMKSTHE

SEQ ID NO: 290934 - protein, 342 aa, unidentified
MQITTIGLDIAKNVFQVHGIDAKERVVVRKQLRRSQVLAFFKALPPCLIGMEACATAHYWARELTKLGHKVRLMPAKDVKAYVKRNKNDAADAEAICEAVRRPTMRFVRIKSAEQQGQLMQHRTRDVLIRQRTQIINALRAHLAELGIVAAQGDAGVNELRAIVADDRDERLPIDARASVIVLAAQLEALQTLIGSIEKRIKMQHRSNETSQRVETIPGIGVLGATAIVATAADPTVFRSGRDFAAWIGLVPRQDSTGGKQKLGPISKQGDRYLRRILVVGAIAVLRRAQENPGKYPWLTQLLARRPFKVVAVALANKMARTAWALMVHGGTYRAPELAEAA

SEQ ID NO: 290935 - protein, 432 aa, unidentified
MKKIRENAAGIDIGAKKVFVSIEGQEVKNFFTFTEDLEQVRDYLLKHKIKTVAMEATGVYWNILYEILEEAGIDVWLVDGRQTKQVPGRKTDVKDCQWIQQLHSYGLLNRCYVVESDVKELRSYQRLREDHIRSASMHVNHMQKALTEMNIRLTEVLSQIHGTSGLAIIEAILKGERNKEKLLKMCHSSIIKNKKDEVLKSLNGKYTQAGLFALQQAFDSYNFYQSQIQQCDQMLDKVIKRMGDGGTDQKLQIPRKPIRHNKPDINNLGISLIKIFGGKDATVLSGITDYTWMQLLSETGTELTRWPSEKHFTSWLGLSPGQHSSGKMKKNKRKAGRPKAGQIFRQIAQSLITSKHIALGAFGRKLRARKGPSIAIKSMARKLAVLYWRVMVKGLEYVENGIQKYEEQLLAQRHKTLMRLANELNVQISYNP

SEQ ID NO: 290936 - protein, 362 aa, unidentified
MNYVGVDIHKKYSVLCAVDERGRKLREARVEGNAPFGFAQFFSGLGGPSKAVVEACWNWGRIHDELEELEGIEEVVLAHPYKTRLIADAQIKTDRLDAYALSTLLRGNLVARAHVPRRETRMRKNLLRQRLYWARLRTMLRNRIHALLDRQRSLELPQCSDIFGVRGLSFLRRLELPETDAALLREQLALHDLIAQQMKAQEKRIGLEFGSEAMHRQLMSVPGIGPTLAAVIACEVDSIERFSSAEKLCAYAGVVPTTHSSGGKTRHGQLLPFCNKWLRWALIEARWVAIGCSPYFGALYKQHRARGKKANSAVLIVARRMCRIIWQLLHEKRDFEKRPLRPNFNFPGCSVVRLTAATAARP

SEQ ID NO: 290937 - protein, 418 aa, unidentified
MQTELSQFKVIIGIDWADKKHNVCVQATASGKRQSYQVPHKAEKLDEWARSLHRQYGGPIAIALELSKGPIVSALQKYDFFVIFPIDPTTLANYRRTFTPSGAKDDPTDAEYALTLLLTHTEHFTALQPQSVEMRTLMALVEQRRRLMNDRVRITNRLRNALKQYYPQALEWFDRIDTKLFCDFIKRWPSLAQGRRARKATLERFFRDHNMNRKALLERRITAIKSSLPLTEDEAIILPYRLQALTLVAQLGVALESIRTYDDEIAALAPQHPDYGLFDRLPGAGPSLAPRLLVAFGEQRERYSKAAELQKYAGVAPVTERSGQSTWVHWRWQCPTFLRQTFVEWSAQTINKSYWAGLYYYQQREKGCSHQAAVRALAFKWIRILYRCWVTHTPYDEAKYLKALQERGSPLLKIAEAA

SEQ ID NO: 290938 - protein, 355 aa, unidentified
MNSEKYIGLDVHQATIVVAVMDSTGKVVMESILETKAATILEFLAGLRGTLSVTFEEGTWAAWLYDVLKPHVAKVVVCNPRKNGLLKDGNKSDRIDARKLAELLRLNNLKSVYHGETGVRMLRELARSYLNLVKDQTRVMNRLKAMYRSWAIPCAGRDVYYARHRAEWLAKIREAGVRRRAEHLYQQLDMLQHLRQQARRELLAESRKHSITAKLRQIPSLGPIRVALAVALIQTPHRFRTKRQLWAYSGLALETRTSGEHCYIQGQLRRSKKQVSIRGLNKDHNHDLKGLFKAAATRASVQPGPFQDFYQASLAKGIKPTMVRLTLARKIAAITLTLWKKGENFDAEKLKSQAA

SEQ ID NO: 290939 - protein, 349 aa, unidentified
MTIVEDARVITGGVDTHAGLHVAAALDPLGGLLGVQEFPATAAGYARLLDWLGGFGTVALVGVEGTGSYGAGLARHLAAAGVPVVEVDRADRQDRHRQGKSDPLDAVSAARAAQSGRASGAPKGRDGAVEAIRALMVAKRSARHERTQAINQARALIVTGPDELRARFAGHTPAALVEAIAALRPRPGDVPGHATRVALRELGRRAQFLDAQLDRLDELIGPLVTARAPGLLSLHGVGPDTAALLLIAAGDHPERLRSESSWAHLCGVAPIPASSGKVSRHRLNRGGDRQANHALWRIVITRLSSRPGHPATRAYAERRAKEGLSKKEIIRCLKRYVAREVYHQLRGGA

SEQ ID NO: 290940 - protein, 415 aa, unidentified
MALKIVYKICCGIDVHKTFVVACIASTNDKGITSYESHRFSTYTSGLKTLLQWLLDRNCKDVCMESTGKYWIPVYNILESDCSIVLAHPKYVKAIRGKKTDKKDAKWIADLFKHDLVAGSFMPPADIRQLRDLMRYRFKLTCFKSSEKNRLQNCLTVSNIQLGNVVSDTFGKSAQAILDKLLENPADTSFDLEPLVYKSLKKKLPELRDAIDGYITPEQAGKLKVIKAHYENLESRKAELEELILALAAPYQQELAILQTAPGISSPFTAIGIISETGTNMEAFPSAKHLCSWAGLTPTNNESAGKKKSVRVSKAGCYIKPLLVQCANAVVKSTKHPEMRNRYLRLKKRRGHKKAIIAIARMLLTALYHMLKNGENYNAELYRKSDLPPVNREITVEQALMIARNQGYKIKSATA

SEQ ID NO: 290941 - protein, 460 aa, unidentified
MGWLPNRLPAGVAWLDIDVPACRALAVAWPGRGATALIDLELGMPAAGPPPELERKGQSMAAVMIGADPHQGSHTAVVTGQAGVALGEVRVRASAAQVQQLLAGAAAWPVRTWAIEGAGGLGHLLAQQLAAAGERVLDVQPELAARVRRLAAGAVNKNDPDDARSVAVAALRPAACPPVRADDHAAVLTVWARRHRDLSRSRNQVAGRLHAVLCELIPGGVSKQIRSAAAACILEQARPSGAVQAARHELAAEDLAGLRRIDARRRDTRRKLAAAVRAPGTTVTEVFGVGPAVAAAVTGDVRDVSRFASRDCFAACNGTAPAEVSSGNRVICRLSLRGNRRLNHAIHMAAVTQIRFRHSEGRACYDKKTAGGKTSQEALRALKRQVSNAIYQHLKAGARRAAAAGPGGHPGNGCVASVAGLHPADRLFGQATPGPAPTLRSRPYLAKTGGDQVAPAGATA

SEQ ID NO: 290942 - protein, 396 aa, unidentified
MNQQLFAGIDWATKTHAVCVVDQHGGIRARFGVPNTGKTFTGLVRRLAKLTVAGVAIERPDGPLVAAMLDAGLRVVVITPRTVKALRSRYSAAGAKSDPGDAYVLADALRTDGHRLAALVPDTDPTIVLRALTRTRKDLVKARVGLVNQLAAQLERCFPGALGLFRRLDSAVAVAFLRRYPTSAAAARLGHAELAAFLRRTRSCRRTPPVDLRDRLRCTPPAGISRAEASGLAVCITALLDTIQILTRQEKELAAEIVERLEVHADQHVFTGLPKAGHGVRAARLLAEIGDVRARFPDEEALAALASVAPVTRASGKARSVGFRWACDKQLRDALVDFADTPATPRHGPPISTPKRWPEPAATPTPCASWPAPGSASSGASGKTTPPTTQPSTEGR

SEQ ID NO: 290943 - protein, 477 aa, unidentified
MPRWIGLDLHKRVLEVCVLDEAGHIQSRTRLPVERAELRKFAERELRTDDQLAVEATTNTWPVVALLRPYVGKIVVSNPLQTKAIATAKVKTDKVDAETLARLLRADYLPTVWQPDAATAHLRHLCSQRSSLVADRTAVKNRIHALLHQRLIPVPNESLFSQRRRRWLTDLELEPEDQATLARDLHLLEEFDRAIAELDHTLYRVGGNDPRLKLLVTLPCVDVVCAQTLLAALGDVRRFHDGAHAASYLGLVPSTKQSADRCYHGPITKAGNGHARWMMVQAAQHLDRHPGPLGAFFRRLARKKNRNVAVVACARKLVVIAYELLLHTQPYRYAQPGPTAEKLRRLRLRTGGTRRKTGSPKGIWSVAKLPGGSRTFKALPTLYAEEDVPQLVPPAPGELRVQRQPDVAHFVASLSQSQVRRRRRPTTDDLTSEACTHTRAVSEDLALRPSAPVKAAARPAPLRSAPAGDGRSPDKRR

SEQ ID NO: 290944 - protein, 365 aa, unidentified
MGWMAPLRHLSAKMLGVESPADGEPSMSEITTIGLDLAKHVFQVHGVDANGATVVRKRLRRVQVLAFFSRLPRCLIGLEACTTAHYWARELRTLGHEVQLMPAQYVKAYVKRNKNDAADAEAICEAVVRPTMRFVPVKTPEQQAAVLLHRGRERLVRQRTGLVNALRAHLAEFGVVAPQGLRNVGKLITIVRDESDARLPDLARQVLAVLAAQIEQIEAAVAALEKQLMAWHKSNAVSQRLATIPGIGPIIATAIAATVVEPSAFRSGREFAAWLGLVPRQNSTGGKTRLGGISKRGNQYLRRLLINGASANLLRSKLTNADPWVIGMRRRRPSLVVAVALANKTARIAWAVMHRQEVYQRMAAA

SEQ ID NO: 290945 - protein, 359 aa, unidentified
MKNLKYSVGIDVSMNDIACCISVINDQQEVKVRATRKFNNNEGGFSLFQEWVKRHQKEELPVIMVMEATGVYHEQLAWFLHHKGNMVSILLANKAKKYLQADGIRSKNDKIDAKGLAKIGAEKKLDQWTPPSMELYTLRYYTRQHQSLNEFYTATANQLHSIEHSQVKNKAIIKQLKSSLKLYQKHIKELEKLIAQLIHADPVLNQHQQNICAIKGMGMLSFAVIAAETNGFTLFDNAASLVKYAGYDVIENESGKHVGKTKISKRGNSRIRRILHMPAFCAVRDDQPQFNKLFDRVYDKTKIKMKGYVAVQKKLLVMSYYLWKKGEQYDPTFKKEVAPALPEATRDESLKEVLIEQQN

SEQ ID NO: 290946 - protein, 401 aa, unidentified
MPDDQKYAVWCGIDVGKEAHHACALDENGDRLFDRPLPQDEASLKELFERLRTHGRVLVIVDQPNTIGSLSIAVAKASGVDVAYLPGLAMRKAAQLLPGDAKTDARDAYVIAITAQRIPDTLREVGRDDETMAELRVYAGRDDDLVGDATRSVNRLRAALLQIHPALERVFRGSKITNDLTLDLLIHYGGPSGLMRAGRVRVTAWAKKSGHRKVEPSICEVFDALAQQTVTVAGTAAAEAVIPQIAQSIKDTKHQRAQLNAQVEQLIADHPLYGVLVSMPGVGTKTAIAVLLAVGDASSFPSAGHLASYAGIAPTTWQSGKSIKGEHPSRAGNKQLKNALFRSAWVATLHDPVSRAYYQRKRSEGKRHNAAVICLARRRCDVIWAMLRKRSLYQAELPSAA

SEQ ID NO: 290947 - protein, 336 aa, unidentified
MPMLADIVDGVIGVDTHRDTLAAAATTPIGRILAQTATSADAAGYRALLDFADAQIPDRRCWAVEGTGSYGAGLTTFLLAHCERVVEVGRLKRPASRTGAKTDAIDAVRAARDVLGHEHLALPRRRGDREALRVLLGCRRNAVSARVAAINQLKALIVSAPDGLRAELRGMATTTQITRCAGLRDRPARSLEHRTTIRVLRITAQRIQQLHAEIDELGSQLTTLVDAIAPWLVDLPGVGPVTAAQVLVSWSYAGRLRSEAAFAALAGTSPIPASSGQVTRQRLNRSGDRQLNRALHTIVIARLREDPDTRAYAARRTAQGKTPREIRRCLKRFTAR

SEQ ID NO: 290948 - protein, 346 aa, unidentified
MLYAGLDLSRQRLDVHVLDEGGRTIEVTAVRPDADALRTLAVHVLRQGQEVSAAIESMTGARFVHDTLEFAGWDVAIADAAKVKGIAPLAAKTDKIDAWVLAELARRDLVPEIWLPTPEVRAERERARFRLHLVHHRTALKNRIHATLMTFGHPVSVTDLFGVAGRELLAGLALPEPWTTTLGTSLRMVDQLGAEIDACERDLRRLGADHASIPLLLTVPGVGWVLAYTIASEIGDIGRFSSPKKLTGYTGLCPLVRQSGNRDVRGPLAKNGPKYLRWALIEAATHAARDAHYRERYERTKQRLGRQRGAKVARVDIARKLAEAIWHVLTKNEPFAPAGPTMLLVA

SEQ ID NO: 290949 - protein, 315 aa, unidentified
MYYIGLDVHKKTISYCVKDVSGHVQQRGTMAATRTELDNWMKTLPQPWTVAMEASIFTGWVYDHLRPHAAQVKVAHPLMLRAIAVAKKKNDRIDASKIADCLRCDFLPECHMACTSIRDRRRTLRYRHLLVRQMVQMKNRVSGLLLETGVRHNKERLHQVKYFQELLTDKEVTESIRPLLRLSHETIRRLDKTETALIRSLERDPVLAERIKNLKTIPGIGVITALTWALEMDDVSRFRSVKQAISYCGLCGDERSSADKVLRTPISKQRNKHIQSVLVEAAKFAPQQSHELALVYEKESRKATPIAPRWPWLES

SEQ ID NO: 290950 - protein, 455 aa, unidentified
MCVPIDYAKKDHVVMFCNGYGDILRKPFSVKNSPQGVDYLTDQVVRSCRQRGISQNHVFFGGEQVGSFADNFVSTLRSQGWLVAGVNAHEAKIQRENLQASTDRLDLLGIAKSLLNRRANCSPAQSGIYLDMRTLVRHRRKLVEITTEVKNRIHAVVDRLFPGFLNESKSGITPFSKSSLWLMKERFSAGQIRRRRRTSLIEALRQRGTKKPEDTADRLQQYASQVLNAPQDHVHILQLSLAQHVKHFCCLQEGIGQLETEIALNLAQTQGAFLTSVRGIGIVLAAGVSAEIGNPFEQKPINNLVSYSGIIPRVKQTGGPQGKTKTGKVARRCNRIVKDYVVRSASHLGLYGPADLKSDYQRRQANEQHADFGMGRRYLRMAMCLMRTSQTYLPSQLRKAQTQIQDRADYYVMSWPQLRDKWQKSGALETAFSADQPLGQWRKIVQHFYGIKLTL

SEQ ID NO: 290951 - protein, 416 aa, unidentified
MDTMYERCCGLDIHKKTIEACFRSGKKKTHMSFGTTSAELRKLTMWLVENDCQSVAMESTGSYWKPIFNILELSGTDMKIIVVNARHMKNVPGRKTDVNDAEWIAELLQYGLLRPSFIPDREQRELRELSRYRKSLVGERAREINRLQKMLEGGNIKLTSVVSEVTGYSSRRLLDRLLRSDEPMTEEVISELVHTSLVGKSKELEIALDGLLSELQKELLIKVLDHIDDMSRRIADLDDFCRKQMKKYEDALDKLDEIPGIARRTAETILIETGLDMSRFPTAKHFARWAGLAPGNNESAGKRSSGRTTKGNPTLKSTLIQSAKVAARKKNSFFKARYQKIAAKRGANRASVAVAHSMLIAIYHILKSGERFKDLGEDYYNQFNREKKKNYYLKKLTKLGVNLKEATLSISIQTAT

SEQ ID NO: 290952 - protein, 423 aa, unidentified
MEVMYERVAGLDVHKATVVACVRLGTDRKITRECRTFDTTTDGLRILLAWLEECRCSHVAMEATGVYWMPVWKILGEGNFGLIVANAAHIKNVPGRKTDLNDAMWIADLLACGLIKPSFVPEEEVQELRSLLRTRKQLGREQTRHVQRIQKTLAEANIKLDSVLSDIMGASGRRIIEAMIAGIRDPRRLAALANTRIKATPKQLYDALHGRLTDHHRFLLTLHLRQWDNLDATIREIDREVEARIARMDKEVKAGEAPFRDLIGLLCTIPGVSTLSATTILSEIGRDMSRFPTAGHLVAWAGLCPGQNESAGKRKPVRLRKGAPWLKTMLVQCAWAAKRKKDSYYKAQFFRLQARRGPQKAICAVAASILTAIYHILKNGTEHHDLGADHFNRRSTEAQTKRLVAQLTRLGFEVQLQRTAEAA

SEQ ID NO: 290953 - protein, 332 aa, unidentified
MYLGIDIHKRYAQVAVMNEAGEFVEEVRVENANLDDLAQRYAGAKAAIEATSNYYHIHDTLSEQLDVTVAHPKKLNLIADTDKKTDRVDAKELARMVRLNSVPESYVPTDEIREARALVRGRQKLVENRTEYANKIHGLLSDHGITQKVKPLSVKGREFLRELSLPTPWDTLLESYIEMIETLTDEIAQLDEAIEERAGSLKETQLLMSIPGVSYYSALMIYAELGEIDRFDRDKEAVSYVGLNPVIRESSDSRFEGGISKRGSGRVRWILVQCAQTAVHTCNDEYLSRFYDRLAGKKGSQKAIVATARKLLVSIYHMLDRDEVYDPPGVSS

SEQ ID NO: 290954 - protein, 396 aa, unidentified
MRADRRWRTRKEKKEWARRLQSSDPGLDVIHPQAAGIDVGNATHYVAVRPDRDPEPVRQFECFTADLHRMADWLKSCGVKIVAMQSTGVYWIPLYDILEERGFEVYLVNARHTKNLPGRKSDVQECQWLLKLHTYGLLNNSFQPTSQIRGLRTYWRQRAEHVQAAASCIQRMQKALTQMNVQLANVISDLSGVTGQLIVRAIVGGERDPQKLAALRDQRIHASSEEVAKSLEGNWRPELLFLVKQEVDTYDTYQKRIAECDEQLQQQLANFANAASAITAAPVTEPQGDEQPKEARVKRKKLAKNAPRFNLQQELQRVAGVDLTRIDGIDVMVAQTILAEVGLDMGRWKTEGHFVSRLGLCPDNRITGDKVVGRGTRHVVNRAAHLPAHGRQRTVA

SEQ ID NO: 290955 - protein, 409 aa, unidentified
MSKTMAGIDVHKRMLMVVVMGAEETEARPQRRFGTTTPELLHLQTWLQQHNVGDVVMESTAQYWKPVWLTLEEHFRLYLAQAWSNRAPRGKKTDFKDAERLVRRHMAGELTLSFIPDAEQRQWRSLTRRRTQLTRDRTRIQNQVESLLEETRIKLAGVVTDLFGASGLRILTALASGETHAHQLAALADARLHCSPEELTAALTGFVSPVQRQLLQQHLEHLRLVESQIEGVSQMTAEVFQKHGDTIARLAEIPGVRVLAAQQIIAEASANAAAFPSAAQFSSWIGVCPGRNESAEKNHSSRCAKGNPYLRRVLCQVALAASRTHNSFFQQKLRRLLPKHGFQKSIWAIARHLSVVIWKILHDGVRYIEYGGRPSALAAKRRLQRLKKELRALGYSDELIPTRSTCLPA

SEQ ID NO: 290956 - protein, 370 aa, unidentified
MKKNSKDETRRKALQAKSRKMKLTVGIDLGDEWSQCCCLGECGEVIEEFRVKTTREALRARFGDLKPMVIALEVGTHSRWVSQLLQEFGHEGIVANARELRAITGSDRKSDRVDAEKLARYARVDRRILRPIRHRGEEAQVDLLALRGRAVLVKTRTQLVNAVRGMVKSFGYRLPSCSAERFGRLKEKIPAGLQQTLNPLMEALEQVQQQIDSYDQQIEKLATEKYPETELLRQPWGVGTITSLSYLLTIEDKHRFEKSRDVGCYLGLRPRRSQSSQRDPELGITKAGDCFLRSLLVECGHRILSEKAPDSALKRFGERLQARGKKNAHKRAVVAVARKLAILLHKLWVTGEVYEPFPGGADQNTAQAAA

SEQ ID NO: 290957 - protein, 360 aa, unidentified
MLAELVDAVVGVDTHRDTHEVELALPTGTPIGIRKISNDNSGFAELLAWILDHSPGPRVVVSIEGTRSFGVGLARAVAAAGLTVIECEQPNRKARRGKGKSDPIDAHLAVLAALRLDADRLPVPRADGDREALRILLGTRHELTVVTTAQTNRLRALLLGGQDSERDLARATLTDPVLLAMVRRREPPQASREQAVRHGEIRRLAHAIRAGRHALAANRAQLQAIVDQIAPELTERRGIGAVTAAQAIVSFSHPGRCRSDAAFAALSGTSPLQASSGKTVRHRLNRGGDRALNSAIHTIAITRIRCCPTTKNYVARRTAEGKSSREIQRCLKRYIARELYRALNASTTLTTQTSAAPTPA

SEQ ID NO: 290958 - protein, 364 aa, unidentified
MKKCHSNTELSSHEETRCQFNGGKADIKLGIDVHQDFYVVVEQVDGSNPKPPQRFQKQAFLHWATKLKQSGAEVYAVYEACGFGFTLQRQLSELGIHCYVVCPQKLDEQNRRVKTDGLDAKALCLKLDRFVEGNRHALALVRVPSEEEEQARALHREREQLVNVRKVLEAQGRSLLVNHGMEPVQGWWKKRAFATLAAPEWIKELLGNSQPVVLLLQEKIDQLTRQLQNAANAEPPRGLGKMTSVIIDREIGDWDRFNNRRQIASYTGLCPGEYSSGNTRLQSCVTKHGNPRLRAALVELAWRLVRFQPNYKPVRKWRQILAKGALATGAARKKAIVAVARQLAVDLWRIKTGRLRAEELGLIN

SEQ ID NO: 290959 - protein, 355 aa, unidentified
MDSEKYIGLDVHQATIVVAVTDSTGKLVMESILETKAATILQFFAGLRGTLSVTFEEGTWSAWLYDLLNPHVDKLVVCNPRKNALLKDGNKSDRIDARKLADLLRGNQLKPVYHGETGVRMLRELSRSYLTIVKDLSRVMNRLKAVYRSWAIPCAGRDVYYTRNRAQWLAKIRDAGVRRRTERLYEQLDMLQYLRQQARRELLAESRKHAITAKLRQIPYLGPIRSALAVALIQTPHRFRSKRQLWAYSGLALETRISAEYRFVEGQVRRSKKVLSIRGLNKDHNHDLKGLFKGAATMASVRPGPFQDFYQASLAKGIKPTMARLTLARKIAAITLTLWKKGESFDVEKLKSQAA

SEQ ID NO: 290960 - protein, 355 aa, unidentified
MARLTYHPKNFETFIGLDVDKKSFSFTVHNRSEMNKSKKIPSNPEGLYNYIQKHFDSEKVICAHEAGPTGYHLYDYLKQKGILCLITAPASIPKARNQRVKNNRIDSVDIADNLMSGKLKPIRVPQGPYRELRELTKIREVYAHDRKVAKQRIKAVLLSAHLYPILKEPEAHWSSIYIKELQQIECSFAVRHRLDMLIEDFEYARKKLLSIHRTLRSFCRENDQINQYIHHLQSIPGVGFTVAVMLLGNIGDPQYLQNPREIASFVGLTPREQSTGDDVNRGSITHLGDKTMRSLLIEAAWVSIRHDTQLKQFFERVRSRNHPRIASNIAITAVARKLTQYCYRVLIDKRDFIQH

SEQ ID NO: 290961 - protein, 415 aa, unidentified
MSALFRWVGRAIGLDVHRDFCVIAICEDGVVRSAGRVASTPEAIKALAESLEPSDRVALEVTGSAWEVARILEPHVERVVVVSPDDTGIVQARAKTDRLDARALARLLWKGELESVWMPDERCGVLRRRLARREQLVHARTRAKQEVHAVLHRRLQGKPPSTDLFGAKGRQWLAGLELPLVERESVNAALRHVNFLDYEIDEVERLIAEQAVGWPEIRRLMTVPGVNLICAASFIAAIGDANRFMTSRKLVAYLGLDPKVRQSGEAPARSGRISKRGSASARWALVEAAWTTVRQPGPLHAFYERTRGRRGHGKAIVASARKLAVLFWCMLTRGEDYAHQQPSLTAKKLRKLELKAGAPRRTKAAAGISSVNRAMREAERELAEQAEISYKRLVQDQKAGAPARKVGASATPERA

SEQ ID NO: 290962 - protein, 481 aa, unidentified
MNVQVNAVGQGPVRRLAGIDLGIASEHTVRVLDGAGQKVCAARCVPTRESLLAMEARALAGTPAGTRLEVVLEPTGAAWFPVARFLAARGHAVYRVSSAKAADLRKFYRRHAKSNGIDAETLARVPLADPDGLIELDLAEGDQAALDRRVRACDRLTQQAATHKTRIKDLVRQLMPMTPLTGDLGKADLQVLERYADPRALLAAGPAQLTALISAASRGHQDQARAAQWTAAAQAAIELYGPDDPAVPFADLAAEVATEIRLLQAIQAELAAHGAAREAAYRQADPAQIARTLPGLAEVGGPAMTAIMGRPGRFASGHHFKSFLGLAPRASETGETDRKGEPMTKAGPSLGRATMIRAADTARKLDPQLARIYHTQMTERGANHLKACCVVAGHLALRLHAAMLRGAPYQLRDTDGTPVTPGQARQIIAANWTVPDDVRKRRRSRKKTSGKAPQQAARPGRRGGPPAPGSPPPRGPVNSAP

SEQ ID NO: 290963 - protein, 323 aa, unidentified
MNKYKETFGVDISKDVFDCYGSVSGHTQFSNNETGFKTFLKSLPKESLVVMEATGYYHYRLAQFLYKKGIAVSVVNPLSVKRFIQMKLAKIKTDKSDAKAICDYGLSQEVPLYNALTDVQSECLQLFRLLDSYLKKRAATKNKLHGEEVLGVPSNHVYRSLKRNKVHLDKEISGIESKLLSLVKQDQQQQLTLLQSIPGIGLKTALFLIVVTDGFNKFETSSQLCSYIGITPIIRESGSSVRGRSRISKVGNRKLRNLLFLCAFSACKQNKACREVYQRITNKGKSKKLALIAVANKLLKQAFAIAKSGRPYDERFVSVLVIK

SEQ ID NO: 290964 - protein, 329 aa, unidentified
MRTVGIDVGAKELVLVLRQNKKSCEVKTFDNTPQGHKKLIKHLKPKQKETHVCLEATGVYHFDLAVAISKTPNLKLMVINPKVANKFAQALATKDKSDEVDAEVLALFAERMDFIQWECPGEIKLVVRAYSRQLIKMTRHLTAAKNQKHALEATIFTPKAILQNQRQQIRFYEKEIEKLEKEVVGLIKSDEKMKQHFNLLISIKGIAQTSAIQLLGELMVLPKDMTKRQWVAYAGLNPKKHQSGTSVNKKTRISKVGNRYLRKALYMPALSATNHDKRVRAYYLHLQEDNGLLKMQAICAVMRKLLHVIWGMFMTKQTYDSSKFYAAKV

SEQ ID NO: 290965 - protein, 390 aa, unidentified
MARGAGLVTIAVDPHKRLNAVEVIDAGSVVLARQEFVHSTAGFAELMGVARRWRCRQWAVEGATGVGKNLAQRLVARGEVVFDVPSKKSSLVRAFSATSGRKSDEVDAHAVALAALNSPDLERVDLDDHTTALRLLASRRKELVGLRTQAVNRVHRELQILVPGGAKRGLSAARAKTVLATVRPRDEVGKLRKSLVADQIADLVAIDKRLADINRQIKAAVKAAPTTLPELRGVGPVITAIVLGEVRDVARFVDEDHFASYNGTAPTTWGSAGEATPCVNRGGDRTLNHAIHMAAVTQLRYPGPGQDYYQRKRAAGKKPKAALRCLKRRISDAIYRQLLTDAQASQRGPGGHSGATTKISASDPAPTVGSSIKPQPGPRSHVTPVAAKTS

SEQ ID NO: 290966 - protein, 314 aa, unidentified
MRTQVFVGIDVSKAQLDVAFRPEGRVSVPNDEAGCAQVLERLRAVPPTLVVLEATGGLEIPLTGVLAAAGVPVVVVNPRQVRDFAKATGRLAKTDTLDAQTLAHFAEVMRPELRPLPDEQTQALAAILARRRQLVEMLTAEKNRLGSAPKPVRKSLRTHIAWLERELTHTDSNLAHAIRESPVWREKDALLRSTPGVGPVMTTTLLANLPELGTLTGKQIAALAGVAPLNRDSGTWRGKRTVWGGRAQIRATLYMAALVAARFNPVIRAFYQRLCATGKAKKVALTACMRKLLIILNAMLKHRTPWRTELVPCA

SEQ ID NO: 290967 - protein, 416 aa, unidentified
MTEEIEWFVGFDWASETHVVCLLDQNGRAIGERRVAHGGAGLAELCDWLTARTGAPPARIGVAIETPHGPVVEMLLERGFAVFAINPKQLDRFRDRFTAAGAKDDSRDAHVLGDSLRTDRRAFRPLAVDDATVVELREWSRIADELTQERNRLANRVREQLWRYYPQMLQLSDDLAADWFLALWECAPTPAKAAKAHEGSLARILEAHRIRRFDAAQALQVLRQKPLQVAAGASEAAVAHIKVIAERARLVNRQLKDAHRKLDALCAQLEQPKQSEAGQGPEQRDVTILRSLPGVGRINLATLLAEAAEPLRRRDYQALRALSGVAPVTRRSGKARLVLRRMACNNRLRAAVYHWARVAAQIDPASKARYAALRRRGHCHARALRTLGDRLLGLACAMLKSQTLFDPNHKAAHAAA

SEQ ID NO: 290968 - protein, 335 aa, unidentified
MAIVTIGLDTAKSWFQVHGVDESGQVVLRRKLARGRVLQFFAGLTPCVVGLEACGGAHFWARELAKLGHDARLMPARYVRAYVKTNKHDAADAEACCEAVQRPGMRFVPVKSEEQQGMLMIHRSRDLLVRQRTAAVNALRGHLAEYGITAAKGTARARELMSLVDTDERVPAIARDALLQLVEQIRDTERKIEAFDKQILSLARENEVCRRLMTVLTIGPFAATALTATVGDPRYFASGRHFAAWIGLVPKQYSTGGKERFGGISKRGDTYLRKLLIHGARATVHRVRSHQRPGGWIAGLLARRHFNIATVALANKTARIAWAVMVNGSSYRAAA

SEQ ID NO: 290969 - protein, 391 aa, unidentified
MIYVGIDVAKDKHDCFITNSDGEVLFKAFTITNNLDGFNDLYQKIETVMKDITKVKVGLEATGHYSYNLLGYLIDKGLPTYVINPLHTNLYRKSLSLRQTKTDKVDARTIASMLMSDVNLKSYSDTSYHNEELKSLTRYRFDKVKERAKLKTSVSRLVCILFPELEKLVPTLHMASVYALLSEFPSAKHVATAHLTRLTNLLSKSSKGRYGKDTAITFRDSARASIGSNMPAKSLELKHTIKLIQELDSEIDEIENEIKIIMDEINSPILSIPGINYRMGAMIIAEIGDFNRFDSPDKILAYAGFSPSTYQSGQLDGAYAHMEKRGSRYLRYALYNATKYVCHWDPTFAAYLAKKRAEGKHYNVAISHAVKKLVRVIYHLEKTKQQYIKAA

SEQ ID NO: 290970 - protein, 391 aa, unidentified
MAPVMIGIDPHKGSHTAVAIGADEEPLRQVRVRASAAQAQKLVAWAADWPERTWAVEGARGLGYLLAQQLVAAGERVLDIQPKLGARVRLLATGASGKNDPNDARSVAIAALRSTTAAEVAAAGHAAVLKVWSKRHRDLGRARNQLACRLHAVLCDLAPGGFSKEITAGQASGLLQRIRPSGAAAQARYDLASEFVEDLRRLDAQLRDTRSKLTAAVKESGTSLTEIFGVGPVIAATVIGATGQVSRFASRDRFAAYNGTAPIEVSSGNRRACRLSRRGNRRVNHAIHMAAVTQIRNKHSQGRAYFDRKLAEGKTRKEALRCLKRRISDAIYARLQDDARRTRQARTLTAREGNRGTTLTPARPAHTPITGSSDKPLPGLTPLYDPGQSPA

SEQ ID NO: 290971 - protein, 345 aa, unidentified
MSMVRSVVGGVDTHADTHVAAVVDANGGILGIESFPAGEAGYGALLGWLSSHGEIQMVGVEGTGSWGVGLARFLHDREITVVEVDRQNRQNRRKVGKSDTTDAVAAARAALSGSARVIPKTRNGPVEQIRILMVARRSARSQRIETLNQLRHLVFTGPEQIRVRFKDRYKTGLVTEVAKLRPRKGSDPVLFTTQVTMRGLARRIQQFNAEIKHLDSMLTELVTDTAPSLVGLFGVGTDTAATLLVAAGDNPDRLRSERSWAHLCGVCPIPAGSGKTDGRHRLNRGGDRQANAALYRIVLTRMSQDPRTKTYVARRRDEGKNTAEIMRCLKRYVARETFKHLPRTA

SEQ ID NO: 290972 - protein, 318 aa, unidentified
MNVIGLDVSKDTMDATLITTKGSKDYIKISNSTEGFENLINWIKTKRIRKIAISMEATGIYYEQAAEYLSALYTVYVINPLKIKEYAKSQFSHTKTDKSDSKLIAEFANQHLDKLTPFRPSENPTLYKLINLLQQLKEQQKETQNRLHTAKDIYIKSTHESIIELLEEKIDQTSKRIEGMIKQKESLNIEYQNLQTIPAIGKETAVILLRHLTDKNFETANKFVAFAGLSPKIEQSGTSVNKKGRLSRYGHRQLKRALFMPALVAYRMNAFPQLVSNLEAAKKPKMIIIVALMRKLAKIAFYIHKTKKPFDKARHQTV

SEQ ID NO: 290973 - protein, 465 aa, unidentified
MSKTPKRRHPRQSNPLPAQPKPPKLDALAQINQHAAGLDIGDAEIYAAVPESATDSAVRVFRTFTTDLETLADWLAACHVVTVAMESTGVHWILIYELLEARGFQVYLVNARQLKNVSGKKTDILDCQWIQQLHTYGLLQPSFRPPEELCALQALVRQRSRLLQSCTAEIQHMQKALQQMNLQLTNVLSDVTGTTGLAIIRDIMAGERDPHKLAAYRDPHCKKSEAEIAAALTGHYKPEHVFALRQALQAYDFFGQQITACDQEIAHTYQTVTPAASRTVPPLPPRARQRIKRQHEPAFDLRSELYHLAGVDLTTIDGVEILTAQAVLTETGVDMSRWPTVKHFTSWLGLCPENAKTGGKIIKRGTKPSANRAATALRLAARGLIHSDSALGVYCRRMRSKLGKAQAITATVHKLARIIYAMLKTKTPYQDPGADHLEAQVQERKLKQLQRQAKELGYELTPSAA

SEQ ID NO: 290974 - protein, 463 aa, unidentified
MQRSGKKTSTAVREPDVEGLPVVRPNVAAIDLASEIHWVCAPSIDRSGREVEQFGATTPELERMAEWLKERKVESVAMESTGVYWIAPHEVLERHGLEILLVNTRELARVPGRKKSDHVDCKWAQRLHSCGLLVGSFRPNEQICMLRTLVRDRGNLVAASADWLRRMQKALDQMNVRVHRAVKDIDGMTGMAIIRAIVKGERDPVSLAKFRQPHCKKSEKQMADELTGHWREDHLFSLQESLKMYDAVQAGVADYDREILRKLAEMEREDCREQQAPKLKNANKARAIKTRGEEPLRQALYRMSGVDVTAIDAIGAGTVQVVLSEYGPDLSRFPSEKQFVQHATLAPHKPTSGGKALKKKKRNNGSTRVAAALRMAATSLHHSETALGAYFRRIARHKGKDIAVFATARKLATLIYRLLRYGHPYVDEGAEAYEKRYREDRIKSLTAAVKALGFELTPKACDA

SEQ ID NO: 290975 - protein, 355 aa, unidentified
MDDLKYIGMDVHSATTTIAVQDSRGRLVMEATVATQAAALSDFLRGLRGRLWLTFEEGNWAAWLTQVLTPQVEKLIVCNPRRNASLKQGNKSDPLDARELAHLLQANLLKPVYHEADGAQTLQELARAYTTCVSDTTRVMNRIKARYRARGILCSGSRVYRPRFRQAWFEQLTDPGARQRVELLYAQLDLLQELRKRARQALRTEARRDPAYALLRTVPGIGPVRAALLLALLRTPFRFRTKRQLWTYAGLGLVTRDTGQYQIVGGQIIRRQRPARVRGLNPQHNRELKEIFKSAALAATRPSSLLHAFYQQRLDQGMRPHLARLTLARKIASLTLTLWKKGERFNAHALTSQAE

SEQ ID NO: 290976 - protein, 392 aa, unidentified
MRYAGIDIGSERHVVALVDERGEGLVAPTNFGEDVDGYTQLLTRLGEPSDVLVAMEATGHYWQNLFAALAGAGYSVALLNPLRTRRFAGEDLERTKTDAIDALGIARFAAQKRPVVTRLPDSATQELRELVRFRDRLMQDFGDRVRQLHRLVDLGFPEFTRYVRSLDSELASAILHEYPTAEAFLGLPWKRLAKLCYDGRHKVGEELGKSLVEAAKTSVGRHHGPAYRVQVRCACEDLDLLRRRLREIDSDIERTLKHHEVGTLRTMLDGIGPTTAARPVAELGDIASFPSAAAIAAYVGAIPGLRQSGKRQASRAGLTPHGNARLRAKLWMPTLTAVRKNPWLRPYYEGLLRRGKLPKVALVAAMRKLLIAVYFVAKHRKPFVPVLAKAHA

SEQ ID NO: 290977 - protein, 399 aa, unidentified
MSKQQARIWVGIDAGKGHHWAAVVDETGATLWSKKIENDESAILTALAEILDLADEVHWAVDISSRSSALLLALLAAHGQRAVYVPGRTVNRMAGAYRGEAKTDARDAYVIAETARHRRDFTLLDVPAQLAADLALLTAHRTDLITDRVRTVNRLRDVLTGMFPALERAFDYSARKGALVLLTGYQTPAALRRRGLTRLTAWLTNRGVRDPESVAAAALEAAQAQQTALPGEDTAAQIVADLATQILDLDDRLRRLDRQIRDTFRTHPQAEIIESLPGMGPILEAEFVVAAGDLTSYTDAGHLASAAGLVSVPRDSGRRTGNLHRPKRYSRRLRRVFYLSAQTSIVRDGPNRDFYLKKRGEGCKHVQAVIALARRRTSVMWALLRDNRTFTPTPPTQTA

SEQ ID NO: 290978 - protein, 337 aa, unidentified
MIYIGVDLHQRFCAMAAMDASGEILDERCVTNQEEAVRAYLGRWSEPVRVAVEACSFAAAFVEVVQSQGAEVELVHPERVKAIASAKLKNDRVDARTLAHLLRTNLLPAAWIADAATRELRELIRLRVSLARQGTRWKNATHAVLHRHGLRSPVSDLFGKAGRAWLEAVALPASARIAMTHHLDLLDQIERQRQALDQMLEQQAQQDPDARHLMSIPGIGAYRALALKAEIGTIRRFATKRQLYSYAGLVPRLRQSADRTRRGGISRAGSPLLRWVMVGAALQAARYSPAARSYFERLRQRKHTHVARVALARKLLGAVHALLRDGVCFDEQQFAAL

SEQ ID NO: 290979 - protein, 389 aa, unidentified
MFYLGIDIGKNTHVASLVDDKKKVIFKAFSFSNSIDGAESLILKLEAFKNELEVGMEATGHYWLSLYSYLAQKNFTVRVINPIQTDGWRQGFEIRKRKTDIIDSLLIADLLRYGDFVETSLSNEDYLSLRNLSRFRSYLISSIGDLKRKTIALLDQVFPEYASSFSNIFGKTSKEILSNFSTPSDFEDINSDDLNTFLESVTRKNYASKKIDELSKKASYSFGINFCLDSFSLQIKMLIEQISFIQNQVSDVENEIEVLLEKLNSPITTIPGIGSVNAATILGEIGDIRRFSNPSKLVAYAGLDASVSQSGEYESTYNHMSKRGSPYLRRALFQSALRAEFCDPVFSAYYQKKITEGKHHLVATNAVARKLCHTIFAVLTKNEPYQVQS

SEQ ID NO: 290980 - protein, 400 aa, unidentified
MRTVFGIDVSKASSEVAILVNGERVHGYTMPNDIIGFSRLLGDLKTVGNPEIIFEATGVYSRRLQAFLEENSYDYTRLNPLEAKKQLDGLRVRKTDKIDAEKLASSQFVLNRKPTYVQEEVYQNLHDLSRFYQNLTEDIVRTKNRLHKVLQVAFPEIENLLSTPTGEQYWNLVSIFPTKHWVLELSEVELKEAIRNSTSKRISENRVGNLTEKLVGLAKQSYAGISKTSPMVEEVKYDAQELIRLTNRREQVLQQLIALAEPLPEYKTLLSIPGIAETTATSIIGELGDIRRFKSANQINAFIGIDLKHYESGDFLGQEHITKRGNPYARKILYKCIHNIASASHTNPCHIADFYEKRKRQSQITSTKPHTIASIHRLIRTMYYLIMHNKLYDYTLAQSH

SEQ ID NO: 290981 - protein, 454 aa, unidentified
MAKVSKKKKISKDREFKVVNVNAAGIDISPKEMQVCVPSDRDEHCNRTFGVYTKDLHEISAWLKQCGIDSVVMESTGIYWLPIFRVLKEDGFDVLLVNPRDAKNYAGKKTDEADAHWLMVLHTYGLLKPCYQPDNIARSIRNLSRQRDNLIKSCSREVLHLQKEMEQMNLKLDNAFSDILGKSGQAIIKAILEGERDPEKLASLADSRCKKSKEEIMASLRATWDEDHLFVMKQCDDLYHYYKDKIAEVEAKIEDLIKQYTAQVDAEGAELIRSKKQKQLHHEVSFDIEQYAYNLWGVNAMMIPAMSKNSLLRLVAELGGDFTDKFVDARHFASWANLVPDNKISGGQLLSSKVPKRKNPVGLVFRQCANALNRAKNPLGDYFRHIKARSGYLQAMVATGKKLAIIFYTMVKYKREYDESVYSSHRKKQLTRRIERLQATILRLQDESARCANA

SEQ ID NO: 290982 - protein, 375 aa, unidentified
MKEKVRFLGLDVHAETIAVAIAEPDGEVRSLGTIANRAESIRKLVKKLGPVEQLKACYEAGPTGYVLYWQLAELGVVCEVIAPTLVPMKAGDRVKTDRRDAERLARSYRSGDLTPVRVPDEGSEALRDLVRAREAAKQDQLRARHRLNKFLLRSGQRPAQGVKAWTLGYMAWVRQLRFPQIAREFTRLDYLHEVEHMAERVKRLEQAIAEAVKLAAPELQEVIKGLQALRGVAQISAVTIAAELGNISRFEGARQLMAYSGTIPSEDSSGQRTRRGNITKTGNAHLRRIAIEAAWSYRLRPGIGPALRKRQEGVAEPIKEIAWKAQQRLHRRYMRLAGAGKDQRKIITAVGRELLGFIWAIGVKAEAAAKLPTAA

SEQ ID NO: 290983 - protein, 499 aa, unidentified
MPSRRKGKNTMTTAGKQPSKKEGFDPQRSALKRKARGRCCFEGKGKRRKSKLSVINPDAAGVDVGAQAHYVAVPEDRAAVSVRSFGTCTAQLDEIVQWLKDCGIKTVAMESTGVYWIPLFQKLEEAGFEVLLVDARQAKHVPGRKSDVQDCRWLQQLHSYGLLRAAFRPEDGICRLRTFQRHRKNLVECAGMWIQRMEKALNEMNLQLHHVLSDITGQSGLAILDAIVAGERDPSKLASLAHYRVKKSQAQIEAALRGDYRPELLFVLRQSLENYRQMQQQILQCDLSVEKQLAAMSHQSKPSEHLESKGQAEDSAHCRPGKEKPKNGLESTLAAHLKRILGVDLTTLPGLNVLASLTLLSEIGTNMTKWRNHKAFVSWLGLSPNNKISGQRVLSSRTRKVVNRAATTLRLAAMLVGKTDTALGSFYRRKRAQLGAPKAITATARKLACLIYHLIKNGQAYKEPDLRTYELKYQEQILQSLRKRAKSMGFDLVELPKAA

SEQ ID NO: 290984 - protein, 340 aa, unidentified
MFFIGIDPHKASHTAAVLDAHEQLVSEVRVRADRSQRDHLLAFAAGFEPRCWAIEGATGTGALLAQQLVAAGETVLDVPPALSARVRLLDNARSDKTDAHDARSAAVVALRHSKLRVVGLEDHSAVLRLLAKRHHDLIAHRTRVICRLHTFLCQLVAGGLPRNLSATRAAAELRRIRPADTDAVGVERRRLALELLNEVRRADADLVELKARIAASVNHAATSVTDVVGVGPIMAAYLIGYSGDVRRFPTAGHYARYNATAPIEASSGPNARHRLNPRGNRQLNHALHIAAVTQIAHDTPGRVYYLRKQAEGKTKKEAIRALKRRISDAVFHQLLADTLR

SEQ ID NO: 290985 - protein, 356 aa, unidentified
MSSEVKYIGMDVHKEAIVIAVRDTRGHVVMESIVETKASSLLQFIRGLQGELHVTWEEGTWAAWLYDLLKPHVHRVLVCNPRRNALLKEGSKNDKVDARKLADLLRTGMLRPVYHGEHGLRTLRELARTYQTLSQDLNRVMNRLKALYRGWGMACGGTQVYAPRYRDEWLGKIEHAGVRRRAELLYQQLDGLQALRRTLRSELLAESRKHKASKLLRQIPCIGPIRAARLVALMQTPHRFRSKRQLWTYSGLGIETHDSAQYRFVRGELQRAKKPQQIRGLNRNHNHEMKDIFKGAANRASCGVGPLRDFYVALLDQGMKPEMARLTLARKIAAIALTLWKKEERFNAEHLKTQAA

SEQ ID NO: 290986 - protein, 329 aa, unidentified
MKVQHIIGADLSKKSIDLVCHLLKSHVQIENTTTGFKDLMQWLKEQKINASKTMIVMEHTGLYSYCFEKFLHQHQIPFCKVNALTIKRSMGLVRGKTDKLDAARIAAYGYEKKDKLTIDVPASDSLRRLQMLHSTRERLVRHRASLICSIKEYKCIGISDKDVIMQTQLQLIKNFDKQIEKLMIEIETIIENQKALKQNFRLLQSIRGVGKVVALVTIIKTHNFTRFANARKFACFCGTAPFPHDSGTSIRKKTRVSHLADKQMKSLLDLSAKSAIQYDKELREYYLKRTESGKSKMSTINVVRNKILYRMFAVIKRQTPFLENYLQAA

SEQ ID NO: 290987 - protein, 428 aa, unidentified
MPYKIAGIDVHKRMLAVVVSDVEVNGEYAFERRQFGSNPAQLRLLADWLLEQQVEEVVMESTAQYWQPVWAALERYWTPTCKKREGAGAMSGTQHLAQAQSNRARQGRKNDFVDAERLVKRLVANELTLSFVPDPEQRLWRTVTRTKYQLTRNRVQLQNRLEALLEECHIKLSSLVSDLLGVSARRMVQALADGETDPAALAALANYHLRATQEQLRDALGACQELNPVYRRLLKLALEELQLIENQRGQLDQEIADLLRPYQDQVQRLAEVPGLGVDSAQQIIAEVGPTAATFPSAGNLASWVGACPGDDESAGVSHSHRSPKGNRQMRRLLNQAANAAVKYKGGIFEILYRRYVPRLGHKQTIGVIAHRLCRLIWKILYQGVRYEERGPDVRKKSQRYRAARMIRELQSLGYRVDPANSQSADVPA

SEQ ID NO: 290988 - protein, 356 aa, unidentified
MSKINKLDFKGQQIYVGMDVHKKSWSISILTDEFEHKTFTQPPEVGTLVNYLKRNFPGGSYKSVYEAGYCGFWIHDRLQEHGVECLVVNPADVPTKDKERRSKTDRVDCRKLARNLRSGEIKGIYVPCRPKVEDRSLIRARHSMVKKQTRCKNQIKSILQFYGIQIPAELADGRWSKSFITWIEAIRMERASGNFTLKIHLEELNAIRKIIADLTHGIRSLANSEEYRHNVRVLKSIPGISTLTAMTLLTELYEISRFKNLDKLCSYVGLKPDTDSSGETDRNTGITKRRNAQLRSLLIESSWIAVRKDPALVMTFNTLCKKMSKNNAIIRIARKLLNRIRYVLRNQHDYIPAVIQ

SEQ ID NO: 290989 - protein, 374 aa, unidentified
MENSITYVAMDTHKKEHNVALHYPGQEEIARFTVRNTARDIAKMVKKVAKQAPGDIKFCYEAGVCGFILKRRIEAQGCRCAVIAPSLTPRKPGDRIKTDRRDALKLLAMFKAGLLTEVYAPDKQQEGARELTRCRQAVQENLKRVRHQLTKFLVRHGYVYSEGNHWTQRHLKWLQSLEFEDTVVEDVFDSYFTEMQHCIERLASLDKQVEKLAESEPYKKVVGLLRCFHGIDTLSAVTTITEIFNFGRFSCPGELMSYLGLTCCEFSSGERQKKGPITRAGNKRVRRILVEAGWHYRHPCSISKALRQRRKGQPQWAIDIADRAGQRLRKRYRHLINCGKMPCKVTVAIARELAGFIWSVFREYEIRKSVSKAA

SEQ ID NO: 290990 - protein, 370 aa, unidentified
MKMSIGVDLHKTQFTVCLLSEDRKIAENGIYPTNDYGYQEFLGKVKKLSERGYEICAAVESTGNARYFRNRVIKAGIEVKVVNTLKFKVVNESVKKTDKHDARTLAEFLEKDMLPESVICSQESENIRRVLKSRSIFVKTLVALKNQVHGLLLGYGIETKKGMLQSKKERQRILNGLEDHDFDGSAAPAIQSLFKSIDSAAEQVKSFEKVLEEMVKEDRDVELLKTIPGVGLITASTIRAYTDDINRYESAKKYASHAGLCPWVQNSNMRIYHGHITKRGPADLRTAFVQTVLGMVRIPNRTGSYSIMKNYTKMKKHKGSGKSIIAAARKMSSIVYVILKTGKPFDPLKMDHYRKYRDMQTAAFNAAWVV

SEQ ID NO: 290991 - protein, 370 aa, unidentified
MEKRSMFVGMDVHKESIDISVAEEGRQGEVRHYGAIPGDLEALAKVVRALRAPTRGLRFVYEAGPCGFGIHRYLTAQGEDCVVVNPSSMPKRSGDRIKTDRRDGDALARLHRAGELTAIYIPTPDDEALRDLVRAREDAVGLSTQAKHRLKAFLLRQGRRYPGRAGWTTPYRRWLADLSFPLAPQHIALQEYRDTIDETERRVERLTDQLRQLTPAWRWAPVVDALQALRGVSFVTAVGLVAEVGDIRRFTHPRQLMAYLGLVPSEYSSGPSVRRGGITKAGNPHARRLLAEAAWAYQGIPRIGRQMLYRQEALPKSICAIAWKAQLRLTSRFRRLVARGKAKPKVATAIARELTGFIWAIAREVPAPPA

SEQ ID NO: 290992 - protein, 343 aa, unidentified
MKQDISVLGIDLAKNVFQIHGANGHGKRVLSKRVGRKELVELMSNFTPCVVGIEACTGAHYWARLFSNMGHTVKMMAPQFVKPYVMSNKNDRNDAKGIAEAVTRPEMKFVPIKTVGQQDILLLHRARELCVKNRTAQSNQIRGLLAEFGVTINKGLSEVRKLPEILDLNKDKLSVKAIHIFERLYEQFKVYEEQVLLYEKDIEAHVKSEPLCKEILKIEGIGPMTASALVATIGDPKVFKNGREVSAWLGLVPKQHSSGNKIRLGGISKRGDRYVRCLLVHGARSALRCVNNKTDKKSRWAANKKATQPVNKAAVALANKNARIVWAMMATGECYRQEEAHAA

SEQ ID NO: 290993 - protein, 402 aa, unidentified
MNAVGIDVSKGKSMVAIMRPFGEIVSAPFEIKHTASDIHSLVELINSVEGESRIVMEHTGRYYEVLAHQLSKANLFVSAINPKLIKDFDNDSLRKVKSDKADAVKIARYALDKWQNLKQYNVMDELRNQLKTMNRQFGFYMKHKTAMKNNLIGILDQTYPGVNTYFDSPARSDGSQKWVDFASTYWHVDCVRKMSKNAFIDHYKNWCKRKKYNFSQSKAEEIYGKAKELVPVLPKDDITKLIIKQAVDQLNSVSTTVESLRTLMNETASKLPEYPVVMAMKGVGTSLGPQLMAEIGDVSRFTHKGAITAFAGVDPGVNESGSYEQKSVPTSKRGSSVLRKTLFQVMDVLIKTHPQDDPVYQFIDKKRAPGKPYYVYMTAGANKFLRIYYGRVKEYLSSLPES

SEQ ID NO: 290994 - protein, 419 aa, unidentified
MDLNKQTFAAYVGIDWADQKHDISLSSSVDGKPEHRLIPSTPEALTDWLSQLRQRFPEGKIAVCLEQSRGPLIFHLMGYDYLVLFPVNPKQLADYRKSFSTSGAKADRPDANFLRELVCLHREHLRPWFPDDEVTRSLALLAEARRKAVDERTKNTNRLTAVLKGYFPQALKLTGSSLYDKMSLAFLEKWIRLEDIQRTQDRTIRNFYTSCGSRSSRLIEERLRLIRSTVPLTTDKAVITSSIITVKMLVRQIKSLNQSISEYEQALAEMFDQHPDKDIFNSFPGAGDALKPRLVAAFGTDRNRFEKADNIQKYSGIAPVTKRSGKSIVVHRRLACPKFLLQTFHEYARHSRKKSIWAKAYYDMQREKGKGHHAAIRSLAFKWLRIIHRCWLDRVCYEEIKYLKALQRNHSPLLKYIAT

SEQ ID NO: 290995 - protein, 320 aa, unidentified
MEQEKVYVGIDVAKANMDVAVYPSGQQWSFSNDEKGISQAVTRLGELSPALVVMEATGDIELPLTAALAVAGLPMVVVNPRQMRNFARAMGKLSKTDTIDAQVMAYFAATVQPKPRPMPDAQTQELSAILARRRQVVEMIVAERNRHGIANEAVREGIQDHIAWLEKELANVDNNLTRIIQKSPLWREKDELLRSVPGVGPVLSTTLLADLPELGTLNRRQIAALVGVAPLNRDSGTFRGKRRVWGGRAKVRAVLYMATLVATRHNPVIRAFYQRLNAAGKEKKVALTACMRKLLTILNAVIRYRTPWCDTSSQVLGSCS

SEQ ID NO: 290996 - protein, 392 aa, unidentified
MYIVGIDIGKNHHEASIVSPEGKQIGPSLRFATTHKGADSLMSFIFKNIGNSPCVFGMEATGHYWYPIYSFLKAKGYTIYVINPIQSDSLRKMYIRQTKNDSIDSFLIAEVIRFGQFGTTSMADENILAMRQLCRYHDSVISSRTEIKLRIGTIMEQIFPEYEKQFSSLWVSTSMGILEKYLTPENIENAPIDELFKIIKDKSHNRLTRAKAISIKEAAADTFGIKIAQDAFSFQLKQLIDRMNFLDKQIEALDIEIMKYYEQFDCYLHTIPGIGIIGAATILAEIGDINRFKSSSALVAFAGIDPTVRQSGEFSSTHNHMSKRGSPYLRHAIFLAATTCSFHNSPLNAYYKKKRDQGKHHLTATGAVARKLTTVIYAVLRDSKPYEPKSFC

SEQ ID NO: 290997 - protein, 410 aa, unidentified
MDMIYPHCAGLDVHKDSVWACVRHMSPDGKVRQEVRVFGTATRWLLELSDWLAREGVTHVAMESTGVYWKPVYNVLEDRFNTMVVNARHIKNVPGRKTDCKDCQWIAQLLQYGLLTASFVPRRGQRELRDLTRQRAQLIQERSRVANRVQKTLEDANIKLASVASDALGASGRAMIRALIDGDKTPEQMAELARRRLREKIPQLKEALTGTVTDHHRFMLRQLMDQIDRLERQVEDFDRRIEQVMSPLEQKATENLDQIPGIDVRAAQNIVAEIGADMSRFKSSGHLCSWAGMCPGNHRSAGKRKKGTMNQGNRWLKRTLMQCAWAASRTKNSYFQGQYRRLSARRGKKRAAAAVGHSQLVVTYHLLRDGTEYQDLGTNHFDTLAESQRTAPLVKRLEKLGYRVTLDKAA

SEQ ID NO: 290998 - protein, 333 aa, unidentified
MMNINPQGWVANRDQRPNAGIDVSKQHLDACWGAQELRVDNDATGWDELIAKLKDAGVDLVVIEATGGYERELVCALQSADIVVARVNPRQARDFAKSMGVLAKTDAVDARTLRDFADVLACHKDRAKYITAPVDTQRLELAALMVRRRQLVDMRVAEGNRLELASPVAARSIRSVLKMLDKQIAGIDQNVDDHLGRHFGKQRELLDSVKGVGAVTILTLTAALPELGTLGRRQISKLVGVAPLADDSGKRKGPRRIWGGRSEVRSVVYMATMSAINYNPVIKVFHSRLIAAGKPKKVAIVACMRKLLTILNAILRDQVRWDAAKHVQTPKSA

SEQ ID NO: 290999 - protein, 383 aa, unidentified
MKKTKGTPRKKGSIIERVLHLAFELSQNKWKLGFSDGTKMRFKSIGARNLEQLHEEIEKAQVRFKMKGDVRIVSCYEAGRDGFWLHRYLLSCGIENVVVDSSSIEVNRRKRRTKTDRIDARKLLQMLMRYHGGERKLWSVVNVPSVEAEDGRNLNRELEVLNKERTMHRNRIRGFLIQQGLVVTNPSGKKFLQELEALRSWDAEELPEDFEARIVREYERLRMVEEQIKILKKERERRVQSADKSSYRQVAQLRTLYGIGVTSSWDFVMEMFAWRQFRNRREVGAFPGLTPTPYDSGGSQREQGISKAGRGRIRALSIQIAWAWLRFQPQSKLSKWFWQRFGHGGKRMRKIGIVAVARKLLIDLWRYLEYGLIPEGARTRAVA

SEQ ID NO: 291000 - protein, 351 aa, unidentified
MNTQQTAQPKLYIGIDIHKRSWKIHCSTDLFGGKSFSMAPEPELLKNYVARHFSDHEVSTAYEAGCCGYSAHRCFVSYGWHSLVVNPADIHRKGKERYTKTDKIDAQLISRELKDGRLDSIHIPDVHREELRSLFRRRNDLVKDFRRIKSYIKMQLLYFGIKEPTEFDNDHWSHKYRKWLDDMVFQYPTAKATLDSRMRFFRFVDQELRDVSTQLRRYCKIHHKKDYMLLRSIPGIGGIVACGILCELGDLRRFNSVKHLAGYVGLAPGVHQSGSNYKTMGITRRAHRLIRSYFVEAAWQSIRADPVMQAYYRKHQGKNVKSIIIKVARKLLSRTLAVIKTETPYVIGVVE

SEQ ID NO: 291001 - protein, 337 aa, unidentified
MKFSGIDLHSNNSVVVVSDEEDRIVYQKRLPNNLEQIRAALAPYRDELVGVVVESTYNWYFLVDGLMDAGYRVHLANTTAIRKYEGLKYSGDFADAAYLAQLLRLGLLPEGYIYPREERAGRDLGRKRMQLVRCQTMQILAIESILARQTGGRMSSERVKRLTAQQIKELGLVPDVALALEANRAVSETLQRQIEALEERLKERVKLRPEYRLLKTVPGIGETLATTIMLETGTIKRFARVGNFSSYCRCVDSRRESNGKKKGEGNAKNGNKYLAWAFVEAANFALRYCPEVKRFYERKKRKTNGIVAIKAIAHKLARACYHMLREQKPFDVQRCFV

SEQ ID NO: 291002 - protein, 342 aa, unidentified
MTVIIGVDPHKATHTAVAVDAKEQELDRVRVRATRRQLEQLRKWAEPYGERVWAIESAGGLGYLLAQQLVGAGERVVDVPATLASRVRLLGTGRSDKNDPNDARSVAIAALRAPRLAEVQPADHAAVLRLLAKRNLDLGHERNRTTNRLHVMLCELVPGGIPKELTVSKAVSLLDAVKPTTAVDQARYEMACELLDDVRRLDAKKKEMKRRMATAVAASGTTVTDVFCAGPVVACLVVGYTGDVRRFRDRHHFAAYNGTAPVEMSSAGRRVHRLSRRGNRTLNYAIHIVAVGQVRQAHSDGRAYYDRKVKEGKTNREALRALKRRISDAIYRQLVLDATRTR

SEQ ID NO: 291003 - protein, 381 aa, unidentified
MKQDNKTKQNRGNQISAEAPQGTFDLGLRRWRVQREGLTVGVDVGDKISHYCVLDEEAEVVERGKLKTTPAALQPWLEALPAGTRVVLGTGTHSSWISRLIERAGQEALVAQPRKIPQIYRSKRKNDRRDAEKLARTGRLDPNSMGPIRHRSVEQQADLAVIQARDALVQVRTQLINTVRGLVKGTGERLTGCSARSFAPKAEEQIPQRLRTALLPLMSQITSLSEQIERYDAEVDQLAQKKYPETELLRQVSGVGPVTSLAFVLTVADRWRFRHSRDVGPFLGLVPAQDESGESSPQLGISKAGNTYLRRLLVGSANYILGPFGPDCELRRWGMKLSERGGKNARQRAKVAVARRLAVLLHKLWVSGEVYEPLPEKRAAA

SEQ ID NO: 291004 - protein, 363 aa, unidentified
MNATAAVPIVGVDLAKSVFQLAVADGSWRVVESHRLTRSQFERWFANRPVGLVVMEACGSAHHWARWLNGLGIEVRLLPAAYIRAYVKRNKTDAADACALLEAARCAEIVPVRVKSIEQQALQGLHRTRSLWMGTRTSRINALRGFCREFGIVIAQGSRLGVEQISRALADPHAAVPTLIRGTMTLLVEEIRLLEVRIAQLERELSALARESPACTTLLSIPGVGLLTATAMVAATSGEVSHYRDARHFASWFGLTPKEHSSGSTRHLGRISKRGDRYLRMLLTHGARAVLRAASVAVNAGKSVDGLRQWALGVQRRSNHNKATCALANKLARICYATLRDHEPYGSVRLNKKLARTAVALPS

SEQ ID NO: 291005 - protein, 369 aa, unidentified
MNKTLYVGLDVHKDTIAVAVAEEGRGGEVRFYGTVINSADAVLRLTKKLAKNGHTVSFCYEAGPCGYGLHRHLTKLGFECAVVSPSLIPRKAGDRVKTDRRDAQMLARLWRAGELTPIWTPDEEQEAMRDLIRARKQAVDVVKPSKMQLLSFLLRHGLRYENGQYWTKRHRRWLAELRRFRFYHQQLVFEELKRAVDQAEERVARLDQAIEAAIPDWHFAPVVDALRALRGVNTTIASTVVAEIGDITRFDNPRQLMAWLGLVPSEHSSGNTTRRGRLTKTGNALARTMLVEAGWSYRHPPKEGHPYLKRAAHLPQEIKDIGWKAQARLCKRYRSLSRTGKPQPRVLAAIARELAGFVWDIARKTPLTA

SEQ ID NO: 291006 - protein, 337 aa, unidentified
MKYCGIDLHSNNSVVIVSDDEDGIVLQKRLANDLGQIRGVLEPHREELVGVVVESTYNWYWLVDGLMDAGYRVHLAHPSAIRKYEGLKHSGDVADAAYLAQLLRLGLLAEGYIYPRQQRGARDLARKRMQLVRYRTAQILSIENILIRQTGARMKGEAVKRLTAEQVDEFAFAPDVALAMEANRAVSQVLGQQIEALERRLKERVSLRAEYGLLKTVPGIGETLATTIMLETGCIDRFAQVGNFSSYCRCVDSLRESNGKKKGEGNAKNGNKYLAWAFIEAANFALRCCPQAKRFYERKKSKTNRVLALKALAHKLARACYHMLRNQEPFDVSRCFG

SEQ ID NO: 291007 - protein, 344 aa, unidentified
MSIKVVGIDIAKNLFQICILGTNGRILSNRKVKRDKLLDTIRQLPEKTALAMESCATSHHWGRVFQELGYTVALIPAQHVKPFVGRQKNDANDARAICEAFSRPDIHFVPVKSVEQQDLKAIRSVRKRLVENRTALANQIRGLAAEYGVVFPLSVKALRSHLPLAIEDAENEFSPVMRSLLQTLYCDFIDISDEIDEVTQSITKLSQQHLRYKAIKNIPGFGPILTAAIISEVGSGKQFQNGRQFSAWCGLVPKQNSSGGKSSLGALSKNGNRDLRTLLIHGARAVVRCRTNSMDPMGAWLRSLVTRRGKAKAIVALANKLGRVAWCVLSTDCEYDINRAFKPL

SEQ ID NO: 291008 - protein, 441 aa, unidentified
MFCNGHGNILRKPFSIKNSPKGIEYLTQQVLSSCHHQGIDPKYAFFGGEDVGSYAENFINTLRSGGWIVAGVNAHDAKKQRPNVQASTDKLDLMGIASMLLNRRANCSPAQTGIYRNLRDLTRHRKKLVDMSTEEKNRIYTVVDQIFPGFLDEKNTGISPFSNSSLYLMADRFSPAQIRRRKRQKLIDTLRRYGTVKPEVGADKLQLYAAHVLNTPAEYLSALQISLAQHIKHFKCLKESIEQLEKEMALWLAQTQGAFLTTLPGIGIVLAAGATAEIGNPTKQRPVANLVSYSGIIPRVKQTGGPEGQTRTGKVSKRCNRILKNYVVQSAHHIGLHGPEDLMADYKRRDANGQHADFGIGRRYIRTAMCLMRNAQIYIPKRLRSKGINPEERAGYFLMIWPSLRDKWAKLGALEIAFTNDNPLGRWRNMVQELYEIKLKL

SEQ ID NO: 291009 - protein, 346 aa, unidentified
MTHSTTVGVDLAKNVIQASVVSARGKELSNRPFSRKKFAEFLGKQKPSLVAFEACATSHYWARTAQRHGHTARIIPAKFVAPFRQGHKTDSNDALAVAEAARRPSIKEAPMKTVEQQGLQAIHRSRQLLIQECTALSNHLRGLLMEFGVIIPQGFASLLRAVPEILEDGENELPDMYRPTLHRMYTRLLELREDIEAMTKEVEVLVKQHPTCNRLTALEGIGPIGALLLYATLGSGTAFSGGREFAAYLGLAPRQYSSGGKTNIVGLSKKIGNCRLRSILILGARAYTYRLKEPKSVKDRWLKEAIDRNGHSRAAIALANKNVRTAWAMVTQGTEYQRRGQLKVAA

SEQ ID NO: 291010 - protein, 345 aa, unidentified
MQYDAGIDVSLEQSSVCVVDAAGKIVKEAKVTTDPHVLVTFFKGLGFPVTRIGLEAGPLSQWLYAGLTQAGFDVVLLETRHVKAALSAMVVKTDRKDARGIAQLIRMGWFRAVHAKSASSQEIRALLTARRLLLDKLRDVELSLRGILRGFGLKLGKVTQRGFETRVRELVANHPMLQQITRSMLLARATLQREHNTLHKALLKIVRRDRVCQQFMTVPSVGPIVAITYKTAVDDPHRIKKSKGAGPLFGLTPTRYQSGETDVIGGISRIGDAMVRAMLYEAANVLLSRTMRFSALKRWGLAVAKRRGMKRAKVAVARKIAVVLHRMWIDGTSFRWSNQKAAAYA

SEQ ID NO: 291011 - protein, 465 aa, unidentified
MLTNLLSSPRVRWASDEYSGLTLTWLPILPSLAPSSHALADYSSTSGGRPWTRQQLQNLPLLSASIGVTENTTCACKLGGSTKREFSVLPHRPEVIDQWAEALRQRFGGRAIAVCLEISKGPLVSVLQRYAFLVLFPVNPTTLAKYREAFHVSGAKDDPSDAQLALDLLLTHPERLAQLHPYSAAMRTLQLLVEQRRALVQDVGRLTNRISATLKQYFPQTLEWFKDKDTLVFCDFLTRWPTLKHAQRARQARLRAFFQEHNVRYPHIIEQRIRAILSATALTADRAVIEPNRLLVEALVPQLRVLLHAVERFDRQIDVLAPTLPDFAVFASFPGAGPVFTPRLVAAFGERRERYANAGEIQMYSGIAPVTERSGNKCWVHWRLQCPKFLRQTFVEFAALSIPHCYWAKAYYEQQREKGSSHQAALRSLAYKWIRIMYRCWQNRTQYDEATYLNALKSHGSPLLN

SEQ ID NO: 291012 - protein, 389 aa, unidentified
MIYLGIDVSKFKHNCYLADEDDFDKGCHFEIKNSKDGFEYLLRKLSDFDKDKIRIGLESTGHYHLNLSRFLLDLNFNIHFFNPYQTNLYRKADSFRNTKTDKVDAFFIAKLLRATDSNPIHNELYHNYELKSLTRYKSSLKNDRVKLKNTIAGHLDLIFPELAEVCKDIFCKYTLEVLIEYPSADKIAKANLTSLTNLIKKASNGSHSKEKAMEIRDAARRSIGINSPAVSFRLVQDIKALEFLIDQIDEVNEQIKLLLDCLDSPIMSIPGVGIEIGPSLIAEIGYIENFESPSKLLAYAGLDPSINQSGTMNSSYSNMSKRGSSYLRQALFLAAFLICQNDEVFRQYYEKKKSEGKHHYVALTHVSRKLTRVIFHLLKTNQKFVSQKN

SEQ ID NO: 291013 - protein, 388 aa, unidentified
MQVVADRAAAPTAIQTDLRAIFISLELSRSTWLITSLSPGGGEKMSKHSVQAGDIAGLLRRFAQLKEKARARTGRDFPIITIQEAGLDGFWIHRVLQSEGIESHVVDPASIATSRRRRRAKTDKIDGETLVRTLLAYKRGEPRVCAMVKAPTPEEEDSRRLCRERKVLTAERVLHVNRIKGMLFCQGISGYEPLRRDRHERLEELRTGDGRPLPPHLKAQVNRELDRLELLLKQIKAVEAERDALLVAAHTPAAVPASMLLNIKGIGPEFAAVLWSEGLFRHFDNRRQVAAYAGLAPTPWQSGAVDREQGVSKAGNPRLRTTLIQLAWLWLRNQPHSALTLWFHERVNRNGGRLRKTTIVALARKLLVALWKYVNAGVVIEGAAMTTA

SEQ ID NO: 291014 - protein, 344 aa, unidentified
MKYFSGLDVSLDETAICVVDEDGIVVTEGKAASEPDDLVRWLVATGLTITRVGLEAGPLSPWLHTELRAAGLPAICIETRRMKGATAAMAVKTDRNDARATAHAMRAGWFTVVHVKTAESQELRLLLNNRRTLLEKRVAIDNEIRGTLKAFGLKLGPVTVASFEARVLELLASRSRLLGMVKPMLSARTALRQQCDVLHRMVLKTVRANAVCRRLLSVPGVGPIVALTYATGVDDPARFAHARDLGPHFGLTPRKYASGEIDRNGCITKAGDGAVREALVQAALTLLTRVQRWSVLKAWGMAIAKRRGLRRAIVAVARKLAIVMHRIWVDGTTFTWSRETAASA

SEQ ID NO: 291015 - protein, 347 aa, unidentified
MRFYTQQHQHYCGIDLHARSMFVCIIDQVGKILVHRKLPCDAGELLRTLKPYREGLVIAVECLFCWYWIADFCEEQGIPFVLGHALYMKAIHGSKTKNDRVDSHKIAALLRGGTFPQAYVYPRQMRPTRDLLRRRLFFARKRGELFAHIQNTNTQYNLPVLEERARKTKDRGAIIEHFEDPVVQMSIASDVGLLESYDDVIRNMELYLIHEVRKDHNANFFLLRSIPGIGEILALTLLYEIHDIERFPRVQEFLSYSRLVKGTHESAGKVKKTTGGKMGNVHLKWAFSEAAALFLRGNTAGQKYFARLEKKHGKGKALSVLAAKLGRAVYYMLLRSKPFDPKRFATV

SEQ ID NO: 291016 - protein, 342 aa, unidentified
MDRFYVGIDLHSRSMRMCVIGEDGKRVCERTFACELMILLEFLRPYGTNMVIAVESTNNWYWLVDGLMGAGYDVRLAHSYGLSLITKAKVKTDRRDARRLARYLRLDDLPEGYIYPKEQRPHRDLLRRRTSLVQFRSATLAGIRMQLKQYNRDIFSAEDLKKIDPEVFDREPLPEPVILTCRFAIQRANLITDQIREMERRIRRKTRQQPEFKILKTLPGVDNILGMTIHYEVGDIARFPSDRDFASYCRVVPPASVSAGKASSGTGRRQGNPYLRWAYGQAAIAAIRYYPDCRRFRDRHLNRRSGPAARLISNCIVAHKLNTASFFMLRDCVPFDPTKMFN

SEQ ID NO: 291017 - protein, 345 aa, unidentified
MKIHTIGIDLGKTVFHLVAVNTKGEVVVRKKCSRTQLLRFTSNLGPCLIGMEACGGSHFLGRALREQGHDVRLMPAQYVKPYVKTNKNDYIDAEAIAEAVTRPTMRFVPIKSDDQLDLQSLHRVREQWVKRRTGVINQIRGLLLERGIILRKGRKYLEASLPGILEDGENKLSGVLRGLLRQLQTELQYLHGQIEECDQLIECIASDLEPCQRLMAIPGVGPVIATATIAAIGNGGAFKKGRGFGAWLGLVPGEHSTGGKQQLTSTSRRGNKYLRKLFVLGAHTVLLQRAKQSSGLSTWLASLIARKRKQVATVALANKMARMVWAVLFKAEAYRPPLVSQPNAA

SEQ ID NO: 291018 - protein, 353 aa, unidentified
MEYVGIDYHTKYAIATRMNKDGLVLSKDRIANLRDDIRSYFSKLPEGSQTVLEATNNWAAFVEWTSDLPIVVKLANPAKTKAIASAKIKTDTIDSKILADLLRTNLIAESYLAPKEVRDIRELVRYRMTLVRLRAQLKTRVRSVLFKVGERVPTANILGPLANSYLSRLSLRDIYREEIESCLTLAQVFTKQIEVFEERIESKAKLSEDTKLLMTVPGISFFSALLITAEIGDYRRFPSGRKLCCFAGLVPSVHASGGKIQHGRIIKQGSANLRFALLQAIPHLIRKHNGLAKHYYRISRKKGTKTARIAISRKLLAIMLSMLKERTSFRTDNESKEKPMLCLPASARVSVGL

SEQ ID NO: 291019 - protein, 335 aa, unidentified
MRDIGVDLHKTSFQCCYLKEDGTEFKKYFISELENFKKSLRQRDRIAVESTGNSRWFLNQVKDKVSEVVIVNPGQFKVIVNSSKKTDKADSELLAFYLSKEMLPEVVMKDEYSSQIKSLCNTRDKLVKLRTSLKNKIHNILLSHGIISKREDFSSEKGLQKAQSYALGEVAEVELDVIVAQIRHLNEGIKKLGREIESKGKDLKGYRNITSIKGIGPKSGTILLSVIGDIDRFPSQKRLDAYFGIVPRVRNSNDTIHHGHITKQGSKLGRTTLVQCTLIAIRYSPYLRDFYLRLKAKKGSGKAIIATARKLLGIIYQTLKNDWIFEDFPNFVLQS

SEQ ID NO: 291020 - protein, 331 aa, unidentified
MFPVGIDVSKNTLDLCILYDGIKGRIKTRNIQNNRHSVENILRWLRLQHCGPEDVHVVMEATGVYHERLATELHDAGFRVSLANPHRTREFARGMGIMTKTDKVDAYMLACYAFLKKPHRWEPPAPEIRYLGALLRRRDVLVGDALREENRLEKYLSTDTPADIISSCRRMAQLLREEVGNIERQIKAHIKASPALRRDYTLLTSIKSVGPQLGMHMLVVLRSHNFASAEQAAAFLGVVPIEKRSGTSVRSRPRMSKIGPPQLRAKLYMSALCGKIYNKRMRNIYDEMCLRGKPKMVAIGALMRKLVHWCYGVLKTGTVFNDESLKQVLST

SEQ ID NO: 291021 - protein, 347 aa, unidentified
MKILALDLGKYKTVGCEYERETGKHRFKTSLTTPAGLQQLVREVKPDRVVIEVCNIAGWVSDLVRGMGIETQVANTNEDAWRWRKVKKKNDQRDALKAAQLSAVNQVKEVYIPPLAVRQWRSLITFRQQLVRRRGRMKNHIRDLLVSEGELLPRGQSCWTNAGIARLEALARPLSEVGMNEMWRGQLYIELQQLQAVQAEIAAVEKKLDAIAATDVRVKLLRTIPGVGPRLAEAIVALLDRPQRFHKASEVSAYVGLVPKELDSGETVRRGPITKQGSRLLRSLLVEVAWAGLRHNQWVRETYQRLSGGKKSRKKIAIVAVARRLLVRCWAMLRDGTSWRVPVPYST

SEQ ID NO: 291022 - protein, 389 aa, unidentified
MIYVGIDVAKDKHDCCILGSEADKLYPVFTIPNNKAGFDELYEKMFSVTDDKTKIKVGLEATGHYSLNLLGSLIDKGLPTCVINPLHTNLYRKGLSLRKTKTDKVDARSIAMMLMTNKTLKPYSDTSYHSEELKSLTRYRFDKVQERAKLKSSVARLVNILFPELEKLVPSLHMASMYALLSKLPGASYITECHLTHLKNLLETASKGHYGRDMAITLRNTARDSIGSVIPAKSMELKHTIHLIEVMTEEIDEIEDSIKSIMDTCNSPIMTIPGISYRMGAMILAEIGDFTRFNYADQILAFAGLSPSTYQSGQLDSSYSHMEKRGSRYLRYALFNAAKFVCKWDENFGAYLSKKIGEGKHYNVAIGHATKKLVRTIYRMELTGEAYRR

SEQ ID NO: 291023 - protein, 462 aa, unidentified
MKRSQKRRSTALKSTSETAGGIDPHQNPHAAGIDIGARELVAAVPPQSTTGPAVRTFTSFTADVEALRDWLLSCGVRTVAMESTGNYWITAYDLLEEAGIGVFLVNARHVKGVPGRKTDVQDAAWLQQLHAAGLLRKSFRPAQEIVSLRYLMRHRQTLVSAAARQIQAMQKIMTEMNLKIQHVFSDVDGVSAQAIITAIIAGERDPAKLAALRDRRCRSSLADIKSALAGNYREEYLFVLKQCQSTWQRIQDDIAACDEQIAILTQRVHAEAPGPLPDPLTGHQHKASKNSPQIDIFEEAWRYYGVDLSAVPGVSTGLLSVLMSELGTGAQILASFRSGSAFASWLGLCPDNRISGGRILKAKTRQVSNRVANALRMGVFGLHRSQTKMGEYTRRMKGRLGKAEGITAGAHKLARIVYALIATRKPYDEAEAFKITPRSLERQHAQLIKQAQSLGFLLVPAA

SEQ ID NO: 291024 - protein, 312 aa, unidentified
MAMLSFCGIDVSKDRLDVVVLPEGWFFSVSNDTAGWAELVVRLRPLTVSAIGLEPSGGYERGIIRALLAAGLSVRRINPNKLRQFARARGVLAKNDRLDARLIAEYVAIMPTRVVQRDAAVERLAEIVNMRRQLCDEHVAAENQAAHLEDAMLRRLSKRRQTRLEADIRLLDKRLAEMVAANVALAQRYELLTSMPGVGPVLAFTLIALLPELGKMTRKQIAALVGLAPYDFDSGKLKGHRSIYGGRMPVRNVLYMAALSASRYSPALKAFHNRLADADKKSKVIIVAVMRKMITTLNAMLRDNAAWQPQSA

SEQ ID NO: 291025 - protein, 339 aa, unidentified
MRLYTGFDLHSTNSYVGIIDEDGKKVWKKKLRNDPGLILAALKKFKSDIAGVVVESTYNWYWVVDLLIEEGYQVHLANPSRIQQYSGLKHADDEHDAFWLAEMLRLQILPEGYIYPKQQRPLRDLLRKRGHFVKLRTSLITSLQNILARNIGKKMNTNHLKALTKDWVAPLLAGNDDLSLAGKVSKDAIDTFSRQIIAIESVVEKKLALRKPYEFLMSMPGVGRILALTIMMETGPIDRFPKVGNYVSYCRKVPAARYSNEKKKGAGNRKNGNKYLSWAFAEAAEFARRFDPKARAYYDRKSRRTNAPIAYNALANKLSRAAYYIMRDGVLFMPEKMFT

SEQ ID NO: 291026 - protein, 343 aa, unidentified
MDYFAGLDVSVKETSVCIVDDAGKIVREVRVASEPEALLQVLTNKTYRFKRIGLEAGPLSQWLYSVLAEAGLPVICVETRHMRAVLKAQINKTDRNDARGIAQMMRVGLYRPVHVKTLRSQKLRVLLTHRKLLQSKAIAIENDLRGTLRNFGLKVGMVGTVKFEARFKELVANLPDLAVLVEPLLIVRRVVREQLAILHRRVLAIVRDDDVCRRLMTIPGVGAVVALTYRATVDVPARFRNSKAVGAVFGLTPAKYQSGENDRTGAISRCGDEMMRMMLYEAAQIMLVRSAKWSWLKAWAMKIARHRGMKKAIVALARRLAVIMHRIWVDGTEFRWTREVAAA

SEQ ID NO: 291027 - protein, 388 aa, unidentified
MFYCGIDVAKAKHTAVVIDDAGAIVVPAFNFENSRDGFTEFDARLAGLDGDVTVGVEATGHYWLALYEHVGRSRQLMVLNPLQVATYRKNGIRKCKTDKTDAVWIADLMRIGHVTPAAVPMDTILQMREMTRFRHHLTEVISDCKRKVLSVLDRVFPEYESLFSNVFVAASRKLLSMTADPQELAEFDLTELSNVLKKASRGRMSKTKAQEIQDAARTSIGVGFLADAARIEIGCLIAQIELLLEQRTLVDAKIEEFMETFSTHITTISGIGNVTGAKILAEIGDVNRFESLEQLVAYAGIDASVYQTGQFTATRAHVSKRGSPYLRHALWLAASMSVLSDPEMKAYYAKRRAEGKAHGTTIGAVCRKMLARIYVVLREDRPYEVRAS

SEQ ID NO: 291028 - protein, 331 aa, unidentified
MNNNTKSILGIDISKHKFDASLRISARRLRQAFANTPAGFVALRQWLDQAGVSQLHAGLESTSRYGLALARFLHEQAFTVSILNPLALHHYARSRLQRSKHDKLDAELIVEYIAKETPPAWSPPSPAQSQLQELSRLLQARKLQLGQERNRLESLPQSRAARSAIQRFIRLLEKEILKLESQLLTTLSAEAQMLADWKLLLTIPGIGELTAAIILAELPSYLQSARAAAAYSGLTPARYQSGLRDTTTGLSPLGNRALRRALYFPALTAVRYNGPIAAKAQRLRTKDKPEKCILGAAMHQLVRQAWGVLKHKRPFDPNWKPPELIPPAVTT

SEQ ID NO: 291029 - protein, 331 aa, unidentified
MLGSNGQVLEEGSVGNSRAALSELSGRYAKALIVMEAGCHSPWVSRHLEQAGREVVVSNPRKTRAIYQHERKSDRRDALMLARIARMEPALLYPVRHGSEEAQQDLLRIKLRDSLVRARVGLINSLRFTLKSLGYTIANPSTERFHKVIQSALPDSVVQMIAPSMQAIEALSLQIKLLDREIRTLAHSKYPETTWLEQIPGVGPITALYFVLKIGDPARFKRVRDVGAFIGLCPRRDQSGENDPQLRISKRGDAYLRRLLVSSAQYILGAFAPPKRFASVRTSTRGRRDGTSEKTCRGSCGPQTGRAALNCVEKQEPLSSVPPAAGKNEDP

SEQ ID NO: 291030 - protein, 357 aa, unidentified
MKSKIKQLDFTGETIFTALDVHKKNWRVTIGSKEFELEHYTQNPNAKDLSRHLKKNYPGAKYMVAYEAGFCGFGIQRSLKEEGIDCIVVNAADIPTSNKEKRRKQDKIDSRKIYKRLAAGDLEAIYVPQTEMEHARSLVRERSRIVSDQTRCKNRIWSLLMFSSLSVDTDKPKQYWSRKFVESLKQLDCGSKPLREALDLAIDEYILIRQLLTKATKKVRELSNDKLFAEIQELLRSIPGIGLINAMVIHTEIQFICRFKTLDHLCSYAGIVPDSDSSGDKEKITGITHRSNNYLREAIIESSWTIVRKDPAMLMLYKRYCARMDENKAIIKIARHLLNRIRFVWEKQTKYEIGIAA

SEQ ID NO: 291031 - protein, 405 aa, unidentified
MVDIMVSDFKKGRYNLMKIFVGIDIAKLNHFAAAISSDGEILLEPFKFTNDADGFQLLVSKLESFDKNSIIIGLESTAHYGDNLVRYLVAEFYQVCVLNPIKTCQMRKNNVRKTKTDKVDTFVIAKTLMMQDDLRFITFFDLDMMDLKALGRFRQKTIKQRTRLKIQLTTYVDQVFPEIQYFFKSGLHQHAVYALLKEAPSPKEIASMHMTHLANLLKVNSHGHFTKELAKELRVLAQKSVGANDSAISIQITQTIQQIELLDSQLEKIEAEMTDIMKFNDSVIMTIPGIGYINGGMILGEIGDIHRFSNPNKLLAFAGLDPSVYQSGNFQAKTTRMSKRGSRVLRYALVNAAWNVVRNNATFKAYYDAKRAEGRSHYNALGHCAGKLVRVIWKMLTGEVEFNLE

SEQ ID NO: 291032 - protein, 347 aa, unidentified
MRFYTQTHKFYCGIDLHARTMYLCIVNHDGEIMAHKNLPTSPEEFLKLIEPYREDIVVGVECVFLWYWLADLCADEGIPFILGHALYMKAIHGGKAKNDKVDSEKISRMSRGGMFPMAYVYPRKMRADRDLLRRRCFFVRKRAELLAHIQNTNSQYNLPPIGGRLDRKKNREGVGEHFPIPAVRKSVEADIQLLDYYDIVIKDLENYIKRMTKIHNPHAYYLLQSVDGIGPILAMTIIYEIEDIKRFPRVQNFSSYARLVKCSRGSAGKIHGFGGGKIGNVHLKWAFSAATALLLRGNPRGQQYLSCLEKKHGKGKALSIIGARLGRAVYFMLQRGEPFDREKFYAS

SEQ ID NO: 291033 - protein, 447 aa, unidentified
MEMSPVHANAAAIDIGATLHVAAVGPDRDPEPVRSFGTFTGDLHRLADWFKQCGVSTVAMESTGVYWIPVFEILEQLGFTVVLVNARDAKHVPGRKTDVTDAQWLQRLHEYGLLRASFRPESRIAALRDYLRQRERLLDYAASHIQHMQKALMQMNLQLHHVVSDITGATGMRIIRAVVAGERDPVTLAALRDQRCKESAETIRQALVGNDREEHIFALAQAVELYDTYLAKVDDCDKRIEAVLTELKATCPPPPAPLPAPRYRTQQPNALSFPAREVLHQILGVDLTQIHGLGPYLALKLVGECGTDLSAWPSAKHFTSWLCLAPSNKISGGKVLSSRTRRSSNRASALLRLAAVTVGRTETALGAFYRRLAGRVGKAKAVTATARKIAVLFYNTLRHGMGYADPGASYYEDRYRQRVVANLKRRAKSLGYALQLTELTAAGTEVS

SEQ ID NO: 291034 - protein, 355 aa, unidentified
MVLHVGLDLSRRRVDVCAIGETGELVGQFRSPVDRDGLFGLSRRLEPYGEQVRAVVESMNGARFVHDELTAYGWRVLVADAQRVKGLAPLACKTDKVDARVLAELSWRDLVPAIWLPTAGVRCERERARYRMHLVKHRTTLKNRVHSTLIAHGHQAPVSDLFGTQGRRLLASLELPDPWASTTTATLELIDDLDRRIAGIERELQRAGAEHRYVPILMTAPGIGWILAYTIAAEIGEIERFPTAKRLVSYTGLCPRVHQSGEVDLRGRLSKHGPRYLRWALIDAAAHASRHPIYTERYQQIKRRVGRQRGSKVAQIDLARRLAEAIWHMLTKNQPFAPFTPTGAAVPLAATTAPH

SEQ ID NO: 291035 - protein, 451 aa, unidentified
MEREERRLEQYRRLRKEIRGSQDYLVVGIDISKDLHHAWMRTVSGKIYRRLTFHNSREGFDTLLLQVEAVQVGHGLKEVVFGMEPTANYHKPLGEFLINRDHQVVLVSPGAAKQNRALLDGRWNKHDGKDCANIADLICQGKCLYYEYPTAELRDLRNLLSLNRKLKKLEQGLRLRMRNHLVAQYFPELDQYCHWGASEGLALVRWCLDPAVMAALSDEELTKRLGGMGRTIAQRKRLAAVKEKASNSIGCRFGSSVEFEGQSVVELLKEVRQRIKDTQEQIEGVCQKFKEYSWLLSIPGFGPTLSAMVLGAIGNPWRFHNGAQVLKMVGLDLSASQSGKSQGSPVVSKKGKAEIRYALYQAAMVASTRDKHFVAYFTNQLRGREKEKGIKTKKRVKLAAKMLMIAWTLMKKQQRFDPAYLVATEPMTARKTRNEENRGIPKVQPNADRRL

SEQ ID NO: 291036 - protein, 507 aa, unidentified
METRTNLNEVGKKKLVLGIDVALKNHWAAIGDNKGQEMVKPFQFSNNAEGMSLLEGMIKQTGRAEDKGDVIIGMEPTGIYWKPMGHYLREAGYRVVLINPSHTHKTKELEDNSQTKNDRKDSRVIQTLTREGKYLEPIILCGIYGELRRLGQAYKSALKRGNVISNKVKMIADEYFPEMRGIIKSINGKTAKGLLAEIPFPDDIIRLGKTKFYKKLKKWSNKRFGKKKSLKLWEAAKKSIGVKVGQEAAKIELRQLVEEMELVKRHREELVKEIEEKAKETEEGKSLIKLPGLGYLSIGKLIGETGSIKSYKGARSLEKLAGLNLIESSSGERHSGKKISKRGRKLMRTTLYQMALASIKNNRAIKYEYQYRIKTKKQKKMKALTAVACKMLRVIYALVSANKEYDERKISRHYYESEIKREENICEWVTPIIPPSGPGYNSGDTVMKNTGHPLPMTLNEVMSGAPVQYRDDTGRNDRVRHRKSGGTNPLVNIEKSWAEENQEVVCK

SEQ ID NO: 291037 - protein, 446 aa, unidentified
MKHKKGPAGVEEIADAEHELVIERVAAIDVAKASGVVCVRLPGPARRVSKVWEVQATTSAVAELAAKLVGWGVEKLTIESTSDYWRIWYYLAEAAGLDVQLVNACEVKNVPGRPKTDKLDAVWLAKLTEKGLLRPSFVPPAPIRQLRDYTRLRVDLTRERARYWQRLEKLLEDALIKVSAVASRLDTISVRAMVEALIAGERDPRQLADLARGRMTVKRTELIKALDGRFDDHHGELARMLLDQIDALDAQIATLTARIAQRLARTEPDDHDQDRPGGGLASTDLSAVQRLCEIPGIGPTTAQIILAEIGMDMTRFPTAAHLVSWAKLCPRTIQSGPVTRAGRTGTGNPYLRGALGEAAATVAKTDTFLGERYRRLVKRRGKLKALVAVARSIFTIVWQLLADATARFHDLGADYYTRRVNIERRMRNHIAQLTAMGYRVSVEPAA

SEQ ID NO: 291038 - protein, 347 aa, unidentified
MDHFAGLDVSVKETSICIVDDAGKIVREVKVASEPEALLAVLKNLAYHFKRIGLEAGPLSQWLFSALAEAGLPVICVETRHMQAVLKAQINKTDRNDARGIAQMMRAGLYRPVHVKTIRSQKLRMLLTHRKLLQSKAIAIENDLRGTLRNFGLKVGVVGKVKFEARIRELVENLPDLAVLVEPMLIVRRVVREQIVILHRRLLAIVRDDEVCRRLMTTPGVGPVVALTYRATVDVPARFRKSKAVGAVFGLTCAKYQSGEVDRNGRISRCGDEMMRVMLYEAAQSMLRSKKWSWLKAWAMQIARRRGMKKAIVALARRLAVIMHRIWVDGTEFRWTREQATAAAAAA

SEQ ID NO: 291039 - protein, 385 aa, unidentified
MTIQIQVPRFIPRDYDVFAGLDVDKKSMAITFADHAGAQRALRMAHQVRPLLNYVRKHFAGQRVAFAYEAGPTGFGLHDELVRRAYTCVVVAPSKVPRAPGERVKTNRLDSRKLAESLRGGQLHSIHVPSGVYRNLRHLVQMRDTHVRQLTSSKLRIKSLLRFEGIAFPEEHEKWTARAMRELQTLPCSDPVRFKLDDLLDTLHFHFQAAARATKQIRQYCLDDPELQQSIDLLLSLPGIGWIVGSHLVARLGNPQEIKNGRQIAGFLGIVSSEHSTGDKQNRGEITRSGDSRLRNKLIQSAWTAIKRDPELRAFHRRIYQRHPKKVAARKAIVAVARKLTNRIYVVLKEQRPYVIRPDSSIAPLTAEETVGPRERLDTAQNDQS

SEQ ID NO: 291040 - protein, 327 aa, unidentified
MTDVHALSTWVGVDVSKKKFDVYVERPDGRGRSTVFPNAPDGFAALLAWGRAQGVNWTRTGVCLEATGPYGTPLARALHEAGVVVAIENPARIQAFARLLGARVRTDRADARLIARYARQHPPCRWTPPSAQQERLHALVGRLDDLRVMRTMEQARAQQLHGEALCSVQNVLKALEDEIARLRDAIRDSIDHDPDLRHQAALLGSIPGLGPETISRVLAYLGPLQRFERVRQVVAYVGLNPRVRQSGQWTGASPISKQGSRAIRKALYMPALVAKRHNPVLRAFCERLAAKGKRPKHVVVAAMRKLVHLMWGVLKSGRPFDPAIGLR

SEQ ID NO: 291041 - protein, 322 aa, unidentified
MEGPVSDVSDRSIVGVDVSKARLDLAVRPSGESWSVDNDEAGIKLLVKRLKPYPGALVVMEATGGFEHAVAAAVSAAGFEAAIVNPRQVRDFGRAVGQLAKTDTIDAGLLALFGERVKPEPRPLADEDLQVLQALMARHRQLIEMLTMEKNRLSMARATTVQHSLKRHIEWLEKQLRDVDRELGDAIKQSPIWRAKEDLLKSVPGVGRVTSTTCVAHLPELGLLNRKQIAALVGVAPFAHDSGSYRGRRVIWGGRATVRSALYMATLVATRHNPVIREFYTRLIQAGKPRKVALVACMRKLLTILNAMVRNNTHWENPQSIS

SEQ ID NO: 291042 - protein, 349 aa, unidentified
MDIVGAFDVHRKQITFDYIEMDSGEVHRGKIRPATRESLREWLDEFTQRFSGKQIAIAVEATTGWRYVVEEIKRAGIEPHLAEPAETKSLQGRKKRAKTDRLDSGHLRDLMVIDRLPESWIPPDHIQEIRTLMRLRHSLIEERTTHKQRIHAQLFHNGYPQISNLNSMEGRAHLEDMELPAAARKVVDLSLAMMEHINEELAPIEKELRAYARSQAGCKALMAHYGVGELTSVALLSELGDTRRFSSSRKAVRYAGMDVTVHSSDDKRAAGKLSRQGPPVLRWAAFEVAKRAWRKSSPDHEYYLQTKERIGANRAALSIARKLIRRAHHTLRELGEEGISEPVLTRGSA

SEQ ID NO: 291043 - protein, 367 aa, unidentified
MKKVSTTASEQSRIISQQKLTIGLDLGDRNSWYCVLDEAGQIQLEQRVRTTAKALHEIFGAMPGSRIALEIGTHSPWISRLLSELGHEVIVANARKVRLIGESRKKDDRLDAQTLARLARIDPELLYPVKHRSAQAQADLMMIRARAGLVRVRTGLVNTARGLAKSYGERLRGCNVRNMNPEKAEGLSPELQAALEPLLSAIAELSARICEYNERIEALAQASYPQVALLKQAKGVGTLIALTFLLTLEDAHRFGKSRDVGCYLGLQPGRRNSGQSEPQMHISKEGDPYLRTLLVQGAQHILGPFGPDCDLRRWGLKLAERGGRNSKKRAIVATARKLAVLLHHLWVSGEVYEPLHNHRATTVAAAA

SEQ ID NO: 291044 - protein, 461 aa, unidentified
MKNKHSNPKKKKFKKIALDENWEKINPNACGIDIGARELFVCVPADRDKASVRRFGTKTPDLGEMAQWLKDCRIETVALEATGIYWIASFQLLERKGFKVVLVNPRQIKNVTGKKSDVMDCQWIQKLHTFGLLGGSFRPADPYCVARTYMRLRADLIAGSTCQIQLMQKALHQMNIQLSHVLSDITGSSGLAIIEAIIAGQRDPIVLAELASRRVKSTKDEMAKALIGDWRPEHLFCLAQAHQMYLRYQLDISQCDAQLADELEKLPNKVDPNSKPMPPKIDRKKQINEKLRLGLYCKFGVDVTAIEGIGPTAALTLLTEVGADLSAFPSEKHFCSWLGVCPDNRISGGKVLSSRTRRVVNRMADVLRMSATTLKSSQTALGAFYRRMVARLGPAEGITAVAHKLARRLYSLIKHGHDYIRTGLEEYEKKNADRKMKVLRKMAESLGVQLLEPQLVRAGVS

SEQ ID NO: 291045 - protein, 436 aa, unidentified
MNPHGVSDQLNLEKLSSGCLRVERVRQKPVTPCVEIVKHKTINLKRSNIMIKKRGRVVGLDVHPDSFAGAVVEGSDPASAQVLSTSTRVELERLEQWALRHTRTDDTLVLEASGNAFSVAERLRAIGRKAEILDSHRAGKVGKVYCANDRVDAVKIARIYLSALSPIVWQPDQKTLERREVFSAYQAVVKESTRAKQQLRSMLNEHCVRLEKGFRLCHPNAITRLLRLREWTPSRTMLLQQLHGSLVSARARRTVLRRHMAQEIVADEALLRLTRLCGINLITLYGVIAAVGDVRRFSHSKKLVAYLGLNPSVSQSGNFQGGGALKRHGRGALRALLIQSGKKLLEVTNPLQKWGLAVAARRGRNKAAVAVARKLCVAVWHVLMGHIVGALERLDTLETKLSKFATEMGPATLSALGYHNKADFVEKKLYVLRSYP

SEQ ID NO: 291046 - protein, 385 aa, unidentified
MTTRAQLADFSPYAYDIFVGLDVDKKKVAITCTDHDQLRRSLSMPHNGSQLLNYMRKHFAGQRIAFVYEAGPTGFGLYDELTAAQQLCLVVSPSSVPSARRNKVKTNRLDSKKLSEGLRGGQLRGIHVPPPIYRELRHLVQLRDTQVKQLTASKLRIKSLLLYEGIEFPAASGKWSGRVLQQLQEVPCNPSVRFKLDQLIDTLGFHYLAAAKVQKQIRRLCENDTELRQGISYLVSLPGVGTITATHALARLGDWRQISNVRQIAGFLGLVSSEDSTGDQENRGSITRTGDSRLRNKLIQCAWTAIRQDPELRAFYRSIYERQPKKVAARKAIVAVARKLTTRMYAVLKEQRPYIIRPDSSIAPLTTAETAGPRDRLDGAQNDEP

SEQ ID NO: 291047 - protein, 487 aa, unidentified
MLSKKGKPGREAGETAPPCSSRTGSRSFPASRAAQQSRNKKSRHERPFIRSDASVPFSPGRSRRKGKSVVQTTEEKICWAGLDWGGEKHAVCVVDDAGEPRDAFDAPHTVEGLETLAARLRQHPGLAGVAVETSRGLAITKLLAVGLAVYPVNPKVAKAWRDGWKAASPKSDAFDALVLADGLRHRRALLRPLAPGDVRARELALLCADEVRLIQERTALVNQLRAALKEYHPTALEWFSDWTSPAAWDFVLMFPGPEALAGASRKRLFGFLKTHGIGLTPKWEERVRLVKDAVRWPQDPAAAGAKQFLAQALARQLRTLEASLREYRDRIESAFDDHPDAGLFASLPGAGPKLAPRLLASFDGRRGECDSAESFQKISGVVPVTRRSGKQYHVMFRRACDKRFRASLHKFAECSIRFCPWAAAFYQQATAKGQSHALAVRNLAAKWVKIIFRMMTENTPYDESRYLASLARHNSPLLTHPAFVERM

SEQ ID NO: 291048 - protein, 311 aa, unidentified
MNTKIDPIHYVAIDVSKSTLQVQDDRQAFAVGNDPKSHRKLLSYLKTCANPLVVFEASGGYERGLLQSLHKAAMPLAMVNPARVRNFARSEGVRAKTDPIDGKMILAFAKSKALRPTEAPSEACVKLAALLDRRAHLVEQLAREKNRLQNSEAFIHRSIKRMIRILEKEIAAIEEGIEKLVGSDPGLKSRAEIIQSVKGVGNRTAWTLLAYLSEIEDLNRNRLVALAGIAPFNRDSGKISGRRSIIGGRAKVRKCLYMAAHTAASCNPVISAYVQGLRDRGKPYKCAIVAAMRKLLIHIQSLMKHAQLSPC

SEQ ID NO: 291049 - protein, 370 aa, unidentified
MSNLKRTQLMQRIKVSGKSFEGQTLYVGIDSHLKSWKVAILGEEYEYKTMSSNPDPEGLAGYLNRNFPGGSYKAVYEAGFSGFKACRILRELGVDCLVVHPADVPTSQRDRQQKTDRVDSRKLARMLRSGEFEGLHLPDPELEADRALVRQRFRIMRDLTRQKNRVKSLLHQFGIDLPKRFTPGQSRNWSRVYMDWLLGLPGEREEIKQVVANYVAVGQLLKTQLLAGTRQVRAVSKKARYARDYHILTGIPGIGPLTAIQMLVQLGDVSRFGSLDRLCAYVGLVPTTYGSGDRMVAGRLSRRGRKELKVMLIEASWVAARKDPALILRFNNLTRRMNKNKAVIRIAKNLLGRIRYLLRTGQEYQPGIIK

SEQ ID NO: 291050 - protein, 409 aa, unidentified
MDPVIDRVAGLDVHKATVVATVRAPGADGRRTSRTETFGTMTADLIALRDWLQASGVTHVALESTGVYWKPIYYVLEDTFQLLLINMLELKHVPGRKTDVKDSEWLAQLLECGLLKASFVPPPAIRELRDITRYQVQQVRDRAAEVNRLCKVLEDAGIKLTSVATDVLGVSGRAMVDALVAGTTDPTVLAELARGKLRAKLPALRRALQGRFRRHHAFLVEQILAKIDFLDETLDRITAELDARLVPFAPMLANLDTIPGVNRTTAVSIIAETGGDMARFPTAGHLCSWGGMCPGHDESAGKRRSGKTRTANRYLRAALIQSALGASHTKGTALQARYHRVKRHRGHKKAIVAVGHQILEIAFHIMRDGGTYDELGADYFDRRHTDRTVRRHVRHLEALGFQVTIEKAA

SEQ ID NO: 291051 - protein, 338 aa, unidentified
MALYCGIDLHSTNCWITIIDEERKVVRESKFGNDLAAILWFLEPYRAELEDVAVESTFNWYWLVDGLMDAGYRLHLTNTCAIKQYEGLKYTDDRHDARWLAHLLSLGILPEGYIYPKQERAVRDLLRRRAFLVHKRTSFLLSMRGAFECRTGMRITSNDIKKWTPTDVEQHIADPLEALGVTCLLEPMATLTEQIKILEKEALKRGNLRSEFSGLKTVWGIGKVLGLTITYEVGDIGRFAKVGNFASYCRLVKSDRLSNGKRKGSGNSKSGNPYLSWAFSEAAHFAVRHHESAKKFVQRKRAKTNGIVAIRALAHKLARASYYVMKDKVDFDPDKMLH

SEQ ID NO: 291052 - protein, 392 aa, unidentified
MVVSVGIDVSKDKHDCFIVSSEGEVLADAFTIPNTIDGFHCLLQRIQDCTHAQDKIKVGLEATGHYSYNILGFLLDNDLPVYVMNPLHTNLYRKSLSLRKTKTDRVDAKTIATMLLSDVDLKSYTDTAYHNEELKSLTRYRFDKVQERAKLKQSVSRLVTILFPELEQLVSSIHGTSIYALLSEYPGAKQISEAHLTKLANILVKTSRGHYRKDKATHIRDAARTSIGSVMPAKSLELKHTIKLIQELTSEINEIEDAIRKIMDELKPPILSIPGMGFHSAAMILAEVGDFSNFNSPDKVLAYAGCSPSTYQSGKLTNCYAHMEKRGSRYLRYALYTATKYVCYWNPVFTEYLTKKQAEGKHYNVALSHATKKLVRLIYALQKSGKAYLAVT

SEQ ID NO: 291053 - protein, 413 aa, unidentified
MQPLYRGLAGIDVHKKMLAVVVRWEREGHTEYQQRSFGTTQREIRHLTAWLQQLQVSEVVMESTAQYWRPVWYGLEAHVRLHLSHPLATRAPRGRKTDFRDARRLVDRLWAGDLEESFVPEAEQRSWRWLTRTRVELKRKIGMVRSQVEGLWEEGGVKLAAVVSDVFGVSGWALLEQMAQGETDAATIAAQARGSLRHKREPLQEALAGGLSPVGRFLLKQSLEQVRLLQQQIAEIGAALAVAMREHTAVLSRLARVPGVQVAAAQELLAEVGPGAAAFASAAQFASWVGVCPGQQESAGVSYSSRSPKGNRYLRRLLCQLGWAALRTKGTFFAGLFARLTPKLGAKAAAWAVAHRMSRVIWVLLRRGVDYLERGPAPQSPQRLMRKFRRLLLELSRAGLDASALLPPTRATS

SEQ ID NO: 291054 - protein, 829 aa, unidentified
MKYAIAAGIIDLGSIRTQYEECERMNLLDSYEYKIFESGGRWYCRLPDGRRLKRKNREDVESEIIKIQKERKKTEKESEGKKPEDIFTEWNMARLNSGVIEGATALRYRKTCDKYIKNAAINKKSVKRITRKEWTGFLQDIYDAGSPTEEDPKRRISAKELGRIKCVVRGILNRAEDEDLITYTADEVISHVRTDINGFRHMTSPTENEVYYPDEYALLKSYCLSNPNPYTRCILLSMTSGERIGECVALLVEDINLEEHYILIRRTETQADNTGKQMETVREGAKTQAGIRRVAIPDNALEWLREIKEIAEKTGGGYLFKQEPGRFKKRYVGNRVRASQVRRHLKKICAELNIPYRPPHKFRKTYASILKAADVDDTTIIDQIGHTDIKITENVYIKDRNRMKEKSRILGEIDELRLDPPEEENPNCRVISFFDESPVSHPRVTRRLQTAYKRRPPMHRIIKIGMDVHSTNFTLIAVEPRVGEEPVVLFRKQVSPDYRNILTFIDELKKSFPNEKLLISCGYEAGCLGFTLYHQLMKSGVNCIIMAPSTMEMPGGKRIKTDKRDAYQIARCLATCGYHSVYVPSKDDESVRDFIRMREDHIKSLKQTKQQINAFCLRHGHKFEREKWTKSHLKWLDSLDFTSLNRETLNQYMQTYRYLEERIRYFDTRIEELAAMDAYRENTSKLCCFLGIKTCTALSFIVETGDFNRFRKASSYSAFLGLIPGEDSSSDNINRTALTKAGNKHLRTLLIEASQGICRGKPGYKSKELTARQKGNSPEVIEYADKANRRLRQKYYRMIFKGKARNTCVAAIARELSCFIWGMMTVNIA

SEQ ID NO: 291055 - protein, 373 aa, unidentified
MRKVIMVGCDLHDKTMLLKIAEGREEAETRSVKNTAAGRATMIAGLKKRAATAGEARVLFAYEASGQGFGLFDELTDAGIECHVLAPTRIARSQRQASQKTDEKDAQQLLELLRAHVLAGNELPTVWVPDPTTRDDRELVRLRLDVAEKMTMIKSQIQSLLKRNHIRRDQSTGKGWTRLFRSWLKGALCESADSPLGVNARLALASLIRQLDFLEEEERRLDEGVNALAGETRYAAAVEEMVRLCGVGVLTALVFLTELGDLSRFANRRQLAAYLGLAPRSFESGNANDRKGHITHQGSSRVRKMLCQATWARVRYDAQERQTYGRIVAKNPKKKKIAVVASMRRLAVRMWHRGRAFPGQPSRSMILAAQAAH

SEQ ID NO: 291056 - protein, 349 aa, unidentified
MILVGCDLHTRKQQVALLNTTTGELRDQELSHIGDDVERFYAALSPPVTVGIESTGYSLWFHALLQRLAITLLVGEAAKIRAMVVRKIKTDRRDARHLRDLLKDNRFPVVWIPDPTTRDLRALIKHRLRLVRIRTMVKNGLHAIALNQRLALGPSLWSRQGLAQLQALVLLPHTRRRREDSLELLHWLNRHIDELDLHVATAAAADPATRRLMTHPGVGPLTALATVLVLGPVGRFPSSKHVVSYIGLAPAISASADKYRLGHISKQGSALLRWVLGQAAPLATRGDAALKRIYFAVLRRRGRPKAKVALARRLLIRLYVMLRDQIDYDEFCRRGRTRREGLELARTPV

SEQ ID NO: 291057 - protein, 346 aa, unidentified
MGKSIINLSSVTTVGLDLAKHVFQVHCVDALGRVVVAKPIRRNKLLEFFASLPRCLVGLEACGSAHHWARELIKLGHDARMMPPAYVKPYIRRQKNDAADAAAICEAMTRPSMRFVAVRSLENQAALMRHKAREMLVSQRTQLLNGLRGHLTEVGVIAPQGLRYARELAELIEACDETIPFEVCEALAPLVVQLRNLDEAIARLDRIIAKLAQKDETARRLMSIPGFGPITASAMAATIQDTCGFAGPREFAAFLGLTPKQNSSGGKPKLGRISKMGNRNLRKLLVVGAHAVLFHRKPHTDPLRMWAKKLIEKKPFKLVAVALANKMARIAFAILRGKTVYREIPA

SEQ ID NO: 291058 - protein, 338 aa, unidentified
MKLYAGIDLHSSNNFLGIIDEEGKQLYSRRLKNNLGEVLHELLPYREFMDSIVIESTYNWYWLVDGLMKDGYKIHLANPSAMVQYSGLKHTDDKSDTFWLAEMNRLGIIPTGYIYPREERSVRDMLRRRFLFVKQRTAHILSLKSMVARETGLMMSADRIQKLGSAEIESLFSDQYLRTIALNNLTAIDVLGNMASAIEKEVLSHCKLRDEFKHLLTIPGVGKILAMMIMLEVGDIRRFKDAGNYSSYCRCVKSEKISNNKKKGENNRKNGNKYLSWAYMEAANYVIRYCPEAGAFYQRKMAKKNKIVARKALANKLARASYYIMRDCIEFNKDKLFS

SEQ ID NO: 291059 - protein, 426 aa, unidentified
MNCTQNYKIDQVTEQTLVVGIDIAKRTHYACFVDDRGRVLRKSFPIFQSKEGFQQLYKAIQEAMQAFGKSEVIVAVEPTGHYWLNLAYFLEEHGIPLVMVNPAHVCRSKELDDNLPTKHDAKDALVIARLAKDGRFLVPRLLHEIEADLRVGSTLKEKLRKEQTAVKNAIIRWTDRYFPEFWTVFRDLGKTALSVLEWTPFPADMAGRTAEELIEVYRQSEGLKCPQKAKIQALINAAKDSIGVTEGTAMARFEIAALVRRYRQLEAEIAALDAELKALVQTTMEYQWLKTVDGLGDATIIDLLAEIGSFAHYRDPRQLVKLAGLTLKENSSGQRKGQKHISKRGRKRLRSVLFRAMIPLIRHNEAFRELHEYYTTRSVNPLTGKQSIVALCRKLLNVLFAICTKKQAFDAERMKQDVLSQVQRAA

SEQ ID NO: 291060 - protein, 347 aa, unidentified
MSQYIGIDLHKAKSFVTRMDRRGRVLEQVELPHATGALQQYLERLPSDTRIAVEATGNWMWLYELIEERHPDLVLAHPLKTKAIASARIKTDKIDATTLAHLLRADLVPAAYIPPRPVRDTREILRYRASLVRLRTQVKNKIAAILSKTGLTPPTKTAFGVKSRQFLATVPVRPCYRLALDGYLRQLGHLTDAIAQVAQTIEAQVAVDPQAQLLCTMPGIGAYSALLILSEIGDVHRFPDSRHLCSYAGLVPSVHASGGQTRLGRLTKQGSKWLRWILVELSVHAINGAPQFRRLYYRVAKKHGANTGRVAVARAMLKTIYAMLKHQEAFRPLLKGIAGQRQGVMAD

SEQ ID NO: 291061 - protein, 350 aa, unidentified
MLRKFDTAVVTIGIDPGKNTLHLVGLDARGEIVLREKVVRAKIVSRLANVPPCLIGIEVGMGTHYVTRGLLALGHDVRQVPPVYAKPFRQTHKNDFRDAHAVAEAVQRPTTRCVPPKTDEQLDLQALHRVRYRLVGQRTAIINQIRCFLVEHGITVRQRLHWLRHALPDIVAQRTDVLSPRMVRILEDLAQDWRHLDDRIEAVSGEIEALSQNTKLCLNLMTIPGIGPIISSAVVAAIGDGAAFARGRDFAAWLGLVPKQISTGDRTILGRITKRGNRYLRMLFMQAARVVLLRPKNWMQHSFGPWLAAAAQRLHHNVLATALANKLARIAWSVLVQHREYEARLSVATT

SEQ ID NO: 291062 - protein, 393 aa, unidentified
MLHSSGVSLDTTDAVALASERSEEAKATAADGRSLTLECCNADTVRELDRRRPLVNSPNSRLSRDKLSSSHLQGRDTSKMSFQHFIGIDVSKAKLDLAFDEQASTTVVPNDPKGIDELVDLLPEAKSCVIVIEATGNYERPLAVRLVEAGHVVSVVNPRQVRDFAKAIGKLAKTDKIDARIIALFGKLTRPRAVAKTKQLQGELDQLVTRRRQLIGTRTAEKNRQGQAVSGAVRKSIQRVLDAINKDIKMIDREIQKLVQSDDDWKHRAELLGTMPGIGDVTSATIIAELPELGDLNRQEIASLVGLAPFNRDSGQMRGKRSIFGGRGSVRSALYMAALSARRYNPAIAAFSKRLAEQGKPPKVVITACMRKILITLNTMVKTNTAWENPQNA

SEQ ID NO: 291063 - protein, 347 aa, unidentified
MNYIGVDCHISSLDFAVVNERGVTTKKAKVNTGVKEFIGFVKSVPKPRRIFIEEGELAGWLLETSLKFGERLIITDPKINKWIGKAGQKSDTIDAVKLAQLARGRYIKAIYHSVDKRRRFKHLVFAYHDTVRNQTRIKNKIKASFRKNGIRCSGVTVFSGKHRDRWREQLSENKTTRLIVEELWIQLDQLHASKERLKRNIRIQSKRYPEIKQFMQIPGIGLVHAATISAIIETPHRFANKKKLWMYAGVGLMERRSGERVYSRKLTREYNRPLKNAIKQAVQASIHAHDNQFRRQYLRLTLKKGLASHKAKLTVARSMLAALYGMWKKGEAYDPKIDIKRNSEEKK

SEQ ID NO: 291064 - protein, 342 aa, unidentified
MKDRIVIASDIAKNVFECVRFKNDRQVGKVKRYKRNQFSKPLVSREKFTLVMETCSGAHHWARLARQYRHNVILIPPKVVAPYRQGQKTDANDAMAIYEASRRHQLKASVQKTVEQQGLSTLESVRSHYQDRKKSLGNAIRGHLAEFGLVMPKGYKSLRSQMPLILEDAENGLPMSARLAINEYWEDWQRANQQVFRLEKEKLKLLNKFDAAKELLKIEGIGPVSTSGLICVLGDGSAFKRAKEAAAFIGTSPKQHSSGGKEVIIGISKTTGHKKLRAALIQGARSVILRLAAKGKPSSDKERWLAQLIERQGENRAAVALANKNVRTAWALLAHNRQYIAA

SEQ ID NO: 291065 - protein, 341 aa, unidentified
MDQAVTIGLDIAKSVFQLHGVDRSGAVVVRRQVRRAQLLPFFAKLPACLIGIEACATAHHWGRALINLGHQVRLMPPSYVKPYVKRQKNDAADAEAICEAVTRPTMRFVEVKSVEQQSVMVLHRIRLMLMRQRVQLSNAIRGHMAEFGLAAPIGREGLGSLIRLIAEGDERVPAEALTCLNMLVGQLALINDQILEADRRIRTNARATETGRRLMDVPGVGPLLASALVASIPDPKAFRSGRNLAAWIGLVPRQNSSGGKERLGGITKQGDRYLRQLLVVGALAVVRYAQRNRTRRPWLVQLLARRTTKVATVALANKTARMVWAIMTTGEAYREPVLQAA

SEQ ID NO: 291066 - protein, 342 aa, unidentified
MTTFVSFVGVDMASATFMACIGTTPWKVTVKPVQFENNEDGFVSFLNWLKENNLKADSSVVCMEATGVYSEGLAYFLHASGYIVAVEPPLNIQRKFPPHASKTDELDCQHIAEYAYRYHDKLSFWKPRAEILEQVKVLLTTRQHFSGQLTGHKNALHAIHRKKVSSELAQHSHQNMIEQIAKAIKEIDKEIRRLINSDPTFKQTLLLLITVPGIGLQLAAHLLLLMQETLDPRTLAAFIGICPLKHESGSSVYSAPTSRHFGPPTLRKLLYLAACSVRTHKKQFQHYFFRKVAEGKHKKLVLNNIQNKILKIACAVVRSQQPYIANYVSVNPLVFQKSLTNS

SEQ ID NO: 291067 - protein, 412 aa, unidentified
MPKIVYPICCGIDVHKSFVVACIATTNEQLVTTYSGYKRFSTFTGDLRRLAKWLADNNCKDVCMESTGKYWIPVWNILEPTCNLVLAHPKYLKAIKGKKTDKRDAKWIADIFKHDLLNGSFIPPEEIRQLRDLVRYRVKLTNYTTGEKNRAQNCLTVSNIKLDNVFSDVFGKSATAITNQLLEHPGEAFDVAPFVDKRCKASIEEIQAAVDGMMCANQAEKLRIIRSHMDSLKLCKLNLESEILGLAQKYLPQIDLITTAPGIQVFSAIATIGEIGVDMSVFETSRNLCSWAGLAPQNDQSAGKKKTTRVSRAGVYIKPILVQCALAAIKSNDHPEVKYRYQAIKKRRGHKKAIIAIARMLLTAIYNILKKNEPYNAELYRLSDKPPVNREVTVEQAIFILQRQGYLVTASA

SEQ ID NO: 291068 - protein, 346 aa, unidentified
MMLIGCDFHPSWQQVSWLDVETGETGEQKLVHARGEAKQFYEQLAAPVLIGMEATGNSQWFIELVEDLGHEIWIGDAAQIRASYVRKQKTDKRDAAHILKLLVEGRFPRLWTPDREQRDLRQLVLHRHKLVLIRSRVKNELQHLSLNKGMQRKRRLWSQAGQQLLRELPLKKWAACRREDLLGLLTMLDEQIGKLDGAVQHAAEENPQSKLLMTQPGVGPNTALAFVLTIGDVGRFPRGKQVASYLGLIPREESSGGRQKLGAITKQGNRMLRSLLVEAAQVAVQHDPGLRKQYRHRCHQKPKAVAKVAVARKLAVRLYWMLRTNVAYPEIVRIESSSGLPLVGAS

SEQ ID NO: 291069 - protein, 351 aa, unidentified
MLYIGLDVHKEFCQACVIDEHGRVLSNEKFSSTRDELDRFLAGFKDAKFVLESTGIWEFIYEGIEKKGFEAQLAHPLRVRAIAEAKVKTDKVDAETLAQLLRADLIPRSWVPSRDIRDLRQLVRQRAYLVQQSTSFKNRIHAELLRRGVRRPQNFVMPFSKKSIDWMRSLEIPTVISCLNCLESVQAQIEEMNIKLLDEFKRRPDAQLIATVPGIGFYGALLIHAEIDDIKRFSHPEKLCAYAGLVPTVRQSASSVHYGAISKDGSSYLRWMLTEAVHTHTHCEPGSRLSRFHAKVARRRGKQKATIATARKLLLIIYWMLVRHEPYHSQGLDPGFPPARNECDIGIGAGP

SEQ ID NO: 291070 - protein, 347 aa, unidentified
MALHGQIVLGIDTHKHTHVGVILDGLGRVSGALQFPATEAGTQRLLAWNQENGGAKIAGVEGTGSYGYPLTRALQLAGVTVLEVNRPDRANRRRRGKNDTVDAEAAARAVLSGQANAVPKDREGAVDALRALTMTRNSAVKATTQASNQIKALLVGSPERLRQQLTVKSLLQLATRCAELDPCSGMHTALRSLGRRWLLLHAEIVELDTQIRALVRDTIPTLVARPGIGIHSAAQLLITAGGNPTRLHSDAAFAALCGASPVQASSGQRQRHRLNRGGDRAANNALWAIANNRLIHDPATREFAAKRRAQGDSRNEILRILKRYIARETFNLIISSLRPLVALAAAC

SEQ ID NO: 291071 - protein, 354 aa, unidentified
MSQKLNSAIAVIGIDIGKNSFHIVGHDQRGAIVLRQKWSRGQVEARLANLPPCLIGMEACVGAHHLSRKLQMLGHDARLMPAKYVRPYSKGQKNDFRDAEAIAEAVQRPTMKFVATKTADQLDLQALHRVRERLVGQRTGVINQIRAFMLERGIAVRQGLRSLRSELPGILATRTDVLAPRMLRIIEDLAGDWRRLDARIEDLSSEIEALARQDKGCERLMTVPGIGPIISSAMVAAIGTGDVFSKGRDFGAWLGLVPKQISTGDRTILGKISRRGNRYLRVLFVQAAWVVLVKVKCWERYGLKSWIEAAKKRLHHNVLAIALANKLARIAWAVLNKGRAFECVKTDEMASRPA

SEQ ID NO: 291072 - protein, 377 aa, unidentified
MKSIVYVGIDVHKDSYTLVCLKPNLEGEDQIFGTMKIQSDYHRVLQYLERMQKILGEDVEFICAYEAGCMGYSLYHQLTGKGVKCFIIAPTSLLREKSRRIKTDKRDAINIAKSLAYGTGRHVHVPSAEDEMVQQYIRMRDDHRKIFKSLKQQILALCLRSGNNYSGMTNWTKAHLEWLLKLELDWLLRETLDEYLATYGQLSDKLAAFERRIEELAKSDRYREDVGKLSCFVGIKTYSALAILVETGDFERFPSAGKYAAYLGLVPGERTSDEDRNVTGITKSGNSHLRRILIESSQSLCKGAVGYKSRALKTRQKGNSSQTIAYADRCNERLRRKYYQMMRKGKNRNVSVTAIARELACFIWGMMTANTKARDAA

SEQ ID NO: 291073 - protein, 315 aa, unidentified
MDVTHSGSRFVGIDVGKAHIDVHVRPSGEAFRLTRDPAGLAELVARLNPLTPALIVLEATGGFERVVTAALCGVGLPVAVVNPRQIRDFARATGRLAKTDRVDPKVIAHFADAVRPDQRPQPDAAARELADLITRRRQVVAMISSETMRSHQARLPAVRRRLAAHLDWMNQELRQLDADLDTAVRANPAWQERATLLVSVPGVGDATTRTLLAELPELGTLGRRQIAALAGLAPVAHDSGQHRGTRHIRGGRGTVRAALYVAAWIGSRWNPTLKDIYQRLRAAGKPRKVALVACMRRLLTILNAMIRDKTPWRAA

SEQ ID NO: 291074 - protein, 414 aa, unidentified
MKLFVGIDVSAQELEACFMNPDGDTLETLKVENNLHGASHLRDRIVAAADKLSPSEIHIGLESTSVYSWHPAMFLHQDESLRQRNTKVFTINPKLINKFREAYADLDKTDRIDAWIIADRLRFGRLTTTIVMQEQYIALQRLTRMRYHLIHNLTREKQYFLQNLFYKCNAFRSEVDSSVFGHAILEMLSEKYSLDEIANMDVADLADYLKEKGKNRFPDPEHVARCIQKAARASYRLSKVVEDSIDIVLGTSIQSIRSIQTQLKELDKAIERILEGISGALCLRSIPGIDRVYAAGILAEIGNIDRFSDQAAVAKYAGLTWRRHQSGSFEAEDTKRIRSGNRFLRYYLVEAANSVKNRDPEFGEYYRKKFNEVPKHQHKRALVLTARKLVRLVDVLLRNDQLYTPRRKVNSAKE

SEQ ID NO: 291075 - protein, 394 aa, unidentified
MVNKSCGLDIHKCFLIATILSRSGEKKQERFQRNEDGILALKNWVLSEKCDVVACESTSDFWVPIYDSLIKHLPVIVGNARDMKAFTHKKTDKVDSEFIAKLALNNMVQSSRVFPKNHRDFRSNIRLRHELVQKRTDIKNEAHSILAPEMFNLKDVLTDIFGKNGRNILSGITSGKSIDEIIECLSPYVRKKSSQIREILNKEISQSAVFRLQICLELIKYLDVEIESLEKEIFSYAYSIHKREMEILMSVPGIGELGAATLIAEIGNFKDFSTGDKLASWLGVVPNVYQSADKFYNGRITKRGSKEARWILTQIAQSASRKKNSKLKEFFNRKKKSIGHAKSIIALARKIVTIIWHLVTNDEMYEDGTGYQKGEIQKKKIVEIDLSRLMKASK

SEQ ID NO: 291076 - protein, 408 aa, unidentified
MEVMYARCAGLDVHPASVVACARHAEGPRVQRTLERFGTTTQELLRLADWLEQHGCTHVAMESSGVYWKPVWHVLEGRFELVLANAMHIRNIPGRKSDMNDATWIADLLAHGLIRGSLVPPTPIRALRDLTRARKQLVRERAQHVQRIQKVLEDANIKLTGVVSDVLGQSGRAILEAMVAGEDDPERLLAHAGSRLKASHAVLVEALRGQVTDHHRFMLRLHLAQVDSLERAITALERRAEELLSPFRTEVERLTTMPGISSTAAHVIVAEIGLDMSRFPSAGHLRSWVGLCPRLDVSAGKRLSNRTRRGCPWLKTLLVQAAWAAVRHREGYLHAQFLRLKSRRGPKKAILAVAASMVSAAYYMLRNHVDYHDLGADYFHRQDRGRLARTLLKRLRALGIDVHITAAA

SEQ ID NO: 291077 - protein, 333 aa, unidentified
MLPPNCGTATPYILRNTVGLDISKLTFDATAIVGNAEYSAKFDNDSKGLNQFSDRLKSLGCQNLHICMEATGNYYEEVADYFAQYYSVYVVNPLKISKYAESRFKRTKTGKQDAKLIAQYCRSAQESELVKRQKPTDEQYRLSRMTAAYAQIKSECAAMKNRHHAAKDEEAAKAYAQIIKAMNEQLEVLKEKIKEQTEKPNCKEGVKRLETIPAIGRMTAAVLFHHLTSSKFETSNKFAAFAGLSPQQKESGTSVRGKGKLTKFGNRKLRAVLFMPAMVAYRIRAFPDFIKRLEEKKKPKKVIIAALMRKLAVIAYHVHKKGGDYDPSRYKSA

SEQ ID NO: 291078 - protein, 400 aa, unidentified
MDPVIGLDIAKGESQVQAFLQRKKTYKQSFKFAHDLQGLHAFYRFYQEVEQVSGQPPVVIFESTGHYHMPVLQFLEDQDITYCLINPVVSYEARKTSLRKVKTDKADAFHLGELYYKEDFEYYQKKTEKALNLRLLTRQHSALTESYVGVKLQFQAALDQVFPEFQSVFSDLYGTLSLNTLAHYPTALDIQGVTPQELADEMRQFGARRSKAWFLDKASQLKEAAKRNPFQSPVCHGELVSLNMYIKMLFQFQEHLSKLKEEIDALAKTFEDYEFLQSIPGIGNKIAATIVSEIGDINLFHHPKKLVAFAGLDPSVFESGKFKASINNITKRGSSRLRQALYSAVQCGLAKNRNKKLIAFYQRKRNEGKLHKVAVIACANKLVHWIHAILSSKKVFVDQS

SEQ ID NO: 291079 - protein, 350 aa, unidentified
MYIGVDTHKKQHVLVALDEQGRRHGMQHSLNTPEGWAQSVAWARAQGSACYWGIENSGSLGKGFAQFLLAQGETAVYEVSPHRTAQYRRRGRTQDKTDETDALAIARLMLAEGDQLPRVRRDDTSTELRLLSDHRDNMLVERTRLINQLHGQMLQIDPSYKEKSGRLTAEAGVIYCRDLTIADADDLIRTRLLIVQQLATQILRLDGDIAAVTADLERRVRESQTPLLAVRGVGTIVAARVIGELGTTPRIPSAPALAALAGIAPVAVSSGGRGGYRLNRGGNRQLNRAIHIIALTQRRCDPRAQAYYAKKRAEGKSARAAMRCLKRRLVDVLYRLLPRESTETVEQAAA

SEQ ID NO: 291080 - protein, 337 aa, unidentified
MNQLYCGVDIAKETAVFCLLVDSGEPLERATTFNNNAQGFKAGLKWLRKLAKPFKPFQIHLVMEATGVYYLSLAKFFSGQAGIIVSVVNPAQVKSYAQAELVRTKTDQVDAAVIARFAMALRPRPWSPPAPHEEEMLGILRHVEAIKEMIQAEKNRLHALEATGPSTVNVQRAVKKHIRFLEKQIDDLTGRLRQIAKEHPDLDENLKLLCSIPGVGEITAHTLLAEIGDISRFSGVKQLVAFAGIAPAERQSGTSVRGKVMINKRGSRRLRKALYMPAVVAARHNSNVKELYQRLLSAGKKPICAIVACMRKLLHIAYGVLKSKKCFEPNWTNANLA

SEQ ID NO: 291081 - protein, 387 aa, unidentified
MPQPNDLSRSLVALDQNSTIIAVIELSHSSWLVAGMLPGIERQPRKKLEPNPERLLALLHRWQDEAVRAGRTISRIAVAFEAGRDGFWLARWLEARGVEAHVIHASSVAVSREHRRAKTDRLDTELLKRGFLGWLRGERGHCSMARVPTIAEEDAKRPNRERDCLVGERTRIVNRIKSTLARLGIRNFKPTLRKAAERLASVHTPEGMRLPPNTLAELQRDMARLSFVVSQIREIEDARQKRLEQQHETGPHAMVRGLARIVGVGVETADLLVHELLSRPMRDRRAVARYAGLTGSPDESGARRREQGLARAGNARVRRAMIQLAWRFLMFQKDSALALWYRARTADSRSGTRKTMIVALARKLIIALWRFVTTGEPLEGVVLRPAS

SEQ ID NO: 291082 - protein, 341 aa, unidentified
MEQATTIGLDIAKHVFQLHGADAAGHVLFRKRITRVKLLGFLAAQTRCVVAMEACAGAHYWAREIAKLGHHVRLIAPAYVKPFIKRQKNDAADAEAICEAAQRPSMRFVPVKTEEQQANGIVFRARDLLVRQRTQCVNALRGHLMEYGYVFPKGITHVEALVALVEDLQSSLPDSVRVILKLLVDTFTALEAQIAVLDAEINRRSKSDPTARRLMTIPGVGPIASTAITALVPAAEGFPAGRDFAAWLGLTPLQKSTGGKQKLGAVSKRGERTIRRLLIIGASAVVQQASRRGAPKGSWLAQMLARKPKMLVTVALANKMARIIWALLVKGGTYRTPAVAA

SEQ ID NO: 291083 - protein, 384 aa, unidentified
MEKFSTLYVGLDVHKESIDIAVAEAPRDAEVRHLGSVAGGLDAVSKSMRKLVSAGHRLHIVYEAGPCGFVLQRHFSSLGWHCDVVAPSSIPRPSGERIKTDRRDAMKLARLARSNDLAVVRVPGPADEAIRDLVRARDDAVREQRNGRHRLKALLLRNGITYAGKSSWTAAHLRWLATLKMEHAAQQIGFQEYLHSITETTARIHRLEQAMRDALADWTLRPVVQALMSMRGVQLIAAMTLVAELQDFLRFESPRQLMGYVGLVPSEHSTGPKRRQGSITKAGNSAARRMFVEIAWHYQHSPRVSAVIATRHDQLPKAITDIAWAAQLRLHAKFKRLMARRLMKNKAVVAVARELAGFVWAIGCEVQTSGWQGIAVEPTTAAAS

SEQ ID NO: 291084 - protein, 338 aa, unidentified
MAMYCGIDLHSNNNFVAIQDGMYEDVVCRKLRNDLGAVLKFLEPYREELEAIAVESTFNWYWLVDGLKEAGYDMRLVNTTKASDYSGMKYTDDRHDARWIAHLLALGILPEGYIMPPQERGLRDLLRRRSYLVHQRTSLYLSVKTIFARSNCQKVTTHDIRSWDSETVRRMFDDPHVAESVVAMLPVVRVVTAQIKGIEKIALETGKLRDEFRFLLTAPGIGDILALTIMCETGDISRFRKVGNYGSYCRCVKSERFSNNKKKGKGNRKNGNKYLSWAYSEAAHHAKRFEPLAKRYFDRKKSRSHPMVAARALANKMARACYYVMRDQVPFDSSRTFC

SEQ ID NO: 291085 - protein, 428 aa, unidentified
MDHHLNMQKSPTPNPEPSAPAAWIGLDWGHRTHAFALQDSAGRTEEGSLEHSPEALHTWLAQLAQRYGGRPVRLALEGKGGAALPALLQYPWLEIYPINPVTSARYRTAFTPSGASDDRPDARVLLELVRDHAAKLRPLELQDDQTRHLNALVQARRDLVDRRTQLLNQLTSLLQSYYPQALQLVDNLNTELAVQFLSRWPELLSLKSARPATIRACYYTHHVRRPELVQERLEHIAAARALSTEAAQVHVAVRQLRLFLDQLKAFRKHVALFDEEIRRVFAAHPEAELFRDLPGAGAQMAPRLCAAFGTVRALYPEPAALQKLSGLAPVREKSGDRLWTHWRWLAPTFLRQTFVEWAGQTVMYSAWAKTYYQRMEAQGKARQVILRALAFKWIRVLWKCWHARTPYDEARYLKQLAHRKSPYAVAQT

SEQ ID NO: 291086 - protein, 323 aa, unidentified
MKIICGVDISKARLDACIEPGSTRASFNNDAAGIAALATFCRLHRVELVAMEATGGYERRAFLLLSEQGLPCAVTNARQVRLYAEAMGVLEKTDAIDARIIARFARAKDLQQTPLPSPAQLRLKALVARLRQVTDDLTVQKQRRSSLLDNAEILASIDEVIALLKRQSRTLEGEIGSMIDDDPLWAYLAETWSSVKGVASRTVARLMADLPEIGTYSNKAIAKLVGLAPIANSSGKREGKRPVRGGRSSVRSILFLVAEIASRYDQSLADFRARLVAAGKQKMVIRIALARKLLVRLNAKARDARRQLALPGDSPSVASQLAS

SEQ ID NO: 291087 - protein, 355 aa, unidentified
MNDAKYIGLDVHQATISAAVLDSTGKLVMECILETNAATILQFIDGLRGSLHVTLEEGTCAAWLHDLLKPHVTQVLVCDPRKNTPMKTGNKNDRSDARKLAELLYLDKLHPVYHGETGIRALKELARSYLALTRDTTRVMNRLKALYRSWAIPCAGQRVYAPRYRSQWLGKITEAGVHRRAEIYYQQLDALRSLREQVRRDLLTEGRKHSAMKLLRQIPSIGPIRAVLLIALMQTPHRFRTKRQLWAYCGLALKTSTSGEYRFVEGQLRRSKKFLAIRGLNANHNHDLKNIFKGAATRAAAVPGPFQDFHAALVARGMKPAMARLTLARKIAAITLIVWKKGVRFDAEYLKQQAA

SEQ ID NO: 291088 - protein, 337 aa, unidentified
MDPQLRYIGIDFHRRRSVIVHKDSTGKILETVHLDNDPVAFARELAKGGEHPEVVLEACYGWYWLADLLDELGANLHLAHPLGNAWGNRRVKNDERDAEDLVDLLRLGRLAEAYIAPPELRELREIVRYRAKLVTLRSGLKSQVHSVLAKEGVAVPMSDLFGTAGNDLLDTATLGRVYAIRIKSLRDLIGDYDKEIAMLQTEVDKWLAGDMGYLATQALPGVGPVLGAVFVAEIGDVTRFSSPDKLCCWAGLTPRHRESDTHVVRGPITKQGSRLVRWAAVEAATRQQGAQSGRYERIVARRDSKKIARVALARHLLTLVYYGLRDGEIRCLAKKTG

SEQ ID NO: 291089 - protein, 346 aa, unidentified
MNQIIRIGMDTSKHIFQLHGVDSAERPVLRRKLRRSEVLAFFAKLPPTVIGMEACGAAHYWARELRKLGHEVKLMAPQHVKAYVKRNKNDGRDAEGLCEAMSRPTMQFVPVKTEEQQAALMLAGVRQQLIARRTQLSNTIRGYAAEFGLTAAKGLDKIEPLLARIAQDETVPALARELFAVQGQDYAQLQIELKAIEVKLMAWHRANACSRRLAQIPGVGPIGATALVMKTPDPRAFPSGRHFAAWLGLTPKDHSTAGKTRLGKITRAGDEVLRSLLVAGATAVIQQVRNGRGRPSAWLLALLKRKPPKLAAVALANKIARIAWKLMTTGESYDGARMPGAQAFAA

SEQ ID NO: 291090 - protein, 358 aa, unidentified
MSKHSENQEVKVMGIDLAKRQFHVHGVDVGGRKVLSKKFSRQKLKEYLVTLLPCTVAMEACAGAHYWGRLLRSYGHEVRLIAPQFVKPFVKSNKNDAADAEAICEAAQRPTMRFVAVKEVEQQDIQSIHRMRSLAVERRTAQINQIRGLVFEYGIEIPTGRFNLLKRLPEILEDAENGLTEFFRKELFGLYEELRHLDARIKHYDEKLKQIAQADERLQRLQTIPGIGPVIATALLAAIGDIQAFKNGRELAAWLGLVPRQHSTGGKATLLGISKRGDVYLRQLIIHGARAVLRWADRKTDRTSRWAAVLTVRRHKNIAIVAMANKMVRVAFALLKKGENYRVQPLVAHNTPLGPIEA

SEQ ID NO: 291091 - protein, 351 aa, unidentified
MERYLGADVHAASVTFCVLDASGKQLRRDVVETNGKALVGYLQQIPGTLHLCIEEGEWSQWLYEILSPHLAELVVYRGEWKPGQKSDAIDAHGLAEKLRTGRIDRPVYKDGRLFTALRDRARTYTMVTRDVARVKSRLKSFFRSRGLPCTGEAVFRAEERAKRARALPVATQEVVELLGRELVQLAALKAEAEAGMLRESHRHRITHILETAPGLGPIRVAQMLPIVVTPHRFRTKRQFWAYCGFGIVMRSSSDWVKDQGHWVRARVAQTRGLNFNHNRMLKAIFKGAATTVIAHAGPNPLRAGYDRQLENGTKPNLAKLTVARSIAAIVLAMWKTEEAYDPERIHEPARS

SEQ ID NO: 291092 - protein, 373 aa, unidentified
MFHFTTLFIGMDVHKESFSLCYYDMMANQFKHSTKVGPNVSYIVNYVNELRRLYGQDAEVLCGYEAGCLGFTLYHQLQAHGIPCIVMAPTTVMKEGSKRVKTDKKDAAQLAKALAFRSYRPVHIPTVEDEQVKEYIRMRTDHKVALKKIKQQILAFCLRHDFRYTEGSSNWTQKHVRWLRSLKPEGLYAEILTEYLLTYEKLVDQIERYDARIEQLGQSDSYQEKVSRLSCFIGIKTLTALSIVTEIGDFNRFATAQHFASYLGLTPSENSSGDKERRGAITKAGNSHVRRLLIEAAQSLAKGTIGYKSKELKRRQSGNRVEVIAYADKANERLRRRYRTLVLGKNKKQNVAKTAIARELSGFIWGMMTGRIA

SEQ ID NO: 291093 - protein, 356 aa, unidentified
MTNAVPMDVIIGVDTHKDVHAAAAISGAGVHLATTTVPASSKGYGALEAWAKSMGAVQAFGIEGTGSYGAGLSRFLRERGHTVVEVNRPNRQLRYQQGKSDAVDAESAARAVLAGQAAGQPKSGTGAVEMIRHLKIARDTAVKARTQAMQTLKAIIVCSPDALREQLDQVSGKMTLLRRLVALRPGPLTSTLASAKTSLRAIARRWLLLDAEIKQHDAHLETLTAARAPKLLEAHGIASGTAAEMLLLVGDNPERIHSEAAFAKLCGACPIPASSGKTIRHRLNRGGNRQANAALYRVVIIRMRGHQPTLDYVRRRTAEGKSKPEIIRCLKRYVAREIFGYLCPKPALADAAATSS

SEQ ID NO: 291094 - protein, 370 aa, unidentified
MAQRTPLFVGLDVHKDSIAVAHALGQCADPPVFVGAIGSRQADLDKLIRRLRAKTPELVFAYEAGPCGYGLHRYLTGQGFRCQVVAPSLIPKKPGDKIKTDRRDAVDLARLLRSGDLTRVYVPTVEDEAIRDLCRARDAARITLKNAKLRLKAFLLRLGLHYIGRADWNAAHRRYLAKVVCPTPAQQIVFQESVRAVDEQVDRVHRLEAELLERTPAWRLFPVVQALQALRGVQWLVAITVVAELGDLTRFASPRQLAAFVGLVPSEDSSGPRRRLGAITKTGNGRARRALIEGAWAYRHPAKVSEHLQRRIGALPKPIQDIGWKAQVRLCKRFRRLVARGKHPNVAVTAIARELIAFMWAIAKEVPITM

SEQ ID NO: 291095 - protein, 315 aa, unidentified
METKGIFIGIDISQQSLDMASYPEGQIWKYKNDKHGISKVVEKMQGLQPKLIVMEATGGLEVPLRQALEERGLPVAVVNPRRIRDFGRAMGQLAKTDKLDAKVMAYFAAKIEPEARPAADKDSQYVRSLLERREQLQEMLTAERNRLGQCLSPTIQHQIQDHIEWIEREIADLDNLVKEKIAANPQLQEKLELLQSMKGVGQILSARLVAQLPELGHLNQREIASLVGLAPVNRDSGKYRGKRTIWGGRACVRKAFYMPVLAAIRCNGVIRALYLRLIAQGKLKKVALVACMHKMLTVLNAMMKHNTRWQESYSS

SEQ ID NO: 291096 - protein, 344 aa, unidentified
MQIKSIGIDLGKTTFHLIALGNRSQVVIRKKVSRSQLLVFTANLPSSLIGMEAGVGSHFLGRALREQGREVRLIPAQFVPFVKSNKNDYRDAEAIAEAVERENMRFVPIKTEDQLDLQALHRVRDRLVARRTSVINQIRAFLLERGISFRKGPASLRRQLPEMLENADEKLSTAMRRLLNFLWQEWKGLQAQIESLNADLEQIAGSNAACVRLQQIPGVGPLVSTAVVSAIGNGAAFKKGREFAAWLGLVPRQWSTGGKAKLLGISKRGNPYLRRMFIHGARAAVLRVKREGSSLGKWMSGLESRAARNVVIVATANKLARISWAVLSSGNDYQPRYKALVFSN

SEQ ID NO: 291097 - protein, 501 aa, unidentified
MSINHFPQEKLATFHAMNQSAIGIDVHSNLIVGVYQSSRFNSTRASIDGDTWNGDSTKKGLEDFAKRCKERKPEVLLMESTGVYWQSLYESLENEGFSNKDIVVVNARDVKNRRGNKTDLSDAIHLAEIARNGDYRASFVPKKEVRQLRCLWRSYHTLKNTRKKLLNILHKQLCQVGCRASSVFSDIRGKIATQVIELLIGGKSGDELKEAIASVIKRSRGRLKATPDMVYEALRADMDSKVWYSIRQHLKHIKFIDKQLEAAFANLTIQSAPYEKTIQLLQTIPGIKYLTALGIVCEPGDDLSAFKSVRKFSKWIGHAPGNNESAGKRYSGRTTPGNKYLKILLVECAAGIGLMKKGFLHEIHQRFKERIGTKRANVALAHKLCRIIYSILKNRTPYQERYKPILKEHRLGKAIKAVDGLRNVGLSCDDIEVTDTETGNSTIIYGANKYRRKLMKNKWYTEGKQSEMCFSHLLNSIQPVSAGNRLRLTLNLLRYLCYLTY

SEQ ID NO: 291098 - protein, 409 aa, unidentified
MNLYLGIDVGENKLDFCALDSDQRCCFQGETTNDLNGAIKIKQTVLTETQTHHYEKITAGMEATSVYNFHPMTFLAEDSELQALGLSVITINPYTSHHFSQLFNDGKTDAIDAKQLADLLRVEPLGTPVARQENYVALQRLTRERYHLVKQMTDSKNHFLNNLYYRCNTLERELPTSVFGSAMMTLITDEELTLDEAAALPLDELVTHLQQLAHGKFGDAEAGAKAIKKATRSSYRLSKVVTDSVDEILAVYANEIRMLKKQIQVLDKTITQISTQNTDINCLTSVPGIGPVYAAGIVAEIGQIERFPDESHIAKYAGLAWLPHESGTSVRQATPRTRKGNQYLRYYLVEAANSIRRYDITYQRYYHKKYEEVPKYRHRRAIVLTARKLVRLVEVLLRNHQFYIPPKVV

SEQ ID NO: 291099 - protein, 413 aa, unidentified
MVKTARKEGLMDFYVGIDVSKFKHTVAIIDQDGEIRKKSFDISNSREGFDSLLNELGLLGEKEQIKIGMEATGHYMNCLVRCLISNGYQIQIYNPSLISMFRDSESVNLAKTDNLDAMLIAKYVATHPFTSSPQLSYLIGEIRKISRAKYFLFGDKTACYNHLLRYLDEVFPEFVSFFKKNEDGTRKNMGRNLFESPTIRWLLSEYSSPQKMARMRIETGETLRRMSKGSISFNRFNKLRELAKNSIGYSTEVDEQIIRNLVTQVRIIDEEIEMLNELLEPLMEEINSPLLTIPGIGINLAAMIIGEIGDISRFENPEKLIKFAGLDVKVYQSGTINHKGHIRKRGSPILRYALALSVQKLRIHSPVFSEYYYSKLKQGKATNVAIIATTRKLIRVIWKMMTTNQVFNNIKRD

SEQ ID NO: 291100 - protein, 355 aa, unidentified
MDSKKYIGMDVHKESISIAVMNGAGKIVMECVIETKASMILQLFDGLRGDLQVTFEEGTSAAWLYDLLKPHVSKVVVCDPRKNASMKEGNRSDKIDARRLAELLRLNHLNPVYHGEHGLRSLKELVRSYLTITKDLGRVMSRVKAIYRRWAIPCTGKQVYAPRHRAEWLGKITEPGVRRRAEFYYQQLDALRTVRQEVRRELLAEGKKHQSWKHLCQIPSIGPIRAAVLLGILQTPHRFRTKRQLWTYSGFGIETHSSADHRNVDGQLQRAKKQVSIRGLNRNCNHDLKNLFKGAAIVASCKPGPFQEFYTALLAKGIRPEMARLTLARKIATIVLMVWKRGVCFDAQHLKPQTA
